United States Patent Application Publication US 2005/0228172 A9 - sequence listing, part 4

SEQ ID NO: 9704 - DNA, 623 bp, Homo sapiens
tctgtttccacctccatatttctaccccacaaagtcagcccttcttttctttctttagtgggaatacacattttgaaactgaaaagagatggtatgtggggatgtacggagaacttgttggagtctctgttgtggacaacgctttatgtggtttcaagcttcacatacaaaaaaaaagaaggaaagtggcagcacccaaaaaaggtatgaaaacatccagaagaaattttaaaataatttctatgataaattctttttgaaaactatcttcaagactattaagataatataaagaggtacaaataaaaatgagatattaaatgcaaccctaaaaagtatttaattcacccaaaaagtggcagaagaggaggaagagagaaataaaaagcagatgggacaaatagaaaccaaacttgtcaacaattgtgttaaatgtaaaagttctaattataacaattaaaagacagagactgtcagactggataaaaattcaagacccaattatgttttttatagtaagcacaatatctttttttttggaattttttttattatactttaagttttagggtacgtgtgcacaacgtgcagkttagttacatatgtatacatgtgccatgttg

SEQ ID NO: 9705 - DNA, 616 bp, Homo sapiens
tgctaaagtagttagagaaaagtgtactgatgtttgcaatttactttgaaatgtaataacaaccagaacaaaaaataagatgggttgatagataaatagatatgtgctaaaaaacaagtgtaataaaattattttggtctttttgtttccgttttttgagacagggccttggtcygtcacccaggctggagagctaatcatagctcattacaacctcaaattcctgggttcaagtaataaaatgttaatggcagaaccagttgatatgtttatgggtattcactataaaattctttcacttttgttttatgtttgaaaaggttcataataaaatgttgaggaaaaaaccgtaaactcaaaatgtcattctgaccctgaactatttactattccataatttactaagttaacatcctactgatcagaaaaaattaatattttctttaaggagccctagctcttttctaggcaatactttcttatactttgggaacttgatgtgttatattataggtaaacattttgaaaacaatcaccagagaggtgttatacaagagcataatgatattctatgaggaaataggatcttataacctcagggtcaaaattcctaaga

SEQ ID NO: 9706 - DNA, 616 bp, Homo sapiens
tgctaaagtagttagagaaaagtgtactgatgtttgcaatttactttgaaatgtaataacaaccagaacaaaaaataagatgggttgatagataaatagatatgtgctaaaaaacaagtgtaataaaattattttggtctttttgtttccgttttttgagacagggccttggtctgtcacccaggctggagagctaatcatagctcattacaacctcaaattcctgggttcaagtaataaaatgttaatggcagaaccagttgatatgtttatgggtattcactataaaattctttcacttttgttttatgtttgaaaaggttcataataaaatgttgaggaaaaaacmgtaaactcaaaatgtcattctgaccctgaactatttactattccataatttactaagttaacatcctactgatcagaaaaaattaatattttctttaaggagccctagctcttttctaggcaatactttcttatactttgggaacttgatgtgttatattataggtaaacattttgaaaacaatcaccagagaggtgttatacaagagcataatgatattctatgaggaaataggatcttataacctcagggtcaaaattcctaaga

SEQ ID NO: 9707 - DNA, 521 bp, Homo sapiens
acacacacacacaccccacatgcacacaacacaaaggtttaagcrctcactataagaaggtcaggggacccttttctcattccagtccttgatgtggatccaagggaagcagtgcctttgaagtcagcagcaaccgcagcaggctcagctgtgagggtgtggacagggaggcagacaggatgtgctgccttatcagggcccaatctaaggccctcctgtaaggaccaagcttcctccagcaaaaggtgacttagaggtgtttgttcaataatgcgaggagactcattacaaccctggggcacttgggatctggctctctcagagccaagcctttctgtttggagttttgcacagccctttaagaggagacttcagagtgagactctgtctcaaaaaaaaaagaagttctttcttacattgaggtggaatctgccactccatgactttgattcattgacccagttttgcaataattctcaagagctgggaagaagtatagccagatttcaataccagggaga

SEQ ID NO: 9708 - DNA, 561 bp, Homo sapiens
agagagaatgagaataagaaactggagcaaaatgtaaacagtgaacctgggtaaaggatgtgcaggagttccttgtactagccttgcaatttttctttgagcttaaaattttttaatgaaaatttcctacaaaaaaggaatcggggaaacataagtgagccacaaaaaaagctatttcataagtggaaaacaatacataagaaacagttgtacactggatttatgacaatttgaaggagagaacatacctgaattcactgactgatgaatttaaaaaaattagatccctaattttgttaagcaatgctgagcaaaaaacaaaacaacgacaacaaaaaccacctatgagacatggtatgtatcttccttatagaatagataagacataaatgcaactaaccatcaagcaaggtgaattttgataattactacaaaaaccgtacaaagtttaaagggcaaagagcacatttagctcaacctgggagatcccacagtggcttggaagaggaagtagagattcaatctatggaaargatttcaatatacataatagaaacaggg

SEQ ID NO: 9709 - DNA, 577 bp, Homo sapiens
ttgtggttttgatttgcatttctctggtgattagtggcattaatattttttcatatatgtgttgttcatttgtctgtgttctttgaatgtgtattactcttaaatctgacaaattaatagacctttaaaaattaaggtcggccgggcrcggtggctcacgcctgtaatcccagcactttgggaggccgaggcgggcggatcacgaggtcaggagatcgagaccatcccggctaaaacggtgaaaccccgtctctactaaaaatacaaaaaattagccgggcgtagtggcgggcgcctgtagtcccagctacttgggaggctgaggcaggagaatggcgtgaacccgggaggcggagcttgcagtgagccaagatcccgccactgcactccagcctgggcgacagagcgagactccgtctcaaaaaaaaaaaaaaaaaaaaaaaaaattaaggtcttccttcactaattttttttagtgcaggaatggtttttataacatagtgaatgttaacaattgaaaaggaaagttacagctttacattcaaaaaaagaacttctttttttgctttcatgattt

SEQ ID NO: 9710 - DNA, 577 bp, Homo sapiens
ttgtggttttgatttgcatttctctggtgattagtggcattaatattttttcatatatgtgttgttcatttgtctgtgttctttgaatgtgtattactcttaaatctgacaaattaatagacctttaaaaattaaggtcggccgggcgcggtggctcacgcctgtaatcccagcactttgggaggccgaggcgggcggatcacgaggtcaggagatcgagaccatcccggctaaaayggtgaaaccccgtctctactaaaaatacaaaaaattagccgggcgtagtggcgggcgcctgtagtcccagctacttgggaggctgaggcaggagaatggcgtgaacccgggaggcggagcttgcagtgagccaagatcccgccactgcactccagcctgggcgacagagcgagactccgtctcaaaaaaaaaaaaaaaaaaaaaaaaaattaaggtcttccttcactaattttttttagtgcaggaatggtttttataacatagtgaatgttaacaattgaaaaggaaagttacagctttacattcaaaaaaagaacttctttttttgctttcatgattt

SEQ ID NO: 9711 - DNA, 519 bp, Homo sapiens
cagagtgagattccatctcaaaaaaaaaaaaaagccattttattccattaacatcttgggtacctactgtgtgccaaccctgccctgggcactgggaaataggaaacaacagggacctgggctcgcattctgataggggtcgcagaaaagaggcaaaggaatagaaacaactgtcaggtgcgggtaagtggcagaaagaaacattagtgccgaaacaaaagccagtgtacttagaacaatgtcatagatggctattgaggtggagcccagaatgaaatgggggctgcaccttgcatatgtcttgraaacgtggtccaggcagaggcaggagcctgcccaggggcttagaggcacagtgagcccgaagacaagggtggggccagttcctgtggccttccctgcaggggctttggctttcttggaatgagatgaagcccccaaagggttctgagcggaggagatacaggatcagacttaggtttaatggggaccaccctggctgctgtgtggctcctcgga

SEQ ID NO: 9712 - DNA, 732 bp, Homo sapiens
ccaaaacttgctggctgcctttgtatttctttctttctttcttttttttttttgagatggagtctcgctctgtcacccaggctggagtgcagtggcgcaatctcggctcactgcaacctctgcctcccaggttccagcaattctcctgcctcagcctcccaagtagctgggactacaggagtgcaccaccacacccagctaattttttgtatttttagtagaaacggggtttcaccatgttggccaggatgatctcratctcctgaccttgtgatccacccatcttggcctcccaaagtcctggggttacaggcatgagccaccgcgcccggccctgcctttgtatttcttaatccctttcgtcatcacggcaaccaggagcctccatgaggtgaagtgacttgtccagggtcttgagtaactggtggagctgggattagaacccaggtctgtcaggttctaaagctgcctttttagcttcctgctgtgggggtctcatgttcttagaaggtcagaggagggagagagtgacctgatctgagttccagaaatctaacattggagaaatctgaaatttgagacttcctctggctggggactttgagcctggggtggtctcggttgggaaatgcgcagatcagaagtaggtctgggctctgcaggatgggcggccaggggccctctcatgggcactgcatcccagcactgggcagggagggaggctgccagcga

SEQ ID NO: 9713 - DNA, 524 bp, Homo sapiens
tgttaaatttcaattctattttggtgctttttgtcattgaggtgttcattattgtttaattgatctattagagctcttccagcaattcaagtcaaaatccttggagtcatccttgactcctctatttttattacacttatatccaatatgtaggcaaatactctcagcagcaccttcaatataaatccataatcctaccacttctccccacttcattgctaccacctagatatcttcaatttcaaaatgtaagattttgtcatcttttgtatagattcttgcaaggccaagcaaatggtctcccttctcccatactatccttatccctcattcagtctatagagcacacagcagccagagagatcgtatccaattgtrggataaattatatgattcctctgttcccagctctccagaggcttcacattttactccaagtaaaagccaaaatcattactgtgactcacagcatcctgtacaattggcccagggtgacctctctggtatctcctactactcatctt

SEQ ID NO: 9714 - DNA, 524 bp, Homo sapiens
tgttaaatttcaattctattttggtgctttttgtcattgaggtgttcattattgtttaattgatctattagagctcttccagcaattcaagtcaaaatccttggagtcatccttgactcctctatttttattacacttatatccaatatgtaggcaaatactctcagcagcaccttcaatataaatccataatcctaccacttctccccacttcattgctaccacctagatatcttcaatttcaaaatgtaagattttgtcatcttttgtatagattcttgcaaggccaagcaaatggtctcccttctcccatactatccttatccctcattcagtctatagagcacacagcagccagagagatcgtatccaattgtaggataaattatatgattcctctgttcccagctctccagaggcttcacatyttactccaagtaaaagccaaaatcattactgtgactcacagcatcctgtacaattggcccagggtgacctctctggtatctcctactactcatctt

SEQ ID NO: 9715 - DNA, 564 bp, Homo sapiens
tagtttgtagtagttcgcatgatcgtttagcagatcctcctttccccctcccacttctttgtccyattgatgccgaacttggtcatgtgatttgcttgagccaatagggtggtagtggacataaaaagaaaatgcctgaaaggtacttgtgtggtggtgcttgtgtcattgctctgagaacacacaccagagaccctgctggtcccaggataaaaagatatgtgggtcaccccgtctctactaaaaatacaaaaaaaaaaaaaaaaaaatagctgggcatggtggtggatgcctgtagtcccaactactcgggaggctgaggcaggagaatggcgtgaacctgggaggcggagcttgcagtgagccaagatcgcgccactgcactccagcctgggcgacagagcgagactccgtctcaaaaaaaaaaaaaaaaaaaaaacaacaacaaaaaaaaaggctgtcagagcctcctcagcttccctacaaacctgcaacttgatgttttcaccctaggcagctctagacctataagtatgagaataaaagcttattgctgtcatgcca

SEQ ID NO: 9716 - DNA, 522 bp, Homo sapiens
ctttgagattgtaaataaactcagtaaaagtttaactttcattttttttccacccttgacaatcagaaaattgctaggttcaaaaaagctcccagagattaaacaaaatgktttttttttcttccttcacaatagttttcccttattgctgtactatgtgataaggttaatataacagctgccatacagatcattaatacagggagataagcaaagttgcatgctggaaacatttgcagggtatcatttgccttcttctgctgataaagaagccttaggtaacaaatacagatcacaggcactgaatatttaactttttagacagaaatcccaattgatctttcctaatatgttattattcataaatgctctttaaagttgggtactgactgctctcaaaatatgattttttaaaaaaaatttgtatgttacctaccttttcaagtttacagtcaaacgtaatttactttttaatatgacaaatagttataactcttgcaaaaacaaagatttccatgcccc

SEQ ID NO: 9717 - DNA, 551 bp, Homo sapiens
caagatttaacacttgtatgtctttgtagtattataagatgattctacagagaataaaaaataacttatactctctacagagccagacaataggtgctggttcttaaagaagcaaaaagattaagcctgacagattttctgtttcctggagtaacagtgtgcttttactgaaatacccacaaaggttgcagcaagaaataatagtgtagcaaaaagaaataatttgggagcataaaaaacatgtgggttttgggttttggagaaaatattaaacactgcacwctatcaatatcccttaggggtacaattcttagccttaacaaaaaacaatttataagatatctaacgatgaaatttaccctcatcatccagttcctttactttgctgttaaatcaagaatgaccccaaatggaaacatttctgaatattcttttggaataaattctcaaatttcaatagtttacttttttcaaaagtttgtaacactgactacctgagttctctctcccaatatttctgggaatactgaaaagaacattctttaagtgtt

SEQ ID NO: 9718 - DNA, 554 bp, Homo sapiens
attttgctcactctaaacaaccagttaaaaaaggaaataattctttcttatagtgactatgtagatatgtctgacttatttgcttttccatgaggtgattcaaaattttcattttctgtacatacacatctagataatagtaaatagtctgagaaaaagaaaaaatatttaatcatttttttcttacatgatactaagctaacataaccattttttaattctcaaagataagctggatactttgatattatctagggaaaacctaacttaattgactcaatttgttgaatttcgttgggggsggggattgagctgtagagtatttaaggcttctccccattaagatatcataagatcaccttttctccctctttccctaaatgttgacattacacttcattttgacagttgttcaatgaagttttaaagcgttatttctgtttatatgataacaacaaaaacaagaacaataactacaactctccaaataattactgccacatataaaatgaacaattatcagatttaagatatctttatcctttcaaactcaa

SEQ ID NO: 9719 - DNA, 508 bp, Homo sapiens
tgatttttattttaaaaaactattagaaaactaaggatagaagaacactcctttgactgataaagggtgtcaaatataaagataacatcatacttaattgtaagacaccacatgctttcccgcaacattgtggtgttaaaaaaaggcttggctattgtcttacaactcttactcaacatcattccagaagacctatccattgtgcaataaggaaaaagaaagacactctgatttagattagaaagaaataaaattatctcatttgcagatgacataattgtgtaastagaaaaatcccaaaaaacttaacaaaaatctcctagaacatgtaagttcattcagcaagtttgctggatatgttaatatataaaattgattttgtatttatacagtcactatgaacagctagaaactcaatttttaaaatttgtccttaagcatgtgtacaattgatgaaaattcttgttaggatattcccacattaaaatttttttcttttttaaggtca

SEQ ID NO: 9720 - DNA, 1933 bp, Homo sapiens
taagaggcagacagacagtcttctagatgcttcacataagttaactcatttaacactcacaacaaccctctggggtggacaccattaatatgtcccattttatgcctaaggaaactgaggcacagagattccaaggaacttgccacatgtgtgtattaacaaataaataagaaggtataggtttaaaaaaaagaaattccttgaaaaacaaagacatttgaactgaatttggtgagacagagagacactgaggtttttgagaccagaatgattcagcaggagcgagatggattagtggcccctgaaactaggggtagtggctgatccaaaaagctcctgcagagatccacatccaggggagaggctctgaactggagtggtggcaaaggcagttgaaacaagaagcaggtactttgggaggccgaggcgggcagatcacgaggtcaggagatcgagaccatcctggctaacacggtgaaaccccgtctctactaaaaatacaaaaaaatttagccaggcgtggtggcaggcacctgtagtcccagctactcgggaggctgaggcaggagaatggcatgaacccaggaggtggagcttgcagtgagccgagatcgcgccactgcactccagcctaggcgacagagcaagactccatctcaaaaaaaaaaaaaaaaaaagaagaagaagcaggtagacaaaattgcaacatcttgtaggacttcctgagtaatgacaagagctgtaaccatcagggttcaatgagggaaagaaaactgctaggagagtgcgatggattgaattgttaccccccaaattcgtatgttgaagccccaacccccaatgygatggtatttggatgtgggatctttgggaggtgagtaggtttaaatgaggtcatgagggtgtgcgcctcatgataggatgattgtccttataagaaggggcaccagagaacttgcactctctgccctctaccacgtgtggacacagtgagaaggtggctgtccgaaagccaggaagagggccctcaccagaacctgaccctgctggcaccctgatcttggatttccagcctccagaactgtgagaaataaatttctgttgtttaagctacccaatttgaggtatcttgctatggcagcagaagtagacaaagagagaggaatggataacggatgcatttatagtggataaggctgatgcaattgtgggagttggtgaagcaatttacaaagatgaggaatctgaaaggaaagcttgacaccgttcatgacactgatgcccatcgcaacagagccagctgtctgcacacctggcccaggccttggggaagctgagggggacatcagaaggagctggcggagctgtggtgcaggtgctggcctcatgtcagcagatctcatgtcagcagatcagtgacaatgtgcagaagccctgctcaaaccttcagagtgtacaatatatgacttctgcttcaattccaatttccaagttgcacacaaaatgtcctgggtggccaatattgcctggaatcaaatggcaaaggggatgctgtgaaacctaggcttagctgagttaagttaatacagcacaaagccagcaagatagtggatgagaaaaagcagacaagtaaagaggaccccaagtttttgtgcatgcttgactagaaaaatggtgatgattctaggagatgttggaagacgatggtgagcttagttctgctgtagtctttggcatgtatgtagaaacatctagcaggcaactgaagacttaaagagaggacaagactggaaataaagacataggagtttttaaccaagtgaggttttgtacacttctccattctctatgctgctgaaggaaatgatgcagaaagtgcatggagccatcaaaaattggattttgttccttttaagagaaaattttattcttc

SEQ ID NO: 9721 - DNA, 535 bp, Homo sapiens
ccacaaccacagaacaagacagttctcacaagcagggccagaggcagggagagacaggtaaacagatggaaaacctgcatggctaagtctttccagtatcagagtgcctggctccacgtccacaccaggtgacctttactccagcgtacccctgtcttctatcaggaaagatttcaagtttcagaggttagcagctcagaagcagcctcagtgtgctgcccattcctgccctgatcttgttccttggtttccatcactgggtatctgccttattctagaaaccatgccctcctttatgccagaggttcagcaagtgtgaccctgaattgattgtttcctctatctgaatccccacctaataaaccgtttcaccaagaccagagtcctaccttgctattactccaaaagactatctygatgcagaatccacctggagggcctcctgagaccagagctctaggaattcatctccacatctcccactgtgcagttcagtatctggcatgtaatgggcacacaacaaatatttatagaa

SEQ ID NO: 9722 - DNA, 661 bp, Homo sapiens
ggggtttcactgtgttagccaggacggtctcgatctcctgacctcgtgatcctcccacctcagcctcccaaagtgctgggattacaggcatgagccaccgtgcctggccaggtttccaacctttcttctgatgagatttcatttatagaaatcccctttcttaggaacggtggacagaaaagtttgtccactgtcaaattctgtgcatacagcctgatcagtgcttgtcaggtgattaatagtgatgacatccacttagaacttttcttctttagggcatcaagaaatggcttcgggggcgaaggtgggaggatcacttgagcccaggagttcaagaccagcctgggcagcatagtgagactctgtcgtaaaaaaaaaaaacaaaacatagctgagtgtggtggtacatgcttgtagtcctcgctacttgagaggctgaggtgggaggatcacttgagcccaggaggtcgaggctgcagtgagtcatgattgcgtcactgcactccaggctgagtgagcaagaccctgtctcaaaagcaaaaaagaaagaaagaaatggatttatctgttctctaatagcaatgtcacttgtccttgatgtggtggttctgatatacatawatttcagttaccctggtttagttaagtaatactagtcccc

SEQ ID NO: 9723 - DNA, 527 bp, Homo sapiens
ataattttattttctgcttagtcagaagcaaggccctcaccaataagccatttgcaagtaaagccaattttcaacccacgggtctggtgggagcaggactatccaaaaaatactcctgaaaacaccaacagtctcaactctgcttaaaagaaaagtagccacacataaaaacctcctatgcctgacatggtcacaaggtcataaaagccttgggagacagagaagtcatgctgagcttaaagccatcttgagaagtcttacacatgcacaaccctgatttkctccgaccctgagaatagcctgttgttaggcaatgtcggccaatacagactctacttgccaagaacttcaaacatgacctttacaaggtagcaattgttggaaactattaagatgcctctgaaaaaataatataatctgcagcgacaatatgctgaaagaaatgccaaccctgtaaagcaagtgctctctcgcctccctcacacgtgctcaggcagaagggaagagaaacattttcctccacagca

SEQ ID NO: 9724 - DNA, 534 bp, Homo sapiens
gcaagtcccgccaagctgaagacggtgaagaagtcctcctgggctcggagctgtaatgactctatatctgaaattcgaatcattgctaagaccagctgtagcttcccaaatacctttttagatggttttctatccatccctgcaccctctctgcaaatccaggcctccctcacaccaggcccagatgattccaggaggcttctcacagtcaccctgcctccaatcctgccccaaccatgcccaccctgcagccagtgtaagcatactcaaaaatataaacctttggtaggttccccaatactcttcaggtaaagtccaaaccccttcatgtggcccctgcaaaatgtggcccttggtgacttttctagcctcatttctacagctagtgaacccctttccctacctcacatgtgacccagccacactgacagtcaccagttccttcaaggtgccatgctttctctcacctcttcgaccccctcctycctgactgaatgagctcctgtgcccccagctcttactctggttgactct

SEQ ID NO: 9725 - DNA, 662 bp, Homo sapiens
gccaacttgcatcagaagtcttggagtaaaccagagatggctcctgaggccatctctggtctcctcctcccctagataccaagttgccattgttcctggcaccttgacaacttctgaccttgcaccaatattgcctgtaaaaaggatgtgctctatctccattagaaaatgtgtttagctgcaaataagaaagcttagttaacagtggcataaattcatggggatttactttgtgacacaagaaatcagaagaaaggcagtcacaatgttgcttcagctactccatagtgccactggggacccaggttctttctgggcttcggctcagtcatccttaatgggtggggggtgggtctgaagctttaggcttggcatcttgtggctacaaaagggctgctgcagctccactcacacctctgcaaggataaaacacagcacaagctctgcctgtccctgtttgttataaaagcaaaagctttcttagaaatctctagaagactttacttgcatttcacgggccagaactgaatcacagggccacatcctcagctggaagagactgggaaaataagaatgcaggtgagcttatwcttcctcaaagaaaaccagaatcaaatggctatgggctagacaactaacagtgtctctgctacatgtctaca

SEQ ID NO: 9726 - DNA, 555 bp, Homo sapiens
tgggattaggcgtttattaataaaactccccaaatggtatttgcaatgtgtcattctacttgagaacataaataggatagaattaaactaacacagaaagattacttatcttataattaagaacattgtacaagaatgaattttgaatttataacaatttctgggctggcaagggagacgtattaaataacctttcttcttaaaaaatatcttttgagacataaattctctgtggggaaaaaacacagaacaatgagctgtcttttctcaattgattgcctgtagtgttacaaatactttgaaaaatgaagggaaatttaacattttaaaatgatctttcagaaatctattattatgagcggggaaaaatgaacaaaagtccttaagtatttaggctttttgaaaacttccatkatgtaaactaggtaatactggggatagccaagcccacagagtacagcagcatgaaacacaaacaagagtcactgattttttatagtcagctgaaaaacagcacatctaattttttttaaatagaaaaataaacaatatttc

SEQ ID NO: 9727 - DNA, 1701 bp, Homo sapiens
gatgctgtcattttgttagactattctaggcctattctacttcagtgtctagtgtagcattactgcagaccatgtgtttcagcagagtttgtggatcttgttttcccaatagctcccactgtaatagtggtgcaccccgctggcagcaggcagcttattgagaagatgtctccatgccttgctgggcactgcagcctacattaaactatccagattccattttcatatttttctgacttagagtcactttcccaactcagtgatctcctttctggcagcagcatcctgtacatcattaaattgttccttgttctagagggatggacgtactgagttcctgttaaaggtttgtctgctgtctagaactactccttctcatggtaaaagcccctaattttcttatggtgcccactttatcgtaagtccatataggtctgcagcttcctgaggtggctcatgaccagcttcgcccagaacctcagggattgggccagaaagggaagatgacctcattggaattattggccattgctctagcttttgcttgctggatttgaactgtagtcattttgctgtcacctgcctgggacccgagatagaccacacacctgtggaggcagagctgagagatggagaactgaattctgattttcctttttggaacctgaatccagtagtggttgaagttctattcctgaccttttgacttcctcagcacttttccctcccctctttagcttaagccaattggaattggtgcttctgtcatctgtcacttggaatagaaacaacccaagtgatacacaccaagtatctgtagtccaagttcaaaagaatttcactctttcattgttttagcctgggtttcccattaataaatcaagattgaaaaatcttccttcattcatggatgctggcrtccaacaagcttattgttaagttaaaggcttcagattgtatgacaaattctcagccctatatattttctgagttctaaacatgatatcaagttaccttaaaatccagatatctacaagtcattgcttctaattaacatagaagctaccttaaaaaaaaacctgtacacacactaatatatatatatatacacacacacacacacacgtgtgtgtgtgtgtttgtgtgtttgtggagagagagagagacagagagagagtcatgtgccacaccatgatgtttccgtcatcgacagactgcatataccacagtggttccgtaagattataatgcagtatttttagtatacctttcccacgtttagatacacaaatactttccattgtgctgtaattgcctacagtattcagtatagtaccatgctgtacaggtttgtagcctaggagcaataggctccagcatacgctgtctaggtttgtgtaagcacacgctatgatgttcgcacaacatgaactcccctcacaatgaatttttcagaacataccctgtgagttaagccacaaatgactgtatacatatacacatatttctatgtgaatgtgtaacatgaatacgcatcataaacatatatgtgtgtgtattacatctttaaaatgactagaccagcaatatgtgattcctttcactcgttagacaaaacaaataaacaaaacacaaaacctcattgggcaatattgggaaataaatacatcaagggcagagaatttgatgtgatcaaagtcc

SEQ ID NO: 9728 - DNA, 1701 bp, Homo sapiens
gatgctgtcattttgttagactattctaggcctattctacttcagtgtctagtgtagcattactgcagaccatgtgtttcagcagagtttgtggatcttgttttcccaatagctcccactgtaatagtggtgcaccccgctggcagcaggcagcttattgagaagatgtctccatgccttgctgggcactgcagcctacattaaactatccagattccattttcatatttttctgacttagagtcactttcccaactcagtgatctcctttctggcagcagcatcctgtacatcattaaattgttccttgttctagagggatggacgtactgagttcctgttaaaggtttgtctgctgtctagaactactccttctcatggtaaaagcccctaattttcttatggtgcccactttatcgtaagtccatataggtctgcagcttcctgaggtggctcatgaccagcttcgcccagaacctcagggattgggccagaaagggaagatgacctcattggaattattggccattgctctagcttttgcttgctggatttgaactgtagtcattttgctgtcacctgcctgggacccgagatagaccacacacctgtggaggcagagctgagagatggagaactgaattctgattttcctttttggaacctgaatccagtagtggttgaagttctattcctgaccttttgacttcctcagcacttttccctcccctctttagcttaagccaattggaattggtgcttctgtcatctgtcacttggaatagaaacaacccaagtgatacacaccaagtatctgtagtccaagttcaaaagaatttcactctttcattgttttagcctgggtttcccattaataaatcaagattgaaaaatcttccttcattcatggatgctggcatccaacaagcttattgttaagttaaaggcttcagattgtatgacaaattctcagccctatatattttctgagttctaaacatgatatcaagttaccttaaaatccagatatctacaagtcattgcttctaattaacatagaagctaccttaaaaaaaaacctgtacacacactaatatatatatatatacacacacacacacacacgtgtgtgtgtgtgtttgtgtgtttgtggagagagagagagacagagagagagtcatgtgccacaccatgatgtttccgtcatcgacagactgcatataccacagtggttccgtaagattataawgcagtatttttagtatacctttcccacgtttagatacacaaatactttccattgtgctgtaattgcctacagtattcagtatagtaccatgctgtacaggtttgtagcctaggagcaataggctccagcatacgctgtctaggtttgtgtaagcacacgctatgatgttcgcacaacatgaactcccctcacaatgaatttttcagaacataccctgtgagttaagccacaaatgactgtatacatatacacatatttctatgtgaatgtgtaacatgaatacgcatcataaacatatatgtgtgtgtattacatctttaaaatgactagaccagcaatatgtgattcctttcactcgttagacaaaacaaataaacaaaacacaaaacctcattgggcaatattgggaaataaatacatcaagggcagagaatttgatgtgatcaaagtcc

SEQ ID NO: 9729 - DNA, 591 bp, Homo sapiens
tattatttactccatttaacagatgaggaaagtgagacccagaaagttccaccagttgttgaatagcatagagctgttgggtttccatttggtctgtgctagagtctaagttttaaccactgtcacttaattttgtttctgatctcaccagatacagtatccatgcctggtcagaactacagmaccatatctgaatttatcctctctggcttctcagccttcccccagcagctcctgcctgtcttgttcctgctgtacctcctgatgttcctgttcacattgcttggcaaccttcttatcatggccacagtttggattgaacgcagactccacacacccatgtacctcttcttgtgtgccctctccatctctgagattctgttcactgttgccatcacccctcgcatgctggctgatctgctcttcacccatcgttccatcacctttgtggcttgtgccattcagatgttcttctccttcatgtttggcttcactcactccttccttctcatggtcatgggctatgatcactacgtgaccatctgccacccactgcattacaacatgctaatgagtccccgtggctgtgcc

SEQ ID NO: 9730 - DNA, 556 bp, Homo sapiens
ctcactgcaacctccccatcccgggttcaagtgattctcctgcctcagcctcgcgagtagctgggaccacaggcgcgtgccaccaggcccagctaatttttgtatttttagtagagatgggktttcaccatgttggccaggatggcctggatctcttgacctctttatctgctggccttggtctcccagagtgctgggattacaggcatgaaccattgcacccagccactgaaactggtttcttatttaaagttcctcactgtctttgggagacatataccctaagtgtgtgtgtggatattatgtcgaattgagtgaaggatatcagaatgcaaaagtggagagagagcaagaaggagagagagagagagagatacagagataggagaaagagagagagagaaagagagagagagaaagcaggtgtcaagtagtcaagtaaaaatagagttctttacattttttgatctgtacaagaaatgtaataactaagaatttggggcaaaatctgggaaagggaaaaagagagaaaaaaaggaggttggtaaaatagggc

SEQ ID NO: 9731 - DNA, 1463 bp, Homo sapiens
ttttttataaatggggtctcactaccttgcccaggctggtctcgaatttctgggctcaagcaatcctcccacttggacctccaaaagtgctgggattagagaggtgggccgctgtgcccgacctaaaaagggagttttagaagctcacctccccaccacgctgggcctggggagaggaagcgggggcaggaaaaggccgacaggaagtgcastttcctggggggcggctcacggggctcttctgtcactgatctgtcctcacagaaggatttccgctcacttcatcacccacccgagccaggaaagagccactgtctagtggccgccaacccttaacccgcccccacaaccgcgccactccccagcctcctccgcatttgtgtcacagccttcagctagcgccaaaagccactctcttccccacactgtacttagtttttagatgactatttgtgaggactgatcgtgactttccatttaatgattcaaggctcttattaaaaaacaaaacaaaacacttaagctttaaaaaacaaattgggccaggcatggtggctcatgcctgtaatcccagcactttgggaggccgaggtgggtggatcacctgaagtcaggagttcgagaccaacctggccaacctggtaaaaccctgtctctactaaaaatacaaaaaaattaactgggtatagtggcgcacacctgtagtcccagctactcggaggctgaggcaggagaatcgcttgaacccaggcggcggaagttgcagtgagctgagattgcgccattgcactccagcctgggcaacagagcgagactctgtctcaaaaaacaaacaaacaaaaaataccaaatcgattgaaagagaaacatcagtaggtcatggccctcagttatgaccaaaaaagattacgaagggggtaaaagatgataggagtttggaaaactgccctagagactgttctggaagattccacagctggctgagacttcgggagcacagacgtgcagtgtgttactgatgcctgtcttcgctgtggccgctggccaagaccctcgctgcccctagcctggcccggcccctcacccaccctcccaggcctggcaggtctggctttaagacccccgattccctacattcctaatcagtggcactgggactgtggtgactgatggacagagtcaaactgagcttctgccgtgacccaggggaaatggctcagacctgtcctttgccgccagggctggtgtcaccagggcctgagaagcaggtgccagccctgggtaagggcaagggaggtgacacggtgtcgcttgcccgagcaaggcccctgcagccaggctctgagcccatctgatgctgtcaccgactcgccgcctctgctgcccggagacccagctcttgtgtgacccatggaatcctcagggggacagcagtgctggagcgtggctgctgtggcatttcc

SEQ ID NO: 9732 - DNA, 531 bp, Homo sapiens
atattttgaatactctatatcttctttgggtccattctgatagtcacttaattgctcttagaagcattatgagatttacacagttattttctttagatgccactatttaaacatatatgaagaactcattcaacaagtgtaaracttgcttaatattgatccattgttgaaaatttgagagaaaatttactattatgtaaattgaaagggacaagtaaataaaaaaagaacatgtaaatttctttatgttccattttaaaccattatttcttattcatatctaagtagatctacatataacctgccaataaggcagaggttctgaatttggctttcagggagaccatgaaacttcccaaattgtgcatatattcctttttcttggaagagagattctattttccaacatatttacaaaagggtttttaaaagttaaaaatgttaagaacaactaaattgaatggttaaggaattagaaaatcattggtgggactgaagctcctcactgattagctaaattaataaaggaaa

SEQ ID NO: 9733 - DNA, 528 bp, Homo sapiens
tattaactgtatttgtatcttttttacaatgatgtgatttaatttgatgataacattcaatgatattgactgtttccagcatatttgaatggcataaacctgactttcaaatttgtggtcagctcattttgacttacatctttctagttgtaaaaggtgtgttagtcttgaaaacaaaatgaaaataaatgtataaargatacaaagttgtctttaactcgaatatttatatgcctaaaattcctgagttagcaatgaactttaagttatcgagtgttcttttccggcactgctgtagcagacactgataccgtcctgtctatgtcactactttccttatcactgcagtccacgttagctcaatttccaactgccagcatgtggatttcttttcctgaaggctttctttgtccgctggagcctgctctgctacctgtacagtaggacagaagtgctcaggaaataatgctgtttggtacccaagaacaggcttccacaagttacctgagaagtcctcatccaatgatc

SEQ ID NO: 9734 - DNA, 528 bp, Homo sapiens
tattaactgtatttgtatcttttttacaatgatgtgatttaatttgatgataacattcaatgatattgactgtttccagcatatttgaatggcataaacctgactttcaaatttgtggtcagctcattttgacttacatctttctagttgtaaaaggtgtgttagtcttgaaaacaaaatgaaaataaatgtataaaagatacaaagttgtctttaactckaatatttatatgcctaaaattcctgagttagcaatgaactttaagttatcgagtgttcttttccggcactgctgtagcagacactgataccgtcctgtctatgtcactactttccttatcactgcagtccacgttagctcaatttccaactgccagcatgtggatttcttttcctgaaggctttctttgtccgctggagcctgctctgctacctgtacagtaggacagaagtgctcaggaaataatgctgtttggtacccaagaacaggcttccacaagttacctgagaagtcctcatccaatgatc

SEQ ID NO: 9735 - DNA, 528 bp, Homo sapiens
tattaactgtatttgtatcttttttacaatgatgtgatttaatttgatgataacattcaatgatattgactgtttccagcatatttgaatggcataaacctgactttcaaatttgtggtcagctcattttgacttacatctttctagttgtaaaaggtgtgttagtcttgaaaacaaaatgaaaataaatgtataaaagatacaaagttgtctttaactcgaatatttatatgcctaaaattcctgagttagcaatgaactttaagttatcgagtgttcttttccggcactgctgtagcagacactgataccgtcctgtctatgtcactactttccttatcactgcrgtccacgttagctcaatttccaactgccagcatgtggatttcttttcctgaaggctttctttgtccgctggagcctgctctgctacctgtacagtaggacagaagtgctcaggaaataatgctgtttggtacccaagaacaggcttccacaagttacctgagaagtcctcatccaatgatc

SEQ ID NO: 9736 - DNA, 822 bp, Homo sapiens
tggactgtgtaaagcaatacactgcaaaaaatttctttctgccactctaaatagttttggatcaaaattgtcagaccttattgctgttacaggatrtgtactttaatctgttattggtgttcaaacctgtgtcctcttaacttgattttgttgtatgtccaacacaggaagaggtcaaagatgaagtcagcaccacagtctgaatgaaattttaggtgcattttgtgataatgggtcttcctcctggaagcagagagattgagaaccataacaactttatgaagaaaggagtagcaaatgagtcaaatatcacagagacattaataatgttgaaaatttgcctacactggtatagaggtgtatataaaaattaagggattagaaaatattatctatttaaaactttagtatataacaaaggaaatatcacaaaccagtaaataaaggaaaaattattcaataaatagcactatgacattagtaatatataaaaatttggtgacataattgtttttaaaaattactttagaatcttactctgtacacagtaaaacaaaatgaataccagtgagatattttttaaatgttacataatggaagaaaatagaagacataaataaatattatctaaatctgagtgtgtttccttcattaaaacaagacaatagaggaaattaaagaaggcaaaatcatataatgtcagataaaatacacagtgtgagaccaggaaaatctggattaaatcaatgttcctccacttatttcagacagatgacattgactacaattgcacattgtcattggaaattggcaattaaaaga

SEQ ID NO: 9737 - DNA, 533 bp, Homo sapiens
tgaagtgcctgttatgtgtcaacagggttccaggtgatgaagctacagtgctaagtgagacagaytaagcctccactctcagggaatttacttacattcaagtgagtaaacacgagctcgacgaaagacaagacattgagtaaggaagagaattcatacagcaaaaagcgccacacaaaaaaacaaagggtagtggtatattaaggattgaaaaaattgttctgcaaagagccagatagtaaacattttaagttttgcaggtcaaatggcaaaacacatattttttaggcacttatataatgagaaaacaaattctcacaaaatagtttttcaaaactcaaaatataataatgcatacataaaacaggtaaagatacgtgaacacaaagattaggcaatactgtaaatgtctactaatggggactgcttaaaaaaattctgttagctgtttaaaaatttgtggtagaacaacacaccttgaaacagaaaagtattcaaaggtatattgctaaagtgaaacagttaagtggaag

SEQ ID NO: 9738 - DNA, 859 bp, Homo sapiens
tttttgggatggcattagcagcatatcatacactattattagaattaagcaataaaatacatctaaggagcctaggactgaacttgatatatagtttttgcccaaatacttattattatttgggcaaatttatatcattgaagcaaggctccaatggatctttcactaaaaagccaatgtaaatgaaatctcatgaatgccaacacgatatctttatgtttagactcattattataaaaattattataaaaattttttgctaatgtttgtagacatgaaatagagggaagatattgggcttaactactttcaaggcatcgataagataaattattacatatattagagatatatgttataccaataagccaaagactttattttatatggaagaaaaaaatggctaatgtgagtgaagtgaatattagcgatgtctgaataggaagaatcatcactattttctttagtgaagaaaacctggccagacaaggtggctcacacctaatcccagcactttgggaggctgaggcgggtggatcataaggtcaggagtttgagaccagcctggcyaacatgatgaaaccctgtctctactacaaatacaaaaattagctgggcgcagtggtgcccagctactcaggaggctgaagcaggtaggaattgcttgaacccaggaggcagaggttacagtgagccaagattgcaccattgcactccagcctgggtgacagagcaacactgtctcaggaaaaaaaaaaaaaaagaaaaaaagagaaaacctaacagggattagacaagccttttatttacgtacttaaattttcttattatgaatgtaatatattataaataattttaa

SEQ ID NO: 9739 - DNA, 523 bp, Homo sapiens
gatgctccctaattagtagagaaatctaggtgatagaggtgcattccgctggtgaagccagccttttctgtttatgttctgaagatacgactcagcagtaaaaggtcttttctgcacacaaacttgattggcggagactgtatgaagcctgtgacaggtggaaagaggagctgtgtattttagcacttctcctgaaatggaaatccttctccatactccctgactgctccttgttggtgtctcctcagtacccagcccagtgcattggagatcagagactagggmagttgcaggatggctcacagagaagagtcttgtaaattgtcctgtaattcttctcattcattagggggcttttatgaatgtgataattagagtactcctgtgactctctataacttaaagaaccccatgtttacaaagtcttttttttttttaatatagtatgttgacatctttactttcaggggtttttttgttttgttttttgcttttgagacagtcttgctctgtcacacaggct

SEQ ID NO: 9740 - DNA, 1286 bp, Homo sapiens
attgagcacagccccacgcatatgttatttccttcctaagcagacctttttttacaggggccattatgtatgctctgtgccgatggtgaccatatcaaaaagcatcatgtctaaatttcagcagtcccttaaccttctatcttgggaagcttgatatcctcttttttttccaaaaatttttgagcattaccttcttaatgaaagaatacatattttcaattctatacagttttagaaatggaatgacagaaactgttggctgattttttatggatattagtcatgcagttgtatatttgaagccagtaaagaaaagtgctgatacattattgggtgaagcactatttggagtggcaaaaaatcaatctattggtttgttctatgatctatgtacactcactgctttgctaccagcctgtctccaacagagctctaattctcaattactcagttttcaaacactctggttatagccaccttaatccttagctttatgaactctaaatatgtgtgtaaaattagaaatttctatgaacaagacaattcataagaggaggttcagtattacactagtgatatatcctttggtctgttttcctgttcaacagcatgtgaaygacttgcacaaagtgtaatttgaacattgaagtaatatctgtaagactcaagggatactagaacttttgcaaattttattcgttaaaatataacagatgaaaattaacatgttgcacagaattgtggaacatttatgtaactctcaaacataaggagtaaaattctgaggaggaagggatattttcattgaaaatttcccccaagctggaacaagatgaaacccagcaaaaaagcttttttaaaaccacaaatgcctctgtcttcgtgctatttctctcactttctctattctgcttaatttttaaactgcaacctgaggagtgaagatgtaaacacacacacacacacacacacacacacacacacacatatgtggtcgtcatgcagataacataataaaaagtccttttctggcattgccaccactgctgtcctggaaatactttgtcttcatgtgctctttattatatagaaaattctctctcctgacttgatgacattttacttctttatgtattctttgcatatttcaagctcttaaagagtttttggtagtaggttctcaagatatagtccaaaacgaacacagtttgcacaagatttgtaagtttagtcttgtgttcttcagggctgaatcactgtgtggtcactgcttcaattatgttaca

SEQ ID NO: 9741 - DNA, 1265 bp, Homo sapiens
tgttccaaaaggtaactcatcacacagaggccagaactcaaggcaacagtaacagtagcaaacaaagaagaaatgcattgcaattcatgtgacactgtttgcagccaaattascaaagtgccaatgcaacaacatctggtcagagggactccttgtgtcttcaatttcagccacttcaaagtcagctctttccccaacatcccctgaaaccatctctcatccctctccttttgctcattcccctgctacactggcttccttgctggccttgaacatgtgcaagaagcacattcctctgagtctctcattaatccttccttctgccttgcacacacttctgcgggccacatggtgacttctgccctgccttcactatggtctctgttcatttgtcacctggtctgctggtattgcatcaatgaccagtaaaaaaatagtaaaaaaaaaaaaacaaaaaaaacccaccccgtccacactttccttcttatttcttttttcctcttcaaagggtttgtcaccatcggataccatatggtgacaccatatggtatttctcttgtttgtttgtattctttctctgtcactgatttgcagcaactttttttttttttccggagtctcgctctgtcacccaggctgaagtgcagtggcatgatcttggctcactgcaacctccacctcccaggttcaagcaattctcccgcctcaacctccagagtagctgggactacaggcgcgtgccaccacatccagctatatatatatatatatatatatatatatatatattttttttttttttttttttttttttgtattttttgtagagatgagaattcaccatattggtcaggctggtctcgagctcctgatgtcaggtgatccacccacctcggcctcccaaaatgctgggattacacgtgtgagccaccccacccagcctgtagtgacttttgttttatagaactaattattcaatgtccagacagtatttgtaacacttcagaattcactttatagtcctcaaatgcctaaaaattttctcatgaatactgcagagttcatgcactcagggaaagactgtgagtgggacaagaattcctaaccagggttgtcaaagggatgccctaacagaggctagattcacacgcaaaatgtagaaattaacttcttgtaaaatggaggttaccagagcctgggagaattgggggaggggggttgttggcaagatgatggtcaatgaatacaaaattacagttaaacta

SEQ ID NO: 9742 - DNA, 1265 bp, Homo sapiens
tgttccaaaaggtaactcatcacacagaggccagaactcaaggcaacagtaacagtagcaaacaaagaagaaatgcattgcaattcatgtgacactgtttgcagccaaattagcaaagtgccaatgcaacaacatctggtcagagggactccttgtgtcttcaatttcagccacttcaaagtcagctctttccccaacatcccctgaaaccatctctcatccctctccttttgctcattcccctgctacactggcttccttgctggccttgaacatgtgcaagaagcacattcctctgagtctctcattaatccttccttctgccttgcacacacttctgcgggccacatggtgacttctgccctgccttcactatggtctctgttcatttgtcacctggtctgctggtattgcatcaatgaccagtaaaaaaatagtaaaaaaaaaaaaacaaaaaaaamccaccccgtccacactttccttcttatttcttttttcctcttcaaagggtttgtcaccatcggataccatatggtgacaccatatggtatttctcttgtttgtttgtattctttctctgtcactgatttgcagcaactttttttttttttccggagtctcgctctgtcacccaggctgaagtgcagtggcatgatcttggctcactgcaacctccacctcccaggttcaagcaattctcccgcctcaacctccagagtagctgggactacaggcgcgtgccaccacatccagctatatatatatatatatatatatatatatatatattttttttttttttttttttttttttgtattttttgtagagatgagaattcaccatattggtcaggctggtctcgagctcctgatgtcaggtgatccacccacctcggcctcccaaaatgctgggattacacgtgtgagccaccccacccagcctgtagtgacttttgttttatagaactaattattcaatgtccagacagtatttgtaacacttcagaattcactttatagtcctcaaatgcctaaaaattttctcatgaatactgcagagttcatgcactcagggaaagactgtgagtgggacaagaattcctaaccagggttgtcaaagggatgccctaacagaggctagattcacacgcaaaatgtagaaattaacttcttgtaaaatggaggttaccagagcctgggagaattgggggaggggggttgttggcaagatgatggtcaatgaatacaaaattacagttaaacta

SEQ ID NO: 9743 - DNA, 888 bp, Homo sapiens
ggcatttgcagcgtgcgccttggcgctaaacgaagccaagcggttgttggtcgagtccaaggacaccttggtagaaatggcaaagaacgaggtggacgtccgggagcaacagctgcagataagcgaccgtgtgtgtgcctcgctggcgcagaaggcgagcgagaccttggagctgaaggtgagcgcattacctgcggctgcgggccagggtgggacaggggaggagacgcggactgggagccagcgtgatccccctgcgcttccctgcccccaggaaagattaaatatgacgttaggactgatgaggggaactatcctccggtgtacgaaatataaccaagagttgtacaccacccacggtctcatcaaggtacggttcggggtgagagccytcgggggtggaggcaggggtgccggtggctggaggctgggtttcaatgcgcttgcacaccgcaccccaccagggtcctctgtcgaaagttcacctggagaccgcagaaaagctggacagacccctggttcgcatgtaccagagacacgtgggcacccaactcccggaggctgcgcgcctcgcacaggtaaaccccctcccccgtacccctctaggcccagccccgccaatggtaaggctccttcctcaagcacatctggaccaggtatgatccccctctcacccaagtcggcctgtccttcaactcctgccacgaagtggggaggcgggggcttcactgggtactgaagtgggtactggcgggggcttcagtgggtactggctcaaataagtcccctcaacccctgtcctcccccctcacacacaccctcactgtccagctctggccttagtctctctaacctgtaaaatgaggagcacgtcagcacccacttcaa

SEQ ID NO: 9744 - DNA, 888 bp, Homo sapiens
ggcatttgcagcgtgcgccttggcgctaaacgaagccaagcggttgttggtcgagtccaaggacaccttggtagaaatggcaaagaacgaggtggacgtccgggagcaacagctgcagataagcgaccgtgtgtgtgcctcgctggcgcagaaggcgagcgagaccttggagctgaaggtgagcgcattacctgcggctgcgggccagggtgggacaggggaggagacgcggactgggagccagcgtgatccccctgcgcttccctgcccccaggaaagattaaatatgacgttaggactgatgaggggaactatcctccggtgtacgaaatataaccaagagttgtacaccacccacggtctcatcaaggtacggttcggggtgagagccttcgggggtggaggcaggggtgccggtggstggaggctgggtttcaatgcgcttgcacaccgcaccccaccagggtcctctgtcgaaagttcacctggagaccgcagaaaagctggacagacccctggttcgcatgtaccagagacacgtgggcacccaactcccggaggctgcgcgcctcgcacaggtaaaccccctcccccgtacccctctaggcccagccccgccaatggtaaggctccttcctcaagcacatctggaccaggtatgatccccctctcacccaagtcggcctgtccttcaactcctgccacgaagtggggaggcgggggcttcactgggtactgaagtgggtactggcgggggcttcagtgggtactggctcaaataagtcccctcaacccctgtcctcccccctcacacacaccctcactgtccagctctggccttagtctctctaacctgtaaaatgaggagcacgtcagcacccacttcaa

SEQ ID NO: 9745 - DNA, 610 bp, Homo sapiens
gaatttgcagtatgtactcatgttctttaaagagaaaccccaagttatataggctccagccattcaaaatctagatctgcccccattaactttataaagtcagtataacaacactaacaagatataatcatcataatataatggggatgataataaactctatttcttatttcatcactttgaaagygtgcctgtggactcccattgtgaaaaatgagttggttagcacattgccaattctttctctttactccatacccccactcctgacttccatcagctaccttacaagcacatcctctttactgaatacaaggaaagcatctgtgctttgtccgtggtttgattctaaaatttttaagccattaaaaacttttgcaatgttatgtttatatgaatataattttttactgatatggtttggctgtgtccccaccgaaatctcagcttgaattgtagctcccataatccccacatgttgtgggatgaacgcgattggaggcaattaaatcatgggggcgggttttcccatgccgttctcatgacagtgagttagttctcacgagaactgatggttttataaagggcaattcccctgcacatgctccct

SEQ ID NO: 9746 - DNA, 517 bp, Homo sapiens
ttgaacctggaagactgaggttgcwgtgagccaagatcacggcactgcactccagcctgggcaacagagcgagactccatctcaaaaagaaaaaaaaaagtgcctctggaacccctcattgcacaggaacgttctagaaatctccaccaagccagggcctctgagctggtgtcagacagggtctacgttctctgaggtccccctccccaggcccagctccccagcaggaagcatccggaagcattacttgagcagtgcgaggaaggcagcgggttccacgtcgggcagctcaatctccgtggatgttgtggccattcccccgttgaacatggcatcaaagacggcgctgcccacggccagcacgaacctggtacgggagagagaaggccctggttaagcccgtggccgccaccccacggccgggagggccagcccggtatcctgggtgaccaccccactagggctccctgccagcctccagcaggcatgtaccaggccccccgatggcagaggcttc

SEQ ID NO: 9747 - DNA, 527 bp, Homo sapiens
cgtgcatgtagaacagataccactctttggagtgtgagtgaaatggtagggttagatttttagtcccactcagcagctttgcctatgaggatttacaagacaggtgttatgtttactgattgctaactgcacatgtcagaggttgggggaggcagcgtcaaagatggcagtgttaaagaaaaaaacctggccagagaagtgccagttctgtacyacagagaagacaccaagcacagaagaagcccccgtaccctgtactccatttgtctaacacaaatgagtgttgcccagacacccaactctttgaaggaatcctagataaagactttggtgttggtaccattcgtattgatctttctcccgtatctgggagcaggaggaggggttgcttaactttcagttgttctgtggatccaaaagagcattcatgtaaggtggactcaggggcacctgcagaaattagagcaaccagggttagtttctgaatcagttcaagagtttttgaaagctccttctctctctctgtc

SEQ ID NO: 9748 - DNA, 573 bp, Homo sapiens
gcaagagttacagcaatcaatcgcaattacagaaagtagcaatatgtcaccaacatgaccagtttctgaagaaacatgttcacacaggttgggcctgataacttgcagctaaaggaagaaaattactaggtggctggaaacagagccagtagctcagctaaggagggcaatgagtacactgagctgcaagagctacaccctcacctgagggtctagaaatccaggctgtgggccagtaagactgacttagccttccttcacctgtcttcggaaatttaagttaaaaaaaaaaaaacctcctcttctctgagcccttgctatggtctgtatatttgtgtcccattaaaatttatatgttgaaatcctaacccccaaggtgatggtatyagaaggtggggtctataagaagtgattagatgaggtttgagactagttcccttataaatccgaccacagagagatccctagcccatttcagcatctgaggacacagctagaaggtgccatctacaaaccaggaaatgggacctcactggataccaaatccgatgctgctttgcccttggaactccc

SEQ ID NO: 9749 - DNA, 533 bp, Homo sapiens
tatatgtgtgtgtgttttttgttgtttgttcgtttttgtttttgtttttgttttagagacagggtatcactctgtcacctaggctagaatkcagtggcacgatcatggcccactgcagcctccaactcctgggctcaagcaatccttctgcctcagcctcctgagtatctgggactgcacatgccaccacacctggctgattttttgatttttctagacagagtctcgctatgttgcctgggctgttctcaaactcctggcctcaagcgatcctcccacctggggcttcccaaagtgctgggattacagacatgaaccactgcacctggccactgttggcttttaaaatcttatttgttgctacactgagaagcttccaactgagaattacctgcttcagtaagttagtgtagaagtgtttgacagggggtctccttacttccagatatggagtttttccagcttaggtgttctaggcagaaagtacactccaggcacgattttgtgtaacgtctatccatgttggggaacac

SEQ ID NO: 9750 - DNA, 533 bp, Homo sapiens
tatatgtgtgtgtgttttttgttgtttgttcgtttttgtttttgtttttgttttagagacagggtatcactctgtcacctaggctagaatgcagtggcacgatcatggcccactgcagcctccaactcctgggctcaagcaatccttctgcctcagcctcctgagtatctgggactgcacatgccaccacacctggctgattttttgatttttctagacagagtctcgctatgttgcctgggctgttctcaaactcctggcctcaagcgatcctcccacctggggcttcccaaagtgctgggattacagacatgaaccactgcacctggccactgttggcttttaaaatcttatttgttgctacactgagaagcttccaactgagaattacctgcttcagtaagttagtgtagaagtgtttgacagggggtctccttacttccagatatggagtttttccagyttaggtgttctaggcagaaagtacactccaggcacgattttgtgtaacgtctatccatgttggggaacac

SEQ ID NO: 9751 - DNA, 533 bp, Homo sapiens
tatatgtgtgtgtgttttttgttgtttgttcgtttttgtttttgtttttgttttagagacagggtatcactctgtcacctaggctagaatgcagtggcacgatcatggcccactgcagcctccaactcctgggctcaagcaatccttctgcctcagcctcctgagtatctgggactgcacatgccaccacacctggctgattttttgatttttctagacagagtctcgctatgttgcctgggctgttctcaaactcctggcctcaagcgatcctcccacctggggcttcccaaagtgctgggattacagacatgaaccactgcacctggccactgttggcttttaaaatcttatttgttgctacactgagaagcttccaactgagaattacctgcttcagtaagttagtgtagaagtgtttgacagggggtctccttacttccagatatggagtttttccagcktaggtgttctaggcagaaagtacactccaggcacgattttgtgtaacgtctatccatgttggggaacac

SEQ ID NO: 9752 - DNA, 831 bp, Homo sapiens
tgcagttctgagatattccaaaccagagtcacctccttcaaggcctattaaggcctattaagctgtaacccacaacccccaacaaaactctggctcagcttatttcccttaacctatgctgtatttttccaaagtacttctcaccttctaacatatgcaattatttatgatgtttttgtatctgtctaccccttgctagaatagaagctccacrgtggcaggatttttttttttttttttggtcactgacacattccaaatgcacagagcactgtctggcacatagaaagcacttggtaatatgttgaatacatccctgaattaatgcgacatcaattcttcacccataaaacctacagttaaaaattaacagtgctcccaccaattgctggacataggcctacaaccatgtaaggcttaggtattatccagcatctgggagaacagctcctctcaacaaagactgcatttaaaacaaggaaattgtgcattggatgcactcgccaactttccacctagaagctacagctcctccattagagaatgataaatgtcactgtcataatcagaaattttccgtggtttccaatgtgcttgcttttatgctgaaagccaaagcattaataaagcaattgaaggagtaggattataagtctatgaatgtcagtggcaaggtttcacatatgtcactttgcaataataaaggacttcagagacagggctagggactgagctgaacaggaatacttgtatttcttaaataggagatagtgaagacaggaccaaaagcaaataaatgagaaaaatgaaggcaaattcaattaatcattt

SEQ ID NO: 9753 - DNA, 831 bp, Homo sapiens
tgcagttctgagatattccaaaccagagtcacctccttcaaggcctattaaggcctattaagctgtaacccacaacccccaacaaaactctggctcagcttatttcccttaacctatgctgtatttttccaaagtacttctcaccttctaacatatgcaattatttatgatgtttttgtatctgtctaccccttgctagaatagaagctccacagtggcaggatttttttttttttttttggtcactgacacattccaaatgcacagagcactgtctggcacatagaaagcacttggtaatatgttgaatacatccctgaattaatgsgacatcaattcttcacccataaaacctacagttaaaaattaacagtgctcccaccaattgctggacataggcctacaaccatgtaaggcttaggtattatccagcatctgggagaacagctcctctcaacaaagactgcatttaaaacaaggaaattgtgcattggatgcactcgccaactttccacctagaagctacagctcctccattagagaatgataaatgtcactgtcataatcagaaattttccgtggtttccaatgtgcttgcttttatgctgaaagccaaagcattaataaagcaattgaaggagtaggattataagtctatgaatgtcagtggcaaggtttcacatatgtcactttgcaataataaaggacttcagagacagggctagggactgagctgaacaggaatacttgtatttcttaaataggagatagtgaagacaggaccaaaagcaaataaatgagaaaaatgaaggcaaattcaattaatcattt

SEQ ID NO: 9754 - DNA, 521 bp, Homo sapiens
gggctcatcttttttctacattattttattcctctgaaaaatagtttacctccctactgcatagaggatgctagagaccattttgtaagttgctctgcgttccagggagaaagctgtgaacagcttccttgtgcatcttttgatggggagcaagaaagaaggtgattttwtgggctaccttatcattattctcccaaaggacttgaattagttgagatttgctcaatgtggtcagcacattcaatccatgatcaaatcctttttatttttcttgcacaacgtctgctagttttccttccactccacctgtgtagacagtggattcattcagcccctcagcctctctgacatagtagtgctcctgcaccgtcaggcctaagtgtgctattgccacttccacccatcactctagccgtgccactccttgctgtactccagggtgacttcctatttggccctggctgtggctcagaggtcgaattcagaagttggcaatgtcctcattggattattagtccact

SEQ ID NO: 9755 - DNA, 544 bp, Homo sapiens
tgggggactctcctagggaggcagtgcccagcttgtttgtttctccagtgcccacatacttctgtgcaggtgtttgggtcagatgtrtcttgaagcattcccagaacagagtctcacttttttttagaggtgagggtctaaaatcattgagatatgcaaaaatcacacacatggtcaagtttcctttttttttttttttgagacagagtttcactcttgttgcccaggctggagtgcaatggcgtgatctcggctcactgcaacctccgtctcctgggttcaagagattctcttgcctcaacctccaaagtagctgggattacaggcatgtgccaccacgcccagctaattttgtatttttagtagtgatgtggtttctgcatgttggtcgggctggtctcaaactcccgacctcaggtaatccgcctgcctcggcctccccaagtgctgggattacaggtgtgagccactgtgcccggcaagtttactcttaaaagtgccttacagtaaagttctgtggctcaggcctttaatcccagtgctt

SEQ ID NO: 9756 - DNA, 544 bp, Homo sapiens
tgggggactctcctagggaggcagtgcccagcttgtttgtttctccagtgcccacatacttctgtgcaggtgtttgggtcagatgtatcttgragcattcccagaacagagtctcacttttttttagaggtgagggtctaaaatcattgagatatgcaaaaatcacacacatggtcaagtttcctttttttttttttttgagacagagtttcactcttgttgcccaggctggagtgcaatggcgtgatctcggctcactgcaacctccgtctcctgggttcaagagattctcttgcctcaacctccaaagtagctgggattacaggcatgtgccaccacgcccagctaattttgtatttttagtagtgatgtggtttctgcatgttggtcgggctggtctcaaactcccgacctcaggtaatccgcctgcctcggcctccccaagtgctgggattacaggtgtgagccactgtgcccggcaagtttactcttaaaagtgccttacagtaaagttctgtggctcaggcctttaatcccagtgctt

SEQ ID NO: 9757 - DNA, 575 bp, Homo sapiens
aaatactctttataatagcatcagagaactttaagtatctagtaataaatacttattttgtaagtcactgaaaatttgaggttgtttgttatacagcaaacctgattagctctacaaggaaaatgttaaagctctattatgagatattaaagaaggctcaagtaaatagatagctcatctggccttgaataggaattttaatagaataatatctcagttctttccaaattgatctataaattgaaaataattccaatcaaaacctcaacagtgtttttcatagcatgtgataatcctagatggaagagttaagggctgaaatagttaaaatatttcgtcaggaaaggacacttcccttgctggttgtcaggatttactatgaaactagagtaattgagacagtagtggtattagttcaccgatcaatggaaatacrtagggagcccagaaatagattcccatatgtttggcactggggataagaaaaaggtggcatattatcagtagagaaaggagctgaaagatggaactgaaaacaatgcttctccaagtggaagaagttggaggtgtatccc

SEQ ID NO: 9758 - DNA, 530 bp, Homo sapiens
taatggatattggagactcagaagggggaagatgagaggcagatgatgaaaaaccacctagtgggtaaaatgtgtactattcaggtgctgggtacactgaaactccagacttcaccactacacaattcatccatgttaccaaaaacctcttstacccctaaagcaattaaagtgtaaaaaataaaattaaaaaagaaaaaaaaagcaaatacctaatggctccaacacaattccaaaatgacaggaaagaaatcctaattggctcatcttaggccacatattagcccatttcagtgggttaaaagcagggggctaggtagcttgggccagtgcccactcgctggggatgtagagaggaatagagagatgctccaaggaggaaatctgggggcaggaagaaaaaattggcactctgaatcaccagctgagccatattcctgaatctgctgctactctcccacttcttttcctcagagcatctcacaaatttcaacttaacctaagttctaactctttaatttagatgctaa

SEQ ID NO: 9759 - DNA, 662 bp, Homo sapiens
cacattttcaaattagcttgtcaagttccatagaaactgtattttagttctgattggaattactaaataatgttttggatgaaactctacaaaatcacgcctaaattgacaggtgggacttttataatgtgattctgtgtaagacacaaaaaaatttgctttttaagtagctaagactctgtaagagtatgtagtcctatctattacttaacttaatattcttttaactcttctggactaagaaactgtagtcattttatggttctaaaaagagaccaattttaagcttttaaaattttggtagctcttattttatgtataaacattttacttttgattttttagaaaaacaaaatttcagccgggcrcggtggctcacgcctgtaatcccagcactttgggaagccgaggcgggcggatcacgaggtcaggagatcgagaccatcttggctaacacggtgaaaccccatctctactaagaatacaaaaaattagccgggcgcaaggtggcaggtgcctgtagtcccagctactcgggaggctgaggcaggagaatggcgtgaacccgggaggcggagcttgcagtgagccgagattgcgccactgcagtccagcctgggtgacagagcgagactccgtctcaaaaaaataaataaataaat

SEQ ID NO: 9760 - DNA, 515 bp, Homo sapiens
tcacaccggctaatttttttttttagtagagacagggtttcaccatgttgctcaggctggtctcgaactcctgagctcaggcaatccccctgccttggcctctcaaagtgctaggattacaggtgttagccactgcgcccagccctaacaaatctttttaaaaaattaaattgcagggcagcaaccatccagttaaaaatctacaaccttagctatatctagcaacakcaactacagcattactaagttactaagttttggaataccacggctcaaaacattggggctctattataccctgcattgtactatattaaaatgaaggagtaggaggagaaaaatgattattctactatactcagaaaaatacattctattttcttcccaatattgggttgttcctttttcacacatggaatgtgcaaaagcagggggtgatagggaacaagtgggagagtcggcatgcagcactttatttcagtaaatattttagaaaactttagcagatgatcaag

SEQ ID NO: 9761 - DNA, 588 bp, Homo sapiens
aggcaatttagcagagtagtcactagtttaccagtgattttcctcagcaggagttagcctaggatttttaaactacattttccctctcccctatccctatctccctagaagaatcactgtacatgacagttagaaataagatcaaatttatcctttagtaatttgactgcctgctaggcaaaaactcaacaaccttctgacaaaattcaragctcataatctctacaacatgataattaacaatgctgcaacaaagaaataactggccaggtgtgtaaaaacaggaaaatgtaacccagagtcaagagaaaaatccatcaatacaaatagacttatctaacctgatgttggaattagcagataattactttttaaaaactgtgataagcataataaagaatcgatagggaggaaaaaaataaagctttcttacttcacatgacggttttctagtatgtcttctaacaaaattaaactaaatgtcctctgaactagagaaagaaaggattctacatctggatctggacagagttcttaccctttcagtggacaaagggaactcagtcccataggatattatggcttttc

SEQ ID NO: 9762 - DNA, 588 bp, Homo sapiens
aggcaatttagcagagtagtcactagtttaccagtgattttcctcagcaggagttagcctaggatttttaaactacattttccctctcccctatccctatctccctagaagaatcactgtacatgacagttagaaataagatcaaatttatcctttagtaatttgactgcctgctaggcaaaaactcaacaaccttctgacaaaattcagagctcataatctctacaacatgataattaacaatgctgcaacaaagaaataactggccaggtgtgtaaaaacaggaaaatgtaacccagagtcaagagaaaaatccatcaatacaaatagacttatctaacctgatgttggaattagcagataattactttttaaaaactgtgataagcataataaagaatcgatagggaggaaaaaaataaagctttcttacttcacatgacrgttttctagtatgtcttctaacaaaattaaactaaatgtcctctgaactagagaaagaaaggattctacatctggatctggacagagttcttaccctttcagtggacaaagggaactcagtcccataggatattatggcttttc

SEQ ID NO: 9763 - DNA, 546 bp, Homo sapiens
taaaagatgctggtggccagcgatagagatgtctggaatcctactacatgcctaagttgctatctgaagacagcatactgcagaggttagcaaatactcttagattataacactctcagtgtttcagaagctttttcaaggcaacgataggccaaaagaaatagcaattccatgtactaagtcaggtttaaatgacttagatatagtcatctatagtgtctaatagatgttgctgtgtttctctagaaaaattaaaatatcccaaagtaactccaggagtttgcttacattatccaagagtgtctcagtacacagtttgagaaccatgggtatattgcataggttaattcaggttttcgagccacactacctggatttgaatctggtcaccactaacrattatatatgtaaccttgtgcaacttgtgtgacttgtagttaaactttcatactttggttactcaattataaaatggatttgataataatactttatggagttgttattatgatcattcaatcaataaaatctatgtacaattaaaat

SEQ ID NO: 9764 - DNA, 541 bp, Homo sapiens
actgaggcaagatgcttctgagggctctgcccagtgccttgtgaattgtgagattgtccaggctgcctgcgtgagctccaatactagttcctctaatccaatgctctaattcaagaaaatatgacwgagttcattgttgtgaagcagagttgcccaggaagcccacagaatcatgagaaataataaaaatttgttaaataataaataactgaaaaaaaaaaaagagctggatccaggtctttgcacaacctcaggtaggtgttgctagtgtgtgccaatcagagctcagctgaagacctctggtgggccctttgccgatctctggagctctctctctgcagtattttgctctctggtatgctgtccacctgaattccctcactgcctcagtctcccctgcctctcagcttcatctcaactcagagagagcctgtcctgaccctcctggacatgttgagtttaatgtgcctcttaccatactagtgaagattccttgaaatgccgtctggaagaggtcccttataaacaaactcctggattt

SEQ ID NO: 9765 - DNA, 985 bp, Homo sapiens
cttttgcccatttttcttttttttttcttttgagacggagtcttgctcttgttgcccaggctggaatgcaatggcacaatctcggctcactgcaaactccgcctcccaggttcaagcgattctcctgcctcagcctcccaagaagctgagattacaggtgtctgtcaccacatctggctaatttttgtatttctagtagagatggggtttcgccatgttggccaggctggtctcgaactcttgacctcgtgatccgcctgcctcagcctcccaaagtgctgggattacaggtgtgagccaccgcgcctggcctttgcccatttttctrtcaatttgtttacaccttttatttttttaaagaattctttatatattagggagatgagttccttatctgtcatattatatgggttatagatatttttttcagattattatcttttgactctgatcaggatactgttggctttgtagaaagtttttttttttattgttataacgcatttatcaaatatttccttcagcgcttctgggttttttaacattctttgaaaagtccaacccataccaagaccattaaaaatcattcataatttctcctagtatttctatggtttcagttcatttcttttctttctttcctcctcctccctctttctctccttttgcatacaaatgtttggttcactttgatatggattgaacttttatttatttatttattttgagacagggtctcactatcttacccagggtggagtgcagtggcatgatcgtagctcactgtaacttctaactcctggattcaaatattccttctgcctcagcctcccaagtagctaggactgcgtacacacacaccatgcctgactaagttttaaaaatgttttgtaggaatggggttttgctatgttgcctaggctcgtctcgatctcctggcctcaagtgatcctcccgcacaggcctcacaaagtgctaggattac

SEQ ID NO: 9766 - DNA, 985 bp, Homo sapiens
cttttgcccatttttcttttttttttcttttgagacggagtcttgctcttgttgcccaggctggaatgcaatggcacaatctcggctcactgcaaactccgcctcccaggttcaagcgattctcctgcctcagcctcccaagaagctgagattacaggtgtctgtcaccacatctggctaatttttgtatttctagtagagatggggtttcgccatgttggccaggctggtctcgaactcttgacctcgtgatccgcctgcctcagcctcccaaagtgctgggattacaggtgtgagccaccgcgcctggcctttgcccatttttctgtcaatttgtttacaccttttatttttttaargaattctttatatattagggagatgagttccttatctgtcatattatatgggttatagatatttttttcagattattatcttttgactctgatcaggatactgttggctttgtagaaagtttttttttttattgttataacgcatttatcaaatatttccttcagcgcttctgggttttttaacattctttgaaaagtccaacccataccaagaccattaaaaatcattcataatttctcctagtatttctatggtttcagttcatttcttttctttctttcctcctcctccctctttctctccttttgcatacaaatgtttggttcactttgatatggattgaacttttatttatttatttattttgagacagggtctcactatcttacccagggtggagtgcagtggcatgatcgtagctcactgtaacttctaactcctggattcaaatattccttctgcctcagcctcccaagtagctaggactgcgtacacacacaccatgcctgactaagttttaaaaatgttttgtaggaatggggttttgctatgttgcctaggctcgtctcgatctcctggcctcaagtgatcctcccgcacaggcctcacaaagtgctaggattac

SEQ ID NO: 9767 - DNA, 985 bp, Homo sapiens
cttttgcccatttttcttttttttttcttttgagacggagtcttgctcttgttgcccaggctggaatgcaatggcacaatctcggctcactgcaaactccgcctcccaggttcaagcgattctcctgcctcagcctcccaagaagctgagattacaggtgtctgtcaccacatctggctaatttttgtatttctagtagagatggggtttcgccatgttggccaggctggtctcgaactcttgacctcgtgatccgcctgcctcagcctcccaaagtgctgggattacaggtgtgagccaccgcgcctggcctttgcccatttttctgtcaatttgtttacaccttttatttttttaaagaattctttatatattagggagatgagttccttatctgtcatattatatgggttatagatatttttttcagattattatcttttgactctgatcaggatactgttggctttgtagaaagtttttttttttattgttataacgcatttatcaaatatttccttcagcgcttctgggttttttaacattctttgaaaagtccaayccataccaagaccattaaaaatcattcataatttctcctagtatttctatggtttcagttcatttcttttctttctttcctcctcctccctctttctctccttttgcatacaaatgtttggttcactttgatatggattgaacttttatttatttatttattttgagacagggtctcactatcttacccagggtggagtgcagtggcatgatcgtagctcactgtaacttctaactcctggattcaaatattccttctgcctcagcctcccaagtagctaggactgcgtacacacacaccatgcctgactaagttttaaaaatgttttgtaggaatggggttttgctatgttgcctaggctcgtctcgatctcctggcctcaagtgatcctcccgcacaggcctcacaaagtgctaggattac

SEQ ID NO: 9768 - DNA, 508 bp, Homo sapiens
ccctcaaaaaagcttgtaccaatttaccgtatcattaacagcacgtttctccacatcctcgccaacacttgatattatgaatccctaaaaattttgcaaattgccatgatggggacactaaaaaaaaaaaaaaaaaatttttttttttttttttttttgctcaatttagaccaggcgtggtggttcacgcctgcaatcctagcacgttgggaggctgaaataggagaactgcttaagtccagggagttcagaccagccamggtaacatagtgagacttcatctctacaaaaaatttaaaaattagctggacatggtggtgcacacctgtggtcccagctactcggcaggcttgagcctagaagtatgaggctacagtgagctgtgattgcaccactgcactccagcctggacaacagaatgagactctgtctcaaaaaaagataatttttcaattttatgagagaaaatattatattttaatctgcattttgctagttactgagtttc

SEQ ID NO: 9769 - DNA, 1569 bp, Homo sapiens
tgacaagatctttttacatatttaggaactattagttaaatgaatgaaaataaagctgaatattttcaacatttgcattgaattttaagtaggtgggaaacaatcttatttaccttttttggcagtggctcaaaattattatcagtttgttggccctacaaattaattcatattttttaaatgtccatgtatgattccacaagctttataattgttttaaagtcacatttgtttacctggtacttccttgataattataaatgacagtaacaagaggtgaaggaacatggacaccagaaagatattgttcctgccagacacacagacctgtcatcatgtaccaattttaaaaaacaaataaagtcatgattttattgagtaaatatatawgggtccaaaaaatctgaaaaacactgttatgctgactaatggtcagaatggttttatagaaattcccaaaacaagtttgtgagaaagtgttaccctttttgtcccccttttttttggcttgtgtttgtttttagttattttaaccagtgttttttttccaaggctaatgatgttgtttgctagtttcctcatgttacatcaaatgaatttggataccctctgagacatctaaatagcaactgcagtaaatattcatcatgtggaattaataatgacatcttgaaatgttctatttgtttttttcgggctctctttacctcacagaaccatcacccaatgtggtattaaaaacaaaggagggccatggctggattttataccacattgagaggagaaaaggtgaactgtgagatcactttggtaacaagcactagcaaagcttaaaggcttgtcaagaaacttgggtacaggagaacttgggtttatgattacttagatattattcctaatgtgaaatgaatgaaataattataaattgcccagataaatgactattggttaactgctaatttctgatgcaataaaaattcaaactgaagttttctgttgatcccaaatacttatcagacttagaagtggaaatttccagttatatattaattagataaagcaaatgaagaagctctctagaataatgttatataatttctgattacagaaaaaaacttcaccttgagttacattcatttagcatatcctgtttattttttattattaactgtagatagagaaggaaaaagaaagaaaatggggcaaagatgaataaaaataaataacagatgacaaggccattgaagttttataaaacattctttattggttgggtggtgcctgtttggtgcctatatttctgccttgtgtgtttaaaataaactttaaaagctagagaaataaatatatctgccaattgttatggttacttttcttcctgctactcttctcgttaacatttacttggaaaaagaatagaatccaagtaagacctggcaatagtaattttagttccatgtgttaaatttattttattgaactgttcggaaattttaaaattctaggctaacttaatagcaaaattaatatatttaaaattgtctctagtaaccattagaagatttttaa

SEQ ID NO: 9770 - DNA, 1711 bp, Homo sapiens
ttttgttaaagaaaggcagttactgttactgagatagctcgatggtatcctgtgcatttttttttgaaagctcaaatagaagtctcacagttttagggagggattttttttagtctacaaaaagttattagtatgcctgtcctcttagtactgtactgcctagttactctcctttcaaaaaaaaaagcgtatatttattatatttccatggtaaactagcagctacaataatgtacacaactctattgagtagtatttattaaatgcatatacatatttgtgttcctaaaaatgcttgtacatwctaaaactgcaattttactgatagttgggaaatgaaagtgcaaaagaaattaatgacttgtgaagttctggtatttcattatgtcaagacaagattttttttttttttcctgagctgtagatctcatttgctgttggttgattaagaaaaaaatcttggccaggtgcgataggctaagtctgtagtcccagcactttgggaggctgaggtgagtggattgcttgagctcaggagttcgagaccagtctgggcaacgaggcgaaaccccatctacaaaaaaaaaaaaaaaaatagaaaaattagccaggcctgtacacccatagtccctcctactcaggaggctgaggtgggcggattgcttgagcctagaaggttgaggctgcagtgagccgagatctcaccactgcagtctaccctgggtgacagaatgagaccctgtttcaaaaaaaaaaaaaatcttttagataagttgttaaaataggtggcttagaagttggtgaattaaagagataatgtttgtgtgcaagtataaattattctcgataaaccagtgtaaacattttcccatttttgtataatatgcaataatttatgtctttattgacttgtattgtgggactttcatatcgccacaatgtgtgtgtgggtgtgtatatatatctttacagtttttgtaatatgcagatacaatttagactctcatataaacatgaccattagaattttttttttttttttgagatggagacttgctctgtcacccaggtgggaatgtagtggtgcaattttggttcactgcaatctctgcctcctggcttcaagcaattctcctgcttcagcctccctagtagctgggattacaggcatgcaccatcatgcccagctaatttttttatttttttttgtatttttagtagaggtggggtttcaccatgttggccaggctggtcttgaactcctgacctcagatgatccgcccacctcggcctcccaaactgctgggattacaggcgtgagccaccgcacttggcgaccattataatttttaaaaagcctgtttacataccaaataaaatcatcatgttggatgacacactagaagtgtttctttacaattttgaaataatctattttatagactaggtagttttcattagaatttgacattgacctagttgaattcatatgttagcatttcacacataaccatcttggattaatgagatccttgtttctgagctggtgtgtagtcctaccactcagtttatttcagctgtattcatagtttgatgcccgccatcctactttaacttcataatgttctgtttagattattaagtaatcaaagtggtcatattgagaaaactgaatacaattaataggtgtgaccccagtctcataaggggt

SEQ ID NO: 9771 - DNA, 1029 bp, Homo sapiens
tgagtcagctttgcaggtgtttgtgtcttatccctggggatgaaaaaagatgttctgacaccaataactctaacacaagtctggaaaacaatttggaatctgggttgcagaaggtagcagacactaatggagctccaagcccatttttctaagatccagagcaatttcttgctttctgcacctcttgcatttattgtaatgtactcccaagaaacctggccattagctctgtatctgcttaagaaacctccactttcagaatcttcaaggctggaaggagaatgcagcaccagtcaggtaccgtgacctgaaggttggcaccttcggaattttcccagccggatcccagccatgtctcttcaggaaacataggatttggaacctgacagcttgaatgggacattcaacgtttggattctgaagaattccaaacgttcttcaggaatattcgctatagataaaagttttattctgaataataagaatgtggaaggctgaccatattttacattaatattgtccaatatgtttatgttgaacttttcttctacacatgaaatctgaattgctctgactcattacctgcgaacatttcctttccactgtggggcacacagaagtaaccaggaggctgggcgccgtggctcacgcctgtaatcccagcactttgggaggctgagcaggcagatcacctgaggttgggagttcgagaccagcctgaccaacatggagaaaccccatccctactaaaaatacaaaattagccaggcgtgatggcgggtgcctgtaatcctagctacttgggaagctgaggcaggagaatcgcttgaacycgggaggtggaggttgcagtgagccgagatcacgccattgcactccagcagcctgggcaacaagagtgagactctgtctcaaaaaaaaaaaaaaaaaaaaaagtaaccaggacacagcacctaacattcctgggtgcaacactggattgttcttttctcgtttcagttatctgcattcgctgagccatttgctact

SEQ ID NO: 9772 - DNA, 1029 bp, Homo sapiens
tgagtcagctttgcaggtgtttgtgtcttatccctggggatgaaaaaagatgttctgacaccaataactctaacacaagtctggaaaacaatttggaatctgggttgcagaaggtagcagacactaatggagctccaagcccatttttctaagatccagagcaatttcttgctttctgcacctcttgcatttattgtaatgtactcccaagaaacctggccattagctctgtatctgcttaagaaacctccactttcagaatcttcaaggctggaaggagaatgcagcaccagtcaggtaccgtgacctgaaggttggcaccttcggaattttcccagccggatcccagccatgtctcttcaggaaacataggatttggaacctgacagcttgaatgggacattcaacgtttggattctgaagaattccaaacgttcttcaggaatattcgctatagataaaagttttattctgaataataagaatgtggaaggctgaccatattttacattaatattgtccaatatgtttatgttgaacttttcttctacacatgaaatctgaattgctctgactcattacctgcgaacatttcctttccactgtggggcacacagaagtaaccaggaggctgggcgccgtggctcacgcctgtaatcccagcactttgggaggctgagcaggcagatcacctgaggttgggagttcgagaccagcctgaccaacatggagaaaccccatccctactaaaaatacaaaattagccaggcgtgatggcgggtgcctgtaatcctagctacttgggaagctgaggcaggagaatcgcttgaacccgggaggtggaggttgcagtgagccgagatcacgccattgcactccagcagcctgggcaacaagagtgagactctgtctcaaaaaaaaaaaaaaaaaaaaaagtaaccaggacacagcacctaacattcctgggtgcaacactggatygttcttttctcgtttcagttatctgcattcgctgagccatttgctact

SEQ ID NO: 9773 - DNA, 555 bp, Homo sapiens
aatcaggctgtcctgtaagaatggctgctaggccaagtcaggcgctcccgtagacccttgcagactggcctggcaccagccacagggaatccactgcccggccctcaaagggaaggtggaccagcaacacagctcagctccttggcgccatcttccctcacaaaagagcggcactgtctgaaccctcagggccaaggagcagtaaaaggccgtaaaggcggagggaggagccgccataaactggaggcagagtccttagcaatttcctttctgataagggcttcaatggtttggaggagacctrctgtgattctctaatctgggctcacgtgccctggatgtttgaatccttgggtcagagtgcacaaagggaagatcaaggaggagaaaccgtcagaggggacaggaaaggacaggagggggcatccgacgaaggccaagaggcaagctacagaaggggccgtggaataacaccaaaagggtggctcgggcgaaggccacttcctgcacgccaggcccctgtgaagggatcacctcattcgctctcccacccaa

SEQ ID NO: 9774 - DNA, 594 bp, Homo sapiens
tagaccagaaaactgtggactctcaactttggtccaaaaaatcaaagcccttcctaattccaggaccacttagattctgtgtggccttgaaaatgaagtttatcttcacaagctagtgttctaaacctcctgtagagctcgaattaaaatatctaaaaataggctgggtgtggtgattcatgcctgtgatcccaacaatttgggaagccaaggcaggaggatgacttggggccaggagttcgaaaccagcctaggcaacatagtgagaccctagtctctatgaaaaatttaaaaattmgctaggcatggtggtttgtacctgttgtcccagctaatcaggaaggtgaagcaggagaatcacttgagccctgcaatttgaggttacagtgagctatgatcatgccactgcaacagagacatcatcacttaaaaaaaaaaaagaaagaaaaaaatacgtatctaaaacaacaataacaaacaaacacaaaccaaaacaaacaaaagccctgttgtttcaagggaacgtcttttttttttttcttgagacggagcctcgctctgtcacccaggctggagtgcactggcacaatctgg

SEQ ID NO: 9775 - DNA, 1370 bp, Homo sapiens
ttaggatgatatttgtaacagtggctcatggcagttgaggaatattttgcaatgttaaacaactcatattactcttaaattttatatatgaaggtcctgatattctggacattggccgtggatgagccttgaactctagaattgtgagtagttctgtttttgtaaaaatacataataggacttagtttttttaaaaatcacattaaagtttaaactttattataataaatttacttaaaatttggtaattgctaattataatttgtattttgtctttgwatttttatacataattttgaatattttagaaaaaagataacatatgatagctgggcactgcagccatccaacttagcctgcctcacccacacccatgtggtaccttcagccctggccaagctttgaggctctgtcactgagcaatggtgactgcacatgggcagctcttcctccatccccccagcctcagcccaaattcttacctgaaagcatcactgccctggcccctccctcccggctacccctgccacctctactgtctccccgccccgccccccgcccctcccccccgcccacatcctcaccccacccccctgtcccctggctaagcaggggagaagtgggctgggggtagcctggatgtggggcaagtccactgtcctccttgatggcaaaagcccattgaagaagaaccagtccagtctccccgtcttttcctggaatatttttggggttggaactcaaaaaggaaaaaattacatcaatcttttctcaaaaaaaaaaaaagaaggctgaggcagagcccaggagttcaagaccagtctggccaacatggtgaaaccttgtctctacaaaaaatacaaatttttgtatttagctggtgtgtggtggtgctgcctgtagtcccagctacttgggaggctgatgcatgagaatcgcttgaacctgggaggcagaggttgcagtgagctgagattgcaccactgcagcctgggcaacagagtgagactctgtctcaaaatagaaaaaagaagataacatttgaaaaccagtatgaaatttttaatttttcacatttaatataaattttggtgaactttaaattttaaacacttttttcttatatcaatgtttattttttaattgacatgaaaattatatgtatttatagtgtacactatgacgttttgatatatgtatacatgtggaatgattaaatcaagctaattaacatatccatcaccttacatccttatcatctttttgtgatgagaacttttaaaatctactgtcttggcaattttcaagtatcaatatgttattattaaacactttttatgctctaaataaattgaatttatttttaatcc

SEQ ID NO: 9776 - DNA, 559 bp, Homo sapiens
gaggcaacataatgagacaatatctccaaaaacaaagaaacaaacatataatctaagttatggtgctttatacatagggtactgaaaaactccctcagtgttgggtatctctgaaataaagaattagtataaacatctattgttttctatcttttgatattaaaagatagaattccaagcagccaatagaatactgaagtatcttttaatgaactaataaggattgatctttaaaatatatggtgaagtggctgggtgccgtggctcacgcctgtaatcctagcactctgggaggctgaggcaggcagatcgcttgagctcaggagttcaagaccagcctggacaacatggtgaaaccacatccctaccaaaaaaaaaaaaatacaaaaaattagctgggtgtcatggtgcatgcctgcagtcccagctacctgggtggctgaggtgcaaggatcatgtgagcccaagaggtccagactgcagtgagctgagatcaygccactgcacccaagcctgggtgacaaagtgagatcctgtctcaaaaaaaaaaaaaaaaaaa

SEQ ID NO: 9777 - DNA, 775 bp, Homo sapiens
tctttactttagagatgagggtctcactatgttgcccatgcttgtctggaacatctggcctcaggtgatccttctgcctcagcctctagagtagctgggattacaagtgtgagccactggcctggccaagttcacccttttgatatatacaattcaatggtttttagtatattaacataattacgcaattatcaaccactatcctattcgagaacattttcatcacctgagaaagaaacaccatatctgttaccagtcactttccattctcctctccctccagcccctgacaatattttctgttggtaccattgttttctgtggttccctaagatttcttgccctgctagataagatttttgattaaataaatgcaactcacagatatgttgaagagtactttaaggaaaatttacaggattctyatttgcaagctcctccttatgtagtatttcaacatcagggtttcttatgcttggggtctttagccattatccattgcaggtaatttttttttggcaaatatttatagtagctttattcataatcaccaataattgtaaaacaacccaaattttttttttttttttgagacagagtttcgctcttgttgcccaggctggagtgcaatggtgcaatctcggctcactgcaacctccacctcccaggttcaagtgattctcctgcttcagcctcccgagtagctgggattacaggcatgtgccactatgcctggctaatttggtatttttagtagagatgggggtttcaccat

SEQ ID NO: 9778 - DNA, 514 bp, Homo sapiens
ttattgagcatttactaggtgccagggcactgtgtcagacgctgagataacagcctgaataagacaaatcggcctctaatgtcataaagcttagatccaactaggcaagatagactttgcacagagacgcatttagccaattcagctaagggctgcagagatgaagtacaggcacagggtatgaatgtgtatacctggggatgacctatcctgctacaagtggggaatggtggtctctcaaccagaaagatcctcatcaaagtggaaagatctgtgtagagagacagaaatatgtctcctaattctgtgggattgcagggagsggggggtctggtcttgcagcttcacagtctgatcaatcagaggagaaagacaatcaaggggcaaggaggaaagggcagcagagagaggttgtccactctcaggaggcccatgtgggtcagaggagcagtttggacaccactctcatcttctccatgtcatatggccaactccaaagccagataccaaggtg

SEQ ID NO: 9779 - DNA, 927 bp, Homo sapiens
tacaagcttattgtctttttcagatttgaaacatatctgtattaatgaagagtgactgcatgcaaacgacaatatgtcaggaaagaaaaaaagatcccatagaaatgtttcattctggacagctggtaaaagtctgtgccccaatggttcgatattcaaagtaagtgttgcaaaatgattaatgaactaagatgaaatttcccttttatgctctgactttttaaaagtactgtaagaccacccaccatatgggaacttcaaactcttagctttggaatcatgacttagaattgagtcatgatgctactacttgcctagtatatatgtgatcctgagtaaacaattaacttctctgagctgcactttttatatctataaaaatggtggtggttgtaactcctacctataagtatataatggatattaaatagatataagtattgatgtatagatttttatgtgaacttaagtcttgggacaaataggagtgcaattatgggtcctaaggtagttgtgtgttcagttttcgaagaaatatttcttcgtatcttttgctcatcttctaattggattgtttgctcttttactattgagtttttttagaagtttgttataaaatatacgtaacataaaatttacctctcgaycatttttaagtatacagttcagcagtgttaattacattcacattgttgtgcatctgatctctaaaactcttttcatcttagaagatggaaattctatcacattaaactgtgactccccattccactgttcctcacagcagcccctggcaaccattattctactttctccctctatgaacttcactactctaggtacctcatataagtcttatacgtatttgttcagaactggatttattttgctaatattttatgcagcataacatcctcaaggttcatt

SEQ ID NO: 9780 - DNA, 927 bp, Homo sapiens
tacaagcttattgtctttttcagatttgaaacatatctgtattaatgaagagtgactgcatgcaaacgacaatatgtcaggaaagaaaaaaagatcccatagaaatgtttcattctggacagctggtaaaagtctgtgccccaatggttcgatattcaaagtaagtgttgcaaaatgattaatgaactaagatgaaatttcccttttatgctctgactttttaaaagtactgtaagaccacccaccatatgggaacttcaaactcttagctttggaatcatgacttagaattgagtcatgatgctactacttgcctagtatatatgtgatcctgagtaaacaattaacttctctgagctgcactttttatatctataaaaatggtggtggttgtaactcctacctataagtatataatggatattaaatagatataagtattgatgtatagatttttatgtgaacttaagtcttgggacaaataggagtgcaattatgggtcctaaggtagttgtgtgttcagttttcgaagaaatatttcttcgtatcttttgctcatcttctaattggattgtttgctcttttactattgagtttttttagaagtttgttataaaatatacgtaacataaaatttacctctcgatcatttttaagtatacagttcagcagtgttaattacattcacattgttgtgcatctgatctctaaaactcttttcatcttagaagatggaaattctatcacattaaactgtgactccccattccactgttccycacagcagcccctggcaaccattattctactttctccctctatgaacttcactactctaggtacctcatataagtcttatacgtatttgttcagaactggatttattttgctaatattttatgcagcataacatcctcaaggttcatt

SEQ ID NO: 9781 - DNA, 497 bp, Homo sapiens
gaacttcagtgtctgatggcttcattatatctttttaatacacattacaatgaatgtatagtctttaaaattaaaaagattttaaaaggtttgtccattaactttttttttttttttttttggagagagggtcttgctctgtcaccctggctggagtgcagtgatgcaatctcagcgcactgcaacctccacctcccgggctcaagtgatcctcccacctcagcctcctgagtagctggactatgcctggctaatttttaaatttttggtagagacaggcgttttaccatgttacccaggctggtctcaaactcctggcctcaaaccatcttcctgctttggcctcccaaagtgctgggatcacaggcgtgagccaccgcgcccagcccccgttttcttagtctataggtggagaaaacagttcacctccccgccacgtggcrtaagtgtgtttttgttctgtgttgagacagggtcttgctctgttactgaggctg

SEQ ID NO: 9782 - DNA, 545 bp, Homo sapiens
gaaaatactaacgccaggggaacccgcagcaggaagagtgctcagccctgcctctgctgggaatacaccagcccctgaaaccaagcacagtcacatgatgggcaggatgctccaggacagagaagcctcaccgccgagggcagcaatcacgcccccgggtttgcaatcatatctctgcagtgagtggcagtgcgccagctctctgccacctttctacaggtgacatctgataaaggtgaacaagggcctctctctgccaacttatctgcaggaaccaaacgggtttcctagggtctgacacctaagaaatggagaaacacatagactcatctggaaccaccgttaccaccaccatcaaacaatgccgaccaacagcaagatgtgccggcggaccatcctacagctcagcggccagataaaaaygaattccaggccgggtgtggtggctcacgcctgtcatcctagcacttttgggaggctgaggtgggagtatcacgaggtaaggagttcgagaccatcctggccaacacggtgaaaccccgtct

SEQ ID NO: 9783 - DNA, 505 bp, Homo sapiens
ttaattgttgacttacattgaaaaccatgtaaccttctyggtcttgtaaaatatctttgctatgatgataaagttaaattaacttgaaaattataaaatttagccagaagagataaataatactttcataattttgcctcccttttgtgagcacattattttctactacttattgttttaaggaaagaagcatattagttttttgtttttttttttttaagagtcagcgtctcactctgttgcccacactggagtgcagtggtgtgatcatagctcactgcagcctccacctcctggactcaagccatcctcccacctcagcctcctgagtaactgggactacaggtgcacgccaccacacctagctaattttttattttttctagaaatagggtctcactatgttgcccaggctggtcttgaactcctgggctcaagcgatcctcccatctcagcctcccaaagtgctggcattacaggcataagccaccatacctagcatagt

SEQ ID NO: 9784 - DNA, 505 bp, Homo sapiens
ttaattgttgacttacattgaaaaccatgtaaccttcttggtcttgtaaaatatctttgctatgatgataaagttaaattaacttgaaaattataaaatttagccagaagagataaataatactttcataattttgcctcccttttgtgagcacattattttctactacttattgttttaaggaaagaagcatattagttttttgtttktttttttttaagagtcagcgtctcactctgttgcccacactggagtgcagtggtgtgatcatagctcactgcagcctccacctcctggactcaagccatcctcccacctcagcctcctgagtaactgggactacaggtgcacgccaccacacctagctaattttttattttttctagaaatagggtctcactatgttgcccaggctggtcttgaactcctgggctcaagcgatcctcccatctcagcctcccaaagtgctggcattacaggcataagccaccatacctagcatagt

SEQ ID NO: 9785 - DNA, 505 bp, Homo sapiens
ttaattgttgacttacattgaaaaccatgtaaccttcttggtcttgtaaaatatctttgctatgatgataaagttaaattaacttgaaaattataaaatttagccagaagagataaataatactttcataattttgcctcccttttgtgagcacattattttctactacttattgttttaaggaaagaagcatattagttttttgtttttttttttttaagagtcagcrtctcactctgttgcccacactggagtgcagtggtgtgatcatagctcactgcagcctccacctcctggactcaagccatcctcccacctcagcctcctgagtaactgggactacaggtgcacgccaccacacctagctaattttttattttttctagaaatagggtctcactatgttgcccaggctggtcttgaactcctgggctcaagcgatcctcccatctcagcctcccaaagtgctggcattacaggcataagccaccatacctagcatagt

SEQ ID NO: 9786 - DNA, 556 bp, Homo sapiens
aggccacaccaacccacaccactcaaattcttgtgacactggtctgtacaatgctcctagccattcacctgtagacctgggtttttttttttttttttttttttaatttttttgagacagggtcttgctctgtctcctaggctggagtgcagtggtacaatcacagctcattgcagcctcgaacttctggactcaagcaatcctcccaccccaggctcctgataggtaggaccacaggagcatgccaccatgcccagctaatttttttttttttctgaggccgagtctcactctgttgcccaggctggagtgcagtggcatgatcttggctcattgcaacctctgcctcccgggttcaagtgattctcctgcctcagcctcccacgtagttgggatcacaggcacgtgccaccactccyggctaaattttgtatttttagtagagacagggatttaccattttggccaggctggtttcgaacttctgacctcaggtgatctgcccacctcggcctcccaaattgctgagattacaggcgtgaaccaccgcgcctgg

SEQ ID NO: 9787 - DNA, 549 bp, Homo sapiens
tcagggtcccaggagaaaacacatgctgtgcccagacaagacaggagctgggcttagaaagggccctgtttactcgaggtgtggcggggggtttagcaccacaaaggaaagggaagttgactcctacccatgtgacagggaagcttgtaccactcttacctacacggagagcccagtatgagaggagaggtaggtagaatggtctgcatggagagagctggggcatctgggcccaggtagctccaggacaactgtgccagcagctgctctacagtctcctccaggatctccatctactgagcccacctggaagctgcagggtggagctctagtgtccaaccaggtccatctcccagagtgctcggcagggcagaggagcatgggcagcagtctggaagagcaaaagaaatcgggcacaaaattcctaaggagacagtaagtttgccaaagggcacagacacgtcctaaattcatagcttgctagagttaagagcatyaacaacaataaaaatgctccttgcctgtaaatgggataatcatagaatgact

SEQ ID NO: 9788 - DNA, 552 bp, Homo sapiens
cttaatccacagatttactgtcaatagtttgtatcaaattgtgataacatatttgaagttaatatttcaaattaaagcaaaatcacaaatttatactttatattatgaatgagattcacaaaaggagcatgataatatattctgttgtcatcrcatacaaaataataacatatagagtatgaatcaataatttttcaaatacaaagctattacaattaggaatacaaagaaatcataattaggaatacttctacaatattaacacacaatagtggtaacacttgcaaaatgatggtggtggttttttttttttttttccccgacagagtcttgctcttgttgcccaggctggagtgcaatggcgtgattttggctcactgtaaactccacctcctgggttcaagcgattctcctgcctcagcctccctagtagctggtattacaggtgcctgccaccacacccagctaatttttgtatttttagtagagatgggggtttcaccatgttggccagcctggtcccgaactcctgaccttaggtgatccaccagc

SEQ ID NO: 9789 - DNA, 552 bp, Homo sapiens
cttaatccacagatttactgtcaatagtttgtatcaaattgtgataacatatttgaagttaatatttcaaattaaagcaaaatcacaaatttatactttatattatgaatgagattcacaaaaggagcatgataatatattctgttgtcatcgcatacaaaataataacatatagagtatgaatcaataatttttcaaatacaaagctattacaattaggaatacaaagaaatcataattaggaatacttctacaatattaacacacaatagtggtaacacttgcaaaatgatggyggtggttttttttttttttttccccgacagagtcttgctcttgttgcccaggctggagtgcaatggcgtgattttggctcactgtaaactccacctcctgggttcaagcgattctcctgcctcagcctccctagtagctggtattacaggtgcctgccaccacacccagctaatttttgtatttttagtagagatgggggtttcaccatgttggccagcctggtcccgaactcctgaccttaggtgatccaccagc

SEQ ID NO: 9790 - DNA, 1988 bp, Homo sapiens
atcccaccatcaaccacatgcagcttcagctcctgaagcttttcctgcaatgtgagttccccaaacggttaacaaatatcaaacacacttgcttagtatacgctggtttaacaaatatctatggtgcatccactaggtacaaagcactgtcccaggtgcaacaaccttggaaataaggtaagtgaccaccatgcttctgggaacccctcagtttgtaagtcttccttaccttccatgttctttgcctgcactctgcactgtttccacaagaacattgtttcaggattaacaaaggattcacctaagacactcctatggagtttcctcaggaaacttggaatgacatgtaaagccactgcaacaacactgaacgcactggccttgctgccaggaacactgtcaccatcgctggggacacagccaggccacatgccagggactatcacagacaccattaaatgtcaccatgccctgtgaaatgttacaagggtctctatttaactgagactcagagaagttaaatagccgggctccgggtcacccatgttgggagggtcagagggggcatmccaaagagcccatctacacacactttcccctgtactgccaacgtttttcataagctcaattcataaagacctttgacttcccaacttgaggcacatcgtgtaaaagcacacatgataccacccagctccaggctcacacacacatgtgcaagggggaatgtggcctctctaaatgccaggagcctttgatctgagggtatctccctcccatgccctgcacagtgctcccccagcttgcagcttaactgggcttccccatcagccccttcacacccccatgagccatgggctaggaggctgcaggtgccacctgcccccgctactggcaccacagcgctagcagtccgccttgctctccttgcagtgcctgccctctgcttcccactccctgatctactgtggctagtcccatcctccaccaggcactgattccctggacccccaactcacatggcctctcccgccctacggctccacacttggcttctcatggtttcctaccacagcaagtaggagggttagttttatgtcaacttggctgagccacagtacccaaatatttggtcaaaagccagtctagatgttgtgtggctgttttttaaatgagattaacattgaaatcagcagactttgagtaaagcagtccaccctccataatgtggtgggcttcatccaatcagttgaggccttagagaaaagactgaggtcccccaggaagaggaaactcttcctccaggctgcgtttggcctcaaaagtcaaaattgcaatatcaacccctctctgggtctccagactgccagtctgccctgcagatttcacactcgccagcctccgcaatcacatgagccaattccttaaaataaatctacacacacagacactcttcccataggctctgtttctctcagaaaccctgaatagtacagcaagaaaatgcttatcagactgtttgaacctgagttcttcaccagactgtatgacgcttgagggcaaggacatcatcttattcacttctgaaaccctaagccttagcaagtggacagacaataaacaggtgtcgagtgaatagaaagtagatgagttcagactcagtgtgctaagacatggcctttcctgggccattgccaaggctaataaaagaccctgagctggaatatttaatctccagacttagccctgagtatgcaagaatggatttttccagcacaaaggcctaacactgaccagtacctccataacccctacagccctgggctatggggatcctgaccctccctgctattccccaccctccactggggccagcttcccctctttggaagtgatgtcctctcagtctctctgcacttgcacacttaatgtgcacagtgtctgccagccagccagagagggcacgcaaactcactcacacactcaat

SEQ ID NO: 9791 - DNA, 1988 bp, Homo sapiens
atcccaccatcaaccacatgcagcttcagctcctgaagcttttcctgcaatgtgagttccccaaacggttaacaaatatcaaacacacttgcttagtatacgctggtttaacaaatatctatggtgcatccactaggtacaaagcactgtcccaggtgcaacaaccttggaaataaggtaagtgaccaccatgcttctgggaacccctcagtttgtaagtcttccttaccttccatgttctttgcctgcactctgcactgtttccacaagaacattgtttcaggattaacaaaggattcacctaagacactcctatggagtttcctcaggaaacttggaatgacatgtaaagccactgcaacaacactgaacgcactggccttgctgccaggaacactgtcaccatcgctggggacacagccaggccacatgccagggactatcacagacaccattaaatgtcaccatgccctgtgaaatgttacaagggtctctatttaactgagactcagagaagttaaatagccgggctccgggtcacccatgttgggagggtcagagggggcataccaaagagcccatctacacacactttcccctgtactgccaaygtttttcataagctcaattcataaagacctttgacttcccaacttgaggcacatcgtgtaaaagcacacatgataccacccagctccaggctcacacacacatgtgcaagggggaatgtggcctctctaaatgccaggagcctttgatctgagggtatctccctcccatgccctgcacagtgctcccccagcttgcagcttaactgggcttccccatcagccccttcacacccccatgagccatgggctaggaggctgcaggtgccacctgcccccgctactggcaccacagcgctagcagtccgccttgctctccttgcagtgcctgccctctgcttcccactccctgatctactgtggctagtcccatcctccaccaggcactgattccctggacccccaactcacatggcctctcccgccctacggctccacacttggcttctcatggtttcctaccacagcaagtaggagggttagttttatgtcaacttggctgagccacagtacccaaatatttggtcaaaagccagtctagatgttgtgtggctgttttttaaatgagattaacattgaaatcagcagactttgagtaaagcagtccaccctccataatgtggtgggcttcatccaatcagttgaggccttagagaaaagactgaggtcccccaggaagaggaaactcttcctccaggctgcgtttggcctcaaaagtcaaaattgcaatatcaacccctctctgggtctccagactgccagtctgccctgcagatttcacactcgccagcctccgcaatcacatgagccaattccttaaaataaatctacacacacagacactcttcccataggctctgtttctctcagaaaccctgaatagtacagcaagaaaatgcttatcagactgtttgaacctgagttcttcaccagactgtatgacgcttgagggcaaggacatcatcttattcacttctgaaaccctaagccttagcaagtggacagacaataaacaggtgtcgagtgaatagaaagtagatgagttcagactcagtgtgctaagacatggcctttcctgggccattgccaaggctaataaaagaccctgagctggaatatttaatctccagacttagccctgagtatgcaagaatggatttttccagcacaaaggcctaacactgaccagtacctccataacccctacagccctgggctatggggatcctgaccctccctgctattccccaccctccactggggccagcttcccctctttggaagtgatgtcctctcagtctctctgcacttgcacacttaatgtgcacagtgtctgccagccagccagagagggcacgcaaactcactcacacactcaat

SEQ ID NO: 9792 - DNA, 1988 bp, Homo sapiens
atcccaccatcaaccacatgcagcttcagctcctgaagcttttcctgcaatgtgagttccccaaacggttaacaaatatcaaacacacttgcttagtatacgctggtttaacaaatatctatggtgcatccactaggtacaaagcactgtcccaggtgcaacaaccttggaaataaggtaagtgaccaccatgcttctgggaacccctcagtttgtaagtcttccttaccttccatgttctttgcctgcactctgcactgtttccacaagaacattgtttcaggattaacaaaggattcacctaagacactcctatggagtttcctcaggaaacttggaatgacatgtaaagccactgcaacaacactgaacgcactggccttgctgccaggaacactgtcaccatcgctggggacacagccaggccacatgccagggactatcacagacaccattaaatgtcaccatgccctgtgaaatgttacaagggtctctatttaactgagactcagagaagttaaatagccgggctccgggtcacccatgttgggagggtcagagggggcataccaaagagcccatctacacacactttcccctgtactgccaacgtttttcataagctcaattcataaagacctttgacttcccaacttgaggcacatcgtgtaaaagcacacatgataccacccagctccaggctcacacacrcatgtgcaagggggaatgtggcctctctaaatgccaggagcctttgatctgagggtatctccctcccatgccctgcacagtgctcccccagcttgcagcttaactgggcttccccatcagccccttcacacccccatgagccatgggctaggaggctgcaggtgccacctgcccccgctactggcaccacagcgctagcagtccgccttgctctccttgcagtgcctgccctctgcttcccactccctgatctactgtggctagtcccatcctccaccaggcactgattccctggacccccaactcacatggcctctcccgccctacggctccacacttggcttctcatggtttcctaccacagcaagtaggagggttagttttatgtcaacttggctgagccacagtacccaaatatttggtcaaaagccagtctagatgttgtgtggctgttttttaaatgagattaacattgaaatcagcagactttgagtaaagcagtccaccctccataatgtggtgggcttcatccaatcagttgaggccttagagaaaagactgaggtcccccaggaagaggaaactcttcctccaggctgcgtttggcctcaaaagtcaaaattgcaatatcaacccctctctgggtctccagactgccagtctgccctgcagatttcacactcgccagcctccgcaatcacatgagccaattccttaaaataaatctacacacacagacactcttcccataggctctgtttctctcagaaaccctgaatagtacagcaagaaaatgcttatcagactgtttgaacctgagttcttcaccagactgtatgacgcttgagggcaaggacatcatcttattcacttctgaaaccctaagccttagcaagtggacagacaataaacaggtgtcgagtgaatagaaagtagatgagttcagactcagtgtgctaagacatggcctttcctgggccattgccaaggctaataaaagaccctgagctggaatatttaatctccagacttagccctgagtatgcaagaatggatttttccagcacaaaggcctaacactgaccagtacctccataacccctacagccctgggctatggggatcctgaccctccctgctattccccaccctccactggggccagcttcccctctttggaagtgatgtcctctcagtctctctgcacttgcacacttaatgtgcacagtgtctgccagccagccagagagggcacgcaaactcactcacacactcaat

SEQ ID NO: 9793 - DNA, 1988 bp, Homo sapiens
atcccaccatcaaccacatgcagcttcagctcctgaagcttttcctgcaatgtgagttccccaaacggttaacaaatatcaaacacacttgcttagtatacgctggtttaacaaatatctatggtgcatccactaggtacaaagcactgtcccaggtgcaacaaccttggaaataaggtaagtgaccaccatgcttctgggaacccctcagtttgtaagtcttccttaccttccatgttctttgcctgcactctgcactgtttccacaagaacattgtttcaggattaacaaaggattcacctaagacactcctatggagtttcctcaggaaacttggaatgacatgtaaagccactgcaacaacactgaacgcactggccttgctgccaggaacactgtcaccatcgctggggacacagccaggccacatgccagggactatcacagacaccattaaatgtcaccatgccctgtgaaatgttacaagggtctctatttaactgagactcagagaagttaaatagccgggctccgggtcacccatgttgggagggtcagagggggcataccaaagagcccatctacacacactttcccctgtactgccaacgtttttcataagctcaattcataaagacctttgacttcccaacttgaggcacatcgtgtaaaagcacacatgataccacccagctccaggctcacacacacatgtgcaagggggaatgtggcctctctaaatgccaggagcctttgatctgagggtatctccctcccatgccctgcacagtgctcccccagcttgcagctkaactgggcttccccatcagccccttcacacccccatgagccatgggctaggaggctgcaggtgccacctgcccccgctactggcaccacagcgctagcagtccgccttgctctccttgcagtgcctgccctctgcttcccactccctgatctactgtggctagtcccatcctccaccaggcactgattccctggacccccaactcacatggcctctcccgccctacggctccacacttggcttctcatggtttcctaccacagcaagtaggagggttagttttatgtcaacttggctgagccacagtacccaaatatttggtcaaaagccagtctagatgttgtgtggctgttttttaaatgagattaacattgaaatcagcagactttgagtaaagcagtccaccctccataatgtggtgggcttcatccaatcagttgaggccttagagaaaagactgaggtcccccaggaagaggaaactcttcctccaggctgcgtttggcctcaaaagtcaaaattgcaatatcaacccctctctgggtctccagactgccagtctgccctgcagatttcacactcgccagcctccgcaatcacatgagccaattccttaaaataaatctacacacacagacactcttcccataggctctgtttctctcagaaaccctgaatagtacagcaagaaaatgcttatcagactgtttgaacctgagttcttcaccagactgtatgacgcttgagggcaaggacatcatcttattcacttctgaaaccctaagccttagcaagtggacagacaataaacaggtgtcgagtgaatagaaagtagatgagttcagactcagtgtgctaagacatggcctttcctgggccattgccaaggctaataaaagaccctgagctggaatatttaatctccagacttagccctgagtatgcaagaatggatttttccagcacaaaggcctaacactgaccagtacctccataacccctacagccctgggctatggggatcctgaccctccctgctattccccaccctccactggggccagcttcccctctttggaagtgatgtcctctcagtctctctgcacttgcacacttaatgtgcacagtgtctgccagccagccagagagggcacgcaaactcactcacacactcaat

SEQ ID NO: 9794 - DNA, 541 bp, Homo sapiens
cactggatcgggtatatataatgtaaaaaagcaaggtgcagaactgtgtgtatgtgtgtgtagtgttcattgtgtaacgaagttagcataaacatgactattatatgtatttgcttatatttggraataaacccaaaggattttttttttatccaaaggattaaagatactgatttacatatattgttgaatgtggaatctaccatgaaagagatgtaaaactagaatcaacaagcatatgctttagaacatgtagttgagagaggtatctgggcaaagtgcctcttgggatgtctgctgagtccaattctcagtatttaaactgctggacacagatctaggtattccatagcctagttgtatcagatgtatggattgtgcatcatgaaatgaacatcctgtgttctgagaagctcagataacctcataagtcttctctttctttgtgtgtcgtattttctaggacctcatagttgaccagacgatagagaaagtttctttctgtgccccagacaggaactttgatagagccttttcttac

SEQ ID NO: 9795 - DNA, 536 bp, Homo sapiens
tgtcctgtggacataagaagctgatgatttttagtgttattgcacaaatgatttttatgtttctaagtcaagtaaaaggaaartagtcaaaagttggtgatggcatatttgtcttgagacataacacgtctgagtaaaatattatcagagtccatgttaaatacaaaatatgatggacagtgtactctcagaaatgagtagaaatccacttatgaagattatcagacacatatagaagaatactaaacacaagtattacaaactacgtgtcagtgggacttggatcaacttgctaaatatgaggtaagaagatattggccaaaatcttttttcctgaaggaactggtcaaatcatgataataaaccttccagagtataaaatacttactgtactctaaaagtatgtacactgatgcatggatgaattatggtgtccagtcaaatctaaataataatttgttaaccaatgccaaatattttatcttcatttcagccacttaaggatgcaattgaaattttcagtaaaaaaggaacac

SEQ ID NO: 9796 - DNA, 536 bp, Homo sapiens
tgtcctgtggacataagaagctgatgatttttagtgttattgcacaaatgatttttatgtttctaagtcaagtaaaaggaaaatagtcaaaagttggtgatggcatatttgtcttgagacataacacgtctgagtaaaatattatcagagtccatgttaaatacaaratatgatggacagtgtactctcagaaatgagtagaaatccacttatgaagattatcagacacatatagaagaatactaaacacaagtattacaaactacgtgtcagtgggacttggatcaacttgctaaatatgaggtaagaagatattggccaaaatcttttttcctgaaggaactggtcaaatcatgataataaaccttccagagtataaaatacttactgtactctaaaagtatgtacactgatgcatggatgaattatggtgtccagtcaaatctaaataataatttgttaaccaatgccaaatattttatcttcatttcagccacttaaggatgcaattgaaattttcagtaaaaaaggaacac

SEQ ID NO: 9797 - DNA, 657 bp, Homo sapiens
aacagggagagagaggcaaagatagagagggagagagaggagaaagttcccataaaagatgtgggaaatgccttgaggtgaataattttagaaatcacaaacacaaattaaatctgctatctcagccattgaatgagttgatccaattatgaaatcaaatatgcttgactgggttgattcagtcgtgaaatcaaataaagcttcagtttgtattagaatatgcagataatttgtaagataactagataagcatggttattaccttaaattttcagaccaaatcaaattcagaacaatgaaacactgcagtggtcataaccattaaggagtgttgaattaatttcattaacaatgttttcacttagaaattgtccatactactctattacatatactaataatagcaataatgactaacattatatttatattgttagttattaatatctcagttacgtaatattttgcatgggttcctttgagccttacaggaattgtgtgagttatttattttattttacttttttttgaaacagagtctcactctgtcrcccaggctggagttcagtggcatgatcatggctcactgaaacctgcacctcccgggttcaagcgattctcctgcttcaacctccccagtaactgagaccacgggca

SEQ ID NO: 9798 - DNA, 500 bp, Homo sapiens
ccccaattgagaaaaacgaactcaggaattttaaaaaattattactgttactaataatggtttatatttctttttatgggtttcaaagcatcttcatgtagtctatgtcattttaaactacctaagcacagtgtcacccttgaccattcatgctgctattattgttggattcatttttgtttgtgatgggaatttgcaagtctactttcccacatattcgtttccaggattgatcgttgtgaagcacttgcagtgctgagttatgaaagtatgttcaacggtgtcccctttacgttagcttttaaaaaggggtccactagcattcacagtcattgtgtycctccagatgtgtgctgctgtttgcccctgttgatgatgactcctgtatcccttttgtttgcagtgtctcagtttgaaactgaattctacatcagtggacttgcacctctctgtgatcagcttgttgtactttcgtatgtaaaggagatttcagaaaaaac

SEQ ID NO: 9799 - DNA, 560 bp, Homo sapiens
tttataaaactatataactttcagaataacccagtggagagaagtgttgtggcttccatcctgctcagtggaatgctggtgctgccattgcttagagctgaggttctcaagctctagggtgagtcatcgtcacctggcaggcttrttggaacccagatcgctgacccagtcagactccctagagtctctggttccaaacttccagggcaggaactgagaatgtatatttctaacaagttcccaggtaatgttgatgccactggttcaggggcccttcttttagaactgctagtctagggtaaaaacaaaatgaaaactaaccatcagcatttaaatttcaaggtagaagaaccatatacatgtctgggaaaaaaaatttataggtagcattcccttttctttagtgtttttctctgatatatggttctacatgcccaagtcatctcacatttcagtggaaacatacataatccctgccatctaattggaactgtgagtctttaaaagacataagcatttgtttatttctagttcttggcagatagatatatgtcttcatc

SEQ ID NO: 9800 - DNA, 788 bp, Homo sapiens
cagtttcaatgacacctactccaggacccctgatctgcctgaaaacttggtggctaaaagcaacatcacattgattttgctcacaaatctgcagtttggcaaggctcagaggggatggctcaagactgaggctggagccatctgacatctcactcacttgccggctggcttttgatggcctgctgcaaaggggcagagtcgcctccatttccacatattccttagccacacactaggctgccccagactggaggccacaaaagggcctctttctttccatgccttsggtttcttccagtgagcatgcatgatttctatattttaaaaggacagaaaataaaacataattctaatttccttttactttcatgtcaggtttacatctctaattgtaatgtcttcaaaccatggtatctgaacatcccatattttgcccactcatcttcccaggtaccatttctaattatttgataaaaatagtagagtgggctgggcatggtggctcacacctgtaatcccagcactttgggaggctgaggtgggtggatcacctgaggtcaggagttcgagaccagcctgaccaatatggtgaaaccctgtctctactaaaaatataaaaactagctgggcctggtggcatgtgcccgaagtcccagctactggggaggctgagacaggagaattgcttgaacccgggaagtggaggttatagtgagccaagattttgccactgtgcttccagcctgggtgacagtgagactctgtttcaaaagtaaaataaaataaaa

SEQ ID NO: 9801 - DNA, 758 bp, Homo sapiens
ccactgtgattgtctgctgggatatatgatgttgtccctgttacatcgcatctctctactcttaaaaaacatactgatgcatgtcattaaagtactttatttcttcattcagagaataaaaattactgagagggaaaatagctaggatcggtatttctaaaggaaaaaaaaaacctggagaaaggttattactaataaagcaaagagagacagaatgatctctttgaaaagcawtctattttagtatatatgacatagcaacaacttggaattttatggaaatgaaggcgctccctagccctattagataatgtcctcttggggttgcctaggtttgcgtggcagctgcagtttcttctcagactaataaaaagtggaaattaatgagagagtgactttagctggggtaggaaaagcaagctacactattctgtatactgctttggctagcctggggtggtgatgaggtagggatatatatacattgaggagagaggattttttttaaagctctattgaaaaactcttagatacattgctcctccaaagccacataataaaaagctctgagtttttttattaaacaacagagtagacattctgctttagagatttttgtttgtggactcatatacatggtgaccttttccacttccttcttatttttagcatccaattaccgttctctaaatgaatgcttaattcttcagtttggtattacccacagttttattcggctgctgctttaggcaataaaa

SEQ ID NO: 9802 - DNA, 611 bp, Homo sapiens
gcaagagatattggaaaatgtgtaatatgggggttatgatcaggtgaatagagcagtgattaaagggtaaagtatacattttaaactactcataacctgtagacacttaaaactccaaagagtggaggttcattcaaaagcctacgcaggctttgggcgggggtttcttaacactgttatcacttaaatgtcacttgtaaggacccacatttaataagctggaactcaaagttcattttcctgtgaggacattgtaacaagatgtgccacactaacaccctacagagtgcatttaagaaacacggtagcagggatgatcacagcatggtgtatagaacctgctttagggattaggcagagccaggaatcttcagaggagattctgatatctggcattatgtacggctccacttaggggcatcaaatcctacagttacagaaattccccattagatagttttcacaacaaacacgtayaatcaaagcaacatttcctaattatcaaggagaacactcagaagtggacagatgatatcttcaaattcataaagaagcacagccaacagaacagacaacagggcaatgattgagtttgcatcaggattgggctt

SEQ ID NO: 9803 - DNA, 523 bp, Homo sapiens
acccagtaatttttttttttttgagacagagtctcattctgtcaccaaagctgtagtgcactggcacaatcttggctcactgcaacctctgcctcctgggttcrcacccggctaatttttgtatttttagtaaagatgagttttcacagtgttggccaggcttgtctggaacttctggcctcaagtcatctgtctgcctcggcctcccaaagttctaggattacgggcatgagccaccacatccggcccataatttaagtaatttcttaatttctcagggtgaatcaatcctggtaaggttggggtcagcctctgcctaatgcttctcaggataccagatgtcctgctagtctgctacttcacctgcagggccttaatgttgattaatttgcaaatagaatgcacctagacaatttagtaatgactgtgttttctccttcctttgttaatgtatacagtaatggcaaccacctcaaacacttgttagatatgctaggataaaaaatatatagacgggaaaaaa

SEQ ID NO: 9804 - DNA, 523 bp, Homo sapiens
acccagtaatttttttttttttgagacagagtctcattctgtcaccaaagctgtagtgcactggcacaatcttggctcactgcaacctctgcctcctgggttcacacccggctaatttttgtatttttagtaaagatgagttttcacagtgttggccaggcttgtctggaacttctggcctcaagtcatctgtctgcctcggcctcccaaagtkctaggattacgggcatgagccaccacatccggcccataatttaagtaatttcttaatttctcagggtgaatcaatcctggtaaggttggggtcagcctctgcctaatgcttctcaggataccagatgtcctgctagtctgctacttcacctgcagggccttaatgttgattaatttgcaaatagaatgcacctagacaatttagtaatgactgtgttttctccttcctttgttaatgtatacagtaatggcaaccacctcaaacacttgttagatatgctaggataaaaaatatatagacgggaaaaaa

SEQ ID NO: 9805 - DNA, 548 bp, Homo sapiens
taatatgtactcctcttctcagaagaatgcaaatcttcataaacatccacatggagacagaaatggctaagatcaataacagtgtactttaaatagaggtcatcatcatagctctgaaaaccaagtagagtaatgcttgaatgtacaaggttccacctctgaatcaagtgataacattggaaaattaagtgagatggtgttcccattttaaagatgcaaacacagaggcttggagagtgcaagtgaggagctaaaggtcaccctgggcagtagtggtraggctgggagccatccccacagctacctctctatagaattttgagctgatgctcataggaaaaatcaccacagagttataaaaacacaagcatccccaggattaaaaacaaaaacaaaaataaaaccttttcttaaggattctgatatttaaaattatgtttcaggttatacatacacacacacacacacacacacacacacacacacacccctgtacccctacagtcagcccttcacatccacgggttctgcctctgtagattcaaaca

SEQ ID NO: 9806 - DNA, 547 bp, Homo sapiens
tccatatgtcatgggtggggggaccggatgaaaggtaattgaatcaagggggttggattttctcatgtttttctcataatagtgaataagtttcacgtgatctgatggtttcctaaaggggagtttgccttatcacgctctctcttgcctactgcaatgtaagacgtgacttttgccttctgccatgattgtgaggcatcccaggccatatggaactgtgaggccattaaacctctttttctttaaattacccagtcttgtgtatgtttttattagkaacatgagaacagactaacacagagtcttgggtcagtatattagacagacataaaaataagtgcatgctaacctagcaatggatccacaaaatacatgagggacaatcaaaaaagacaaacaattaattcaacaattttggtctgatatttcttcttttatcagtaacaggacaataagacacaatcatgaacaataaaggtatctggatcatgaagcagctgagctgtgactctctgtatttacagtctttctaaattttagggtggtt

SEQ ID NO: 9807 - DNA, 547 bp, Homo sapiens
tccatatgtcatgggtggggggaccggatgaaaggtaattgaatcaagggggttggattttctcatgtttttctcataatagtgaataagtttcacgtgatctgatggtttcctaaaggggagtttgccttatcacgctctctcttgcctactgcaatgtaagacgtgacttttgccttctgccatgattgtgaggcatcccaggccatatggaactgtgaggccattaaacctctttttctttaaattacccagtcttgtgtatgtttttattaggaacatgagaacagactaacacagagtcttgggtcagtatattagacagacataaaaataagtgcatgctaacctagcaatggatccacaaaatacatgagggasaatcaaaaaagacaaacaattaattcaacaattttggtctgatatttcttcttttatcagtaacaggacaataagacacaatcatgaacaataaaggtatctggatcatgaagcagctgagctgtgactctctgtatttacagtctttctaaattttagggtggtt

SEQ ID NO: 9808 - DNA, 535 bp, Homo sapiens
ttttaccataatgttgcttgaaaaatgccaaaataatacgttttaagtcatttcaaatcagaacataaaaagcaaatgcaaagatacagaagtgcacaagcccctttgaccccaatgcgacctcgaccccaaccccgaccttgaccctgaccccaacyttgaccccccgacccaacctcaaccctgaccctgacccaacccgacccaatccccatcttgaccctgaccccaaccttgacccccaacccgacctcaacctcaaccctgaccccaacccaacccagaccccatcccaaccttgaccctgaccccaaccttgactcccaacccgacctcaacctcaaccctgaccccaacctgaccccaacccaatcctgaccttgaccctgaccccaaacttgaccccaacccaacctcaacctcaaccctgactccaacccgacccgacccagacccaaccccgacctgacctcaaccgtgaccccaaccctgaccccgaccccgacctcgacctcaatcccaatctgaccctgac

SEQ ID NO: 9809 - DNA, 550 bp, Homo sapiens
acatacacacaattttttcacctttataaaaatagagcaactatatacaaaacaatatagtgcatatatctatatatttaatgggttttaaatttataaatgagagtttgaaatgatataaaacaagttcttaattgtggttatttctgtggaaaaaaagttgggtggaaggagagattttccttatatctttaaacagtcaaggagcatgtattactttgataataaaggaacatatattaacatatatatgttacataaatagaataaagagagagaccaccattaaaataaaactttaggaactttttaaaaatatgtggcttaaaacaaattagggagtaggtaaagatggaataacaaggtagaaaaattgccattgctcagatgaacaactgcattcaaatattgcataactaaagctataaatgtatatttctatgcytctctgtgtgtatatcacagttgttaatttctatccaatctgcttcccagttgtttctggaatccaccactgcctctccaccattactgtcattaccctagttga

SEQ ID NO: 9810 - DNA, 511 bp, Homo sapiens
acccaggctggagtgcagtggcacaatcacagctcactgcagccttaacctccctgggctcaggtgatcctctcacctgagtctcccaagtaactgggactataggcatgtgccactgctcccagctaatttttttattttttgtagagatgaggtttcatcatgttgccccgactggtctcaaactcctgacctcaagtgatccccccgcctaggtctcccaattgctgagattacaggtgtgagccatggtgcccggccaataagtttttcttaacctgttttatggcatgttgggggcctaggggagggaacaacttaaatttcttctctcagatctctgtarattgatgatggtctgaagatttttaggcaggtataactaatgtgtaaaaaatagtttctagtattctacaaatactgcaggaaaagtgccagaaagagactgtgaatttgctgtgttttattatgctaatgtagctgcaggcaaattctatttcaaactgaggcc

SEQ ID NO: 9811 - DNA, 640 bp, Homo sapiens
cagctctcatgggctggcatttagtacctccagcttttccaggctaatagtgcaaactgctggtggatctaccatgctggggtctggaggattatagccctgttctcacagttccactaggcagtgccccagtagaaactctgtgtgggggcttcatcctcatatttcccctctgctctgtactaatagaggttctctgtgagggcttcacccctgcagcaggcttctgcctggacatccaggctttctcaaacattctctgaaacctaggaagaggctctcaagccttaactcttacattctktgcacccacaggctgaacaccatgtggaagctgctaaggcttatggcttacattctttgaggcagtgacctgacatgtaactggatcccgtttagccatggttgaagttggatactccttgctcctcagattgcagacggcctattgtgggaccttgtgatcatgtgagttaatactccttaataagctcccctttatatatatatctatatatagatatatttatagatagatatacaaagacatatctttatatttatatcacataaaaatacatgctgtatctttatatcacataaaaatatatgctgtatctttatatcacataaaatatat

SEQ ID NO: 9812 - DNA, 642 bp, Homo sapiens
tgactaatttttgtgttttttttttttttttttttggtagagacaggatttgccatgttggccaggctggtctcgaactcctgacctcaggtgatctgcctgcctcggcctctcaatgtactgggattacaagcatgagcaccactcctggcctcatttcttatttaatttttttgttgttgttgtagagacagattctcgctatgttgcccaggctggtcttggacttctggcctcaaccgatccacccaccttggcctcccaaagtgctgggattacaggcatgagccactgagcccagccccattcttcttttaagatgtgatttcaagcataacaccagtatacccaatayacaggagaagaggctgtctgatcaatgctggctttgggggcaagagtcctttctgttcggcctctgccttcatcttgtctgaacagaaaaccctcagatctctggggaactcagtgtgaaaactttgaatccaggcgggggcccccaagaggcgatggccatgagggcagggggtgggtggggaggctgcgtgggctcacctgctccacgattccttccccttccagggcccggctgtagttctcgtggatgtactgctccttccagtcctgtgagagggtgggggg

SEQ ID NO: 9813 - DNA, 532 bp, Homo sapiens
aataaacagtaactgggccgggcacggtggctcgcacctgtaatcccagcacttttgggaggccgaggtgggcgcatcacttgaggtcaggagttgaagaccagcctgggcaacatggtgaaaccccaactctattaaaaatacaaaaattatccaggcgtggtggcgcacrcctgtaatcccagctactcaggaggctgaggagggagaattgcttcagcccgggaggtggaggctgcagtgagccaaggtcgtgacacactgcactccagcctgggtgacagggtgagattctgtctcaaaaaaaaaaaaaaaacagaatcattttggtagtccatgtgtcactatctctctaaggcagatatatacaactaaaagtaagatcacattgcctgtaaatggcaaagatgtcccacgcctctaggtttggaaaggaaatctttattattattattattattattattatcattattgagacagtctcactctgtcacccaggctggagtggaatggtgcgatttcggctcac

SEQ ID NO: 9814 - DNA, 532 bp, Homo sapiens
aataaacagtaactgggccgggcacggtggctcgcacctgtaatcccagcacttttgggaggccgaggtgggcgcatcacttgaggtcaggagttgaagaccagcctgggcaacatggtgaaaccccaactctattaaaaatacaaaaattatccaggcgtggtggcgcacgcctstaatcccagctactcaggaggctgaggagggagaattgcttcagcccgggaggtggaggctgcagtgagccaaggtcgtgacacactgcactccagcctgggtgacagggtgagattctgtctcaaaaaaaaaaaaaaaacagaatcattttggtagtccatgtgtcactatctctctaaggcagatatatacaactaaaagtaagatcacattgcctgtaaatggcaaagatgtcccacgcctctaggtttggaaaggaaatctttattattattattattattattattatcattattgagacagtctcactctgtcacccaggctggagtggaatggtgcgatttcggctcac

SEQ ID NO: 9815 - DNA, 532 bp, Homo sapiens
aataaacagtaactgggccgggcacggtggctcgcacctgtaatcccagcacttttgggaggccgaggtgggcgcatcacttgaggtcaggagttgaagaccagcctgggcaacatggtgaaaccccaactctattaaaaatacaaaaattatccaggcgtggtggcgcacgcctgtaatcccagctactcaggaggctgaggarggagaattgcttcagcccgggaggtggaggctgcagtgagccaaggtcgtgacacactgcactccagcctgggtgacagggtgagattctgtctcaaaaaaaaaaaaaaaacagaatcattttggtagtccatgtgtcactatctctctaaggcagatatatacaactaaaagtaagatcacattgcctgtaaatggcaaagatgtcccacgcctctaggtttggaaaggaaatctttattattattattattattattattatcattattgagacagtctcactctgtcacccaggctggagtggaatggtgcgatttcggctcac

SEQ ID NO: 9816 - DNA, 532 bp, Homo sapiens
aataaacagtaactgggccgggcacggtggctcgcacctgtaatcccagcacttttgggaggccgaggtgggcgcatcacttgaggtcaggagttgaagaccagcctgggcaacatggtgaaaccccaactctattaaaaatacaaaaattatccaggcgtggtggcgcacgcctgtaatcccagctactcaggaggctgaggagggagaattgcttcagcccgggaggtggaggctgcagtgagccaaggtcgygacacactgcactccagcctgggtgacagggtgagattctgtctcaaaaaaaaaaaaaaaacagaatcattttggtagtccatgtgtcactatctctctaaggcagatatatacaactaaaagtaagatcacattgcctgtaaatggcaaagatgtcccacgcctctaggtttggaaaggaaatctttattattattattattattattattatcattattgagacagtctcactctgtcacccaggctggagtggaatggtgcgatttcggctcac

SEQ ID NO: 9817 - DNA, 519 bp, Homo sapiens
cctcggccgcccaaagtgctgggattacaagcatgagcaaccacgcctggcctcctaactttcaactgcaaaaaccgcaattacatttgcaccaacctaataatttccatttaacatgcatagaaactaaaagttaaatttgctcaagactccagcgctacccaccagttgcagtggcacatgcctgcagtcctagctacgtggagactgaggcaggaggatcacttgagcmttgaagtttaaggatataatgcactatcatcacacctgtggatagtcactgcactccaccctcagcaacacactgagaccctgttgctaaggtaaaaaaaaaaaaaagatcccaaagctaaacagtttcacttacaaaagcagcaaaaagaataaaatatttacaaataaattcaaccaaggaagtacaaggcttgtacactgaaaactatagaacactgttgaaagaaatgaaagacctgaataaatggaaagatatcctgtgttcgtggatgggaagatttaata

SEQ ID NO: 9818 - DNA, 532 bp, Homo sapiens
tgtaatcccagctactcaggaggctgaggcaggagaattgcttgaagctgggaggcagaggttgcggtgagccgaggtcaygccattgcattccagcctgggcaactagagcaaaactccatctaaaaaaaaaaaaactttgcttatcgtataaaaataaaatatataccaaattttcaaattaaataacatttactaaagccaaaagcacaaaatgtttatttatgaaaaaaatcaaatgttatcttatttacaatttatagtatttttcttgaacttttcttaaaaataaatttggatattgatttgttgccacctactggttaaattcatatttgaatggcatttcacatcaaatattcactacagttaatagaaaacacagagaaaaaaagtaatgttcttttctttacaacgttttactaaactactatgataaattctgctttggaaaagtctgtaaagttacctcacaaaatggtggcttgacttttgacagtatcttcactcaaatttttctttagtgtgttgg

SEQ ID NO: 9819 - DNA, 532 bp, Homo sapiens
tgtaatcccagctactcaggaggctgaggcaggagaattgcttgaagctgggaggcagaggttgcggtgagccgaggtcatgccattgcattccagcctgggcaactagagcaaaactccatctaaaaaaaaaaaaactttgcttatcgtataaaaataaaatatataccaaattttcaaattaaataacatttactaaagccaaaagcacaaaatgtttatttatgaaaaaaatcaaatgttatcttatttacaatttatagtatttttcttgaacttttcttaaaaataaatttggatattgatttgttgccacctactggttaaattcatatttgaatggcatttcacatcaaatattcactacagttaatagaamacacagagaaaaaaagtaatgttcttttctttacaacgttttactaaactactatgataaattctgctttggaaaagtctgtaaagttacctcacaaaatggtggcttgacttttgacagtatcttcactcaaatttttctttagtgtgttgg

SEQ ID NO: 9820 - DNA, 522 bp, Homo sapiens
ataactgttgtatttttagtataaatggggttttgccatgttggccaggctggtctcgaactcaaccttttatccttttaatacatttggagaccctttgtctctcayagagcatctatagcaaattacttaagagcatgcatactggagccaggtggtgggcttaagtttaagctcaattgcttgctaataaggaaattctggacaatgttctaaaactctttgtggctcagtttcccaatttgttacatataagtaataataatagtgtccactttacaagcttgttatgaggattaaatgagatgatacatataaaacagtaagaaaaagtgcctggcaggcattacactgtcagtcagtttcagctatttgtgattactatgagctataagctagtctacatactatttcaggttgaaataatgaaggaaattattcatgcacaaaatcattcaacaaatatttgatgagtacctactggtactagactgtgtcattaattgagcagattagtgcaaa

SEQ ID NO: 9821 - DNA, 528 bp, Homo sapiens
gaaatcatggagatgttggataatttattagtcataaaataatttgccaaatttttaaatggctaacttgtacatatatatcatttaaaacatacacaatgcctgaacgttatgtttgcaactgggttatatttaattttatttttagtatcttctttcactttttccaatcctttgatgaatttaatccatttgcatttaaatgagattttctttgtatcacatagaatgaaagaaactatggggtgggggtgggtggagaaatagtagtgtctttcaagtataccgattayagtaggcaagatttaagcaagccagaaattccagattcagtccaaagacggtaaaaaaacaaacaaacaaacaacaacaaaaaaaaaaccaaaaaatgatatttaggcattcattcattcatttgatttattgatctagtaagtgactaaaaaggtgaaatacatttgactatatattgtgcctggaatatggtaggtgttcaataattatttattgactaactagatatcaatt

SEQ ID NO: 9822 - DNA, 528 bp, Homo sapiens
gaaatcatggagatgttggataatttattagtcataaaataatttgccaaatttttaaatggctaacttgtacatatatatcatttaaaacatacacaatgcctgaacgttatgtttgcaactgggttatatttaattttatttttagtatcttctttcactttttccaatcctttgatgaatttaatccatttgcatttaaatgagattttctttgtatcacatagaatgaaagaaactatggggtgggggtgggtggagaaatagtagtgtctttcaagtataccgattacagtaggcaagatttaagcaagccagaaattccagattcagtccaaagayggtaaaaaaacaaacaaacaaacaacaacaaaaaaaaaaccaaaaaatgatatttaggcattcattcattcatttgatttattgatctagtaagtgactaaaaaggtgaaatacatttgactatatattgtgcctggaatatggtaggtgttcaataattatttattgactaactagatatcaatt

SEQ ID NO: 9823 - DNA, 530 bp, Homo sapiens
tcctgagctgtaacatctctccataatatactgtgctatactttcctttggctgygaaaattatttcatacattttatcaaaatctataaaacagaaatttctggctttttttgtgagtgtcatctttcccaaagaaatctctatcacatagatatttctccaccaaagaaacatatatagccaagtcctaaacacttttacataatttgcacatcaaatgtgcatctatttttcccctggaaccattgatatataatatgaataatgagcatatatgtttagccataaaataaatgatttacttcccttcccattacttaataaaaagtgttagtaacagagtgagagtgaaccaaagcctaggtgccaccacgagtctaggaggaattcatggtaagtaaagaaaggcaacctggttagctcccacattcggactcaaggatctcagaagggtgaagcaccgcaaggtttctgggagtttctgtgggagctgcagaatctttgcttctgtttctgattgaaaaggtat

SEQ ID NO: 9824 - DNA, 523 bp, Homo sapiens
cttgttgccttgcaaaagcctaggtggaaggatggcttgagccaaggaggttgaggctgctgtgagccaggatcatgtcactgtactccagcctgggtgacagaatgagaccctatctcaaaaagaaaaagaaaaagaagagaaagagtagatacagtttgctgcacccttaggtgatctttttgagttgcaaatctggccctgtcacttgtataatctcaatgttagttatctgtaagttttagatattgaaaacattgtctcctagtaatctgaacagaaatgtgtaacaattttgccacacattaattcttctatattatcttaacagctttattttccatcctgagtctrttttttagtctaatgatattgagtagatacttaattatgtcagtctattatgtcagtttttaaactccaatgttcatcttttcttgatttatgctaccaactttattatgtattacattcttataagtagatgagtctgtttctgacgcttgccctctgttctgttcta

SEQ ID NO: 9825 - DNA, 523 bp, Homo sapiens
cttgttgccttgcaaaagcctaggtggaaggatggcttgagccaaggaggttgaggctgctgtgagccaggatcatgtcactgtactccagcctgggtgacagaatgagaccctatctcaaaaagaaaaagaaaaagaagagaaagagtagatacagtttgctgcacccttaggtgatctttttgagttgcaaatctggccctgtcacttgtataatctcaatgttagttatctgtaagttttagatattgaaaacattgtctcctagtaatctgaacagaaatgtgtaacaattttgccacacattaattcttctatattatcttaacagctttattttccatcctgagtctgttttttagtctaatgatattgagtagatacttaattatgtcagtctattatgtcagtttttaaactccaatgttcatcttttcttgatttatgctaccaactttattatgtattacattcttataagtagatgagtctgtttctgacgcttgcyctctgttctgttcta

SEQ ID NO: 9826 - DNA, 541 bp, Homo sapiens
tgactttatgcatatgtaagcacatctagwtagagtttatccacccccttccttttttcttgcttttctgaatgggtcttggagatttttcaatgtaagatctagagaccatccatattgtttactgttggttgataattttatggtattccattgtatgaagatactggtctttacttaatcagtcctgtattggtggaacttagtggacatttgttttgtttgttttttgcattaagaaaagctcctggcaggtttcagagacttaaatgacagctaaaaatctggtgggattacaggtttcagaagtgacaaggtttaaaatagatgaaattgttgggggagccctagcctcccttcctgcacaccctcttcaggtatctaggactcgaagtcttatcaaaacaggacacttattacctgctagtcacaacctatctatatgaacatatacattggcgtgggaagtttgtctgtgattgtgaaacaagattgtcttgctaaagacattctgaatatgtgaaggcaggagggagagata

SEQ ID NO: 9827 - DNA, 541 bp, Homo sapiens
tgactttatgcatatgtaagcacatctagatagagtttatccacccccttccttttttcttgcttttctgaatgggtcttggagatttttcaatgtaagatctagagaccatccatattgtttactgttggttgataattttatggtattccattgtatgaagatactggtctttacttaatcagtcctgtattggtggaacttagtggacatttgttttgtttgttttttgcattaagaaaagctcctggcaggtttcagagacttaaatgacagctaaaaatctggtgggattacaggtttcagaagtgacaaggtttaaaatagatgaaattgttgggggagccctagcctcccttcctgcacaccctcttcaggtatctaggactcgaagtcttatcaaaacaggacacttattacctgctagtcacaacctatctatatgaacatatacatyggcgtgggaagtttgtctgtgattgtgaaacaagattgtcttgctaaagacattctgaatatgtgaaggcaggagggagagata

SEQ ID NO: 9828 - DNA, 570 bp, Homo sapiens
aagctctcagcaaatactagctcttaaaagtatatctacaatgtgggtaatatgggtacaaaactagatatttatgttttagtctagttcctagaaccattcccaatcaaagttattcctagtaatattctttccttaaggtgggcatttcgtgttaccttttagccagtcttatgaaatttctatttcccagagcactaaaatagtcaactaattaattacttcagtatgtactattttttttccttttytgaaacagagtctccctctgtcacccaggctggagtgcagtggcatgatcctggctcactgcaacctctgccttccaggatcaagcgattcttgtgccccagcctcccaagtagctggaattacaggcgcatgccaccatgcctggctggtttttgtatttttagtagagaaaaggttcatcatattcgccaggctggtctcaaactcctggcctcaagtgatcctcctgcctcggcctcccaaagtgctaggattacaggcatgagccatcgtgcctggccagtacgtatttttgggattctactgtatttaaggtca

SEQ ID NO: 9829 - DNA, 570 bp, Homo sapiens
aagctctcagcaaatactagctcttaaaagtatatctacaatgtgggtaatatgggtacaaaactagatatttatgttttagtctagttcctagaaccattcccaatcaaagttattcctagtaatattctttccttaaggtgggcatttcgtgttaccttttagccagtcttatgaaatttctatttcccagagcactaaaatagtcaactaattaattacttcagtatgtactattttttttccttttctgaaacagagtctccctctgtcacccaggctggagtgcagtggcatgatcctggctcactgcaacctctgccttscaggatcaagcgattcttgtgccccagcctcccaagtagctggaattacaggcgcatgccaccatgcctggctggtttttgtatttttagtagagaaaaggttcatcatattcgccaggctggtctcaaactcctggcctcaagtgatcctcctgcctcggcctcccaaagtgctaggattacaggcatgagccatcgtgcctggccagtacgtatttttgggattctactgtatttaaggtca

SEQ ID NO: 9830 - DNA, 570 bp, Homo sapiens
aagctctcagcaaatactagctcttaaaagtatatctacaatgtgggtaatatgggtacaaaactagatatttatgttttagtctagttcctagaaccattcccaatcaaagttattcctagtaatattctttccttaaggtgggcatttcgtgttaccttttagccagtcttatgaaatttctatttcccagagcactaaaatagtcaactaattaattacttcagtatgtactattttttttccttttctgaaacagagtctccctctgtcacccaggctggagtgcagtggcatgatcctggctcactgcaacctctgccttccaggatcaagcgattcttgtgccccagcctcccaagtagctggaattacaggcgcatgccaccatgcctggctggtttttgtatttttagtagagaaaaggttcatcatattcgccaggctggtctcaaactcctggcctcaagtgatcctcctgcctcggcctcccaaagtgctaggattacaggcatgagccatcgtgcctggccagtacgtatttttgggrttctactgtatttaaggtca

SEQ ID NO: 9831 - DNA, 534 bp, Homo sapiens
cgggcggatcacgaggtcaggagatcgagaccatcctggctaacacggtgaaaccccgtctctactaaaaatacaaaaaattagccgggcgtggtggcaggcacctgtagtcccagctactcgggaggctgaggcaggagaatggcgtgaagcctggaggcggagcttgcagtgagccaagatcgcgccactgcactccagcctgggcaacagagcgagactccgtctaaaaacaaacaaacaaacaaaaaaccagatatttggatatgaagaatcacgcttaactttttatgtttgaccatacagaggascaattattaattcaactgggtttccattttccctacttaatgaaaaattcctaggtctcagtgaatctgactttgagaaaaatttgtggaatgtaaaatcagtaaacggaaacgcacgaacgtcgaatttcccatggaaaaatacagtaaaggctatgagcacaagcacactatagtttgttcccatcttcagttttacattcagaaaacaggtatagcttca

SEQ ID NO: 9832 - DNA, 527 bp, Homo sapiens
ttgtgcgtggcataaaatccagcctccaggctatggtccccatagcctctctctgccaggtgactggccccctgcctctctctgcatccccatctcatccctctccctccagcatcagtctccagtgtgctggccttccatattcttgatcttgcctcactcttgccactcaggctaatgtgcagctccttttaattctgtcagtccaccctgtttcctggccatgttaccacagtgagcacatgcctggctgtgtccttccccctgacacttcagctccttgaggcaggggacactatctctgtgcagtcaacagatgagtctgcagggcccccatggcacccagtgggtgctcagggaatattcgcccaagatgrcaagagtgtcgtggccaggcagcttgtgcacggcctgtggggaagaacggtgtggtggcgagtggcccaactgcagaggcaggcaggggcttcagtacatcacggaggggctcgcaactcacacggggaagcctacactgtcgcctgagg

SEQ ID NO: 9833 - DNA, 526 bp, Homo sapiens
ctttttatttttgccattttaaaatatttttaccctcttatgtcttcattttattaccttcttatgtattttatctattggcttttagatattccatttcggactcatttctttgatctaaaaaaaggtagtcaaatagttgggctaaagcatgaggcagccatcatccagaaactaaatgttccaattaccctgtgtctccctctcggattaattaataaatgagggtccagtcagagacatcacactaacacgatttcccaaacaatcgacccaacagatgtgggttagacacagagaggcgaatccaagtttggmcttccaatctcaactatgtgtttatggaacagaggaaatgctggtccttctttttgagtcctttgccaccagagaacatattttaacaagtagaatagtgtattttatttttttttttttggagaaatgacaattggaatcttggtttttcagattcgagtgatgtattatgtggattattcaggttgctgagcttcaaagcacagct

SEQ ID NO: 9834 - DNA, 566 bp, Homo sapiens
tggctccccagaactatgagaggataaatttctgttattttgtcacctagttcatggtattttttttttttttttttttttttgagacagagtttcactcgttgcccargctggagtgcaatggtgccatcttggcttaccgcaacctccacctcctgggttaaagtgattctcctgcctcagcctcccgagtagctgggattacaccatgccggctaatttttttttttaatttttattttatttttttagtagagacagggtttctccatgttggtcacgctggtcacgaactcctgatctcagaggattgacccaccttggcctcccaaactgctaggattacaggtgtgagctactgctcttgaccaatggtacattttaatctatcactcaactttacacaccatggaagcgtttaacccctgttctatgttctaggcaaaagacggaagcagtggagaagtttttacaacgtggtccttatatattgggacagtttattttagcccaatgtattagttcattctcgagctgctaatgaagacttacctgagtctgggtaa

SEQ ID NO: 9835 - DNA, 1293 bp, Homo sapiens
ggcacatagatggttccttttgctcttcctttgtgcttttctttccatccttactccccarcaaggagatgtctgcatcatagtacagagtggttctggcattctggtgagtttttgttcagaaggtaccccagtctaaggatgtgaagactccccatcccaggcttcaacggtgagaggcaaggacagcacatcttctccgctttggcttaacggtccattgtgactcctggggagcataaagagcattctaggagggactagaaatggatgcaaaggcagtggggtctaaacaaagggaggtgagtaggacaggcactttcataccagcagcaaatgctttatgtgttaaggagaaaccaggtctggatatcctgtttggccataaatctgattgcatttgttttggtaatgaactctgcttgaaccttcatacagagatttcagaggaaggggggaggatccagatgcatgtggtgggcatttctttcactgaccaaattcagtccgtcactaattcttggaccttctgctcatttacttgatgttgagtagacatgagacctgctttggccaatgaaacaggagcagaagtgatgtgtctcccttctatatagaagcatttaatcctggtactcaccttattaacttgatttatccctgctagagaaatatgttgacacagaggcatgtgaagtggaaggaggctggacagcgtggctggcaactacaaagagctgcccagtacacttggcagtgttcactggactttgacagagcaaaatgagcaggtgcccatgtgctgctgcactgagatttagggtgacttggggttatcacacatcttcttaagataccaattttttccccaaagtagggaaatagctgtactaactatattgtacacaggctagaaagcaaattctgcagtaatgtgtgctctaaagcaagagattcccaacagactttaagctgcttgtcaagcttggttcccacaccttcctggtccacagcatccctcatctgtttgtggaggaggtgctctggtgccaagtgctgggggccactgaaaaaccctgtggtgtgacatggcagggattactatgtctacttcacagatgcggaaactaaggctcaaacgtttaggtcaaaagactggccccaaatcattagctcaatgtgtgatggagatgagttttgaatagggcttgagacaccatggcatcatgatgaaaaagttatgtatcctggatttttgctagctgttcaccagtctcattacagtaaaaaaaa

SEQ ID NO: 9836 - DNA, 544 bp, Homo sapiens
ctccaacatgcaccaggtcttgtctttctttaagtgaattgcttgttggcagtgcctgtcaaggaagtcctcactcccactccagctagcgttgtttatattawgctaggcagcatttatggcacatgttttaataggcatagactcattaatttgaaatgtacctacattgggatgagtttatctttgtactaactaaaaaaaaaaaaaagagtttgctaagcatatttattgtcttaagattacagagcaatgtttaagcttcttatgagaagtaactctttcaaatacccttaagctcgttaaaaaaattactaggtcacttacaaatccatcctaccttttcactaagacaagtgactaaaggaccacctcccggcaactttattagtaatttattgtttgctctttgaattggcataaaactcccttcttaaatgtatttcactcccaggaacgcagggtaggtgagggtgggtgggcctatgatgggggtgttgtttggggaaggaaatggcttccttggttttggtgacgggattca

SEQ ID NO: 9837 - DNA, 545 bp, Homo sapiens
gggtcatgagagatacaaatggaaggataaaatgagctgcatgtgtttaaaggtggggctgtgcctggcagaggagctgattaagaggcataataagatgcgttaatttagagtaagtaatggaaggaactttgggagatgcctgttcacaggactgaaggcaagtgggactaaaagggtataatgagaggtgtaatgagagaagggaaggtggaatgctctcttgggtctcaggtgtgatgactcagacacacagaggcaagacagaaggagatgtctgatttgaaagggtggaggaccrgaagggcataatctgacaaggtgcaagggagcacaatgctggcaggcccaggagaggagggggatccacagagaggagcaatagaaggggccaggtactaggaatgaaaaccccaaggtgataattatcttctcagaaaagacagccgtgtcttggagtgtttgagccacagtttttgtaaagggtacagaggagccgcaactccttccttctgtcttgtctttggacaacagcagagaaaaca

SEQ ID NO: 9838 - DNA, 660 bp, Homo sapiens
tgccacagtcagagtagtgcctggaatatgcagtaagggctgaacaaacactaaataaatgaacaagtgaataaatggatattgtctcatttttagaacagagtactgaatggatcatgaacactatctggtatgtcacgtaggtaatttacaagggctacaatttcagctcagatttaccttttcctggatacagrtcttgataggtctcttgatgtcatttcacttcagattcttctttagaaaacttggacaacagcatttgctgtcttgtccaaattgttactaagaatcaagagagatatctgacatgaaatgacattggaaaacattaaacacgattgaaataatgctagccaatatggttattattagaaaccaattacattttcaacttaaaaacagtaatacttattgcagactcaaatgtgcttattctaaaacaagtaaatgtttgcctatggtctgagattctaatccacggagttcattctaatccacattcaacactatcatgtaccagtgggcctcataacccacctagccctgtgatttttcaggttcacttttctaaacttgtgaattaaatatttattttcttagttcagaagaggaaaaaaactcttgtaattgttgcccatttcaggagaaatcttgcat

SEQ ID NO: 9839 - DNA, 521 bp, Homo sapiens
caagtccttggcatctataagccaaggtaataccaagggatgctsttaaccaccgggagattagagagaggcataggacagatacttctcagagccgccaaaagaaaccaacgctgttgacaccttgattttgtatttccgccctcctgaactgtggaagaatacatttttgttgtttgaatcacccagtttttgataatttgccttggcagccctaggaaactgatacaaatacctaagagcatatatacttcagcatgaggacacttctgtgcaacgaggtggtgaaaagtaaagagaacgtcttttaaggtggatcagaaataccaacttctgagaaaaaagtcaaccaagggcaaatacagccatgtgtaaatatctgttagatataggtgttgagtacattggcatgttacttttttataccttttcctatttacctaatatttaaattttttaaaaaaaattaaaaatcatcaagcagtaacaagacatcataaacatatggtacaatatcaaac

SEQ ID NO: 9840 - DNA, 521 bp, Homo sapiens
caagtccttggcatctataagccaaggtaataccaagggatgctgttaaccaccgggagattagagagaggcataggacagatacttctcagagcckccaaaagaaaccaacgctgttgacaccttgattttgtatttccgccctcctgaactgtggaagaatacatttttgttgtttgaatcacccagtttttgataatttgccttggcagccctaggaaactgatacaaatacctaagagcatatatacttcagcatgaggacacttctgtgcaacgaggtggtgaaaagtaaagagaacgtcttttaaggtggatcagaaataccaacttctgagaaaaaagtcaaccaagggcaaatacagccatgtgtaaatatctgttagatataggtgttgagtacattggcatgttacttttttataccttttcctatttacctaatatttaaattttttaaaaaaaattaaaaatcatcaagcagtaacaagacatcataaacatatggtacaatatcaaac

SEQ ID NO: 9841 - DNA, 517 bp, Homo sapiens
cacgtaaaggtcgcacagttattttacatctctcctccctgccagcctaaaaaggctggcagataatcggaagcatgcatgctgccactgcattcaactgtgttttctccagggctgtccacattagttcctgatagtgcttatgttcttggtggatgaccataagccccaagtagatgaaaactgtcgctgtgtggtgtatggtgttttgggtatttggttcattagaatgaagaggtagaaagggctgtgtgttcaagatgaggctgctgaggctggtgggttttgaaatttacaaatgactctcaggtggagtcacatgatgctgcatgaagcagtggtgggcgggtgktgagagcagcttctcagttctgggactcatggggcaaatgaaagctttcactgtcatctgccataaatgagtgagtcccatggaagaagtgaactcaccatctcagaaaaagagtgaacaggggagagacatggcacctgtttattcattgatccattttttttt

SEQ ID NO: 9842 - DNA, 865 bp, Homo sapiens
tcacacaggctcttgtttggagtccaggaagaatcaggtcacacatggacttgaatgatgaatgtgggggttttactgaatggtggacgtggctctcaatgggatgggtggggaactggaagggggatggagtggaaagatgatcttcccctggagtttggccatccaccagctgatctctcccatcacctccagccgaactcaacattcagacactcctttccttctctccttctctactgtgcctttccgccatttttctgttcgtctcctcatctgctgctggagtctggggcctgaggttcatatgggtgyaggatagagggcatggcaggccaaaaggcaactttttgggtatgaaaacaggaatgcctgttcccatttagggccgtgggtttctaggcttgagagtagggcctttgccagggaactgccctcttctaccccgtattttcctgtcttctgtccgtatcattattacacatgaaaatgcaacaggttacattgctcctactaaataaaagttattaaattatgcttttagggcatacagagtttttctttatctcaatattgagtacaggtaagtttttatattacacaccctaaacagaatgatttacgtagttaatagtagttgctttaaaatgcaaaaacatgatccagaatgtaggagttaagttctgaagatggaagaaatggagcaggggaatattcctctaactgtccaccttttgtctcttatgtgaggaatgtgtttgttttaatgattaatgtaaagggtctgaaatatctgcatatttaaaaattattagaagcaataattacaagaaaaagtcaaatatttttctggtattaaaaaatc

SEQ ID NO: 9843 - DNA, 865 bp, Homo sapiens
tcacacaggctcttgtttggagtccaggaagaatcaggtcacacatggacttgaatgatgaatgtgggggttttactgaatggtggacgtggctctcaatgggatgggtggggaactggaagggggatggagtggaaagatgatcttcccctggagtttggccatccaccagctgatctctcccatcacctccagccgaactcaacattcagacactcctttccttctctccttctctactgtgcctttccgccatttttctgttcgtctcctcatctgctgctggagtctggggcctgaggttcatatgggtgtaggatagagggcatggcaggccaaaaggcaactttttgggtatgaaaacaggaatgcctgttcccatttagggccgtgggtttctaggcttgagagtagggcctttgccagggaactgccctcttctaccccgtattttcctgtcttctgtccgtatcattattacacatgaaaatgcaacaggttacattgctcctactaaataaaagttattaaattatgcttttagggcatacagaktttttctttatctcaatattgagtacaggtaagtttttatattacacaccctaaacagaatgatttacgtagttaatagtagttgctttaaaatgcaaaaacatgatccagaatgtaggagttaagttctgaagatggaagaaatggagcaggggaatattcctctaactgtccaccttttgtctcttatgtgaggaatgtgtttgttttaatgattaatgtaaagggtctgaaatatctgcatatttaaaaattattagaagcaataattacaagaaaaagtcaaatatttttctggtattaaaaaatc

SEQ ID NO: 9844 - DNA, 568 bp, Homo sapiens
caaaagactcggcaagctcgatcctggtgggcatcaagaagtcctgtcaaacagaaaaagcactgacrgggaatcaggtgtctgcagatgatcaacaaacagaaaaaactgctggcaataatcccagaggactggccatagattcttggcaaggcttgggattcctcggtcaaagcaaaaggtgctctgaccactgtctagggggttcagctgggtgtggcagacctgggttggctgctcccccagtagccatccctttctcttgtcttccagtagaaccctgatgtggcatgtgtccagtgccagggaaggtagtgattggtctaagccaataacggcaatctctttcccctatgccagaggcaggtgatgctgttcaagcaagcaggtcccaagaagaaaaccaccaggggcttctgggaaaaatgtcccctgctcaaacagaacagcacttggaatcccctctgtttatgctcacccccttaccgtaaagcacggtgccacatgaggtagtgacattatacttggcgtttcagtaaccttcttgcatccatgagggaagtcatcc

SEQ ID NO: 9845 - DNA, 561 bp, Homo sapiens
agtggtatttacaacatcaacagaatttcatctcatttcttatgctgagaaagtctagagaatattaaccctgaaatatatactgaatattcttgcaaataagtaacaaatttactaacccctaatttttctttctttgcaggaactccttagctattacaaaggaagtagaataaatgccattaatacaattaaaaaaaataagcagtatggtttacattcccatgtactctatggcttagagcagctcawtaagcccaatgtgacctccgtcttatttttgtaaataaagttttattggaacatagtgatgtccatccatttatgtattacaatagcttttttgcattacaatagcgaagttgggtagttgctacagagactgtatggccctcaaaagccctcaaatatttactatctagacctttactgtaaaagtttgctgacccctggtttagagtaatggttattcttttctctaaattgacagataatgttcattttgacaaggcccccacatctcgtacagtagtagaggactatcatatttccatagttcca

SEQ ID NO: 9846 - DNA, 520 bp, Homo sapiens
aaaattggcaaggcggaaaatttaaaggagacaaaaatcatcggaaaagtcccaagggccctaacaccaaatagctcattaatgcttggaaaaaagagcgagcgagtgttaatgtgagtcagcatgttgtgacttgtgaatgggactggcacaaaccttcgggattcgcctttgctgggttagtaaacagttaagaattcctttaggatcttgctgttgagagccaaaatattttgagcaaaatacatcacacatcactttcttccctgagtctattgcacatatcttttgggtgtcagtttctcaagatatcrtaacttagttcacagagtgcttccacacgtggccttgtaggaccctcccagtaagtaaccttctggagttgacggaagtattttaattttcacgtgagagaaattgaagatcagtgaagtgattggccagggtcaggctcatgggtgggagaccaggacttgaacgcaattctctgattctaactgcagtgctatttctgctctct

SEQ ID NO: 9847 - DNA, 534 bp, Homo sapiens
ccaagatgctatcctatagaagctcaaagttattttcctttgtattgtcacttctctaaaaatttactgttctttgttgaagatgctgtataagctggatttccaagctgcctctttcagaattattcattccctggtgcctcacatgtatatatgtaatatatgtattaataaatcttgtttgtttttctcttattattctgttttttgttagggggctgttccatctaagaacatatgggggttattcttcccctacactcttattcttccatatttgcatatatcaaaatctttgttcattgttgtggaattgatttttttctttcatgtatatcttccaagtttattaacaaacaataacaaagcttttctttcagctgatayttctgtccttaagaaatctaagacaaaagttaaagttagataaaggaagatttgctgtcatagtaagtgtggcagcatgatggggaaatcagagtttcttcctaagtaaaagtatggatgagcccctaaaatcccaaagaaaaagct

SEQ ID NO: 9848 - DNA, 580 bp, Homo sapiens
atttttcaattacatattttttgagacagggtctcgctttgttgcccaggctgcaatcagtgcagtggcgcgatctcagctcactgtagcctggaactcctgggctcaagtgaacctcctacctcagccaccgaatagctggaactacaggcgcgcaacaccttgtctaacctcaattatatttcttaccacatttataacaattatttgcttgcatgtctgtctgtcctaccggctatgtgaggaaatgagacctgacttcagcacagggcctggcacacagaaaggactcactgaaagaatacccttccgtggcacagaaggaggactatgacatacaaatccaggtcacattcaggtcaggakccacacaccaaagacactgatatatctatatcataccattctaattaactagatcctaaaattcaaaggtacaccaaggctgggcctggtggtatgcacctgtaatcccagcactttggaagcccaaggcaggaggattgctagagcccaggagtttgagactagcctgggcaacatagtaagacctcaatgctatgaaaaagaaaaagtaaaa

SEQ ID NO: 9849 - DNA, 964 bp, Homo sapiens
agagctgcaggagaggctgcggcacctccaggtatggtcgcccgaagcacagcgcaacatctccctgcaggacatctgctacgcccccctcaatccggacaataccagtctctacgactgctgcatcaacagcctcctgcagtatttccagaacaaccgcacgctcctgctgctcacagccaaccagacactgatrgggcagacctcccaagtcgactggaaggaccattttctgtactgtgccaagtgagtccatggtggggcccaagcgaggagtgggctggggctggggctgggctgccatggcctcctgggaacctggccgggcatacagctggtcctgaaggaccagaggtagctattcctacggctctggcctggggccgcccagatgattatctctgcccctcgtccggccgccatttcctttggtcagagttcctgctcatggctgcaggtttgtgcgtggccatcgctggcccttcaaccccgagtccactctgtctttctgcagatttcttgacatgtgggagctccctgccacactcttgctttaagtctgacagaggagcccgattggcagagtacatatttatatttgctatgttttgcttcttgtttctgtgccaggggccgtagggccatcagtaacccatgaggtaccatggtatgcattggaaaaggtgccctcaggccagaggtcgtggctggtctcaggcacctgggccgggtgtcctggggtaggccacagccacacacacttctattgattggggttcggtctttggttctgtccactctggtgtgctgccaacaagatgccaacaacgctgctgggccaagggggccaagagccaagggcagcagcagggccttggcagtggaggctccttgaggttggagtagagcagaggtcctcaagatgaacgtttagtactccatactccagagcaaatgagagtta

SEQ ID NO: 9850 - DNA, 634 bp, Homo sapiens
tagaccccaaatttgacaagacttgtcaaatcttgtcatggagatgaatttatcacattaaaagtattgtgctaggtagtggaaatacaaaataaaattacaaagacacccatccaaccatayagccacttgctctgtaagaagaaaacaagacaagggaataattatgtatcacatggattgcagtccaggagcacatacatttctaagataaattgctgtgcaagttgaacaggacaataatttattatagaagacattttagaaaatgaatgaaattgttgagggatatctcactgtatatttctgtcctgaaataccagctattggtattgttggtattttactttttagtaaaaatgtagaagaaaattttttttctttcttgtctcatttattaccctcaattgtgtacgatataattgtgaaaacagaagtgaatcctttattgagtgctattctattccaactgacccctcaagtgtcatagaaagaataatatgtgtgaacataacccaattttagaagcaagaaactgacccacatttataagcaaaaatacttttattccccgtaagtactcctccacatcagaattcaggaacatgacatgttctctgttaccagtagatgg

SEQ ID NO: 9851 - DNA, 666 bp, Homo sapiens
catgaggtcatactgcattagagtgggtcataaattgaatgactagtgtccttataagaagaggaaaatttggacacagagacaagcaggagataatagggaagaagaccatgtaacagcggggcagagattggagtaatgcggctggaagccacgcaacaccaaggagtgccagcaaacaccagacrctggggagaggcaagggagggctcatccccagagccttcagatggcctatgaccctactacaccttgattttacacttctagcctgcaggtgtgccagggagtaactttatgttgtttaagccactttgtttgtgaaactctgtgacagcagccctagggaactcacacaaaaggatattaggtaattaataataaaccatactaattctaaccatttttagataagaatccatgagtaatcactctgtatttgtagataatgacaccggtgaaatctgtaatgcatctgcagaaaacacaaggcgttgataggcctccttcacaagcctgctatacagaattccttcacttttcatggtaatataatgacatatataggttatataggttcattaaggatctgtcatactatacaatggagcataagtgggaaaactaaagttttaatgtgctgtgtcggaaaagttgcaattaaaa

SEQ ID NO: 9852 - DNA, 666 bp, Homo sapiens
catgaggtcatactgcattagagtgggtcataaattgaatgactagtgtccttataagaagaggaaaatttggacacagagacaagcaggagataatagggaagaagaccatgtaacagcggggcagagattggagtaatgcggctggaagccacgcaacaccaaggagtgccagcaaacaccagacgctggggagaggcaagggagggctcatccccagagccttcagatggcctatgaccctactacaccttgattttacacttctagcctgcaggtgtgccagggagtaactttatgttgtttaagccactttgtttgtgaaactctgtgacagcagccctagggaactcacacaaaaggatattaggtaattaataataaaccatactaattctaaccatttttagataagaatccatgagtaatcactctgtatttgtagataatgacaccggtgaaatctgtaatgcatctgcagaaaacacaaggcgttgataggcctccttcacmagcctgctatacagaattccttcacttttcatggtaatataatgacatatataggttatataggttcattaaggatctgtcatactatacaatggagcataagtgggaaaactaaagttttaatgtgctgtgtcggaaaagttgcaattaaaa

SEQ ID NO: 9853 - DNA, 666 bp, Homo sapiens
catgaggtcatactgcattagagtgggtcataaattgaatgactagtgtccttataagaagaggaaaatttggacacagagacaagcaggagataatagggaagaagaccatgtaacagcggggcagagattggagtaatgcggctggaagccacgcaacaccaaggagtgccagcaaacaccagacgctggggagaggcaagggagggctcatccccagagccttcagatggcctatgaccctactacaccttgattttacacttctagcctgcaggtgtgccagggagtaactttatgttgtttaagccactttgtttgtgaaactctgtgacagcagccctagggaactcacacaaaaggatattaggtaattaataataaaccatactaattctaaccatttttagataagaatccatgagtaatcactctgtatttgtagataatgacaccggtgaaatctgtaatgcatctgcagaaaacacaaggcgttgataggcctccttcacaagcctgctatacagaattccttcacttttcatggtaatataatgacatatataggttatataggttcattaaggatctgtcatactatacaatgkagcataagtgggaaaactaaagttttaatgtgctgtgtcggaaaagttgcaattaaaa

SEQ ID NO: 9854 - DNA, 585 bp, Homo sapiens
caagttcttgtcctgtgttcaaggagaatgaggttgtgctgacaattgaagggtgaggagggcggagaagaattttatggagtgatgaaacagctctcagcagagggtgggtgcgagggtggtcccccacccaaagtgagctggtctctccgtcagtgtggctaggtctggggcttttatgggctcagaatggggagggggtgctgattgtgagtatgcaaaaaaggctaaaacaaaggcaccactcaaaggcatggcagtgtaaaaaaaaaaaaaaaaaacagggaaggttaggtatatgtaaatagaggaaaacatgccaaacgggaaaaggggttctcaatcctgtctgtggatttacccgagacttgtagctaggctttaaactgtcctcggcttgaacatcaggtttcgttggggcccgcgccagtctgcctaagattgyctgcctcctgccactgtcagatggccccagtaatggtaaatatcccgcagggaccatggtggtgccactcatgtaaatattgtcccctcaaaatgccagcagacccttttgacgaacattgacgtgatttttctaaagaa

SEQ ID NO: 9855 - DNA, 585 bp, Homo sapiens
caagttcttgtcctgtgttcaaggagaatgaggttgtgctgacaattgaagggtgaggagggcggagaagaattttatggagtgatgaaacagctctcagcagagggtgggtgcgagggtggtcccccacccaaagtgagctggtctctccgtcagtgtggctaggtctggggcttttatgggctcagaatggggagggggtgctgattgtgagtatgcaaaaaaggctaaaacaaaggcaccactcaaaggcatggcagtgtaaaaaaaaaaaaaaaaaacagggaaggttaggtatatgtaaatagaggaaaacatgccaaacgggaaaaggggttctcaatcctgtctgtggatttacccgagacttgtagctaggctttaaactgtcctcggcttgaacatcaggtttcgttggggcccgcgccagtctgcctaagattgtctgcctcctgccactgtcagatggccccagtaatggtaaatatcccgcagggaccatggtggtgccactcawgtaaatattgtcccctcaaaatgccagcagacccttttgacgaacattgacgtgatttttctaaagaa

SEQ ID NO: 9856 - DNA, 585 bp, Homo sapiens
caagttcttgtcctgtgttcaaggagaatgaggttgtgctgacaattgaagggtgaggagggcggagaagaattttatggagtgatgaaacagctctcagcagagggtgggtgcgagggtggtcccccacccaaagtgagctggtctctccgtcagtgtggctaggtctggggcttttatgggctcagaatggggagggggtgctgattgtgagtatgcaaaaaaggctaaaacaaaggcaccactcaaaggcatggcagtgtaaaaaaaaaaaaaaaaaacagggaaggttaggtatatgtaaatagaggaaaacatgccaaacgggaaaaggggttctcaatcctgtctgtggatttacccgagacttgtagctaggctttaaactgtcctcggcttgaacatcaggtttcgttggggcccgcgccagtctgcctaagattgtctgcctcctgccactgtcagatggccccagtaatggtaaatatcccgcagggaccatggtggtgccactcatgtaaatattgtcccctcaaaatgccagcagaccctttygacgaacattgacgtgatttttctaaagaa

SEQ ID NO: 9857 - DNA, 498 bp, Homo sapiens
aaccatcatctgtctaaaatatttatatatgtggatttatgtatatatgtgtacgtatacatatatgtaaaatctaatgtaataattgaaacatttacattattctttattttccctcaaatttatactcccattccactttctgcaaaaatttttgtcccaatgtaatgtaattttatgtttgcaggatttttattgatcaccctatcatactcctgtacaacaaaaattatttataaattaattttttatataaccaaaggctttaagtattaatcttttctrttgagttatattataaatattatcatatgattgatcaaaatgatataaacgattacaaatttttgcagataattattgaattattattattaatttataatagtaaggttgtttcttagcagctgtggaagatttacactttagggggcaatgaccatgagagggctgttttgtaacatggaaggctggcgaatgggagagggagagaggaag

SEQ ID NO: 9858 - DNA, 536 bp, Homo sapiens
gtcacccaggctggagtgcagtggtgcaacctgccttccaagttcaagtgattttcatacctcagcctcccgagtagctgtgattacaggtgtgtgccactatgcctggctaatttttgtatttttcgtagagatggggttttgccatrttgtccaggatggtctcgaactcctggcttcaagtgagctgcccatgtcagcctcccaaagtgttgggattacagacattagccacaacacccaggctaaaatctatgttatttaaacaattgcaactgagagggaaattattccttaaaattgcctgttatgacataaatattaccttaatagttaagtgcctttcaaccttgagaagactgagaattcagtgatttctagtgtttgaatgtatcccccaaaaagcatgtgctggaaacttaatcttcaatgtaacagtgttgggatgtggggcctaatgggaggtgtttagatcatgatagtgccaccctcatgaatggattaatgccaattatgagagggcttgaggctgtgag

SEQ ID NO: 9859 - DNA, 455 bp, Homo sapiens
cctttggattatccaatcattaatctaataaatttttttcttgaatgcctgcatctacaaagcacaaaaagatcatagttaacaattttatgatctaggtgggacacaatctgtgaacttgaaaagataattaacaatatgatattgaatttgatcattggcagataagctgtctaggcacatgatgtataggaatttggggggagaaaaacagtttcagctgaagtgatatgggatggcttacaatctaaacctcttttctgagatcttggtcatttggatctggcagttgtttaaccactggctcaaacttctgtctaacagtcaacccagtcacttaaacaatacaygtttaattatcactcatgcatgtagtgcttggtttccatttgagcttttacaggagatcacaggcttagaagacagccttagcttgaatacaatctcatgagaaa

SEQ ID NO: 9860 - DNA, 519 bp, Homo sapiens
attgctttaaaccactaagtgttgggacaatttgttatgcagaaaaccaaagtgttggggcaatttgttatgcagaaaaccaaaacatatagtatacccatttatgaaactttaaagtatttatttactactttttgaaaaagattagtcattctgtactacagaaaactataacaataatttgctgcctgtatttgtatagcctgcaaggtaagcaaggcttttacactataacatggckggaaaaaatcaaaagaagaatattattttgtgagctatgtgagaaatttatacaaaattcgaattttagtatccacaaataaagtttgattggaatacaggcatgctcattcatttatagcttgtccacagctgctttgtcatgagagcagtagagttccatggtggtatcagaggccatatggaccacagcacctaaaatatttactgtctggccctttccaggaaaagttcaccaactcccttctctagaccattaaatatgtatcatcattttga

SEQ ID NO: 9861 - DNA, 532 bp, Homo sapiens
agcatgtgcctgttagtttaaaaacagacctaaaaataaatttgcttacatttcacctagaggaaaatatacttcgaatactttagaaaataatgttactataatcaacattttaaaataattaacatagtatatttagctagcatcaggcatatcgatgggcattcatattgtttccagttattttgctataaaaataatgctgaaataaacattcttgaacatataactttgttgtacttttgcacatgtgyatatagaacaaattcctagcttggaattgttggctcaaaatagcattatttctaagagcacataaagcaatgaactacaaacagcaaggaaaccgtttgttgtttaattatatgagtggcagaaattgaccaagttataattattagagtaaaaataaaattataccaagtcactaggctgcactgtgggtttcatacaatctgtgcttgtacaatcatatatatttatatattatttgcaaaacagtgggcatcagtatatacatatttagaaataa

SEQ ID NO: 9862 - DNA, 1376 bp, Homo sapiens
tcactgctatcaaacactatgccacattgaaagagatccagattaagaaatttccggcattccttctccctttaaaattagattattctacttatctgaattcttyagtagccactatacttctatataattcttaccttccaaacctatgaaggaagcacttgtgtaatctttggtattgcttacttttcctacaaaaccagatattctcattgttttcctgtttgttgattctaccctctaactggtcattttttatctttagaccttgccactgaatatgttgactacctttaatgtaggaaatattacaaaatacattacagtttgaatcagacaaaaaccacttcaaacacatgaagcagaaactaaaatctatatgacacaagcaagcatgatgacatatttatttgcaaaattattgaagagtgggtacaacatccatgcagccacctagacctgtgatgtctaatatagtagctataagccacatgttcctatatatattcaaaattaaattaattaaaactaaactttctctgttgtgttgtaatcacatatgagtggctggtggctcccacagtagataatgcagatacagaatatgtccatcattgcagaaagctatattagataatgttgatctagtctaagatgattggtgtaaatgtactctaaatgtgattatgggcaaagcaagataacgactattaaaggcataattttaaaagatactgaaaagttatctgtatgttggtggcactttagtttgaaacccccctttctttctactagtattttgcagtagtatattatgaacaaggataacacgaccttgattactttgtcttttgaacataaggtaacaatgactgaagatagctccttgttcagagagtatgccaagcacataccacagacacaagcccagagaaaatggttaaagaaaagtgttttaaaatagttctaacaaaacacctgtctactaaggaatgtgaagcaatctatagagtcaagtatagagtctgtgggaatttggtgagtctttgtccattacataataaaaatgacctaattgaaagcaactgacaggacttcagtgcacattatagacttaatgtaaaggttttatttttattaattcatcattgattaaccactaaaaggagtctaatggttactcagtcaaatcatagtctcaaccactcacccgggactttgccacactcccaggaaatctgttgcagaatttgtggtgagaccacaaagcaacatccaggaaaatgacagtaacagttaaagtacatcatcacagggtaggaattgtcatgtgtgtaaaaatagcagggttatttttttcctgtagaaatatgcca

SEQ ID NO: 9863 - DNA, 915 bp, Homo sapiens
tgcaccaggtgtcttgagcttccattccaaatgagaaataagaaagaaagtctcaatagaattctattttaatccaattaaggcaagacacactatttcattccacaaccttttttaagagactatgatgtccaaattacctgcttcctacatccagaagaaaaatgtagactgataaaatcaatataaatcgaatcattttccactgtcacctgaatattaatcacttcagtagatagcaccttatttttattagataagtttttattacaaacatttacttaaataaaaaagggtattctctctccaaaattgaagataataatgytttcattttccagtaatgaaagtttatcttcctatgaattactcaattactatttttatttatttatttacttatttttatttttttgagacggagtcttgctctttcgcgcaggctggagtgcagtggcatggtctcagctcactgcatcctctgcctcccgagttcaagcaattctccctgcctcagcctctggagtagctgggattacaggcacctgccaccacacccagctaatttttgtatttttagtaaacacggggtttcaccctgttggccaggctgatcttgaactcctgacctcagctcccacctcggcctcccaaagtgctgagattactggcatgagccactgcatctgacctcagttattattttcaatgaaatgtttcaacctctagcaacatggtgtaacaaaaattccaaccaacatacctgctacactacaacaatatcttggatatttgaagaagcataatataaagaaagaaacgaagcatagaaataaaaaagaaatataaagaaagaaagaaagaaagaaagaaagaaagaaagaaagaaagaaagaaagaaagaacgaacagaaa

SEQ ID NO: 9864 - DNA, 553 bp, Homo sapiens
acttactattacgggaacagcatgggaaagacccgcccccatgattcaattacctcccaccacatccctcccacaacacgtgggaattatgggagctacaattcaagatgagatttgggtgaggacacagccaaaccacatcagcctactagatattgagctggacaactggagtttactaggggaaggcaaactaatttataaatgccctagaaaaattccttggaaaaaawaatttgaaatgcagactaaaattatatactcatataacttgcacgtggactaaacacataaatgcaaaagacaaagcttagaatcatggagaatgaaataaattatgtgtataacctcaggttagccaaggttttcttaaagaaaacactctacaatactaataattaaaagaaaagttgactttgcaataaaattaagatgtttgcatcatatataactaaaatgaattagcatcaggaatacataacctacaaatcaattttttaaatgtacaaaaaaatttcactgaagaggaaacaagaaaggtaaatgaatatac

SEQ ID NO: 9865 - DNA, 495 bp, Homo sapiens
ttggatatgtagattgtatctgctgactacgtggctcagttttcccttattaaaacctatctcaataaaatcattttgaaagtagaaaataagggatctctctaaaggattaagtacgtagctggatttagaattcagaaaacagattccagttttctaatccccaacaagctaagggcactaatgcgaaggaatataagagatttactcccaaaaatatcatattggatctgaatttcaaatgaaaaattggcactccctcctggagtcagagagatagaagaaaaaatgagcagaaacaatacagaaacacaactttcaaacagaatgtcccaccctcacatgcccccaccaacatacacacgcatgcacacacactgaaacactgaggtctwtcacttttctatctgtcttaccccatcaccctcaggccagtggagaatgcagtcactggtggctgcttgcatttcaggttctagagatgacattgtcatg

SEQ ID NO: 9866 - DNA, 1001 bp, Homo sapiens
gggggatagaaaataggtgttccaaagggcatcttcagggccttaagccccctacctcttgttaaatatgagaagtctgtgcttcttttctcaaaaacatacacaaaaaaaaatctgcctggtgtccaattcatcagcctgggagatgggtaagaaatgtagttagatcccaaacatggctaaatcctttaaaaacaaatttttaaattactaggagcttttaatggatatttatccgtcttgccatatgactaagcagatgaacaaatacctatcactcacacactagaaatgaaacaagatttaatgcacacagcaccaatcatacatttcactctattgttatcaaaattacaaaacagctgggaacctgacaatgacaacctaacactcatgattttagatattgtccttgctttacttcccaaataggaggctaatattctctttaaagggaaacaaccatgagataaaatataacctttgaatatgaactgtgtatttttctcacagtaagtaaacaatagatattccaaaacagcaggcatcttattaattcagtagggtcagcaatgattaaactcttctcatctgaaaggaacagttgcacacttcttttccgaatatacatctctgtatataacttwtaaaaattcatgtgggttagaagcctggatctgtgtatgtatagaatttccatatagtaccaagcttgattaaattttcccttgctactagccttctcagagactagcaaataaaatatttggctgtgaacagcatttcagctcaccgttgatgaaagtgagctgtactgagcaatgtcagctttatacttttaagaaaatcttttaggcgatggaggaaaacagaaacaaaaccaacactactttagaataaaatgctgaacaatgaaatggagggttattaattctctgccacttgaagattgttttccacccttcagcatgctgagataattatatacacatgacactgta

SEQ ID NO: 9867 - DNA, 563 bp, Homo sapiens
tgggaaggatgagataactcctagaatttagccagaccactaagctgtatctgtactctggtaaagtatcaaagggaaccctctcaaactgcatgaaattgtctggggtacttttggggtaaagatgtgaattcctaggttctactctggagatgctgattcactaggtctgagacccagggatctggggtttttttaaaaaaaataagaatcctgagtgatttcactgtgaaagcttgacagatcataaatgggataatagttgtctgggrtatagcctttcctagcattcaagtattgctgaagatagaagtttataagaagtcttcatcagctcccacaaattttcttttcggtctgatgcttctgaatcactgctccttgccttcttcctctttatctccttgccttacttcaccatttttacctcacctctgcctgcagaagttacactcctgggcagattactaggaaagccaaccagaagaatggctagaaaggagaggttgtatatgtcaggttaattgaaagaaacagcgtcatccacttggccattctaaagc

SEQ ID NO: 9868 - DNA, 521 bp, Homo sapiens
tagctgggcattgtggtgtgcacttagagtcccaactacagagactacagaggttgaggctggagaatcacttgagcctggaagtttgaggttgcagtgagctatgatagcaccactgtactccagcctgggtgacagagcaagaccctgtctaagaaaaagaaaaacagcacgttttgacggaattgcttattccaaagctgttatattaaataccaaaaagacttttaagccaggcgtggtgcacatacctatagtcccagctactggggaggaggaggcagaaggatcgcttgagccaggagttacttggagaccagcctggacaatataatgaggctctgtctctaccaaaaagtggaaaaaaaaayttgtcacaagcagagtatatattacccttatgtatttacttagtatattgctttgattttttttttttgagactgagtctcattggcttggttgcccaggctagagtgcagtgatgtgatctcagctcacttcaacctgcgcctcccagg

SEQ ID NO: 9869 - DNA, 560 bp, Homo sapiens
aaaaaaagaaggaaatgaaaaaggaaaagtgagaagacaaggaaagttaaccctgcattgtcttctgtggctagatggtcagcaagacagatggcctccagaatgagcaatgggccatcagcagacctgccggaagtagggttcagccacatgccatttatggcatggctgccctggtgttggtcaggggcttgattctttctgccagacaacaaacsagcccgtccactggctaacttagtgagaaggagctgtggacaccctggaccctgagggtggcgatcaggtcacccctgccctggagagatgtctatgtggggaagtgcccagaggagggaaggtgagcagctgctgcaggtggcccctaggcagtgtctgacaccacaccctgggggcttaaggaccttggctatttcctgtgttctgactgtattctgaataccaagagaatatttaccttttaaaaattgcttccatggctgggcgcggtggttcacgtctgtaatcccagcactttgggaggctgaggcgggtggatcacgaggtcaggagatcgagac

SEQ ID NO: 9870 - DNA, 491 bp, Homo sapiens
gtaggaggctgctgtgggcagccctgtctgatggggcacccgtgtggggctgtgctctggtgcctgagaatggctggtgcccaatcgacatgagaagacgagsaaaagacagggtttggagtctcctcaacagtgttaaaagaggaagtgacctcacagaccagctcagagatgttaccaagaatatcacagcccccagggtagggagacaagcagcagtttgttctgtctcagctcctgtcaaggatcctgcggggtgggccctctgtatagctgctctctgtcactggcccctggagtgggagcagcgtccttagtcactgcaggcccaggcgggcaggtggtcccaggacagaggtggggaagttgtcctgaggaagcagaagtaggccttgctcccgcccaacccaagggcctccagtggaccagcattcaagatgtgagtgcccgtggtgtgcaaggcactcccatggcaccgtatttattgactg

SEQ ID NO: 9871 - DNA, 511 bp, Homo sapiens
ttatttgattggtagtacaatttcagttcctgtaggttacttttttttttgagaccgaatttcactcttgttgtccaggctggagtgtgatggtgccatctcggctcactgcaacctctgcctcctgggctcaagcaattctcttgcctcagcctccctaatagctgggattaccagcgtgtgccaccacagctggctaattttgtatttttagtagagacggggtttcaccatgttggccaggctgatctcgtactcctaatctgaggtaatctgcctgccttggcctcccaaagtgctgggattacaggccggagccaccttgcctggcccctgtaggttatttttgcatttcatttgttacagataccaacatatactttaagataaactattttgagttaaataaagattggaatatgcttgtttggttttttccctttggagtaaacacatcagaattkccttccattgctgtcggattacagtgacactttagagtctggagggt

SEQ ID NO: 9872 - DNA, 572 bp, Homo sapiens
tgtatttttagtagagacagggtttcacygtgttagccaggatggtcttgatctcctgacctcatgctccgcctgcctcagcctcccaaagtgctgggattacaggcgtgagcccccgcgcccggcccgcattaaggaattttaagggcatcaaacttatttcaccagggtagataaataagatatatttataatctcaggtatgaaagactatagccaaatatttttataataataagctcagatagacttggaaattgaagcgatagtctcagaaaaaaaaaattatggggccaaggaaaagcttcccctctgcctttggaagggtagctgaaaataaacagattaataggaaaaaaaaagtcatactaaattaacttaacatccatagcatggagaaattgtgagagaatgattaccgaataacccaatgtggtacagttgcttgtatacctttcatagaagagaggggaaatggggaatgtaggcaattcttttgaggagtagtaaatagtcattaaagagaatgaatagagccaggatacataaatttacttgtaaatggttccgtt

SEQ ID NO: 9873 - DNA, 572 bp, Homo sapiens
tgtatttttagtagagacagggtttcaccgtgttagccaggatggtcttgatctcctgacctcatgctccgcctgcctcagcctcccaaagtgctgggattacaggcgtgagcccccgcgcccrgcccgcattaaggaattttaagggcatcaaacttatttcaccagggtagataaataagatatatttataatctcaggtatgaaagactatagccaaatatttttataataataagctcagatagacttggaaattgaagcgatagtctcagaaaaaaaaaattatggggccaaggaaaagcttcccctctgcctttggaagggtagctgaaaataaacagattaataggaaaaaaaaagtcatactaaattaacttaacatccatagcatggagaaattgtgagagaatgattaccgaataacccaatgtggtacagttgcttgtatacctttcatagaagagaggggaaatggggaatgtaggcaattcttttgaggagtagtaaatagtcattaaagagaatgaatagagccaggatacataaatttacttgtaaatggttccgtt

SEQ ID NO: 9874 - DNA, 572 bp, Homo sapiens
tgtatttttagtagagacagggtttcaccgtgttagccaggatggtcttgatctcctgacctcatgctccgcctgcctcagcctcccaaagtgctgggattacaggcgtgagcccccgcgcccgkcccgcattaaggaattttaagggcatcaaacttatttcaccagggtagataaataagatatatttataatctcaggtatgaaagactatagccaaatatttttataataataagctcagatagacttggaaattgaagcgatagtctcagaaaaaaaaaattatggggccaaggaaaagcttcccctctgcctttggaagggtagctgaaaataaacagattaataggaaaaaaaaagtcatactaaattaacttaacatccatagcatggagaaattgtgagagaatgattaccgaataacccaatgtggtacagttgcttgtatacctttcatagaagagaggggaaatggggaatgtaggcaattcttttgaggagtagtaaatagtcattaaagagaatgaatagagccaggatacataaatttacttgtaaatggttccgtt

SEQ ID NO: 9875 - DNA, 572 bp, Homo sapiens
tgtatttttagtagagacagggtttcaccgtgttagccaggatggtcttgatctcctgacctcatgctccgcctgcctcagcctcccaaagtgctgggattacaggcgtgagcccccgcgcccggcccgcattaaggaattttaagggcatcaaacttatttcaccagggtagataaataagatatatttataatctcaggtatgaaagactatagccaaatatttttataataataagctcagatagacttggaaattgaagcgatagtctcagaaaaaaaaaattatggggccaaggaaaagcttcccctctgcctttkgaagggtagctgaaaataaacagattaataggaaaaaaaaagtcatactaaattaacttaacatccatagcatggagaaattgtgagagaatgattaccgaataacccaatgtggtacagttgcttgtatacctttcatagaagagaggggaaatggggaatgtaggcaattcttttgaggagtagtaaatagtcattaaagagaatgaatagagccaggatacataaatttacttgtaaatggttccgtt

SEQ ID NO: 9876 - DNA, 572 bp, Homo sapiens
tgtatttttagtagagacagggtttcaccgtgttagccaggatggtcttgatctcctgacctcatgctccgcctgcctcagcctcccaaagtgctgggattacaggcgtgagcccccgcgcccggcccgcattaaggaattttaagggcatcaaacttatttcaccagggtagataaataagatatatttataatctcaggtatgaaagactatagccaaatatttttataataataagctcagatagacttggaaattgaagcgatagtctcagaaaaaaaaaattatggggccaaggaaaagcttcccctctgcctttggaagggtagctgaaaataaacagattaataggaaaaaaaaagtcatactaaattaacttaacatccatagcatggagaaattgygagagaatgattaccgaataacccaatgtggtacagttgcttgtatacctttcatagaagagaggggaaatggggaatgtaggcaattcttttgaggagtagtaaatagtcattaaagagaatgaatagagccaggatacataaatttacttgtaaatggttccgtt

SEQ ID NO: 9877 - DNA, 533 bp, Homo sapiens
ggccaatgtcccactgactggccatgtgacaaagttaccaggaaaaacattttctggcctgctgggctccctcttatcagatcaagagacttgaagagcccagagttgggtttcagggctgaaaagatgggatctaccctgctctgccactgcagagcctgtgtatggtttggggcatgtgcctaccccatgaggagcctcagatcccgccacagaaaaaaagggagtgggccaaattggtctcacaggtctggttctgagattctaggatttcccattttgatgtcggcaaccaggaacctcaatcctaaatacaatataaattatagtaactacttaagagttcagctttgtattttttatatctttgctctccctccccatcactacacactctcataatgcttggcatatggtaagacagttaagtactcagtaaataaygaatgaatgaatatgaatgaatgttacatggagtttgattttgctggtcttattatatatgtgaatttttatatcttttctttgttatt

SEQ ID NO: 9878 - DNA, 1849 bp, Homo sapiens
ttctactttttgctgccacttacagtttaagtttaagtcatccaagttacttggctaaggattgaattaactagcatgattccctgagtgcaggcacagcccttttttcgcatcccaagccccagtgtggcaagaggtgtttgtttgtttgtttgtttgtttttccctcatgtttgatggcccaccacaaaagctcactcagtcatgaagctaaaataaagaaattgtcaaaagttcagaatcctgaaattttagtaatcgttgtgaagatgtatgtcagttaacgctttatcatttttaaattgcttttgatcacagtcatttgatccttaccacaatcccgtgaaggtggtcaagcagatattattatttaccattttatagatgagaatatagagaatgaggtggagtgactcaactacggtcaaagaaaaagaacccctcctggagtagaattcacattcttggatcattgcacagtgatatgttccttcagcttgcaatgttataggcagtawaatgattgttatctcataatgcataaaaattgcactggaggcaaaaccagtctccagttatgattgtcactggagattcttgagagaatattgccatgaataagagtaagagacactgaaccagtaaagatcatattcattctagatctgccactgcatggctcagtggattagggcaaatctcatcgacaacccaagattcatctgctaatatttcagaagcacaacccatatgctgagtaccaaatattaatagaattatcagatatggtatttttatttttatttcttgagatggagtcttgctcttgtcgcccaggctggagtacaatggcgcaatctcggctcactgcaacctccacctcccgggttcaagcaattctccagcctcagcctcctgagtagctgggatcacagctgcccatcaccacgtccagctaactttttgtatttttaatagagacggggtttcaccatgttggccaggctggtctcgaactcctgatctcagatgatccgcccgccttggcctcccaaagtgctgggattataggtgtgaaccactgcacctggcccagatatgatatttttgtccttgcttttcatatgacaggtgcttctgtttctggggaaaaatagagcggatttctattagtgataataggatatccttctgcatttaaagaggatggtaggtatgagtgtggtggctcatgcctataatcccaatgttttgggaagctgaggctggaggattgcttaagcccagagttcaagaccagcctaggtaatatagtgagatcccaactctacaaattttttttcttaattaactgggcatggtggagcatgcctgtagtcccagctacctgggaggttgaggtgggaggatcacttgagcccaggaagttgaggctgcaatcagccatgatcacaccactgcactccagcctgagccacagagtgagaccttatctccaataaaaatagaagggaagataaagaggatggtagtatacattccactcacactgagatttcctaaaggaaattggattagaaatggactttgaagaaccagggaaaatttatgtgttgttcaatatatattatagaccttttttttattttttaaaactagactttatttttttagagcagttttggtttcagagcaacattaaatggaaaatacagagagttcccacatactcctccctgaccacatatacacaaccttcccaccattaacatcccaatcagtgtggtgcatttgctacagttaatgaaccaacattgacacatcatcaaccaaagctcatgttttacat

SEQ ID NO: 9879 - DNA, 1849 bp, Homo sapiens
ttctactttttgctgccacttacagtttaagtttaagtcatccaagttacttggctaaggattgaattaactagcatgattccctgagtgcaggcacagcccttttttcgcatcccaagccccagtgtggcaagaggtgtttgtttgtttgtttgtttgtttttccctcatgtttgatggcccaccacaaaagctcactcagtcatgaagctaaaataaagaaattgtcaaaagttcagaatcctgaaattttagtaatcgttgtgaagatgtatgtcagttaacgctttatcatttttaaattgcttttgatcacagtcatttgatccttaccacaatcccgtgaaggtggtcaagcagatattattatttaccattttatagatgagaatatagagaatgaggtggagtgactcaactacggtcaaagaaaaagaacccctcctggagtagaattcacattcttggatcattgcacagtgatatgttccttcagcttgcaatgttataggcagtaaaatgattgttatctcataatgcataaaaattgcactggaggcaaaaccagtctccagttatgattgtcactggagattcttgagagaatattgccatgaataagagtaagagacactgaaccagtaaagatcatattcattctagatctgccactgcatggctcagtggattagggcaaatctcatcgacaacccaagattmatctgctaatatttcagaagcacaacccatatgctgagtaccaaatattaatagaattatcagatatggtatttttatttttatttcttgagatggagtcttgctcttgtcgcccaggctggagtacaatggcgcaatctcggctcactgcaacctccacctcccgggttcaagcaattctccagcctcagcctcctgagtagctgggatcacagctgcccatcaccacgtccagctaactttttgtatttttaatagagacggggtttcaccatgttggccaggctggtctcgaactcctgatctcagatgatccgcccgccttggcctcccaaagtgctgggattataggtgtgaaccactgcacctggcccagatatgatatttttgtccttgcttttcatatgacaggtgcttctgtttctggggaaaaatagagcggatttctattagtgataataggatatccttctgcatttaaagaggatggtaggtatgagtgtggtggctcatgcctataatcccaatgttttgggaagctgaggctggaggattgcttaagcccagagttcaagaccagcctaggtaatatagtgagatcccaactctacaaattttttttcttaattaactgggcatggtggagcatgcctgtagtcccagctacctgggaggttgaggtgggaggatcacttgagcccaggaagttgaggctgcaatcagccatgatcacaccactgcactccagcctgagccacagagtgagaccttatctccaataaaaatagaagggaagataaagaggatggtagtatacattccactcacactgagatttcctaaaggaaattggattagaaatggactttgaagaaccagggaaaatttatgtgttgttcaatatatattatagaccttttttttattttttaaaactagactttatttttttagagcagttttggtttcagagcaacattaaatggaaaatacagagagttcccacatactcctccctgaccacatatacacaaccttcccaccattaacatcccaatcagtgtggtgcatttgctacagttaatgaaccaacattgacacatcatcaaccaaagctcatgttttacat

SEQ ID NO: 9880 - DNA, 533 bp, Homo sapiens
atcttacccatgagcctgtagccatctttgtttactcctccttcrgactgggacactggtggctttctctgaactgtctggggtatgggtgccagccctccttccctttccttcaggaatttgcagccaggaggacacatacaggcatgaaggaacatgagcacccctcagctcatgtgagacgtggtgtgtgtagacatagcatattttctcagagtttccatgacattttcaggagctcctcgcggtgtgaagagcatgctttcagccctggctttcctcaggtggccaacagcatccgtgattctggccactcttgctccacaaggccctcctttctctattcctctctccatcgacaccatagatgcccagggcaatggtcaaaccaacagaatagatctggtccgggacgcggcacctggatggcagccacccccaccccacaaggccctcctttctctattcctctctccattgacaccggagatgcccagggcaatggtcaaaccaatggaatagacctggtccgg

SEQ ID NO: 9881 - DNA, 533 bp, Homo sapiens
atcttacccatgagcctgtagccatctttgtttactcctccttcagactgggacactggtggctttctctgaactgtctggggtatgggtgccagccctccttccctttccttcaggaatttgcagccaggaggacacatacaggcatgaaggaacrtgagcacccctcagctcatgtgagacgtggtgtgtgtagacatagcatattttctcagagtttccatgacattttcaggagctcctcgcggtgtgaagagcatgctttcagccctggctttcctcaggtggccaacagcatccgtgattctggccactcttgctccacaaggccctcctttctctattcctctctccatcgacaccatagatgcccagggcaatggtcaaaccaacagaatagatctggtccgggacgcggcacctggatggcagccacccccaccccacaaggccctcctttctctattcctctctccattgacaccggagatgcccagggcaatggtcaaaccaatggaatagacctggtccgg

SEQ ID NO: 9882 - DNA, 533 bp, Homo sapiens
atcttacccatgagcctgtagccatctttgtttactcctccttcagactgggacactggtggctttctctgaactgtctggggtatgggtgccagccctccttccctttccttcaggaatttgcagccaggaggacacatacaggcatgaaggaacatgagcacccctcagctcatgtgagacgtggtgtgtgtagacatagcatattttctcagagtttccatgacattttcaggagctcctcgcggtgtgaagagcatgctttcagccctggctttcctcaggtggccaacagcatccgtgattctggccactcttgctccacaaggccctcctttctctattcctctctccatcgacaccatagatgcccagggcaatggtcaaaccaacagaatagatctggtccgggacgcggcacctggatggcagccacccccaccccacaaggccctcctttctctattcctctctccattgacaccggagatgcccagggcaatggtcaaaccaayggaatagacctggtccgg

SEQ ID NO: 9883 - DNA, 512 bp, Homo sapiens
ccccacccggactagtgcccctgcccctaggccacccctaccccacataccagcccggtcagcttttcacgcaggccccggatgtcatccttgagtttctgctccttgatccgccactcagccttgtgtacctcacggctcaggtccctctccggccctggggagtgacgattggcctccagcagcaacacccgcagttcgttcaggctcctgggggtgaggcgggcacagaaccactgcactcagccctggctcctccagctcccacactctagcaatttgccaagtgtccaggggctgaccaactggtgggggacatgggctactagatggcatctgtgccacgaggggccacagtagacacaattcaaccaaagcccaagaggggccaggatttggggctgggatggtcctgaggacttgacctttcctagagtactttttaaagttgttgtggggggagtgcaragcacagtggctcacgcctgtaatcccagcacttcagaaggccg

SEQ ID NO: 9884 - DNA, 551 bp, Homo sapiens
tttttttaattagcctagtgtgatagmatgtgcctgtagtcccagctactccagaggctggggtgggagggttgcttgggcccaggaggcagaggttgcagtgagccatgatcacgctactgcactccagcctggacaatacagcaagaccctatctcaaaaaaaaaggtggggctggtggctcatgcctataatcccagcactttgggaggctgaggtgggtggttcagttgaggccaggagtttgagaccagcctggccaacatggtgaaaccccatctctactaaaagcataaaaattagttgggcgtggtggcatgtgcctgtaatcccagctactcaggaggatgaggtgggaggatcgcttgagcccaagagttctaggctacagtgagctatgatcgcaccactgcactccagcctgggtgacagagcaagaccctgtctctaaacacacacacacacacacaatgctcaaactttcctctccccactgagcaaaagggtgatggtaattctactgctctcagctctgtgagagccccacgtga

SEQ ID NO: 9885 - DNA, 551 bp, Homo sapiens
tttttttaattagcctagtgtgatagcatgtgcctgtagtcccagctactccagaggctggggtgggagggttgcttgggcccaggaggcagaggttgcagtgagccatgatcacgctactgcactccagcctggacaatacagcaagaccctatctcaaaaaaaaaggtggggctggtggctcatgcctataatcccagcactttgggaggctgaggtgggtggttcasttgaggccaggagtttgagaccagcctggccaacatggtgaaaccccatctctactaaaagcataaaaattagttgggcgtggtggcatgtgcctgtaatcccagctactcaggaggatgaggtgggaggatcgcttgagcccaagagttctaggctacagtgagctatgatcgcaccactgcactccagcctgggtgacagagcaagaccctgtctctaaacacacacacacacacacaatgctcaaactttcctctccccactgagcaaaagggtgatggtaattctactgctctcagctctgtgagagccccacgtga

SEQ ID NO: 9886 - DNA, 551 bp, Homo sapiens
tttttttaattagcctagtgtgatagcatgtgcctgtagtcccagctactccagaggctggggtgggagggttgcttgggcccaggaggcagaggttgcagtgagccatgatcacgctactgcactccagcctggacaatacagcaagaccctatctcaaaaaaaaaggtggggctggtggctcatgcctataatcccagcactttgggaggctgaggtgggtggttcagttgaggccaggagtttgagaccagcctggccaacatggtgaaaccccatctctactaaaagcataaaaattagttgggcgtggtggcatgtgcctgtaatcccagctactcaggaggatgaggtgggaggmtcgcttgagcccaagagttctaggctacagtgagctatgatcgcaccactgcactccagcctgggtgacagagcaagaccctgtctctaaacacacacacacacacacaatgctcaaactttcctctccccactgagcaaaagggtgatggtaattctactgctctcagctctgtgagagccccacgtga

SEQ ID NO: 9887 - DNA, 412 bp, Homo sapiens
aaaaattttcaggaactggtgtttgatattgcaaactagaaaattcgttaagtaggcattcactagaattcttctttctgtaatttacacacaatgaccagaatctgaaaagtgaacatgccgcttttgagagtctttgtttttttttctatgcaacctatgaattccatgtaaacattcaaatcaagaacatttcgcatctatatayagaccatcctccataaaattcagtcccattatgattaaggactcaggctttttgttttgtaaagttagaaataaaaggggaaggccgggcgcggtggctcatgcctgtaatcccagcactttgggaggccgaggcgggtggattacctgagatcaggagcttgagaccaacctgaccatgatgaaaccctgtctctactaaaaa

SEQ ID NO: 9888 - DNA, 1036 bp, Homo sapiens
accacctctggacccttctttccttatatgtatagtggggctttcaaagagctaatgtagaccaaattcaatgctatacgtttaaacagtaagtaacacaatactatatatagatctagggagtcccacaccattgataatcaaaatgccattaagggggatgcagaatatacatgtggtataattctaaggtataaaattaggggaattacatattatccacatatgtgtgtgtgtgtgtgtgtgtgtgtgtrtatatatatatatatataaacaatctagacataaactgaagagtagttactttgagagcagaagattggggtcgtggagagtggggaggtcagtgagtatggaaggagactttgcttttactgtacgaccctctgtaatgtttaaaattttcaaactttatatcttgatcatgtttacaatcgctacatttttaatttaaaaagattgtttctatcagtgaatcttgccaagaaaaagaggtggcgatagagaaaaagagcaacaaatcaaaagagattatgattatattgcaataaagctgttttttaaaaagaggatatggattttagaacattaggaaacattgtcctaagccatagaaaccactgtttaaaacctgggtacgactacatggcattaatgagtctagtgctgctcagaagagagaaatgctagaggaccagatatttgtattattttaagaaatgacttctattatttagaaaatttattattttaaatttatacttatttaagtattaaatatttaggtatatctgaatttaaataaaattctcaatttcattctgaagatgcacttaataatgaagtcaggtagtgaaagtctgataccttgtttggtgacttcctgcaactcaccatggggaaggttcccccactcaggacttcaggtgcaacctgtggtgtgctaggaatcatctgcgctgagtgtatttagcaggatgagcaccagggttccagcaggctcacatttcactatgtaagcaccaagtgaatgggg

SEQ ID NO: 9889 - DNA, 1036 bp, Homo sapiens
accacctctggacccttctttccttatatgtatagtggggctttcaaagagctaatgtagaccaaattcaatgctatacgtttaaacagtaagtaacacaatactatatatagatctagggagtcccacaccattgataatcaaaatgccattaagggggatgcagaatatacatgtggtataattctaaggtataaaattaggggaattacatattatccacatatgtgtgtgtgtgtgtgtgtgtgtgtgtatrtatatatatatatataaacaatctagacataaactgaagagtagttactttgagagcagaagattggggtcgtggagagtggggaggtcagtgagtatggaaggagactttgcttttactgtacgaccctctgtaatgtttaaaattttcaaactttatatcttgatcatgtttacaatcgctacatttttaatttaaaaagattgtttctatcagtgaatcttgccaagaaaaagaggtggcgatagagaaaaagagcaacaaatcaaaagagattatgattatattgcaataaagctgttttttaaaaagaggatatggattttagaacattaggaaacattgtcctaagccatagaaaccactgtttaaaacctgggtacgactacatggcattaatgagtctagtgctgctcagaagagagaaatgctagaggaccagatatttgtattattttaagaaatgacttctattatttagaaaatttattattttaaatttatacttatttaagtattaaatatttaggtatatctgaatttaaataaaattctcaatttcattctgaagatgcacttaataatgaagtcaggtagtgaaagtctgataccttgtttggtgacttcctgcaactcaccatggggaaggttcccccactcaggacttcaggtgcaacctgtggtgtgctaggaatcatctgcgctgagtgtatttagcaggatgagcaccagggttccagcaggctcacatttcactatgtaagcaccaagtgaatgggg

SEQ ID NO: 9890 - DNA, 593 bp, Homo sapiens
ggccccttaggcatccttyacgaaacctgattaaagatccagcctgctcctattgatgtagttacttcagactgaagatgggcttttcaaacggggttgcagtgtgtaaagatccggccattgcactccagcctgggtgacagagtgagactccgtctcaaaaaccacaacaaaaaagaaactttagaaagcaaaacccccaatttttttgattactatagaatgcagaagctcctggactcttcccgagattgtgttcataacttttcagctgaaactaacatctgtgaagaccatctatcttgggtgaacctattttctggtaaccagtgttaaatattttttaataaataaaaattttaaacttgtattagaacagttaatttctcgtctttgccttttttccttttttaatatgtttttaaaatcccttttgagagatgagatctgaatatgttgcccagactggttttgaactcctgagctcaaacaatcctctcacctcggtttccagaagtgccgggattacaggcctgggcgatcacacctggcctggttgttgcctttgcaatatttgaagtacattttaaaat

SEQ ID NO: 9891 - DNA, 593 bp, Homo sapiens
ggccccttaggcatcctttacgaaacctgattaaagatccagcctgctcctattgatgtagttacttcagactgaagatgggcttttcaaacggggttgcagtgtgtraagatccggccattgcactccagcctgggtgacagagtgagactccgtctcaaaaaccacaacaaaaaagaaactttagaaagcaaaacccccaatttttttgattactatagaatgcagaagctcctggactcttcccgagattgtgttcataacttttcagctgaaactaacatctgtgaagaccatctatcttgggtgaacctattttctggtaaccagtgttaaatattttttaataaataaaaattttaaacttgtattagaacagttaatttctcgtctttgccttttttccttttttaatatgtttttaaaatcccttttgagagatgagatctgaatatgttgcccagactggttttgaactcctgagctcaaacaatcctctcacctcggtttccagaagtgccgggattacaggcctgggcgatcacacctggcctggttgttgcctttgcaatatttgaagtacattttaaaat

SEQ ID NO: 9892 - DNA, 593 bp, Homo sapiens
ggccccttaggcatcctttacgaaacctgattaaagatccagcctgctcctattgatgtagttacttcagactgaagatgggcttttcaaacggggttgcagtgtgtaaagatccggccattgcactccagcctgggtgacagagtgagactccgtctcaaaaaccacaacaaaaaagaaactttagaaagcaaaacccccaatttttttgattactatagaatgcagaagctcctggactcttcccgagattgtgttcataacttttcagctgaaactaacatctgygaagaccatctatcttgggtgaacctattttctggtaaccagtgttaaatattttttaataaataaaaattttaaacttgtattagaacagttaatttctcgtctttgccttttttccttttttaatatgtttttaaaatcccttttgagagatgagatctgaatatgttgcccagactggttttgaactcctgagctcaaacaatcctctcacctcggtttccagaagtgccgggattacaggcctgggcgatcacacctggcctggttgttgcctttgcaatatttgaagtacattttaaaat

SEQ ID NO: 9893 - DNA, 593 bp, Homo sapiens
ggccccttaggcatcctttacgaaacctgattaaagatccagcctgctcctattgatgtagttacttcagactgaagatgggcttttcaaacggggttgcagtgtgtaaagatccggccattgcactccagcctgggtgacagagtgagactccgtctcaaaaaccacaacaaaaaagaaactttagaaagcaaaacccccaatttttttgattactatagaatgcagaagctcctggactcttcccgagattgtgttcataacttttcagctgaaactaacatctgtgaagaccatctatcttgggtgaacctattttctggtaaccagtgttaaatattttttaataaataaaaattttaaacttgtattagaacagttaatttctcgtctttgccttttttccttttttaatatgtttttwaaatcccttttgagagatgagatctgaatatgttgcccagactggttttgaactcctgagctcaaacaatcctctcacctcggtttccagaagtgccgggattacaggcctgggcgatcacacctggcctggttgttgcctttgcaatatttgaagtacattttaaaat

SEQ ID NO: 9894 - DNA, 593 bp, Homo sapiens
ggccccttaggcatcctttacgaaacctgattaaagatccagcctgctcctattgatgtagttacttcagactgaagatgggcttttcaaacggggttgcagtgtgtaaagatccggccattgcactccagcctgggtgacagagtgagactccgtctcaaaaaccacaacaaaaaagaaactttagaaagcaaaacccccaatttttttgattactatagaatgcagaagctcctggactcttcccgagattgtgttcataacttttcagctgaaactaacatctgtgaagaccatctatcttgggtgaacctattttctggtaaccagtgttaaatattttttaataaataaaaattttaaacttgtattagaacagttaatttctcgtctttgccttttttccttttttaatatgtttttaaaatcccttttgagagatgagatctgaatatgttgccyagactggttttgaactcctgagctcaaacaatcctctcacctcggtttccagaagtgccgggattacaggcctgggcgatcacacctggcctggttgttgcctttgcaatatttgaagtacattttaaaat

SEQ ID NO: 9895 - DNA, 1343 bp, Homo sapiens
ttcctatatgtaatgagtcttttgttctctggctatttttacaaattgctatttatcttgatttccaggaacttgattattctgcagataggcatagttttcttggtatttatcctgttttcgttgctgagcattttggaccagtgggttgatgtctgttcctagttttttaacatgttattcattatctcatcattctgcctcatcctctctytttttgaggggactacaatacacataactgttttgttatgttcacttttttcattctgagttttagttgggattcttcctatttaactgctgttcaagttttctgatagtttactgttaagtcattaaatcaattttttattttggacttggcacttttcatttgatttcctttttgtttgagacagggtctcactctatcacccaagctggagtgcaatggttccgtcatggctcactgcaacctctgcctcctgggctcaaacaaccctcccaccttagcctcctgagtacctgggaacacaggcgtgcaccaccacacttggctaatttttgtattttttttttttttttttttgtagagatggcgttttgccatgtgtcccaggctggtctcaaactcctgggcttaagcaatgctcccattcggtctcccgaagtgctgggattataggcataagccactgggtctgtcctatttttttgctatagcttttatctctctgataaatttccccacctctttacacatttcattaaacttttcttctggaacctctagtattttagtcacaatcgttttaaagcccacatcaataatttcattgtcttgaaaatatctgggtctgcatttgttaactgtttcttctgagcaagggtctcattttgttacttttacatgtgtcctacaatgttttattgcatactgataagtttgtataaatatcagtagagatagaagtaaataatgtttaccttcagaaagggcacaccacctttttcagactgctggagaggtgtcgaagttattctaatgtgcagatgtattggatctgaagtttgttgtggctttaatttattttaccactgactttaagcacttttaggttgggaacaggacattccttttagtgagatctaggatatgtgcactaacaacattctggaaatttacctagtttatagtcacactaccaatttttgtaaatgtgagaaatatttttctactttctatcctagctgctagaatttggagcagctgtggagttttttgttttgtttttgctttccagttttaccccttgcttactgggccatagtatatcttttttgagtgctgaggtctcctc

SEQ ID NO: 9896 - DNA, 590 bp, Homo sapiens
ctaataaatcttgataaagatatgtttgggctgggtgcgttggctcatgcttgtaataccagcacttggggaaggtgaggtgggtggatcacctgaggtcaggagtttgagaccagcctggtcaacatggtgaaaccctgtctctactaaaaatacaaaaattagccaggygtggtggtgggcacctgtaatcctagctacttgtgaggctgaggcataagaatcgcttgaacccgggaggcagaggttgcagtgagctgagatcgtgtcactgcactccagcctgggagacagtgagactttgtcttaaaaaaaaaaaaaaaaaaaagtttggtatttgttgaataagaataatttttactttgagaatcatgtggtattttacagttttaaaactatagtgaactattaatcactttcaagataagtaagaattcattattcttatttaaataacttaaaccagtatcttatttttgagttattaattatggacttacctgaacattccagttcaaggtttacttcaattttccacattgtgcaacagagatctgttagcttaaatcatgaggataaaagacttgagc

SEQ ID NO: 9897 - DNA, 590 bp, Homo sapiens
ctaataaatcttgataaagatatgtttgggctgggtgcgttggctcatgcttgtaataccagcacttggggaaggtgaggtgggtggatcacctgaggtcaggagtttgagaccagcctggtcaacatggtgaaaccctgtctctactaaaaatacaaaaattagccaggcgtggtggtgggcacctgtaatcctagctacttgtgaggctgaggcataagaatcgcttgaacccgggaggcagaggttgcagtgagctgagatcgtgtcactgcactccagcctgggagacagtgagactytgtcttaaaaaaaaaaaaaaaaaaaagtttggtatttgttgaataagaataatttttactttgagaatcatgtggtattttacagttttaaaactatagtgaactattaatcactttcaagataagtaagaattcattattcttatttaaataacttaaaccagtatcttatttttgagttattaattatggacttacctgaacattccagttcaaggtttacttcaattttccacattgtgcaacagagatctgttagcttaaatcatgaggataaaagacttgagc

SEQ ID NO: 9898 - DNA, 590 bp, Homo sapiens
ctaataaatcttgataaagatatgtttgggctgggtgcgttggctcatgcttgtaataccagcacttggggaaggtgaggtgggtggatcacctgaggtcaggagtttgagaccagcctggtcaacatggtgaaaccctgtctctactaaaaatacaaaaattagccaggcgtggtggtgggcacctgtaatcctagctacttgtgaggctgaggcataagaatcgcttgaacccgggaggcagaggttgcagtgagctgagatcgtgtcactgcactccagcctgggagacagtgagactttgtcttaaaaaaaaaaaaaaaaaaaagtttggtatttgttgaataagaataatttttactttgagaaycatgtggtattttacagttttaaaactatagtgaactattaatcactttcaagataagtaagaattcattattcttatttaaataacttaaaccagtatcttatttttgagttattaattatggacttacctgaacattccagttcaaggtttacttcaattttccacattgtgcaacagagatctgttagcttaaatcatgaggataaaagacttgagc

SEQ ID NO: 9899 - DNA, 333 bp, Homo sapiens
gggaattgacttaagtggcttttaaggtcagtgactgagttagaagcaaaattcaaatttctcatttcctaatccgggatttttacctgattccttgaggtggtggctgaacaatgccctctaaatatgtcatgtcttaatccctggaacttgtgaatgctatcatatatgacaaaaggaactttgcagatgcgattaattcaaggatgttaacttaattatccaggagggcctcgtgtaatcaccatcattttataagagggacacaggagtagtcagaatcagaggagaatatgatgtgataatggaagcagagagcagrgtgataagctt

SEQ ID NO: 9900 - DNA, 577 bp, Homo sapiens
attgtgaacagtgctgcaataaacgtatgtgtgcatgtgtctttatagtagagtgcatacgaagtacttataatgcaaacatccacgctgctcaagctaatgtttagcagttctgaatatcctgaggtttctattccaaaagcagctacacaaaattaaagaatgattcatatacatctttttaaaaattctgggatgctcttttacaatgacttcatttccaggaaatatctacaatttccacaaatctgtatttccaatgaactcagggcagtttgataaagaaaaatatgcccagtttgaatctaaatactcaacttcmttcaataaattacaggtctttctattccatctcggtgctgaaaaaaaaattacagatcttctttacttttccctcataatttcaaggttaatgtgttcagatgttttttcacatcattaaagatatacaattctttgagtcattgggagcctgatggatggggtctctcagggcatattcattttccaaaatcattgatctgagaacaaagttaagtaaacctcctctgactacattaaataaaataaacttcta

SEQ ID NO: 9901 - DNA, 505 bp, Homo sapiens
ttatctttcattaacagctgtaattagtctgagccagactgtcatctgctattgaaatatctgaaacwaattagacataagatatgttacgggaacaagattgggagactgaaaatttacacaaatgaggccttctgaaatgatgaacacaagtcataataatgtttctgaaataaatcaaaaacaagacaaaagagagaatgaaatcaatcaggaggatagaaaccagaataccagcacctcaaaaagtttaatcaccatactataaaatccaactgtggaagggcactacaatttttattacaatgaccaggagctcttgtaatagcactacttaagatttagtctaaacaatagagaaaggatcagttgaagataagctgtaacagctcacatttgactttcaatgttctcacaacagttaccaggaaagtttgtagaaattctcctgaagatactatgttgcatttggtccataaaatatagtatagaaaacacttaagaa

SEQ ID NO: 9902 - DNA, 1487 bp, Homo sapiens
actcaacccacttttcctagctctatcttctggctcctgcatttgtgtctctccaaataagtttaaattaacaaatgggtagcctagtctcctcttctataggctgagaaggcaagtgtaaaagcccttagtacacacggcctggtgcgtagcaaatatacataaaatcccattgctatcattaattaccccaaagcaggatggattgatcaaggttgaatgatattttgatttttaaaggaatatatgcttacttctaccaattattttcttttcttttgacccatcttcattggatctaatttggagccttgtcctgctgtgtccctctcctgcgatgaggctacasgtggtccctctataagtgtatctaagtgtgacctgaccaccaaagggggtcatctctcacttcgtaatccatgcagttcaaactcacgccagctattctagcagctgcatgctgttgtagcttaaaagtgttaagtctcttttacacacacacttactaaaggctctgctttaacatctggaatatactaagcactgttccaagtaacccctttagttaattctgcatttccccaaaggagcaccataccttaagactgtgctcagcacacagtggttgctcaacttgttagattgaccagaatgccaccaagttcccagaagtttactagtgtctacacttactcaatgacgtaccctgcaaatgacagtctggggacagtcagggcttccaggaggcagcactgaggaaatgtgctctatgacagtaagatacatgaggtgccaacaggacaaggcccttgtgaaatgtgacagctccatgtgtttgccaaggatcagaaaaggatcccagctcagcaaagccagctcttatgtcccttcctaggggtgagcccacataagttagaggggacaacctcagaaccctgatttaggatttggacacaaagaacgcccatagatcccaacttttccgggttggaggtttgctctccacagcaggcagggcctatgttggcaactgtgcttccagaacggtcccccattccaaaacttgactcgctgcatctgacctatgataagcctacgtttggcatcaagatcatctgtggaaagagatccctgggtttctaagagcttaaactgaaaacacacctaggaggaacccatttctggagctgcttttggggctgtttcccctgaggggtgaaaggttaactctgcaacttttgaggctggggacctagctgtcagtgagttagttgcaagtataacaccaggaacatagattaagaaccaaggatggcaatataaagaaatgaagtgctgacacgtgctacaacatggatgagctataacacactatgctacatgacaggagccagtcacaaaaggccacatggtgactggttccatttctataaatgtccacaacagccaatccatagggacagaaagtagattagggactgcctaaa

SEQ ID NO: 9903 - DNA, 1278 bp, Homo sapiens
cagtatgtagaaaagaacaaatgtacatttacaaggaaaactctttttaatatccagacaaacattacagatagcagttaatgtgaagatttttattttttttttccccacaaagaggctctcagagcccaaaggggttatgatgtgttgcatgcacatccatgtcaaagcagagactggaaaggcagagagaggcagaaaaattgtaagataaagcgcactgccaaatgtgcaaacctacctagccatcctcacattacctgcagtgtcacattttacaccagagcgagtaacaaaatggcacgttcaacgagcaaagacaaaccccacgttttgagactataatatctcaagaacagctaatttttcaaatataccaacaatttttcttatttttcccaagtctacaaacacccataacccaggtatctccatatactttcatattagtgatgaaaataaaraattgtgatttctttaaaaatattcagtaccatggattccctgaattgactattgttggggtattccttccacttgggaaattacaaaaatatgacaattacttgtcaactgagtttatctggttgcttctaaattgggaaaatgatctctgaaaaaatccataaaatattttcattaaattatgttttactgttctaaaatgattgttcaatatggcaactgaaaaaatgatagctacatatctattacatcaatgtacttgacataaactgaaaatactgaatcaatttgttcaacctttccaaatacaagatgtgaaattagttctattgtatgatttctacaatatacaggtgagatttgtataataccagatattggtataatcctagacttctaaaatgtttaagattttcagagataaagcatgtaattcaaagtattacctgaaattataatcaaaaatgagttttaaaatagagtcctacacgagaaaagtctcccccaaagaatgaacaggaggaggaaatgggagactctttctagttactacacaaattcataacaaatgcaaaaattagataattcagaaactcctattttctaaactattagtggccaaagattgtccatttatgcgaagtttaacttgcagtgtgaaaacttttaatcttcaagcagtgcaaagttgctaaagaacacgagtcctcagacctattctagtagtctctcttctcatcctcttttaattgtgtccagttaccctctcctgctttcctctttcctttctatcctctcctctctggagctacc

SEQ ID NO: 9904 - DNA, 541 bp, Homo sapiens
ttgccctgcagggcctttcggtttggctgatttatccaacctcgcatacaccctgctccagtaattcaaagagaactcagtctacactggaagatcaagattggtaaccactggagactggtctctgtgaaggaaaattatgtcagcctgtaggcaggtcagggactgaaagaatcaaatcaaaatggctaaggtttctgcattcttcaggcatcatctgcctaataaatataaattaaataaagttgatttgctccatattgacctttcaatataaatgtgttgaaatgtataaattaggtcacttttgtgtatatatatatrtgtgtgtgtgtgtgtgtgtgtgtgtgtgtatatgtgtgtgtgtatatatctatatgtgtgtgtgtgtatatatcttgatgcaatttgtcttgttatcccaattaattgtctctgcttctaaaaataatttattgtgagatattttcttatttaatcattaattttcagtcatgttataatgttagtaaaactgtttttcttaatattttctcccata

SEQ ID NO: 9905 - DNA, 587 bp, Homo sapiens
aggggtaggtagatggttttgtcagtgtcctagagctggagcagtgggaggggcttcagacggggagatttccagcattaggtgaaaccaggaaggagatgccacccgtgccagaaatgttgtttaaaatagagccagagaaataccctgatttccccatgcaatttttctcctaaccctcaccagtctatacactggctgaactgagctggagagggcagttgtggatttttaattaccaaaagccaagcagacactgcatataatcatgtgttgatttacagtctagagagaatgagtttagattatgaagacacattaattatagtggacctatggccttggcatcctttctaccccttccccgttgcttaagtcatttgactgccmtcttcagggtttttatcatggccaagtaacaaatataagagtacaaaaaaatagaaaaaaacaataagacctactatttgatagcataacagggtgactatagtcaataatttaattgtacatttcaaaataacaaaagtatgattagatgatttataacgcaaaggataaatgcttaaggggatagatacactatt

SEQ ID NO: 9906 - DNA, 1927 bp, Homo sapiens
tgccattacacccggctaacttttgtattttttgtagagacggggttttgccatcttgctggtcttggactcctgagctcaagtgatccacccacctaggcctcccaaagtgctgggattacaggcatgagccactgcgcccagcctaaaaaatactttttgaaatctcagctagattcattggctaacaaggtaattctgtcagaactgaagctattaaggcagggaagattctactcactttttaaatcctagtttaaatttttaaaaaatcctttaaaattcataagttctaaatctgcatagaaacatatacagatatagctatccaaagcattctcactttaaacttttgtgagacctcacaaagaaattatagagttttctagactcaaaatcacgaaacgtctggcatcctttgctgtcaagaaccgtacaagaatcaccctcacttattgagatgctgttatctgttccaaccaaggaattccagacgttaacaaacgcagagaaggacctgggaagcagaggcagctgaggtggggctcactgagaagatgtcttagggtttgggggtgttcctacccttgcactcatcaaccatgtacccccgaacatcacctcttcctgaactaggggaccggaggtcattttacagagattgctgtaatggttcattctgtgggcaggtgtgattgggcaggtaggggagagatggtgaattggaaagacatgttgaactgagtctgaattagtttctttcttttgcccctgatgaagatggaaatgggtttcctctttgccttttcacacaagtgctgcagacaacgtctgtgattgcaccaactcctggtgcctcacccagagcatcgcctccccagatgttattcatccttgtgttttctcctggcctgaaaggagacagctttgactctccaggagatgggaaactagttttctactaaattcccattctagcctacaaattcctatcagaacaacagccccccactaactggattgttgttacgcctccactttactctgtgacacctgcagacatctctatattgtactttttcccaatgaattaagatcacaagaggatatatgcttttcacaatttgcctctgtgtcttagtgcagtgtacatactattgtgaaaatatagatgtagctgggtgtttgtgttggctctaaacaaaccagttcttgcaatcctggccagtttccacctgtgtctacatatccctcaaatacaagaacaatgcatagcccaaaatcagcctgtgtgatagatgcaatctggggaaggtgaagttaacttatgatgcaaaaaggcagaatggaaagccatggttggcaagatgatgacaaaagctaaataaatgtccttgacctagaactacagagaagatgttctctgggaagacttgtgagtgcacrtctcaaatttcgaaactctgatcttccttgccaacccctaccccacctctattcccctccaaagccctaaatataaatcgctatgtcttctttcacaaaatagagaccaaactcctcgtcaggcacagaatatacaaggcttttctttggtctagactctctacctttccagcttcctcttcagttatctccctctcataatccatgctccagtcaaagtgagttattgtcctcatcctccattatgctgtgtcttacccccaacacccccaggtcatgttccctctccactagaccctttcctccctgcttcacgtggtggagagtctttggcacgtgttgactcatgtcctctggatcctctccaaatgtgtgaggacattcctcacttgtgagccttgttgggagacagtgcttgtcttcctttacagaagttgaaaagacccagcactcaatctgccgctaccttggcagataagat

SEQ ID NO: 9907 - DNA, 1927 bp, Homo sapiens
tgccattacacccggctaacttttgtattttttgtagagacggggttttgccatcttgctggtcttggactcctgagctcaagtgatccacccacctaggcctcccaaagtgctgggattacaggcatgagccactgcgcccagcctaaaaaatactttttgaaatctcagctagattcattggctaacaaggtaattctgtcagaactgaagctattaaggcagggaagattctactcactttttaaatcctagtttaaatttttaaaaaatcctttaaaattcataagttctaaatctgcatagaaacatatacagatatagctatccaaagcattctcactttaaacttttgtgagacctcacaaagaaattatagagttttctagactcaaaatcacgaaacgtctggcatcctttgctgtcaagaaccgtacaagaatcaccctcacttattgagatgctgttatctgttccaaccaaggaattccagacgttaacaaacgcagagaaggacctgggaagcagaggcagctgaggtggggctcactgagaagatgtcttagggtttgggggtgttcctacccttgcactcatcaaccatgtacccccgaacatcacctcttcctgaactaggggaccggaggtcattttacagagattgctgtaatggttcattctgtgggcaggtgtgattgggcaggtaggggagagatggtgaattggaaagacatgttgaactgagtctgaattagtttctttcttttgcccctgatgaagatggaaatgggtttcctctttgccttttcacacaagtgctgcagacaacgtctgtgattgcaccaactcctggtgcctcacccagagcatcgcctccccagatgttattcatccttgtgttttctcctggcctgaaaggagacagctttgactctccaggagatgggaaactagttttctactaaattcccattctagcctacaaattcctatcagaacaacagccccccactaactggattgttgttacgcctccactttactctgtgacacctgcagacatctctatattgtactttttcccaatgaattaagatcacaagaggatatatgcttttcacaatttgcctctgtgtcttagtgcagtgtacatactattgtgaaaatatagatgtagctgggtgtttgtgttggctctaaacaaaccagttcttgcaatcctggccagtttccacctgtgtctacatatccctcaaatacaagaacaatgcatagcccaaaatcagcctgtgtgatagatgcaatctggggaaggtgaagttaacttatgatgcaaaaaggcagaatggaaagccatggttggcaagatgatgacaaaagctaaataaatgtccttgacctagaactacagagaagatgttctctgggaagacttgtgagtgcacgtctcaaatttcgaaactctgatcttccttgccaacccctaccccacctctattcccctccaaagccctaaatataaatcgctatgtcttctttcacaaaataragaccaaactcctcgtcaggcacagaatatacaaggcttttctttggtctagactctctacctttccagcttcctcttcagttatctccctctcataatccatgctccagtcaaagtgagttattgtcctcatcctccattatgctgtgtcttacccccaacacccccaggtcatgttccctctccactagaccctttcctccctgcttcacgtggtggagagtctttggcacgtgttgactcatgtcctctggatcctctccaaatgtgtgaggacattcctcacttgtgagccttgttgggagacagtgcttgtcttcctttacagaagttgaaaagacccagcactcaatctgccgctaccttggcagataagat

SEQ ID NO: 9908 - DNA, 1927 bp, Homo sapiens
tgccattacacccggctaacttttgtattttttgtagagacggggttttgccatcttgctggtcttggactcctgagctcaagtgatccacccacctaggcctcccaaagtgctgggattacaggcatgagccactgcgcccagcctaaaaaatactttttgaaatctcagctagattcattggctaacaaggtaattctgtcagaactgaagctattaaggcagggaagattctactcactttttaaatcctagtttaaatttttaaaaaatcctttaaaattcataagttctaaatctgcatagaaacatatacagatatagctatccaaagcattctcactttaaacttttgtgagacctcacaaagaaattatagagttttctagactcaaaatcacgaaacgtctggcatcctttgctgtcaagaaccgtacaagaatcaccctcacttattgagatgctgttatctgttccaaccaaggaattccagacgttaacaaacgcagagaaggacctgggaagcagaggcagctgaggtggggctcactgagaagatgtcttagggtttgggggtgttcctacccttgcactcatcaaccatgtacccccgaacatcacctcttcctgaactaggggaccggaggtcattttacagagattgctgtaatggttcattctgtgggcaggtgtgattgggcaggtaggggagagatggtgaattggaaagacatgttgaactgagtctgaattagtttctttcttttgcccctgatgaagatggaaatgggtttcctctttgccttttcacacaagtgctgcagacaacgtctgtgattgcaccaactcctggtgcctcacccagagcatcgcctccccagatgttattcatccttgtgttttctcctggcctgaaaggagacagctttgactctccaggagatgggaaactagttttctactaaattcccattctagcctacaaattcctatcagaacaacagccccccactaactggattgttgttacgcctccactttactctgtgacacctgcagacatctctatattgtactttttcccaatgaattaagatcacaagaggatatatgcttttcacaatttgcctctgtgtcttagtgcagtgtacatactattgtgaaaatatagatgtagctgggtgtttgtgttggctctaaacaaaccagttcttgcaatcctggccagtttccacctgtgtctacatatccctcaaatacaagaacaatgcatagcccaaaatcagcctgtgtgatagatgcaatctggggaaggtgaagttaacttatgatgcaaaaaggcagaatggaaagccatggttggcaagatgatgacaaaagctaaataaatgtccttgacctagaactacagagaagatgttctctgggaagacttgtgagtgcacgtctcaaatttcgaaactctgatcttccttgccaacccctaccccacctctattcccctccaaagccctaaatataaatcgctatgtcttctttcacaaaatagagaccaaactcctcgtcaggcacagaatatacaaggcttttctttggtctagactctctacctttccagcttcctcttcagttatctccctctcataatccatgctccagtcaaagtgagttattgtcctcatcctccattatgctgtgtcttacmcccaacacccccaggtcatgttccctctccactagaccctttcctccctgcttcacgtggtggagagtctttggcacgtgttgactcatgtcctctggatcctctccaaatgtgtgaggacattcctcacttgtgagccttgttgggagacagtgcttgtcttcctttacagaagttgaaaagacccagcactcaatctgccgctaccttggcagataagat

SEQ ID NO: 9909 - DNA, 1927 bp, Homo sapiens
tgccattacacccggctaacttttgtattttttgtagagacggggttttgccatcttgctggtcttggactcctgagctcaagtgatccacccacctaggcctcccaaagtgctgggattacaggcatgagccactgcgcccagcctaaaaaatactttttgaaatctcagctagattcattggctaacaaggtaattctgtcagaactgaagctattaaggcagggaagattctactcactttttaaatcctagtttaaatttttaaaaaatcctttaaaattcataagttctaaatctgcatagaaacatatacagatatagctatccaaagcattctcactttaaacttttgtgagacctcacaaagaaattatagagttttctagactcaaaatcacgaaacgtctggcatcctttgctgtcaagaaccgtacaagaatcaccctcacttattgagatgctgttatctgttccaaccaaggaattccagacgttaacaaacgcagagaaggacctgggaagcagaggcagctgaggtggggctcactgagaagatgtcttagggtttgggggtgttcctacccttgcactcatcaaccatgtacccccgaacatcacctcttcctgaactaggggaccggaggtcattttacagagattgctgtaatggttcattctgtgggcaggtgtgattgggcaggtaggggagagatggtgaattggaaagacatgttgaactgagtctgaattagtttctttcttttgcccctgatgaagatggaaatgggtttcctctttgccttttcacacaagtgctgcagacaacgtctgtgattgcaccaactcctggtgcctcacccagagcatcgcctccccagatgttattcatccttgtgttttctcctggcctgaaaggagacagctttgactctccaggagatgggaaactagttttctactaaattcccattctagcctacaaattcctatcagaacaacagccccccactaactggattgttgttacgcctccactttactctgtgacacctgcagacatctctatattgtactttttcccaatgaattaagatcacaagaggatatatgcttttcacaatttgcctctgtgtcttagtgcagtgtacatactattgtgaaaatatagatgtagctgggtgtttgtgttggctctaaacaaaccagttcttgcaatcctggccagtttccacctgtgtctacatatccctcaaatacaagaacaatgcatagcccaaaatcagcctgtgtgatagatgcaatctggggaaggtgaagttaacttatgatgcaaaaaggcagaatggaaagccatggttggcaagatgatgacaaaagctaaataaatgtccttgacctagaactacagagaagatgttctctgggaagacttgtgagtgcacgtctcaaatttcgaaactctgatcttccttgccaacccctaccccacctctattcccctccaaagccctaaatataaatcgctatgtcttctttcacaaaatagagaccaaactcctcgtcaggcacagaatatacaaggcttttctttggtctagactctctacctttccagcttcctcttcagttatctccctctcataatccatgctccagtcaaagtgagttattgtcctcatcctccattatgctgtgtcttacccccaacacccccaggtcatgttccctctccactagaccctttcctccctgcttcacstggtggagagtctttggcacgtgttgactcatgtcctctggatcctctccaaatgtgtgaggacattcctcacttgtgagccttgttgggagacagtgcttgtcttcctttacagaagttgaaaagacccagcactcaatctgccgctaccttggcagataagat

SEQ ID NO: 9910 - DNA, 577 bp, Homo sapiens
tattaacactgtgtcaggacctgccactaactcacttgtcccccttctgrgctgtaagttcttgaggacacagactaggttttgcccctctctatccctagaacccagaacagtatgttaacatggcatgcagtaatagcattacagcaacagtactaataccagtaataacaataacttttattgagcacctattatgtgccaaggtgcagaaaaaaatgcttatttgataaataatgtacactgaaaattgctcaccgaatatttttgaatactttcatactcacagagtatttttgtattttgaatacaggcaaccctgaggaaaaattggtacatcccacttcaccaattaattcccttttcattttctctctcttttctccttctggatatgtctcttgtgttccgctcttgccctcaaatagatgttatttaatacctagaaagatgaatagcagtggctacagtgttagttgctagtgactgcgcttgcctttcagaagaagcttcttatagtgtgaaaagttttcagaaggaatgaggtctttattgtggaatgccttacagtaggcca

SEQ ID NO: 9911 - DNA, 577 bp, Homo sapiens
tattaacactgtgtcaggacctgccactaactcacttgtcccccttctgggctgtaagttcttgaggacacagactaggttttgcccctctctatccctagaacccagaacagtatgttaacatggcatgcagtaatagcattacagcaacagtactaataccagtaataacaataacttttattgagcacctattatgtrccaaggtgcagaaaaaaatgcttatttgataaataatgtacactgaaaattgctcaccgaatatttttgaatactttcatactcacagagtatttttgtattttgaatacaggcaaccctgaggaaaaattggtacatcccacttcaccaattaattcccttttcattttctctctcttttctccttctggatatgtctcttgtgttccgctcttgccctcaaatagatgttatttaatacctagaaagatgaatagcagtggctacagtgttagttgctagtgactgcgcttgcctttcagaagaagcttcttatagtgtgaaaagttttcagaaggaatgaggtctttattgtggaatgccttacagtaggcca

SEQ ID NO: 9912 - DNA, 577 bp, Homo sapiens
tattaacactgtgtcaggacctgccactaactcacttgtcccccttctgggctgtaagttcttgaggacacagactaggttttgcccctctctatccctagaacccagaacagtatgttaacatggcatgcagtaatagcattacagcaacagtactaataccagtaataacaataacttttattgagcacctattatgtgccaaggtgcagaaaaaaatgcttattkgataaataatgtacactgaaaattgctcaccgaatatttttgaatactttcatactcacagagtatttttgtattttgaatacaggcaaccctgaggaaaaattggtacatcccacttcaccaattaattcccttttcattttctctctcttttctccttctggatatgtctcttgtgttccgctcttgccctcaaatagatgttatttaatacctagaaagatgaatagcagtggctacagtgttagttgctagtgactgcgcttgcctttcagaagaagcttcttatagtgtgaaaagttttcagaaggaatgaggtctttattgtggaatgccttacagtaggcca

SEQ ID NO: 9913 - DNA, 577 bp, Homo sapiens
tattaacactgtgtcaggacctgccactaactcacttgtcccccttctgggctgtaagttcttgaggacacagactaggttttgcccctctctatccctagaacccagaacagtatgttaacatggcatgcagtaatagcattacagcaacagtactaataccagtaataacaataacttttattgagcacctattatgtgccaaggtgcagaaaaaaatgcttatttgataaataatgtacactgaaaattgctcaccgaatatttttgaatactttcataytcacagagtatttttgtattttgaatacaggcaaccctgaggaaaaattggtacatcccacttcaccaattaattcccttttcattttctctctcttttctccttctggatatgtctcttgtgttccgctcttgccctcaaatagatgttatttaatacctagaaagatgaatagcagtggctacagtgttagttgctagtgactgcgcttgcctttcagaagaagcttcttatagtgtgaaaagttttcagaaggaatgaggtctttattgtggaatgccttacagtaggcca

SEQ ID NO: 9914 - DNA, 577 bp, Homo sapiens
tattaacactgtgtcaggacctgccactaactcacttgtcccccttctgggctgtaagttcttgaggacacagactaggttttgcccctctctatccctagaacccagaacagtatgttaacatggcatgcagtaatagcattacagcaacagtactaataccagtaataacaataacttttattgagcacctattatgtgccaaggtgcagaaaaaaatgcttatttgataaataatgtacactgaaaattgctcaccgaatatttttgaatactttcatactcacagagtatttttgtattttgaatacaggcaaccctgaggaaaaattggtacatcccacttcaccaattaattcccttttcattttctctctcttttctccttctggatatgtctcttgtgttccrctcttgccctcaaatagatgttatttaatacctagaaagatgaatagcagtggctacagtgttagttgctagtgactgcgcttgcctttcagaagaagcttcttatagtgtgaaaagttttcagaaggaatgaggtctttattgtggaatgccttacagtaggcca

SEQ ID NO: 9915 - DNA, 526 bp, Homo sapiens
tttacacacagccctctggccccagactgcattagctgccttttccattccttaatgcaccctcaatatacttttatcatatagaagttggtcatatctatttatgtgcctgtctcttgcatttggcagatattccttgaaggcaaggacttatcacctttgcttcttgagagcctagcaatgtttactgaactgaactgaaaataaatgaaactatggggaaaaatatattggtgggtatgagagtatttctgaggattataaatgtttagaaaagtagaaattgtttttcttacttatgcaaataatacctcatggtttacaaagtgttttcataaaagttatatcgtttgatccttaaaacaacccaagaaggtagggtaaggcagatattgaggctgatagagaccctaaatacataagaaatttctccaaaaagagaaacattattgatttttaaaaggggtgtgtgtgtttgtgtgtgtgtgtgtgtrtgttcagatagatcttcataagatcagagctc

SEQ ID NO: 9916 - DNA, 671 bp, Homo sapiens
gccacaaatgagcccctgggttaagaaacttaaccgttttccccttgacgcgcacacagacacacacccatctctccagccccaccctgagccactctccagcttgcacctctgcggtcctgccccagagcctgacaggtgtctgagatgctcctcctctcgaagcttcgtactcattcttcagacctcagctccaccatcccctccccagcacacacttccttggcgcagaatccagggcgcaataactactcaagggaatgaagggaatcggtgaatgcattatgacacgtgcaacacaaaatgtgcagaaatcaaaaacatttaagygcaaagatttaaaacacacattggggccggccgtggtggctaacgcctgtaatcacagcactttgggaggctgaggcaggcatatcacttgaggtcaggagtttgaggccagcctggccaacatggtgaaaccccgtctctactaaaaatacaaaaattagctgggcgtggtgctgcgagcaggtcatggtggcagacacctgtaatcccagctatttgggaggctgaggcaggagaatcgcttgaacccgggaggcggaggttgcagtgagccaagatcgtgccacttgcactccagcctgggcaacagagcaagactgtctcaatcaatcaatcaatta

SEQ ID NO: 9917 - DNA, 522 bp, Homo sapiens
tgtrtagagtttaaaaacctggaattgggaacaagaggagctattgaacattttattcatctaatagaaggaggaaataaataaaagtaaaaaagtaaacacaaaataaggtaatggagataaatttaaaaatcatgtttttaaatgattttaaagggatggaactcaactatttaaaggtgaagactgccagtcagtgtgaattgtttaaaaaagtccaacaatttggggctggacaaccagtcaaatggttgaaataagaagatgggaaaaaatatgtcaggtaaatactttatttcattggatttatgacttcccctgtaagatgcattattattttatataataccaaaaaaaaaaaaacaacaaaggcagctaaattctgaaattaattgcatatgcatcatgatttcagatatattaaactgtgaaaaaagtgcgttaaaatggtaaagcacaataatcaaaataaagtttgtatagcaatattaatatcacataaaatataaattagaacaaaaa

SEQ ID NO: 9918 - DNA, 522 bp, Homo sapiens
tgtgtagagtttaaaaacctggaattgggaacaagaggagctattgaacattttattcatctaatagaaggaggaaataaataaaagtaaaaaagtaaacacaaaataaggtaatggagataaatttaaaaatcatgtttttaaatgattttaaagggatggaactcaactatttaaaggtgaagactgccagtcagtgtgaattgtttaaaaaagtccaacaatttggggctggacaaccagtcaaatggttgaaataagaagatgggaaaaaatatgtcaggtaaatactttatttcattggatttatgacttcccctgtaagatgcattattattttatataataccaaaaaaaaaaaaacaacaaaggcagctaaattctgaaattaattgcatatgcatcatgatttcagatatattaaactgtgaaaaaagtgcgttaaaatggtaaagcacaataatcaaaataaagttkgtatagcaatattaatatcacataaaatataaattagaacaaaaa

SEQ ID NO: 9919 - DNA, 575 bp, Homo sapiens
gcggtgagctatgatctcaccactgcactccagcttgggggacagggcaagtctgtctcaaaaaaataaaagaaattgaatacattgatattttgccaggaccctgccttctacaggcatctagtctaatgggactgggagtaatcaaggcagatgacctaatcccagtgtccaggatgtaactagagagctacgggcatgcagaagttggaagatgagggaaggcatcacagaggctgtggggtgaactgayttcaaggaatgggtccttcccttcagagccacatgtgtgcgggacacccagacagaaaacacaaacacaaagtcgagtggagggcatttggaaggagcagtgaagccgagccaggaaataccaagatggcgagccagtgtgcttgtagagattgtagagagggtagaattgacactgtggaccctggcctcgatagagaaaggcatcagctaaggaagttgttcaggtgggcagtgaggttgtcgtgctttggaaagatgttcaggctgcactaggaagccccctggcttggggagagactccaggagaccccagcggggag

SEQ ID NO: 9920 - DNA, 575 bp, Homo sapiens
gcggtgagctatgatctcaccactgcactccagcttgggggacagggcaagtctgtctcaaaaaaataaaagaaattgaatacattgatattttgccaggaccctgccttctacaggcatctagtctaatgggactgggagtaatcaaggcagatgacctaatcccagtgtccaggatgtaactagagagctacgggcatgcagaagttggaagatgagggaaggcatcacagaggctgtggggtgaactgatttcaaggaatgggtccttcccttcagagccacatgtrtgcgggacacccagacagaaaacacaaacacaaagtcgagtggagggcatttggaaggagcagtgaagccgagccaggaaataccaagatggcgagccagtgtgcttgtagagattgtagagagggtagaattgacactgtggaccctggcctcgatagagaaaggcatcagctaaggaagttgttcaggtgggcagtgaggttgtcgtgctttggaaagatgttcaggctgcactaggaagccccctggcttggggagagactccaggagaccccagcggggag

SEQ ID NO: 9921 - DNA, 575 bp, Homo sapiens
gcggtgagctatgatctcaccactgcactccagcttgggggacagggcaagtctgtctcaaaaaaataaaagaaattgaatacattgatattttgccaggaccctgccttctacaggcatctagtctaatgggactgggagtaatcaaggcagatgacctaatcccagtgtccaggatgtaactagagagctacgggcatgcagaagttggaagatgagggaaggcatcacagaggctgtggggtgaactgatttcaaggaatgggtccttcccttcagagccacatgtgtgcgggacacccagacagaaaacacaaacacaaagtcgagtggagggcatttggaaggagcagtgaagccgagccaggaaataccaagatggcgagccagtgtgcttgtagagattgtagagagggtagaattgayactgtggaccctggcctcgatagagaaaggcatcagctaaggaagttgttcaggtgggcagtgaggttgtcgtgctttggaaagatgttcaggctgcactaggaagccccctggcttggggagagactccaggagaccccagcggggag

SEQ ID NO: 9922 - DNA, 441 bp, Homo sapiens
caaaaccccgtttctactaaaaacacaaaaattagccaggcgtggtggttcatgtctgtaatcccagctgcttggaggctgaggcaggagaatcgcttgaacccaggacgcatcggctgcagtgagtcaagatcgagacactgccctccagcctgggcaacagagcaagactctgtctcacacacacacacacacacacacacacacaaaaaaaaaaaamaaaaaaaaaaaaagactgtaggagcatctggtgggaggtggtggagggagaactgtgggtttggaagctgcgccctccccccagccatgcgttggaacaggaacagttacatggagaacaaccttaccttgtccgacaccctcagatctttgtcccaggccaagaatcttttaatgacaggatcctctgtgattagagagcagatgtcagtgtgagaagca

SEQ ID NO: 9923 - DNA, 441 bp, Homo sapiens
caaaaccccgtttctactaaaaacacaaaaattagccaggcgtggtggttcatgtctgtaatcccagctgcttggaggctgaggcaggagaatcgcttgaacccaggacgcatcggctgcagtgagtcaagatcgagacactgccctccagcctgggcaacagagcaagactctgtctcacacacacacacacacacacacacacacaaaaaaaaaaaaaamaaaaaaaaaaagactgtaggagcatctggtgggaggtggtggagggagaactgtgggtttggaagctgcgccctccccccagccatgcgttggaacaggaacagttacatggagaacaaccttaccttgtccgacaccctcagatctttgtcccaggccaagaatcttttaatgacaggatcctctgtgattagagagcagatgtcagtgtgagaagca

SEQ ID NO: 9924 - DNA, 822 bp, Homo sapiens
cccagcactttgggtggccaagggaggaagattgcctgaggccagcagttcgagaccagtataggcaacatagcaagagcccatctctaaaaaaacaaaaccaaaccaaattagccaggtgtggtggctggcacctgtgttccaactacttgggagactcatgtgacaggaagatcacttgagcccaggagttagaagctgcagtgagccgtgatcttgccactgcactccagtctgggcaacacagcaagatactgtgtcaaaaaaattttttttgataaaaaataaaagagttacatgacattcagagaccatccaaaaaacctgtgggttcccggctgggctcagtggctcatgcctgtaatcccagcactttgggaggccaaagtgggtggatcacttgaggtcaggagtttgagaccagcctggacaacatggtgaaaccccatctctactaaaaatacaaaaaattagccaggcatggtggtggatrcctgtaatcgcagctactcaggagagggcgctggagaatcacttgaactcatggtgcgcaggttgcagggagccaagatggcaccattgtgctccagcctgggcaacaagagcaaaactccatctcaaaaaaaataaagaacctgcgagtgagttcccacacgttttcctaatgggctgctgctttcctaggagtctctcgctcatagaaaaggcacaaactgaaagaggaagcagatcccattgctgtggaagtcccattgttaggaagctctgcttttctggagttcaaattcgcattcatgacgctttaaaccgtcagagctgggt

SEQ ID NO: 9925 - DNA, 822 bp, Homo sapiens
cccagcactttgggtggccaagggaggaagattgcctgaggccagcagttcgagaccagtataggcaacatagcaagagcccatctctaaaaaaacaaaaccaaaccaaattagccaggtgtggtggctggcacctgtgttccaactacttgggagactcatgtgacaggaagatcacttgagcccaggagttagaagctgcagtgagccgtgatcttgccactgcactccagtctgggcaacacagcaagatactgtgtcaaaaaaattttttttgataaaaaataaaagagttacatgacattcagagaccatccaaaaaacctgtgggttcccggctgggctcagtggctcatgcctgtaatcccagcactttgggaggccaaagtgggtggatcacttgaggtcaggagtttgagaccagcctggacaacatggtgaaaccccatctctactaaaaatacaaaaaattagccaggcatggtggtggatgcctgtaatcgcagctactcaggagagggcgctggagaatcacttgaactcatggtgcgcaggttgcagggagccaagatsgcaccattgtgctccagcctgggcaacaagagcaaaactccatctcaaaaaaaataaagaacctgcgagtgagttcccacacgttttcctaatgggctgctgctttcctaggagtctctcgctcatagaaaaggcacaaactgaaagaggaagcagatcccattgctgtggaagtcccattgttaggaagctctgcttttctggagttcaaattcgcattcatgacgctttaaaccgtcagagctgggt

SEQ ID NO: 9926 - DNA, 822 bp, Homo sapiens
cccagcactttgggtggccaagggaggaagattgcctgaggccagcagttcgagaccagtataggcaacatagcaagagcccatctctaaaaaaacaaaaccaaaccaaattagccaggtgtggtggctggcacctgtgttccaactacttgggagactcatgtgacaggaagatcacttgagcccaggagttagaagctgcagtgagccgtgatcttgccactgcactccagtctgggcaacacagcaagatactgtgtcaaaaaaattttttttgataaaaaataaaagagttacatgacattcagagaccatccaaaaaacctgtgggttcccggctgggctcagtggctcatgcctgtaatcccagcactttgggaggccaaagtgggtggatcacttgaggtcaggagtttgagaccagcctggacaacatggtgaaaccccatctctactaaaaatacaaaaaattagccaggcatggtggtggatgcctgtaatcgcagctactcaggagagggcgctggagaatcacttgaactcatggtgcgcaggttgcagggagccaagatggcaccattgtgctccagcctgggcaacaagagcaaaactccatctcaaaaaaaataaagaacctgcgagtgagttcccacacgttttcctratgggctgctgctttcctaggagtctctcgctcatagaaaaggcacaaactgaaagaggaagcagatcccattgctgtggaagtcccattgttaggaagctctgcttttctggagttcaaattcgcattcatgacgctttaaaccgtcagagctgggt

SEQ ID NO: 9927 - DNA, 549 bp, Homo sapiens
catgttgtaagtagaaaatgtgttagcattaggtgagacatgggtggtctgtttgtgcatatataaacatcttggtgctaaaggtctttttacaaaatttgccaattggctgcaggcaagacttgccaaagatgagagattagtgaatttagtggatttagggggaggcagatgtctaagtaaaacaaataaaacacttacattggaggtataaattaagttttttgaattttgatatatstgaaaattcttcagaggtgaatttgtaatgcatgtctaatattttaaatattaattttctttagtctataactccctcagttgttggatctgctagacattcagtatgtgccacctttgaaaataatactctgtggtcaataaaaaataaataacaagtatttaaaaactcactgtgtttagtgaaattaaattttaatcaaaacacatttttatatttgatcatatggatagttagattatccttgagaaattggatagcaaattgcattttaatatagtagaaactctactattcaatttatgtag

SEQ ID NO: 9928 - DNA, 518 bp, Homo sapiens
ggtatctgtttactattccctgatatctattctctccttccaaagtttttgctggacaagtagtcacccagctaaagcctatacttcctaccctcccttgcatctaggtgtggccatgtgatcaatttgatgtgaatgaccaatgcaatgtgaccagaagtgatgtgtgttctatccacataatacycttaaagtctgggtgtatactcctcctgtccttgttcctcttcccaccgctgggtgatggtgagtgttagagcagccaatttggacccagagatagaagccatgtgttgaggatggtaaaacctccttatgaggcttggagtgcccacctctaaactttacagagacaaaaaaaattctgtcttgtttcaagtgctgtatttttagcttcctttgtcactatatcttaaatattttaaatagcactaaagtggagaagaattccaatgagccagattggttgtaggaagattaattaaaaagatgggatgatatctggggacttgaaatga

SEQ ID NO: 9929 - DNA, 564 bp, Homo sapiens
tcattaaaaaacggatcatataaaactgctcaattcatgatactgttttccagttccttgagtttttcattaatggggattttattttggttttctaaaacacagtaataattttccccttcttaaaaccaygtttgttttcgaataaataggtgccaaatttgcagcccaattctaaagatgatgaaatatatttcattgtgtattttataataaaaaaatccttttctatttaaaaaaattctcaaaggttaatttctaatgtttttctatgggaaaccagtaactattaagtgccaaattttaaagataactttacctcgctaacacggtgaaaccccatctctactaaaaatacaaaaaattagccgggcatggtggcaggtgcttgtagtcccagctactcgggaggctgaggcaggagaatggcatgaacccaggaggcagagcttgcagtgagccgagatcgcaccactgcactccagcctggatgacagagcaagactccatctcaaaaaaaaaaaaaaaaaaaaaagaaaactttagagttttagagaaggaatt

SEQ ID NO: 9930 - DNA, 563 bp, Homo sapiens
caaagattgtatagtcaactgttaataagtaaattttgagaatctgcaacatattgtttataggtaccaagttaaacacagttactgcccatcatgttgcattattgccagttttcagttactcaccctaatttttttagcgtactgttacatagtatttcccctgagccaagcactgttctaaatgctttgtaaatagtaacacagtaaattctcgcaaccgtcrtatatgagacatctgctaataccattcttattttacagaggaggaaactgaagcacagaaagagtaaatggtttacccaaagtcacacagttagtaagtagcagagctgacatttaaaccgagcagccacactcctagagttcatgcctttaactactatgccactgtaacaatgggcagcaacatgaggaaagaaacctatatagaagtaatagtatgggctgggcacggtggctcatgcctgtaatcccagcactttgggaggctgaggcgggcagatcacgaggtcaggagatcgagaccatcctggctaacgcggtgaaaccccgtctctact

SEQ ID NO: 9931 - DNA, 563 bp, Homo sapiens
caaagattgtatagtcaactgttaataagtaaattttgagaatctgcaacatattgtttataggtaccaagttaaacacagttactgcccatcatgttgcattattgccagttttcagttactcaccctaatttttttagcgtactgttacatagtatttcccctgagccaagcactgttctaaatgctttgtaaatagtaacacagtaaattctcgcaaccgtcgtatatgagacatctgctaataccattcttattttacagaggaggaaactgaagcacagaaagagtaaatggtttacccaaagtcacacagttagtaagtagcagagctgacatttaaaccgagcagccacactcctagagttcatgcctttaactactatgccactrtaacaatgggcagcaacatgaggaaagaaacctatatagaagtaatagtatgggctgggcacggtggctcatgcctgtaatcccagcactttgggaggctgaggcgggcagatcacgaggtcaggagatcgagaccatcctggctaacgcggtgaaaccccgtctctact

SEQ ID NO: 9932 - DNA, 511 bp, Homo sapiens
aaaaaaaamaaaaacacacacacacacacacacacacacaaacactggactaggttttaaaagacctgggatctagttaataaatctgtgttcttgaccaagtcattacacctttctaatctcagctttctccttgggaaaagttttaagaagattaaaggagataacagattgctttgtaacacatataaattggtattattgtggctagagtccctattgctttttatctgcttctaagaacagatccaggatgttgtacagaactgcagaaaaaaaaaatgctcttttcataatgcatttatttggttacaaaaacatcatggcatttaataacgtactataaaataggctctgataaactctgattgacagagactggctgtcttgacctggttaacgggaaatgccctgggcctcagacccaaggctgacatattgttcagtttcacagcttccactccccagcccaaagccaacaacgaattcagggaaattactggatgagacc

SEQ ID NO: 9933 - DNA, 511 bp, Homo sapiens
aaaaaaaaaamaaacacacacacacacacacacacacacaaacactggactaggttttaaaagacctgggatctagttaataaatctgtgttcttgaccaagtcattacacctttctaatctcagctttctccttgggaaaagttttaagaagattaaaggagataacagattgctttgtaacacatataaattggtattattgtggctagagtccctattgctttttatctgcttctaagaacagatccaggatgttgtacagaactgcagaaaaaaaaaatgctcttttcataatgcatttatttggttacaaaaacatcatggcatttaataacgtactataaaataggctctgataaactctgattgacagagactggctgtcttgacctggttaacgggaaatgccctgggcctcagacccaaggctgacatattgttcagtttcacagcttccactccccagcccaaagccaacaacgaattcagggaaattactggatgagacc

SEQ ID NO: 9934 - DNA, 511 bp, Homo sapiens
aaaaaaaaaaaamacacacacacacacacacacacacacaaacactggactaggttttaaaagacctgggatctagttaataaatctgtgttcttgaccaagtcattacacctttctaatctcagctttctccttgggaaaagttttaagaagattaaaggagataacagattgctttgtaacacatataaattggtattattgtggctagagtccctattgctttttatctgcttctaagaacagatccaggatgttgtacagaactgcagaaaaaaaaaatgctcttttcataatgcatttatttggttacaaaaacatcatggcatttaataacgtactataaaataggctctgataaactctgattgacagagactggctgtcttgacctggttaacgggaaatgccctgggcctcagacccaaggctgacatattgttcagtttcacagcttccactccccagcccaaagccaacaacgaattcagggaaattactggatgagacc

SEQ ID NO: 9935 - DNA, 678 bp, Homo sapiens
aaaaaatcccaacaaccaaacaaaaatgatatcatcttcatttcayggatgagaaaacagaagttaagtgagtaagtaatttccccaagatcacacagcaagacagtggcaggcctggtggttagagccagttatgcacacctcctttttcctctgcatttaggtgtaataattttgctgtctgtgctgtcactgtagactgaatcagtctcagccctcatctcaccgcattttcttggtctcacatttggactttgagagccagacatattagttttgaatcacagccatgttactaacttctgtgtaaccatggtaatatcacttcatctctctaattttcagtttcttaatttatgaaatagggattataccttccttagcttgttgtgagggttaaatgaagccaaggcagatgatatctgtcaagagtttagcacatatctgttgtacagtaagcattcaataaatgatgcctacatttattgtttttgttctctaaagggagatcagctgaaagactggtttatgtgaaaaaagaagagctttgaataatgctgtagttaactaatacatgtgaataatacactaatattcagagagtaccttctaggccaggatgaaaccagtggttgagtcagagttacagaagcatgagaagcagccacagtttcaaga

SEQ ID NO: 9936 - DNA, 611 bp, Homo sapiens
cattacatcctaaaagagcttttgaactaaaaagtatgctagatcataattaagcactgggatgaaactggtcgcaagagctgctggcccagaagccctcagatgtctcggtttctgtgtgaaggtctcagggtaggtgtggatctcgggtactgtgggtcagtgtgtgcaccctggaggctgggccgtctgtccagggacatcttatgctgcagagggctcgaagaggacaaagagagtgccccatttgctatttttacaaggcgattactgctgagccttgagcaaagactcacagccagtcaggaggtcttttggatgcagtcatgagattccctgagcctgtaagttatccaagagcaaggtctaagactgtggcaggaagcaagagtgagggtctgtgctaagattgacagcaaggaggggcctgaatgactcccacacacacawcaaccccgtgggggccactgagacaaaaaaccaggtgccccagagtggagtttggggccgtggagatataatgatctaccttcaactccaattgttcttaaacttcttcctttaagtttgcaaaaaaaattaagctcttgcttttttgtctatgcagtgaa

SEQ ID NO: 9937 - DNA, 547 bp, Homo sapiens
ttcttgaaagcccgaagttgtttatctgtaactatcccctttgtgtgttgcaggatgttaaagtctttagtgaagatgggacaagcaaagtggtggagattctagcagacatgacagccagagacctgtgccaattgctggtttacaaaagtcactgtgtggatgacaacagctggacactagtggagcaccacccgcacctaggattaggtagggaaccatcagaacaggattggcacctggggatgcttatgtgcaattgaatgaagacygctgctgccaaatgccaaatgtgtgaccgcagtgtcccctgcgaaattagcaggcagtctctgggttcccctcgactctcctgtttctcctaaaatttcactctcctccctccagcccctttcccctagtactttgggaatcttgccttggatggttgaggtaataacttgccaagggctcagacatggcgaggttccctgtggcttgtccagcctccccagctgtcagagccacatggagcttgctgcacacctgtgggcgggggacaggaggg

SEQ ID NO: 9938 - DNA, 547 bp, Homo sapiens
ttcttgaaagcccgaagttgtttatctgtaactatcccctttgtgtgttgcaggatgttaaagtctttagtgaagatgggacaagcaaagtggtggagattctagcagacatgacagccagagacctgtgccaattgctggtttacaaaagtcactgtgtggatgacaacagctggacactagtggagcaccacccgcacctaggattaggtagggaaccatcagaacaggattggcacctggggatgcttatgtgcaattgaatgaagactgctgctgccaaatgccaaatgtgtgaccgcagtgtcccctgcgaaattagcaggcagtctctgggttcccctygactctcctgtttctcctaaaatttcactctcctccctccagcccctttcccctagtactttgggaatcttgccttggatggttgaggtaataacttgccaagggctcagacatggcgaggttccctgtggcttgtccagcctccccagctgtcagagccacatggagcttgctgcacacctgtgggcgggggacaggaggg

SEQ ID NO: 9939 - DNA, 564 bp, Homo sapiens
atagaaacgtttccagatatgtctgctttagtttattatttggtaaaattcacatacagtaagattcactctttgtggtgtgccgttctatgagttttgaaaatccgtaagttcacatagctgccaccaccatcgagacacagaacggttccagcacctccccaaaattttgaccaccacttgtgctttaaactcagctcagtaacgcatatggtgtgagtccccagtaatgatagaaagcataggaacttcagtagctgcttgatgctgtgttcatttcacattaaaaacaaacaaacaaacaaaaaacctgtttcttctgggtcctgttagcaaaacttagtgttagtttctttcttctatttaaatatcttatgtcgaatttgtagtagaacgaaaatctttttgaaaactgttcagaaatctacaacctaragcatctgctattttgaatctttttttttttttttttttagcatccagtgaatgtacattttaggccaatttaaaattccgttttatgtttaaaactacaagacagccatattaaagggcttttagtta

SEQ ID NO: 9940 - DNA, 844 bp, Homo sapiens
tggaatatggtgatgtgcaaagatttgaagcaaatgattattgatagggtggtaggtgaagattacttgtgtttttttttttgagctcattttatgtttaaataccttttagggtcttttttccagtctcagtttaatgtttcctaagatgatgctctgctaaatgctttacaaaatcaacctgctcatgttggctcatttctgatcagtggtgtcagatttggttgaacaattggggctaattttctgaggatcccagaattgaatgacaattgtgaggctgtaagcctgtaatccactgagaggttataaagagatgttactagaattcttcctcagagtaatattccaaaattgggatgccaagccaggtagaagcaaagttttctccttgaaatggatttgaaaaagccaaactttttttttctatatgcgatgactatttgattattccaatattagtttgttgtttttctaggaaagatccagcaagaaagaaaccttgaagctctctttataatttaacattttttaccatatttgatgacaattatcatgtacaagttaacacatgctcattttaataaatcatgaagccggccgggcgcggtggctcacgcctgtaatcccagcactttgggaggtcaaggcgggcggatcaggaggtcaggagatcsagaccatcctggctaacatggtgaaaccccatctctactaaaaatacaaaaaattagccgggcgtagtggcgggcgcctgtagtcccagctactcgggaggctgaggcaggagaatggcgtgaacccaggaggcggagcttgcagtgagccgagattgaaccactgc

SEQ ID NO: 9941 - DNA, 571 bp, Homo sapiens
atactaagatatgataatggtaaaaagcaaagatgctgaaaagataacatgtttaaaggaaatacagtttctctgagatgtgtgtgggggtgggggttgagaatagggaaatagtttccttggagtatgtttgaagtagtgtcctacaggccacgtcttgcctatttcatgtatagatctttatctcttgtcatgcattgcttaatgatggggatacattctgaggaatatacccttaggcaacatcattaatgtaacaatatcatagagtgtacttacacaaacctagatggtatagcctactacacacytaggctacatggtatagcctattgctcctaggctgtaaacctgtttatcatgttattgtactgaatactgtaggcagttataatacattggtaaatatttatgtatctaaacatagaaatggtacagtaaaaatacaatgtgaaagataaaaaatggtacacctatatagggtacttactatgaatggaggttacaggactcaaagttgctctgggtgagtcagtgagtgagtggtgagtgaatgtgaaggcctaggaca

SEQ ID NO: 9942 - DNA, 565 bp, Homo sapiens
tatattgtgagagaaagcaaaactaaaaaaagaaaaaaaattgtctggaaaacagtacatgaatagcagactgccacatggaaataacattgcccaggttgaatcccatatgtgtgcaattactcttctaaggagataactccagctagtataaaactgttccaattaataaaaaataaaccaggggctgggtatggtggcttgtgcctgtaattgcggmattttgggattccgaagagggtggatcacttgagcccaggaattcgggaccagcctagacacatagtgagacctcgtctctacaaaaaaataaaaattaactgagcatggtggcacacgcctctgatcctagctacttgggaggctgagttggcaggaggatcgcttgagcctaggaggtcaaggctgaagtgagccatgattgtgccactgcactacagcctgagcaacagagcaagaccctgtctcaaaaaagtaagaagaaaaaaagagagaaagaaaaagagaatgagtggaaggaaggaaggaaggaaggaaggaaggaaggaaggaaggaaggaaggaa

SEQ ID NO: 9943 - DNA, 531 bp, Homo sapiens
gttagctgggcatggtggcaggcacctgtagtcccagctactcaggaggctgaggcaggagaatggcatgaacytcggaagcagagcttgcagtgagccgagatcgcaccactgcactccagcctgggcaatagagcaagacagtcaaaaaaaaaaaaaaaaaaaaaaaaaaaaggagttatcatagaaagcaatagttaattaccttctcttctcttttaatggtataatttttgtctgaattaccaatgtacagaaaattgagttttctatttaaaactgtgtcagagttctcaattttcaaatcaaatcgagtgaatgaagttcaacccacttatgatttgaaggcttctgtaatgagtttttgaaacacatttaaattaataaatgtttaagtgtatatgtgctatctgatcaaaataaaggtaacttacagaagctggtgccaattatgactacgcttaaataacatagtgatatagtaaacaaatcgtgaactcttggggatatcttggaagtgaacatattaat

SEQ ID NO: 9944 - DNA, 531 bp, Homo sapiens
gttagctgggcatggtggcaggcacctgtagtcccagctactcaggaggctgaggcaggagaatggcatgaacctcggaagcagagcttgcagtgagcygagatcgcaccactgcactccagcctgggcaatagagcaagacagtcaaaaaaaaaaaaaaaaaaaaaaaaaaaaggagttatcatagaaagcaatagttaattaccttctcttctcttttaatggtataatttttgtctgaattaccaatgtacagaaaattgagttttctatttaaaactgtgtcagagttctcaattttcaaatcaaatcgagtgaatgaagttcaacccacttatgatttgaaggcttctgtaatgagtttttgaaacacatttaaattaataaatgtttaagtgtatatgtgctatctgatcaaaataaaggtaacttacagaagctggtgccaattatgactacgcttaaataacatagtgatatagtaaacaaatcgtgaactcttggggatatcttggaagtgaacatattaat

SEQ ID NO: 9945 - DNA, 558 bp, Homo sapiens
tacagttatactcataaatgaattatagatgcttatttgtttaaatctagatttttaacatacttaaatgaaaatacttttaagttaattatattgctgcttaaacaaacactttgattgaataaatttaacttcacagaaattcaggcatcctagttttctcagtaaaggtactggttgtaatagaaattgaattagaatggcacacattatgttgttttacatgatgttaggtacgtatagatataacagcatgccaaaaacaccwtcctcttttgttgtgtatttcttactcagtcacagttgtatgaaaactacaattatttcatttagcaattgataaaaacttgtatttatgttcatggtatagatatgtctagctataggaaatgtattaagagccttatgtaattaactgaatagttcaacttcctaaaacagtttcatttgaagtcaataaataattgcaataaatttaccagaactttgagggatagcaataatggttaaaataatatggccctgtgcatagaaatgtttagtttgtttctgaatgat

SEQ ID NO: 9946 - DNA, 552 bp, Homo sapiens
aatgctrcaaaagttgaagatagtatattgatgtacatattgaagcaaagagaaaactggggccttggacgatggaactagatgagtaagtcacattcggtagggaatttagagctggtgcctgggggcttcattttacaagacagccatgggtattctctaccacatgcttccctcgaatttactcagagggaagccctctctccactggctttcccaggcgttaggagtcaatggttttgaataagagtgaagattaaaattcagcagagctccaagcatgtctgatcttgagcggacaggaccatggactaagcttctgaactcccttttccaatctgctcttccggcctcttgatctctgtgccaggactcaactccatcacaaatgcataattcctatcacaaggagacaaccgtaaatatatttgaattaagtgacatgttttcagcttctcaaaggccccatccctaaactcagtgtggccctggccctgtgacatgctggcgatgcagtcccaccaggcacagcactgaaactgcatgtcgtgc

SEQ ID NO: 9947 - DNA, 560 bp, Homo sapiens
tcacctatgtaacaaacctgcatgttctgcacatgtattcccgaacctaaaataaaataaatttttttaaaaagaaaatagatttattagttaacttataaagagattaaagagcttgaaacaagtaaaaaaaatctcactgtggttttgattaaaatactattcaactataaacaagaatgacatactgtcatttgccacaacgtggatgaacctggaggacattatgcctgtaataagccaagcacagagagacaaagactgcaagatctcactcatatgtggaacctaaaaacattaatctcataggagtagagagtagaatagtggttacagagtctggggagagaagtggtatagaaactagggagaagttggtcaatagatacaaagttacagttagataggaggaataagttctggtgctctattacacagtagggtgactatagttaacattaatgtattgtatatttcacaatagctagaagagaagattttgaatgttctcaccacaaatattagaggtgrtggatatgctaattacctttatttggtca

SEQ ID NO: 9948 - DNA, 574 bp, Homo sapiens
tcaacccaaatgcccatcaatgatagactggataaaggaaatgtggtacatatacaccatggaatactatgcagccataaaaaggaacaagatcatgtcctttacagggacatggatggagttggaagctattaccctcagcaaactaacgcaggaacagaaaaccagaagccacatgttccctcgtataagtgggagctgaactatgagaacacatggacacagggaggggagcaacacacgctggggcctgttgggggctggggtggggagagagagcatcaagaatggattcccagctaatggatgctggacttaatacctaggtgatgggttgatcagtgcagcaaaccaccaaggcacgtttacctatgtaacaaacctgcacatcctgcaaatgtaccccagaacttaaaaagaaaattcacccatctgcaaaamgtttgtatgacaatacctgaaagtctatttgatatgaaataattatccaatagttttacacctgttttctaagagataagagctttcttattctacttcatgccaaagttagagtttggaatcagctattgtt

SEQ ID NO: 9949 - DNA, 538 bp, Homo sapiens
agattttttttaaaaaggtgagttctatatacctccaagtctagaatattgataaaatagttaatgcttcagaatttattggggaatttattgtctttttaatgcttacaaccattgtttgaaaggttgggtattwtcttttttttcagatgataaaatagatttataatttataaaacttggtatggagagcagtagattgatgattctgatctaggacttttgaccctgttgtgtagtaatgactgctggttttttttattattataagagtatattaagatatttatttctctgggagctcatttcttatttgtcccagagtggtacagctctattatataattatcgtaaagtcctattaataggcttttggaagctgtttatggacttttttattacgtgttacattttattttcttccttcctttttttgtgtttttaatgcccaagtatatagagtcttttttctaaactacttagcatttaatttttcaagttttaataggatattgaacttggtgattcacaaactaaa

SEQ ID NO: 9950 - DNA, 538 bp, Homo sapiens
agattttttttaaaaaggtgagttctatatacctccaagtctagaatattgataaaatagttaatgcttcagaatttattggggaatttattgtctttttaatgcttacaaccattgtttgaaaggttgggtattttcttttttttcagatgataaaatagatttataatttataaaacttggtatggagagcagtagattgatgattctgatctaggacttttgaccctgttgtgtagtaatgactgctggttttttttattattataagagtatattaagatatttatttctctgggagctcatttcttatttgtcccagagtggtacagctctattatataattatcgtaaastcctattaataggcttttggaagctgtttatggacttttttattacgtgttacattttattttcttccttcctttttttgtgtttttaatgcccaagtatatagagtcttttttctaaactacttagcatttaatttttcaagttttaataggatattgaacttggtgattcacaaactaaa

SEQ ID NO: 9951 - DNA, 538 bp, Homo sapiens
agattttttttaaaaaggtgagttctatatacctccaagtctagaatattgataaaatagttaatgcttcagaatttattggggaatttattgtctttttaatgcttacaaccattgtttgaaaggttgggtattttcttttttttcagatgataaaatagatttataatttataaaacttggtatggagagcagtagattgatgattctgatctaggacttttgaccctgttgtgtagtaatgactgctggttttttttattattataagagtatattaagatatttatttctctgggagctcatttcttatttgtcccagagtggtacagctctattatataattatcgtaaagtcctattaataggcttttggaagctgtttatggacttttttattacgtgttacattttattttcttccttcctttttttgtgtttttaatgcccaagtatatagagtcttttttctaaactacttagcayttaatttttcaagttttaataggatattgaacttggtgattcacaaactaaa

SEQ ID NO: 9952 - DNA, 527 bp, Homo sapiens
gaaacggcagcaggggagtcctggacccccagccatggcctccgacctggtgatgccacgtgcaggccccgccagccccacggcacagttacaagctggtcaagtaacatgttgctccrggcacaacctccactctccctccatgaagcccaccctcaccctgtgggagaggcctgccacccactgcatagagagaaactgaggcacagagagccatggccctcctccctggcaacatactgcagggaagggctgaacgacagcaagccacccccatggaaaggaaagacaacaagagtaatgacagcaccacagacgctctgggctgtgacgctctgggctgtgacgctctgggctgtggctcagtgcgggtggagaggggcaggagggctcaccgggcgaggtccaggcggtccagcttcagcaggatctgcactgtcatggctgtgctgcaggacagggcgagggggcggtcagcgggtcgccacagacacattgcatggccgctccacacccagggctcactg

SEQ ID NO: 9953 - DNA, 509 bp, Homo sapiens
ggagaggcgcctaatctgagggatgctgtgcgctgcacgccatgcccccacccacccaggttcataaccaacaggccttgaagatggccccgcgcctcaggccaacccattctctggggcctcacctccgactctcgtgggcgaggtagtcagcaaacatgcgcacggcctggagctcaggggccgaggagggcttgatctcatccaggaccacaccgaacttcctctgcagtagggacgaggcgtcagctgcacccgtccaccccagaggatttccatgtcttcagcttggcagggagagccccagacaggaagyccctgccccaccagggacccctcagcccagcatgggccacctccactgcagtacactgtggagggtggcatggcgtcacctgtcgtgagcagccaggtgtgccctcatctgcagggccacactgcccatgccttgagctagggaccctggtaggttactgtctatcccctggcagctgtccacctctggtggt

SEQ ID NO: 9954 - DNA, 509 bp, Homo sapiens
ggagaggcgcctaatctgagggatgctgtgcgctgcacgccatgcccccacccacccaggttcataaccaacaggccttgaagatggccccgcgcctcaggccaacccattctctggggcctcacctccgactctcgtgggcgaggtagtcagcaaacatgcgcacggcctggagctcaggggccgaggagggcttgatctcatccaggaccacaccgaacttcctctgcagtagggacgaggcgtcagctgcacccgtccaccccagaggatttccatgtcttcagcttggcagggagagccccagacaggaagtccctgccccaccagggacccctcagcccagcatgggmcacctccactgcagtacactgtggagggtggcatggcgtcacctgtcgtgagcagccaggtgtgccctcatctgcagggccacactgcccatgccttgagctagggaccctggtaggttactgtctatcccctggcagctgtccacctctggtggt

SEQ ID NO: 9955 - DNA, 558 bp, Homo sapiens
agagtctgtagaacattaaagacaaaaatccttaaaagcagccagaaatagaagatgaattacctttaccctttacagaaataacaattagatagctggctctcaaacttaagtgggcagtagaatcacttggaggacttttaaaaacacatttctgaaccccaactacaaagtttgggttcagtaaatctggaataagatttttaaaagttgcattttgaaaaagctccaaagtgatactgaggctgctggtctaagaaccacttttgaaaatcactgaattagagtgatatttgcattataaagagcaatattggaaaacgaaagacattagaatgacaaaagacattatctgtaaagtaccaagtgaaaaatgtcactgccaatctagaattgatacatgggaaaacaaactatctttcaagaacatgtgcaaaataaagatattgttggacaaaaattgagagtttaaaaaagactttcactgaaataacttcaagaatatgtscttcaggaggaagaaaaattatttcagaaggaagattcaagatggaaaaa

SEQ ID NO: 9956 - DNA, 538 bp, Homo sapiens
tttagagaaagaaaattgagcaatcttggaagaactccatattcttctttaaaaaaaaatttttttttcttaggttcctcttgaaaactactttgagcaggaaggaagggtttggaacagctgtccctcggtgagtttggagaatgttaatcactgtcccttctctcttttacttaaagattagctcacatcccaggcccctgcaaaaggaaacygcatatacttaacttttgagactatcgtgaggaacttttctgtaacagtagtagcatgtcagccagatctaaaagatgctcaagtctggaaacttaccccaaggcaatgagagcccatagggtcagcaatgggccgactggacatttgagaaagtcatttatttcttgactaaatttccccaggaaaaagtaaaacttaagaaaaacagagcacaaatgaaactgccatatacataggcatctgcaactttaaccaaagggtgctctcaggcaaggtgaccctgcatacaccatgtcagcttaaaaatattatattaaaggca

SEQ ID NO: 9957 - DNA, 634 bp, Homo sapiens
accacacctgaccaagaatattttcttttttttgagatggagtctcattctgtcgcccaggctggaatgcagtggcgcaatcttgtcctgtctaactacactttagaacgctttcaccgtctccccaaacccctgcctcccagcccctggtatcctccattctactctctgcttccatgagttcaattgttttacattccacataagtcagatcacgtggtagttgtctttttgtgcctggctcacttcacttaacatcatgtgctccattaagctcctgtgaatcccagtttctaacctgcaattgctctaagtgttttcattgccttttcatggtttctactaagaattccagagcccagmtgcaatgttttcactgctttggatgttattcattgtttttctttacatcttgtccatggacacacaaataaattgtccggtgcaagtgcagcggccgtatgcgcttcctgtgaaagaaggccggtttgacatctattaaacaaatccatctcagcattcttaacagcctttatattgtttgatatcaagctcagtcatttaaaaaatatgcctctgtctttgtaagattacctatgggttggagaagacttatgtaatattcaactcagca

SEQ ID NO: 9958 - DNA, 634 bp, Homo sapiens
accacacctgaccaagaatattttcttttttttgagatggagtctcattctgtcgcccaggctggaatgcagtggcgcaatcttgtcctgtctaactacactttagaacgctttcaccgtctccccaaacccctgcctcccagcccctggtatcctccattctactctctgcttccatgagttcaattgttttacattccacataagtcagatcacgtggtagttgtctttttgtgcctggctcacttcacttaacatcatgtgctccattaagctcctgtgaatcccagtttctaacctgcaattgctctaagtgttttcattgccttttcatggtttctactaagaattccagagcccagctgcaatgttttcactgctttggatgttattcattgtttttctttacatcttgtccatggacacacaaataaattgtccggtgcaagtgcagcggccgtatgcgcttcctgtgaaagaaggccggtttgacatctattaaacaaatccatctcagcattcttaacagcctttatattgtttgatatcaagctcagtcatttaaaaaatatgcctctgtctttgtaagaytacctatgggttggagaagacttatgtaatattcaactcagca

SEQ ID NO: 9959 - DNA, 586 bp, Homo sapiens
ggagaggccacaatcagtacctggtcctgccatgcacagggaggtggctgctctcctggaatggtaacaggacggagatcatagccagccagcagggagctaggcagcasgaacgaacaggccctgcagggggcagcagctgcagctggagcaatggtgggcgggcaggcaccaaaacctctgcactgtcacaggcccagccacctggcacctcctagctgccatggaaatacagtgagaaaaccagttggaattctttttattaaaaaaaaaagtgacttcctggtccatacataaataagaacattgaaactacttgaaaattttttgttgttgttgtttgttttttgtttttgtttttgttttagatggagtttcactcttgtcccccaggctggagtacaatggcgtgatctcggctcactgcaacctctgcctccagggttccagcgattctcctgcctcagactcccgagtaggtgggactacaggtgtgcaccacctcacctggctaatttttgtatttttagtagagacggggtttcaccatgttggccaggctggtctcgaactcttgatccgcctg

SEQ ID NO: 9960 - DNA, 554 bp, Homo sapiens
tgaactttgaacaccagcagacaggctgagaattctctttgatcatgagcccaagttccacgtgtacctgcaggaatctgtgtggcatttgtgcactggtgtggggcccaggagaggaccacggagtgacaagccaccaggttctaaagggagacgaagatccccagaggacctggatagagatgtttccctgaccattgtctgctgtgtgctcccgatgatgagactctagagtttacaactgaaacacactgtyatttatgatattatttgtaatatctggtatgtctaagtaaaacatgcattcagtaaaactcgcgatgaaacttatctcattgtgtggatttcattcttctcaattcttttatgttttctggggttttttctagatggagtttcactcttgtcgcccaggctggagtgcaatggtgcgatctcggctccctgcaacctctgcctcccgggttcaagcgattctcctgcctcagcctcccgagtagctgagattacaggtgcctgccaccacgtccagctaatttttgtatttttagtgg

SEQ ID NO: 9961 - DNA, 531 bp, Homo sapiens
ttatcaactgtgaaaacattatgtaataataataacaacaacttccagagatagctgtgttgcaggcactgtcttaagttcttacatgtatcatttcattaatcttctaggacaacagtcctaaaagagaggtcctattttacagatgaggagcccaaaaaygagcttagggtcacacacagctagaatgtgggacttgaacccaggcaagctcaaggctcttggtcaatccatggaaggagagaaaggaaaaagaagggaggagggaggaagaagggaaggataccagggaccacagtagtgaaaggctgggtttcctgctactacagtgggtagggctcaaacaaccaaatagaaaaattttttaaaaattctaaccacactcaccaaccctaaattagtaaactattttttatgcatgtccttatgtcctagaaaatggagtcaaactggtttttgttgtgatagtagtttttgagacagagtctcgctctgtcgccctgctggagtgcaatggctctatctcagctc

SEQ ID NO: 9962 - DNA, 531 bp, Homo sapiens
ttatcaactgtgaaaacattatgtaataataataacaacaacttccagagatagctgtgttgcaggcactgtcttaagttcttacatgtatcatttcattaatcttctaggacaacagtcctaaaagagaggtcctattttacagatgaggagcccaaaaacgagcttagggtcacacacagctagaatgtgggacttgaacccaggcaagctcaaggctcttggtcaatccatggaaggagagaaaggaaaaagaagggaggagggaggaagaagggaaggataccagggaccacagtagtgaaaggctgggtttcctgctactacagtgggtagggctcaaacaaccaaatagaaaaattttttaaaaattctaaccacactcaccaaccctaaattagtaaactattttttatgcatgtccttatgtcctagaaaatggagtcaaactggtttttgttgtgrtagtagtttttgagacagagtctcgctctgtcgccctgctggagtgcaatggctctatctcagctc

SEQ ID NO: 9963 - DNA, 621 bp, Homo sapiens
ctttaaatagggcatgcaatccatagaggaatgactctaaattactgttaagattggagataaaagttcacatgttttgacaaaggtcttccatgacactgattcttacatctgcgtgtgcatcagaatcayctgggagtgttttgaaaatacagattccaggaactaatgtcagaaccctgaaccagaatcacaagagacagggcctgtccgacctgggacccttatttataaaccactgtaatagtgagtccatgaaaataaacaacaggcaaagagcctataagttaaaataaactaagaaaagcttaacggaaaacatgtagttatcacagaaaaaaatttaaaatatgtggtatttcttaattctgattcatttggatgtatatgttaggaaattcagtttagatttagaatccccgaatctaatatattactatattagaagtataaataccctggacaaagactgcaaggaaatatggaaaatgaatttattagaaaaatagatgtaaacaggaggaggccaatcaaaattcatggggtggttgtattttaaaatgtcttaaattcattatattctcattatcagtggctacccacacgtgtgaattttaaaaa

SEQ ID NO: 9964 - DNA, 621 bp, Homo sapiens
ctttaaatagggcatgcaatccatagaggaatgactctaaattactgttaagattggagataaaagttcacatgttttgacaaaggtcttccatgacactgattcttacatctgcgtgtgcatcagaatcacctgggagtgttttgaaaatacagattccaggaactaatgtcagaaccctgaaccagaatcacaagagacagggcctgtccgacctgggacccttatttataaaccactgtaatagtgagtccatgaaaataaacaacaggcaaagagcctataagttaaaataaactaagaaaagcttaacggaaaacatgtagttatcacagaaaaaaatttaaaatatgtggtatttcttaattctgattcatttggatgtatatgttaggaaattcagtttagatttagaatccccraatctaatatattactatattagaagtataaataccctggacaaagactgcaaggaaatatggaaaatgaatttattagaaaaatagatgtaaacaggaggaggccaatcaaaattcatggggtggttgtattttaaaatgtcttaaattcattatattctcattatcagtggctacccacacgtgtgaattttaaaaa

SEQ ID NO: 9965 - DNA, 552 bp, Homo sapiens
caacatagcaagaycctgtctctacaaagaaaaaaatatatatattagaaaaaacatatagacagagacatgaggacttctgccctcaggtgtgataaattaacaagtactggatataccctccaacctgaaacagcacacaccaaagaaaaacaaaatcaaaaacagaaagaaaaataaaacaagaacatatacgaagcaatgatttgtttttttgtttttgtttttgttttttgttttttgagatgaagtctcgctcttgtcttccaggctggagtgcaatggcacaatctcggctcactgcaacctctgtctcccgggatccagcaattcttctgcctcagcctcccgagtagctgggattacaggcgtgcaccagcatgcccagctaatttttatatttttagtagagatggggtttcaccatgttggccaggctggtcttgaactcctgacctcgtgatctgcccgccttagccttgttgttgttgttgctgtgattacaggtataagccaccatgcctgggctgaagcagtggtttccaaggcact

SEQ ID NO: 9966 - DNA, 575 bp, Homo sapiens
agtgggagacacccttgatcaggtctctgtccagcagagccctcctgaggaaggcgtggctctctgcagggtgggtgccagtcctgagctagggacggtcccttaccttcctctctgggaagctgacctcagccggaggcctctcttggtggtgcccctgagcagcaacctgatttctgtcctcagctacctggccaatgacatggaggaggacgacgaggaccccaaacaaaacatcttctacttcctgtatgggaagacccgctctcgcatacccttgctccgtaagcgtcggttccagttatgccgttgcatgaacccgagggccaggaagaaccgctctcagatagtcctgttccagaaacttcggttccagttcttctgttccatgagctgcagggcttgggtttccccggaggagttggaggaggtgagtggggcctggggasgtggaggaggtggggaggaatcaggtgggctggaggctggatgaggggagagaggggtatcctggcgagtccccatcttctcaaagggcgtttgtttttccagatccaggcttatgacccagagca

SEQ ID NO: 9967 - DNA, 575 bp, Homo sapiens
agtgggagacacccttgatcaggtctctgtccagcagagccctcctgaggaaggcgtggctctctgcagggtgggtgccagtcctgagctagggacggtcccttaccttcctctctgggaagctgacctcagccggaggcctctcttggtggtgcccctgagcagcaacctgatttctgtcctcagctacctggccaatgacatggaggaggacgacgaggaccccaaacaaaacatcttctacttcctgtatgggaagacccgctctcgcatacccttgctccgtaagcgtcggttccagttatgccgttgcatgaacccgagggccaggaagaaccgctctcagatagtcctgttccagaaacttcggttccagttcttctgttccatgagctgcagggcttgggtttccccggaggagttggaggaggtgagtggggcctggggaggtggaggakgtggggaggaatcaggtgggctggaggctggatgaggggagagaggggtatcctggcgagtccccatcttctcaaagggcgtttgtttttccagatccaggcttatgacccagagca

SEQ ID NO: 9968 - DNA, 575 bp, Homo sapiens
agtgggagacacccttgatcaggtctctgtccagcagagccctcctgaggaaggcgtggctctctgcagggtgggtgccagtcctgagctagggacggtcccttaccttcctctctgggaagctgacctcagccggaggcctctcttggtggtgcccctgagcagcaacctgatttctgtcctcagctacctggccaatgacatggaggaggacgacgaggaccccaaacaaaacatcttctacttcctgtatgggaagacccgctctcgcatacccttgctccgtaagcgtcggttccagttatgccgttgcatgaacccgagggccaggaagaaccgctctcagatagtcctgttccagaaacttcggttccagttcttctgttccatgagctgcagggcttgggtttccccggaggagttggaggaggtgagtggggcctggggaggtggaggaggtggggaggaatcaggtgggctggaggctggaygaggggagagaggggtatcctggcgagtccccatcttctcaaagggcgtttgtttttccagatccaggcttatgacccagagca

SEQ ID NO: 9969 - DNA, 540 bp, Homo sapiens
cccttaagaaaaaggtaaaaacatactctgcggcaagttacagtgacatcgacacatctttggagcagacatctggcctttggccccatgtttagatggatctgggagcctgtgtytgcaagcctcacctcacgcggctcactggtggccggaacagtgacatgcacccaggacagaaggactgtggggccttcctcccaggccaggagctgctctgacagatgcttcctctgaacctgtgtgtggccccctcaccgggacactgcccatagctgtaatgccagaacccgctctaacctcacagagggcacaagtgtccatgcccccaaaatccctgcaaggtctcaatgccctcagctcctgtgggaacccctcatccaggaagaacactaactgctttttaactaacttaaatttaacgtaactacaattcagcttagctactttttagtatttctactagggtgagaaatgaacccccgcagttgtgtcgtaaaccctggtccatcagtcagaccagatctctcagggcttcgaagc

SEQ ID NO: 9970 - DNA, 536 bp, Homo sapiens
tggacacacatgccctttaggaagatggctgtggcgacgatgtgaagggtgctgcaggacgagactgaacagggaaaaacaccgaaggatgaaagcaaacaagaaggacgtggtgaaggtgggtgttcacacagtgggccaaatggaggagcaagcttcagggagaagacacccaaaggactattgttacttcctgtcgccgtaaacatcctcatccacgctaccatttatttcctgtcaccgtaaacatcctcatccaygctaccatttatttcctgtcaccgtaaacatcctcatccacgctaccatttatttcctgtcgccgtaaacatcctcatccacgctaccatttatttcctgtcaccgtaaacatcctcatccatgctaccatttatttcctgtcaccgtaaacatcctcatccatgctaccatctattgggtacctagagatgccaatgctgtaccagcattttacatggcttaacccaaatcctcacaacaacctagcaagataaatatgactttcattttgcaca

SEQ ID NO: 9971 - DNA, 536 bp, Homo sapiens
tggacacacatgccctttaggaagatggctgtggcgacgatgtgaagggtgctgcaggacgagactgaacagggaaaaacaccgaaggatgaaagcaaacaagaaggacgtggtgaaggtgggtgttcacacagtgggccaaatggaggagcaagcttcagggagaagacacccaaaggactattgttacttcctgtcgccgtaaacatcctcatccacgctaccatttatttcctgtcaccgtaaacatcctcatccacgctaccatttatttcctgtcaccgtaaacatcctyatccacgctaccatttatttcctgtcgccgtaaacatcctcatccacgctaccatttatttcctgtcaccgtaaacatcctcatccatgctaccatttatttcctgtcaccgtaaacatcctcatccatgctaccatctattgggtacctagagatgccaatgctgtaccagcattttacatggcttaacccaaatcctcacaacaacctagcaagataaatatgactttcattttgcaca

SEQ ID NO: 9972 - DNA, 536 bp, Homo sapiens
tggacacacatgccctttaggaagatggctgtggcgacgatgtgaagggtgctgcaggacgagactgaacagggaaaaacaccgaaggatgaaagcaaacaagaaggacgtggtgaaggtgggtgttcacacagtgggccaaatggaggagcaagcttcagggagaagacacccaaaggactattgttacttcctgtcgccgtaaacatcctcatccacgctaccatttatttcctgtcaccgtaaacatcctcatccacgctaccatttatttcctgtcaccgtaaacatcctcatccacgctaccatttatttcctgtcgccgtaaacatcctcatccacgctaccatttatttcctgtcaccgtaaacatcctcatccatgctaccatttatttcctgtcaccgtaaacatcctcatccaygctaccatctattgggtacctagagatgccaatgctgtaccagcattttacatggcttaacccaaatcctcacaacaacctagcaagataaatatgactttcattttgcaca

SEQ ID NO: 9973 - DNA, 536 bp, Homo sapiens
cttccgatttcaaccttgccatcagggactctaatattctcccgtaatgcacatgcaactcagtggatatcaatgctgcgtccacgtgaagttttctaaacatgtcctttttccaaaaattttacgacaaaccttggaatcagacagtctttcatctgcttaacagggatcctagcaagtggggcaggcagaagaagagaataagagaagggagaggtagacctgaacaatagaatattctagatccctggccaaaaagaagggaaaggggacctgacctgacattttggttgaacaactgtyacagacaactcttctatgtttaacgactttatgcttttaaataaaagttttacaaagcatgcttaggatacaaagaaatttaaaaccttataatttaatgtaaattatacttatctttacctgattatgtgtttttgttaggatatattgtcttagacagtagaattctttaagagtggcttattttgtaatgcacagtctctcttttcttgcaggacatgttctctggatgt

SEQ ID NO: 9974 - DNA, 587 bp, Homo sapiens
tttcctaacctcatgcagacatgaaggaaactatatcctgggaaaatggaagatggcaacacattagtgaaaatgtcattggaaasgtgcactgccccagagctatgttgctgaaatttctaagcctttctttaatagccttcttgggtccctaagcagggaggttttggatgaattctccccagccgtggtatgccattgtctgattcttccagccaaaatttacaacaacaaataaaaaacagtggatccttacgagaaattttttcctgggaaagccatatattgtggaaagggggaagaaattgtaacatggaccaaactctttcaggtcattcagagtatctattgtagcaactgaaaagctccaaaccagtcaaaaaggtgtttttaggtcagacatacattatcaaacattcgcctacatattattagtttatttatgagaaacaaatataaagatgcttgcatgtatttctagcagtatccatataattgaatgctttactttttagcaaaaggactgtctttaaattgagtatgagcctaccttccccagagtcaaattctttattagacatatcaca

SEQ ID NO: 9975 - DNA, 587 bp, Homo sapiens
tttcctaacctcatgcagacatgaaggaaactatatcctgggaaaatggaagatggcaacacattagtgaaaatgtcattggaaaggtgcactgccccagagctatgttgctgaaatttctaagcctttctttaatagccttcttgggtcccyaagcagggaggttttggatgaattctccccagccgtggtatgccattgtctgattcttccagccaaaatttacaacaacaaataaaaaacagtggatccttacgagaaattttttcctgggaaagccatatattgtggaaagggggaagaaattgtaacatggaccaaactctttcaggtcattcagagtatctattgtagcaactgaaaagctccaaaccagtcaaaaaggtgtttttaggtcagacatacattatcaaacattcgcctacatattattagtttatttatgagaaacaaatataaagatgcttgcatgtatttctagcagtatccatataattgaatgctttactttttagcaaaaggactgtctttaaattgagtatgagcctaccttccccagagtcaaattctttattagacatatcaca

SEQ ID NO: 9976 - DNA, 587 bp, Homo sapiens
tttcctaacctcatgcagacatgaaggaaactatatcctgggaaaatggaagatggcaacacattagtgaaaatgtcattggaaaggtgcactgccccagagctatgttgctgaaatttctaagcctttctttaatagccttcttgggtccctaagcagggaggttttggatgaattctccccagccgtggtatgccattgtctgattcttccagccaaaatttacaacaacaaataaaaaacagtggatccttacgagaaattttttcctgggaaagccatatattgtggaaagggggaagaaattgtaacrtggaccaaactctttcaggtcattcagagtatctattgtagcaactgaaaagctccaaaccagtcaaaaaggtgtttttaggtcagacatacattatcaaacattcgcctacatattattagtttatttatgagaaacaaatataaagatgcttgcatgtatttctagcagtatccatataattgaatgctttactttttagcaaaaggactgtctttaaattgagtatgagcctaccttccccagagtcaaattctttattagacatatcaca

SEQ ID NO: 9977 - DNA, 587 bp, Homo sapiens
tttcctaacctcatgcagacatgaaggaaactatatcctgggaaaatggaagatggcaacacattagtgaaaatgtcattggaaaggtgcactgccccagagctatgttgctgaaatttctaagcctttctttaatagccttcttgggtccctaagcagggaggttttggatgaattctccccagccgtggtatgccattgtctgattcttccagccaaaatttacaacaacaaataaaaaacagtggatccttacgagaaattttttcctgggaaagccatatattgtggaaagggggaagaaattgtaacatggaccaaactctttcaggtcattcagagtatctattgtagcaactgaaaagctccaaaccagtcaaaaaggtgttttyaggtcagacatacattatcaaacattcgcctacatattattagtttatttatgagaaacaaatataaagatgcttgcatgtatttctagcagtatccatataattgaatgctttactttttagcaaaaggactgtctttaaattgagtatgagcctaccttccccagagtcaaattctttattagacatatcaca

SEQ ID NO: 9978 - DNA, 542 bp, Homo sapiens
ggaatgcttgtggcacctggcccatcattagtaaaccatgccagatcttttccaaggtgaacagcattggatgggtgattggagatcagccttagtatcatggggacttgggtcataatctctgcccatgcatggaatagttaatccatttaacctttctgcccttcagcctgcccttcagaaaggatctaagacattagtgggtgaagagagggaagagtttgtgaacacctgtgaccttcaacaaaagcttgaaaaaacaaggtcaccattattgattaccacttttctctggttcacatgtgggctgtgccactactggggtcagaagttgaatgaggacattctttgaaacttgctcagagcaagtttcccctctggggaaggagtctagccaagtggtcatgagatgccagagtcttcttctctgactcttaggaacctactctttctattctacatggttagagagaaaggattagggcacaagaactttggggacatgacaatagcaaaggaactrtaggctggtggacaggcct

SEQ ID NO: 9979 - DNA, 541 bp, Homo sapiens
atgggccaagtctgccaggcgcggtggctcatgcctgtaatcccaacactttgggaggctgaggcgggtggatcacctgaggtcgggagttcgataccagcctgaccaacatagagaaaccccgtctctagtaaaaatacaaaattagatgggcgtgatgatgggcatctgtagtctcagctactcaggaggttaaggcagaagaatcgcttgaacccgggagacggaggttgcagtgagccgagattataccattgcactctagcctgggcaaagagcgaaactccgtctcaaaaaaaaaaaaaaaaaagggtcaagtcatacccccatggggtgagggcagccgttaggggtcacatggacaataagtcytacatcacagagcttggcaaggtgacaaaaccaactcttgggcctccttcccccagatatcccagaggcatccttcctggaggaagaggatgaagaccccatcccacccagcaccacgaccaccattgccacctcagaacagagcacgggctcatgtgacaccagcccc

SEQ ID NO: 9980 - DNA, 1294 bp, Homo sapiens
ggtgtgctgacacagacctgtaatcccagcagtttgagagtccaaggcaggaggatcacttgaaaccaggagtttaagaccagcctgagcaacaaagggagaccatgtctctaccaaacataaaataaatcaaattagccaggtgcagtgatgcatgcctacagtctcagatacttgggaggctaaggcgggaggaccacttcagcccaggagttcaaggctgtagtgagtacactccagtcttggtgacagagcaaggttgtgtctctaaaagaaaaaaaaaaaggaaaggaaaagaatggggtaagcaggaaagccaaagatctcgggcatctccakatgattccctgaacaaattgttttttcttggcttcaaaacctttcaagatgtatatttctttgtaaaagaaagacatgccaattgtaactttaagtgagcagtcaaaatctagctcctaaaactgaagtattttaactctcattctgataatatttattttctgaggcaaagaagaaagacaagattagatgaattgtttttctgcccacaccatctcttccgacatgccttatccctttaatcaaatgtataaatactaagcctcctgaaacctcttcagagaaaacacaagccacagaggtttttttgcaactcatgtattcccagggtgtactttcaagttctggctcaataaatctcaatttatcaagacccttgcctcagtcagtcattctggataaccaccatgagtcctgcaaagcccttcagtaatctgttgcctgcctaggtgatgtgtaaggtgagtcaggtcttcatgagtcaaacactcgtcttcctttctgtctttcccaaccctaccactcagtgctgtgtgctctgatctgaccccagctcccaggttgtttgtattggtctaagaaagcaagaccaggaggggcaggttgagaaggaagtaagaagtgaacatggaaagtggcaggtggggctgtcattgctcaaagccacacaccctgggtgcattttatgaatttttctggattcataatcttttccctgtgtgtctatctagaaactcacccccctcctactttcttctcattactctttctgtttctagtgcactcgtttatggccagagaatggccgtgtaaatagttgacaatagaataaaaaatgatgttttctgagacttggaagctggcctttcttttttccaaaagagattggggtttctaaaagctagcttttatgcagggctgtgcagttgtgagtgtagttttagggaacagatgc

SEQ ID NO: 9981 - DNA, 569 bp, Homo sapiens
acccagaaattgatgtgagatgaaaaatacacttgaaagtcccttaggacagtgtagcaccagagaccaacataccttccccttggtaagtggacgctgtcaactttacctccatctttgtctgtcattccttctttcattggattctagatgaagtgggtggcctgcctttggcaccatgctgtttcctttatttttttttaagtgtgtacctttaaacatataacagcccattacacacagcaagatgttccagctctaagagacaccagccacagtccctggtatccattgccaaggtctgccagccacagagccagcacaggcaacagctccccctgggtcttcacaccactctaagctaccttcccagaagtggaagaccagcacttctgcygggatctaactccaaggcagaagtgtctcactcatgaataaatcctcaggtgcaacttccttccttcctttccttccttccttccttccccctttctttccctccttcttttccttccttcactctttccttccttcctcccctccttccttctttcctcctatttttcctt

SEQ ID NO: 9982 - DNA, 545 bp, Homo sapiens
aaagtggattgttttttcacattgcttattacaatctgaaattacctgtttcttatggttccatatagaacacaaactccacgtgagcaagaactttgtcttgctcaagctgaatcccaagctctaagaattttaccaggcatgtgacagatacttaataaatatttgcagaataaatgaattggcatgacaagtcctatgatagcatattctatatgccacgcacttctaagcactttgaaaatatgcaccttcatgtaacctttagagaagcccttggatataagttccaacaccaacccatttcacagatgaagaaacagaggcacagagaggctcggtaatttactggaataacacagctagtgagtggtaggaccagraagtctggctacacagtcagagcccacgacctccacggccgatgtttgattggggcaggttgcccaatgcatgatgagcaaagtttgaatctacttccccgcactcagaaatcttccttacccattgctcctttctctctcattgttcctgaacgcattgtc

SEQ ID NO: 9983 - DNA, 563 bp, Homo sapiens
tttttaagactttgttttgagacaggatctcactctctcacccaggctggagtgcagtgatgtgatcatagctgactgcagcctcaacctcccaagttcaagcaatcctcccacctcaccctcccaagtagctgagactatagcttgygccatcacactctgctaatttttgtatttttttgtagagagagggtttccacatgttgcccaggctggtctgaaacttctgggctgaagcgatccatccaccttggcctctgcaagtgctgggattacatgtgtgagctaccacagtgcccggccaacatttaacacttattgcaaaactttcacaaaatatatcccagtttatactgaataaaatcttcttcttcaaacttcctctagcattgattaataatttttctgtctttgataatcaaagtaaggattgttcaaatctgcctatctttgataactactgaagtttagccatctttgaatgtttttatcgtccacctatatttctaatgttagtaattgtctgttcattctgtttgataattggtttttatttcttatta

SEQ ID NO: 9984 - DNA, 507 bp, Homo sapiens
ccaacagcccaggcttcatgcagcaggcaacctgggcagcaggacctggacttcaaggctaaaggagcgtctgtcagctaactctcctgctgtctccacgccatgcccaaagcacaatctaatatcttcctggcatccctagacaagaggtggaaacctggcagctcataagccacaatacagcccacaatcttgctcagttcaaacagtagtgggtaaatatttgaattaattgctaatattttaaaagcagatttgggactcggtgcagtggctcacgtctgtagtcccagtaccctgggaggctgaggtgggcagatcacttgaggtgaggagttcgggaccagcctggcctacatggtgaaaccccctctctattaaaatacaaaactagctaggtgtggtggctcatgcytgtagtcccagctacttgaggggctgaggcaggagaatcacttgaacctgggaggcagaggttgcagtgcaccgagattgtaccgctgcact

SEQ ID NO: 9985 - DNA, 538 bp, Homo sapiens
tctctaatgacaagcaatattgggagtttttttatatatgcgttggccatgtgtgtcttctttggaaaagtgtctgttcatgtcctttgcctactgttcaatggggttttgtttttttgcttgtaaatttgtttaagttccttacagattctggatattagagctttgttgccatcagttgaatcrcaaccgattgcagccaccctaggctatggtggtcatctgctccaaccgccttatttacaggtgaaaaaaaaaatgagtccccagatgtaaaagttgagggggagtcagagttggtggcaaaaccagaactaagactcaattctcttgatgcatagaccatttttttcttccacatttgttaaatgtgtttggccaatactccctagtgtttttcacattgccctacgtgtatttcaagatccatcaaaaccttgctccgtcttgccatttaactctattttctattcatctcataatatgaaaatcttgtgaccatcaagctgagcttcttcattctctttaccaatgcacc

SEQ ID NO: 9986 - DNA, 559 bp, Homo sapiens
attcttttgtgactctttttttttttttttttttttttttttttagctcatcggctattgctagtgttagtgtattttatgtgtggcccaaaacaatactccttctaacgtggcccagggaagccaaaagacgagacaccactggtttttacaaataycttcttatttcaatttggtgttttaaaccaaaattcagctccttatagcttacttattttgtattattattgttctttaaccatttaacgactataaatgtaacacatttttaatgggctgtaaaaaaaagttaagagttttcttatagatgattacaaaataaaaacaaaaacaaaatgcataacattatttgagtttatgtcagtttaaggtactaccatcttctaacagactgaaacagctcctgtgttacaaagttataagggttatttggatatgatactttttggttgttgtttagcaatatttaagttttacttttcctgttatatgagatagagcatgcaccatataatttgataataattgttagagaaaataattattttaaattatattt

SEQ ID NO: 9987 - DNA, 538 bp, Homo sapiens
ggcacatgtatacatatgtaacaaacctgtacgttgtgcacatgtaccctrgaacttaaagtataattttatatataatactatatatatttataatatattataatatattatataaattacataaatataataattatataatatattatataatatattatatatatatatatatgacatacaggattcacagcagcaggtgggcaggaagaaagtctgagtgggtaaaggatggcccagatccctgcagctgaccccaaaaggaaaaccctgggctggggaaagtagggagacagagctgccttccatggggcacagctgaagcctggcagcagctgaggattccagagaggggagacaggaggggaggcactttatcaaaggacatgttaatagaggtagggcctacagaatgaaggaggcttttcctcacttgctgagtgtgtcacattctgtcccagtcagccctctaccccctgaatgcagagagggcacctagggggaagtgggtctggggaagccatgtcacctgagg

SEQ ID NO: 9988 - DNA, 619 bp, Homo sapiens
tgggctataatcttgggggatactgtattggtcaaataggctgcacygtactttgagatggaaagttatcacagacaggaagaaaaaaaaagtgtttttttctgctttcactgtctcactcaccataacacttctgacaccagatgtgtggaggcctgtttccccacacgccaagcaatcctccagcagacaccagctgggtgacctctcattcaactcaattctgaccttatctgcctggagtagatctataccagttcccacaggttaagggctcagtcctacaaaactgtctccaactttagatgctagtagcaactagttggttgtcatatatacttatgaccaactggctatcaatcagaggttcctataactcctttctcaggtttggttgatttgctagaatggctcacagaactcagggaaatactttacttacatttacccattcatcataatggatattatgaaggataaaaatgaacagccaatggaaaggatttgtagagcaaagcagctgggaaggggtacagagggttcacaccctctctgggtcaccttctaggaacctccacatgcttagctattcaaaaactctctgaaccccgcccttttg

SEQ ID NO: 9989 - DNA, 619 bp, Homo sapiens
tgggctataatcttgggggatactgtattggtcaaataggctgcaccgtactttgagatggaaagttatcacagacaggaagaaaaaaaaagtgtttttttctgctttcactgtctcactcaccataacacttctgacaccagatgtgtggaggcctgtttccccacacgccaagcaatcctccagcagacaccagctgggtgacctctcattcaactcaattctgaccttatctgcctggagtagatctataccarttcccacaggttaagggctcagtcctacaaaactgtctccaactttagatgctagtagcaactagttggttgtcatatatacttatgaccaactggctatcaatcagaggttcctataactcctttctcaggtttggttgatttgctagaatggctcacagaactcagggaaatactttacttacatttacccattcatcataatggatattatgaaggataaaaatgaacagccaatggaaaggatttgtagagcaaagcagctgggaaggggtacagagggttcacaccctctctgggtcaccttctaggaacctccacatgcttagctattcaaaaactctctgaaccccgcccttttg

SEQ ID NO: 9990 - DNA, 619 bp, Homo sapiens
tgggctataatcttgggggatactgtattggtcaaataggctgcaccgtactttgagatggaaagttatcacagacaggaagaaaaaaaaagtgtttttttctgctttcactgtctcactcaccataacacttctgacaccagatgtgtggaggcctgtttccccacacgccaagcaatcctccagcagacaccagctgggtgacctctcattcaactcaattctgaccttatctgcctggagtagatctataccagttcccacaggttaagggctcagtcctacaaaactgtcyccaactttagatgctagtagcaactagttggttgtcatatatacttatgaccaactggctatcaatcagaggttcctataactcctttctcaggtttggttgatttgctagaatggctcacagaactcagggaaatactttacttacatttacccattcatcataatggatattatgaaggataaaaatgaacagccaatggaaaggatttgtagagcaaagcagctgggaaggggtacagagggttcacaccctctctgggtcaccttctaggaacctccacatgcttagctattcaaaaactctctgaaccccgcccttttg

SEQ ID NO: 9991 - DNA, 956 bp, Homo sapiens
tgaagtgaagcactcataaaatgtctaattttgagaattgtaaattctcgtgtcctttgccaaagaaagcatttgtaaaatgtaattgccaaagaggttgctacattattttttggaagacttaacaacttagcaaaatacatgaaaaggcaacttagccatcccttgaaagactcggcaggactttaccaggtaatgaagtgtgtcctgtgtgtagggattggggttgaagagatatttgggggaaggacagagagttaaaaggtggaaaagtcactacaagcagatggagaagcagggacggaagtgtggaggtggagggaacacatcacatgtagaaagacagctacagtttgatgggaagtaggatgggtagattgtcaacaccattagattgggagctttgtttatctaattcagggggttggctaactattgcctactsgccaaaagtttttgtaaataaaggtgtatcagagcaaggtcatgcccttttgattacatattgtctgtgactgcttttgccctacaatggcagagtggtgcagaaaccaccactgctgctgcggaaacagtgtggctaacgaagcccaaaatatttactatctggccctttctagatgaagttgttgacttctgatctaactctgccatgtcccctggtatggagattccagtgtattgcctggcgtgtggtaggtgctcaatatactggtgattcatattgaattgaagcattcgctggtattcagataatgaaggggcctattgtggttctttttgttaagaaggtggagctttatcttaatggtaaagcattttgagccatgtattcatgcacgcattcatttattcattctcattctttgagactcacctctagcctgaactggcctccctctactctgtctctctagcaaactgggcaaaacattgatcagactgtttttctgtgg

SEQ ID NO: 9992 - DNA, 956 bp, Homo sapiens
tgaagtgaagcactcataaaatgtctaattttgagaattgtaaattctcgtgtcctttgccaaagaaagcatttgtaaaatgtaattgccaaagaggttgctacattattttttggaagacttaacaacttagcaaaatacatgaaaaggcaacttagccatcccttgaaagactcggcaggactttaccaggtaatgaagtgtgtcctgtgtgtagggattggggttgaagagatatttgggggaaggacagagagttaaaaggtggaaaagtcactacaagcagatggagaagcagggacggaagtgtggaggtggagggaacacatcacatgtagaaagacagctacagtttgatgggaagtaggatgggtagattgtcaacaccattagattgggagctttgtttatctaattcagggggttggctaactattgcctactcgccaaaagtttttgtaaataaaggtgtatcagagcaaggtcatgcccttttgattacatattgtctgtgactgcttttgccctacaatggcagagtggtgcagaaaccaccactgctgctgcggaaacagtgtggctaacgaagcccaaaatatttactatctggccctttctagatgaagttgttgacttctgatctaactctgccatgtcccctggtatggagattccagtgtattgcctggcgtgtggtaggtgctcaatatactggtgattcatattgaattgaagcattcgctggtattcagataatgaaggggcctattgtggttctttttgttaagaaggtggagctttatcttaatggtaaagcattttgagccatgtattcatgcacgcattcatttattcattctcattctttgagactcacctctagcctgaaytggcctccctctactctgtctctctagcaaactgggcaaaacattgatcagactgtttttctgtgg

SEQ ID NO: 9993 - DNA, 434 bp, Homo sapiens
ttttgtctttattctgatacaaatgtgaatccattgaaagatttaaacaaagagaatgccatctaactagtttcattcttaaaagatcatacttgttgtatagtgagaacaaattgaatggtgaatcagagctgagattttgttatttttataactacaaaatcttgtatagttttctacacctataaagtacaatgagttcacaccctcttaaatctatgtagctgtgtgtccctccatgctattattcatctagcagtctgccttctgctcccactcatttccctacaatgartaacagaactgcaagtagacaaagaaggatggagaatgaacttggcttctctctttcaaatggaagctagcagaaaagctcaggaactcacaccttgaggagagggtaatatgcagtggttaataacataggatattga

SEQ ID NO: 9994 - DNA, 535 bp, Homo sapiens
ccttggcagcagcacccccatggcgtctcctgacctccttccagaggacgtgagggagcacctcgaaggcttgatgctctcgctcttcgagcagagtctgagctgccaggcccaggggggctgcagtagacccgccatggtcctcacagacccacacacgccctacgaggaggagcagcggcagtcagtgcagtctgaccagggctacatctccaggagctccccgcagccccccgagggactcacggaaatggaggaagaggaggaagaggagcaggacccagggaagccggccctgccactctctcccgaggacctggagagcctgaggagcctccagcggcagctgcttttccgccagctgcagaagaactcgggctgggacacgatggggtcagagtcagaggggcccagtgcatgagggcggctccccagggaccgcccagatcccagcyttgagagaggagtgtgtgtgcacgtattcatctgtgtgtacatgtctgcatgtgtatatgttcgtgtgtgaaatgtaggc

SEQ ID NO: 9995 - DNA, 608 bp, Homo sapiens
aagaattttaactacaattcaagtgaaaattcagaatgggtctttttaacagcaactgctgtgcttctagaaactgagaaaggggttagggaagatcttttaagtttctagaaatcttcatgggcttttacattttaatttttagaataaaagttatgtatactgtcaggaatatggatattgtcaggtaatggatacctaagtagaattgatcctgtttgatgctgaaccttatatgtagcaatagtttaatgtgatctgtacttttaggctaataaacatggtatttatcctactaatraatcatctaagcacagaacaaggggaaagttgagtgattctgtctttccagatgattcacattatattctgattttttgagttttactcatatccaaacggttcttcatgctgcctgacatgcattgatatacttaaaagctgaagggtcacccaggaatattttatttattctgttctttttagatccatgagatgatcagacaagaaattttggagcaggtcctcaacagggttgttaccagagcatcttctcccatcagtcatttcttaggtattcaactttgaaagaatgaataaagttttta

SEQ ID NO: 9996 - DNA, 517 bp, Homo sapiens
tactagtgaaggattttatctaaggtctgtccctactcctcaactcagcactaacctctctgagacccaaacaggcacacaggtaccatggccctcacccctaatccccagctccttcacattttctgcattggtctctcctgccttgggctgctcactgctctgctccatggctgcctggccttccttggtcaccctccgaagctccccagccccaggcacccatattggaactgtccagcattcctctcctgtcttggactgggcactgctggagggcagaaacagtgagcttcatttctctccccagcaccgagtgtctggcatagagtagctgcttaattggagtctggtgactgaacagataattccttgatcaaaagccaaccagcctccaattaaactgctcctcyaataagctgcccaccacccctcaagatggccaactcattccatctgtggacaggcacagacagctcaatttgcaagtggagaagatatgattgttgcaaaggtg

SEQ ID NO: 9997 - DNA, 534 bp, Homo sapiens
ctgaagtttatggctgtggacgagcgcttcctccatcagctgagatggagccatgcgtgggcgttgcacagggcagcagccaatgatgggacggagctcattcaggccctctgtcttaataagcacaactcaactaatttgggaagaaaactcagttcagttggccagtacctggcagggacaggkagcttgacttaatatatagtaaatctaattataaaaatatagtactgtgctcaaaatttacatgtgagtagaatgatcgtgatgaaacagaagacagaacttttcccttacgataacattggattttctttcctaacctagctctcctacaaacatgcaaataaactgaaccagctaaagaagtggtcccaaggttttaataaaaaaaacatttaacccttccctaaatattatctaatgagggagcaaaatgtgtcactctcccttaacagatgggattctcatggctgctgttaaaggggaaaaaggagaaaccaaactgggtgactctctgagttacatctttgg

SEQ ID NO: 9998 - DNA, 528 bp, Homo sapiens
cacctcaaataaggaagggattcctatgcacaggtaaacgtaatctaactgtacacacaggtattttatttaatgttacttgagagccaattccacaactacaatggatcactatcacctatsacagggtctctttttccacaattcttatcatctatggaaataatgtattttaaaatgtattaaaggcaaataaccattgaaattgccatatcgcactttttacaataaaccaatgaaaagaaaaccctgcccctttgaagagaaaaagtatatcatccccatgacaagagtcccagtgtacaatacacatacattcacatgaaacctcagtttcctcatctgtaaaacagattctaataatatctattctaaaaggctactttaggaacgaataacatattcaaatgagctcaaaaaattacttcatccattgtaaaagatcaataaaagtgaactatcattattctcctgataagaatgcatttattctaagattaaagaagtagattagttaagcttccctaa

SEQ ID NO: 9999 - DNA, 539 bp, Homo sapiens
gaggcggataattagattgaaaattattttcccttcccttgtatcaaaattctgtacagtagtattcattcaaatacaataatgcagaaaactccttgattgcaaagaaagaaacctaatttgaaccaggttaaaaatattagagggcaatatttttctagattacatagtaagagcttcatgatcagtctccagtacaaaatctcaaggaaggttttgattgcccctattttgtgggttcctacttgggtcacgtatcttcttagttcatggacagttcacttgaccaggtaaagaaaggctgatggtgtactcacawtcacttaattgccctcttgctcacctctccgttagaatcaggatgctgtttgttagcaataaaggaactgccatccaaaatccatgataccaaccatcgtatctctatattgcagcctctttgtctacctttgggtacactggccctcaagcacctctgaatcttctcagtaggtcactgtcacacacattgactgggaaaccaaggttatttcagagac

SEQ ID NO: 10000 - DNA, 2220 bp, Homo sapiens
aagtgggcaggggaggtgacatcacaaagctctcagactgagggtcctgctgggcagagaagactggctgccctgagaggctgacaaagtcacatgcagggtctctgagagtgtgaatggcactggcccggggcacgtgccatgtggatcccaagaaaatgcagtgacttctagagtggggaacacttaaccccctaacccccatccacccacccacctactgcatgcctacctggccctcagtaatacacatgatccttttttttttttttttttttttttgagacacagtcttgttctgtcgcccgggctagagttcagtggtgtgatctctgctgactgcaaccactgcctcccgggttcaagcaattctcctgcctcagcctccggagtagctgggattacaggtgctcgccaccatgtctggctaatttttgtatttttagtagagacggggtttcaccatgttggccaggctggtctcgaattcctgacctcatgatccacctgcctcggcctcccaaagtgctgggattacaggcatgagccaccgtgcccagccacattaggcatttttctaaggtatgaatttctatgatgaacatgtattacttttatattcatggtaaagcgataatgacttttataaataaccttggagcagaaatgctcagccccaaacccttcccagttagtgggccgccccatgggcctgtgactggagtttccccctgccctgtccttgcacggcctccttcctgatgtgacacttggatgcctgtgagagggcctgtgacagatgccagcagtggtggcgatgacaagcccaaagccacatttgttccattacttccagctcctcgttgcctttgcaatccctgcggtgagagctcctttctcttatctgcacaaggcaagagtcaaaagttcttgtcagtgtgattgcagaatatcagactggaaaacttcctgataatacctaaattcctttagcgcagagcagtccctggactcgggtcaggagagctatgtggcttcagcacattgtgtactgtgcagctggataataaaccagatgaaatttggcaaataaaaatgtaaggatgtcattctagtcccatctggtgtgataacccctctcccacaccaatttgtctgttcccttagcaaaaccatgcaggcggcagaggaagagtctctgcttgtgtgagccattgaggaattccaaaatagacacaaagatatgaggaatacaaagaaatgccaaataataaaaaatgaggatcaagctgaggtttctgagacacatttatggcttttgtaaacagtcatgcattcgttgaatggctctttgggatgcactggtgacattagctaattctgacatttaggaatttaaacttagtagctgtcctagcttatccttattaacaaagtttgctaaacattgcgtgctgtgcgccctgctttatgtttgaagatgatgcaaatggcaggctgtcatctcgattccatctctcatcgtaaaacccgagggacacgggcgcatgctcccaccatgttttcctctggcctcattctgcacccagcattccctgttctttccttaccttccccagtttagtttcaaaaacatatgggttcccaaagaaaacaggaagaaatgcagaaacgtgaaaataaagtttaacaagtgatgatagacctttgatagagcactctttcctccatgccaaacaaaccgctttttataaaccaaataatttaaagtatagcttcactcttacctaaacttaaaacaaactggagagagagaggtgtatttttaatagaaatgacacatcgaagcatttccaaaaatgccctttgatgctcctaagccactgaccaagttcctggatttcaccccctcaggtaaccargtgagtttctccaaatccacggatgcttttgcctttgaagaggacagcagcagcgatgggctttctccggatcagactcgaagtgaagacccccaaaactcagcgggatccccgccagacgctaaagcctcagataccccttcgacaggttctctggggacaaaccaggtaaaaaacaaaacaaacaaacgaaaaaagtaaaacagcatctcagtgtattatcgtttcagtcttaacatcaacactgttaacagctggttttgcttagagaatgcagagatgtccctggctgccacag

SEQ ID NO: 10001 - DNA, 661 bp, Homo sapiens
cagttttaatttgcttttctctttttaaaaaacccaagtttattaagttataatttacaaatactaaaaatgtacataatttaagtatacagttcaatgagtttggacaaatgtgtatatcagggtgaccacagcctaattaagatagaatgttttcatcatctttttcattttggcttctgattctttcaacmaacctctatcccttcattgaaaacttccttgccttttgatatcacaagcttttgcagaaagttcttgtgtatttttctgtctcagctatgaaattttttttattggagaatgatgtttagaaaataagatctgggtgctagttgtaaccattgctaatggagtgtaattggttctaggtaaggttgccagataaaatataaaaaccccagttacatttaagtttcagctaattaatggataattttttagtatgtcacaaatagtgcatgaaacatatttatactaaaaattgttttttttctgaaattcaaatttaactggtgtcttatatttttatttgctaaatctggcaaccctacttccaggctcttttagaagaaagaagtaagaaatcatctttctctctctatcatttatatatccacctaatctacctacctgtctagtctgtcatatcatgagttta

SEQ ID NO: 10002 - DNA, 391 bp, Homo sapiens
tgcccaacaaaatacgaaacagctcagcttcatgtcttccaaccaacctcagaaaaaagatraagtctgatttaaatttcatatcaaaagcaatatttcaactatttaaagctacaataaatatacaaccatacggaaatctgtaaccaaatataaaaccctctaaactaaaacatttaacacagcagagaccaccaatgtaacactgggttaattcatttttgtgtaaaacctgtaataaagtgtaccaccacatttatgtttaatttaagagcctctttactccagaagtataaggggcccaaatcagaaaacctattgatataatttaccacattaacaaaccaggaaattatatggttatttcaataggaaaagaaacagtattcaa

SEQ ID NO: 10003 - DNA, 391 bp, Homo sapiens
tgcccaacaaaatacgaaacagctcagcttcatgtcttccaaccaacctcagaaaaaagataaagtctgatttaaatttcatatcaaaagcaatatttcaactatttaaagctacaataaatatacaaccatacggaaatctgtaaccaaatataaaaccctctaaactaaaacatttaacacagcagagaccaccaatgtaacactgggttaattcatttttgtgtaaaacctgtaataaagtgtaccaccacatttatgtttaatttaagrgcctctttactccagaagtataaggggcccaaatcagaaaacctattgatataatttaccacattaacaaaccaggaaattatatggttatttcaataggaaaagaaacagtattcaa

SEQ ID NO: 10004 - DNA, 1523 bp, Homo sapiens
cagacttctcttaggtatctagagaggataagagcagatactccccttgtctgttttatttttatttacttttcacaccttgccctgttgatggatattcttatttggagtatcctttttgtaccaatatrgaaaccagtgtttgggttgtaatatttacttttaagtaaagattccaattgtgaattaccaatggtgagaactgccttagagtatccttttaattttcgtatgtatttatggtaggaaaaaaaggatttctgggaaataaaaaaagtctctagttacatagagaagcatcgtatgtgcccagttctattgggtatgtatgaagggatcagtagaccttcatgaaagtttcatctttaactagtagcctttactgttgttttcttttcccctcgacaacaaattgtgcaacatctaaagtcactgatcagtcttaacatcactgaagtggagacagccaggcagtgtgtgcttcccggtgtaatgtgatgtggaatagagccgtcctgttttctgtggaaatatgtttcaagtccctcagtggatgcctgaaacctcggatggtttcacaccctttctatactatgtttttttcctatacatatatccctgtgataaagtttaatttataaattaatcatggtaagagaataacaataataataaaatacaacaattatagcaacatgccagcatcacttctcttgcactttggggccttagttatgtaagataagggctgtttgaacacaaacaatacagggacatttaaatgtatcttactttattagtagtttagtagctgaatgtatctgcttgtctgtctcgggtaggtgggtagactatacagcgtggaaacacaggaccaagggatgatgatctgagtctcaggtgggacagacagggatggagagatttcatcatgcaacacagaatagcatgtaattcaaaactatgaatggtttatttctggaattttcaatttaatattttcggacagcagtttcctcaataacaaaccactgaaagtgaatccaccgataagaggggactactgtgcatcataaccccgtgaagtgttcttgccaaaaaaatgaacttgtgtctgataaacctctagatctaattacaagtttacaagaagcatgaaacgtataaccaccactgtgagccacacctgggagacgggaacagcttcaggacatatgttctctattcttccacaaacaaatggcctgttttttaaaaaaaggagatacttttatagatcaaaagatatttaaagatatatattagtgaaatgcaacatgcagttcttagatcctgattcagagaaacctgaaaaaagcaattgatgcaaacagggaaaatagaacatgaactaggtattagatgatgttaaggaattattgttacttttattgggtgtaataattttaatgtagccgtatttggtaaaagtcatcttttggatatcaggaggtattggtaggttaaaaatgtgatttttgagg

SEQ ID NO: 10005 - DNA, 468 bp, Homo sapiens
caggaggggacgcgggggcaggaggggacgcgggggcaggaggggatgcgggggcaggagggcatgggtgtctaggtgtgtcctakgctggcactgcctctaggcttccttagagtcccccagattctcagcttcagaacccatcagacaccttccctgtcctaagggattggaagctgccctgagctttggctggctgaaccaggcaatagcgtgaaaatgcacagctaccttcctgcctggcccagtggggatcatgcatatcgccaagccacattaacacaaagtggaagaattagagaccaggactgagatgacacacacacccgtcacaatcctctggaccacagagaactttggatcatgagaggtgggatctcagatcattaagcacccccagtcctgggaaggagagcagctgtattctctctcagccctcccctagccgcaggaagcatacttcactgc

SEQ ID NO: 10006 - DNA, 468 bp, Homo sapiens
caggaggggacgcgggggcaggaggggacgcgggggcaggaggggatgcgggggcaggagggcatgggtgtctaggtgtgtcctatgctggcactgcctctaggcttccttagagtcccccagattctcagcttcagaacccatcrgacaccttccctgtcctaagggattggaagctgccctgagctttggctggctgaaccaggcaatagcgtgaaaatgcacagctaccttcctgcctggcccagtggggatcatgcatatcgccaagccacattaacacaaagtggaagaattagagaccaggactgagatgacacacacacccgtcacaatcctctggaccacagagaactttggatcatgagaggtgggatctcagatcattaagcacccccagtcctgggaaggagagcagctgtattctctctcagccctcccctagccgcaggaagcatacttcactgc

SEQ ID NO: 10007 - DNA, 468 bp, Homo sapiens
caggaggggacgcgggggcaggaggggacgcgggggcaggaggggatgcgggggcaggagggcatgggtgtctaggtgtgtcctatgctggcactgcctctaggcttccttagagtcccccagattctcagcttcagaacccatcagacaccttccctgtcytaagggattggaagctgccctgagctttggctggctgaaccaggcaatagcgtgaaaatgcacagctaccttcctgcctggcccagtggggatcatgcatatcgccaagccacattaacacaaagtggaagaattagagaccaggactgagatgacacacacacccgtcacaatcctctggaccacagagaactttggatcatgagaggtgggatctcagatcattaagcacccccagtcctgggaaggagagcagctgtattctctctcagccctcccctagccgcaggaagcatacttcactgc

SEQ ID NO: 10008 - DNA, 530 bp, Homo sapiens
tgttaaccctggacctcttgggttgatgctgccacaccgtgaaatgatgcctagggcctgtatcctagaagctcactgctggaggaaaggatggtatcacatatgtaccacatagagtcctgagcacagggccactgtttaagaaaaattcacagatgctaytgaaggaccatctctaaagagggaaggaaaagaaaacgtatactaataatgttttgaagattggagtttaaaaaaatacagttcaagctgggtgcggtggttcacgcctgtaatcccagtactttgggaggctgaggcaggcagatcacttaaggccaggagttcgagaccatcctggccaacatggtgaaatcccatctctactaaaaatacaaaaattagctggacatggtggcggatgcctgtaatcccagctactcaggaggctgagacaggagaatcgcttgaacccaggaggcagaggttgcagtgacccaagatcacgccactgcactccagcctgggcaacagagcaagactgtctcaaa

SEQ ID NO: 10009 - DNA, 1206 bp, Homo sapiens
ctaactttaattgagcgtggactatgtaccaggcgctattctgagtgtttgcctctattaactgaatattccacataatggcatcatgaaatagaaggtgaaccattttacagatgggagctgtgagacaggataatttatgtaacttacctaaaatcagagagccagacagagggagagatgcaatctgaacctcaagagcatgtgctcttccttcaccactgggctctactgcagtgttgctcagaccttagcacacaactcctggggggcttctgaaaacactcctgctggaaccccttggtagagtctgtgattcactagaattggggctgagaatttgcatttctcacaaggccagatgattcggaggctcctggtccaatttcactctaggagaaccattgtgccatgttttaccaccttccccacctgaggatttagtccagcaaatggaaatgttgattgaggctttttgagaaaatccatgtgcagagccccttgccgggactcttttggctacaaatgacagaaaaccctgttctaattgtcttaagcaaaaatggtatctataggccacttgaaacagcctaagtctgcctctaggcacagctggacctaaggatccaggaggtattaacagttaggattccctctttttctctccatctctcagctcagctttcctctctgccttcattctgttgtcttcattctcccctcacaatggcccccagcaactctggccttagattccaccaggtagaaacccccaagtaccccttcctattatcccatcagaagyacacgctggctgtcattggccagacatggatcacaggcgcatttctgaacaatcattgtggtcaaggaaatgtaatgttcttattagctaggcctgggttatgggctcacctctaaagagcagaaagtgggctgagctgcactaaaagcacacagatcaagagtagggtagaagaatcgggtgctggggccaaaaaaggaaatgaatgttgagcaggcaaatataaccaatgtccactacaccatcctcaaaggacaaaatgtgttcaacattaaactctcaaaggatgggcccaagcacagagatcatgatcaaagggaaaacccaggccaggtgctgtggctcacacctgtaatcccagcactttgggagcccaaggtgggaggatcacttgaggttca

SEQ ID NO: 10010 - DNA, 527 bp, Homo sapiens
ccagctaccaccattattactaaaaaggttaactttttttaagcaattcatttttctgaactgtgtattagtttgctaagggatgtcatagcaaaagaaccaataaacaacataaatgtattttctcacagttatggaggctggaagtccaaggtgtaggcagagttggtgtcttttgaggacacactctgtggcttgtagatgatcatcttctcctagctctgtgtgtctgcatcctaatctctttataaagacaccagtcctattggattagggcccactcgtatgacctcattttactttaaagaccctatttccaaatatagtcccattctgagatgctgggggttaggactccaacatgtaaatttggtgagggagcagaatacaatttagtccayaagaaatcataaaacacaaatatgtaagagaaatgtgagcataagaaaaagttaaaaagctcatacatagcttcctcagttggaacaaatcaaagtgctttcttgtttttgccatatgcacatcta

SEQ ID NO: 10011 - DNA, 738 bp, Homo sapiens
acaatttaggattgtatttcttgttccagatgggtgacttacaaagcttataaaaacaaggtgatttgtttgtttgttttattggtggggaggctgacagtttgaaatagctggatacagtgtgtttttttggttcaaaaaatatttattgagcatctgcataaaacgctcatgctgagtttatagagaattgaacatctctaactgtcctcatggaggttatccccctgtgaagatgggggagggaaggctatttagctaaacatgaaaaattactagttggaaaagtaataaaggtaacaagctgsgttttgtgatagaagataatagagggcagtccgcttgataagatggtcagagaaggcttgtctggaaagctaaccctcttttacctgaagacggttctaggcagaggaactgtgtgtatgaaggttccaaagcagggaagagcttggagtgttctaggaactcctaaggcagtggttaggactttttctgatgctgtccgttctcctcagcccttgtatgttgatacccagttaactaaactttctaataagcagaacccattttagaaggaaaaaggacctaagacctctctatgaattattgccgaattttcttttttatcaatattgtgtctagtcttgattgattcaggaatgtgttatatcttgttcttgaaacttttttcattagtcagaatgaagtgcttgatattctcaggatgttgtctag

SEQ ID NO: 10012 - DNA, 525 bp, Homo sapiens
ctctgaagtgtagastgtgtttaaatctaatttatgtaacttaaatcacattctcttcatcatggtgtacgtttatgaagttaatggcctttaaagctttcaatttagtttttatttaaatgtgaatgcaatgctgaaaaaaatctctctgtgtattcagtataaatacttatattcaagaaaacagtttaagttttaactgttgtaatatattttattgtttatctggtaaggttagctactattccgtcaaattgggctttctaagaaaggaccaatttttgtttttctttggatagttttcacaatagttctttgttctgtccttgtcttgcattttatcttagtcttatattaatttttcttcacacggaggtaatggatgatgtgccagatggtttcaaacacagactacatgacatatgctcagtttttgatttgaggagtttgtaaagattttcttcaaattgtgatagcaaagttccttaacttaattttttctgtaaacgatttgccatattaagg

SEQ ID NO: 10013 - DNA, 1438 bp, Homo sapiens
catcttatcccaatgagtcctcacaacaactctgtgtgcctatcatagctaatatttactgagcactaactttgtgccagatacttttcagactgtgtgtcatctcatctaagtcttcacaagcacttttgctgtagatttttattattcttatttcaaaatggaagaaaagaacataaagttaataattattgaacatgtgatatgtgccaaggaactgtgctaagcacttgatatacattttcccatgataaacctttgaagtaggtttgcttttttttttttttttttgagatggagtcttgttctgtcacccagcggtgtgatctcggctccactgcaacctccacctcctggcagtgattctcctgcctcagcctcctgcgtagctgggattacaagtgcacaccacccaatctggctaatttttgtatttttagtggagatggggtttcgccatgttggccaggccggtctcgaactcctgacctcaagtggtccacctgccttggcctcccaaagtgctgggattacaggtgtgagccaccatgccctgcctggtctgtattttttttattttttattttttttagagacaaggtcttgctccgtcacctaggttagagtgcagtggtgtgatcatatctcaatgcagcctcagactcctggctcaagcaatcctcctgcctcagcctctggggtagctgggactagaggcgtgtgccaccacacctggctaatgttttaaaattttgtgctagagacatggtctcactatgttgtgcaggctggtctcaaacttcttagctcaggcaatccttctgccttggcctcccaaagtgctgggattacaagtgtgaaccattgcacctggcctggtctgtattttactgtgcccggcctaggtctgtattttatcgagagcaaatagtttgcgcaagtctacataagtaagaagaagaagcaggattgaaagctagtctctctaattacaaagctcatgagcttaggcagtccaaaaatagaaatgtaagttcagagagtttaagggacttgctcacgattacacagcccacagttgaagaatgatatctgaatccaggtttatctgattcyagaattgaaatgctaacattttctagtaagaaaaataatgaaaaataatttttcctctgatttggagctaattctgaaactagagcaatctaactgggctttatttcattgtactctttagatatagctcccctgaagttagtgtgtaaatcactagccagactttttgatatctgcctactacactgtaaacttgcagaacaaatagttcttattataaagctgtgtatcacctagttaggggaaggaggcatttaaaaaggagaggaggaagggatgaggcaggcagacagataggaagagaagaagaaagtgagggaat

SEQ ID NO: 10014 - DNA, 617 bp, Homo sapiens
acataacactcctggactgcgggaaataaaattgagagggacatgattagaagtaaacttctagaattctactaattccaggttcttcaaattggtacaactggtgacaatcccagagtcaccagtcatcacatcaaagtttgatagagaaagatgacccacaggagcagccttgctgtgcttgaggattgttcaacacttgaaatgagcttcggatcagttcttggctgaagtccacctgggcccctttcacgaaggccaagctatcagagtcaaccaccactcttgccccaccctgttcaaataccctgaaaagacaggaggaaggcattaaggagtatcgcaaacacaaaaaagacaccccctgagcccagaggtgcacatcctctgttttctaaagtacagagggagcttccccattacctttaacaggtgctgattttctttgaggcaaaatgattcaatggaataaatactgggaaacrtgtagggacttaagcctggaatctagtccggcctgactttctaccgactacccaatggacctgggcagatcaattttgctcctataacttagttactttgattcagaacaacaaacctttactgcatcctca

SEQ ID NO: 10015 - DNA, 517 bp, Homo sapiens
gcaagagactttcttgattccaggaggcagaggttgcagtgagccaagattgcaccattgcactccagcctgggcaacagagtgaaactccatctcaaaataaataaataaagtttaaaaaaataagacaatgcctaatgccattttaaaataactaatcttaaaagtgcgattgcaagtggtttagaatgtagttactgagagctgaaaggggcattctatttgttcatcctttgctttctctaaaatctattgtttggttttacactgaacaactagtatgactctgcagggttttttgkttgtttttttttgtttgttttttcgtgaaaacagatacctaggatgttttttttcacctttgaaatctctggaagaaaaacaaatatttacttaatagaaatagaagctggagaagtttttcaaaaactacaatgatatattaatacaaaatttgggtgacccctgaagaaactgcagtcacacagaggaaggaaagctgctgcctagaatgcca

SEQ ID NO: 10016 - DNA, 517 bp, Homo sapiens
gcaagagactttcttgattccaggaggcagaggttgcagtgagccaagattgcaccattgcactccagcctgggcaacagagtgaaactccatctcaaaataaataaataaagtttaaaaaaataagacaatgcctaatgccattttaaaataactaatcttaaaagtgcgattgcaagtggtttagaatgtagttactgagagctgaaaggggcattctatttgttcatcctttgctttctctaaaatctattgtttggttttacactgaacaactagtatgactctgcagggttttttgtttgtttttttttgtttgttttttcgtgaaaacagatacctaggatgttttttttcacctttgaaatctctggaagaaaaacaaatatttacttaatagaaatagaagctggagaagtttttcaaaaactacaatgatatattaatacaaaatwtgggtgacccctgaagaaactgcagtcacacagaggaaggaaagctgctgcctagaatgcca

SEQ ID NO: 10017 - DNA, 941 bp, Homo sapiens
gtaaccacataactcttttgattgtagatttagctgcgatgtcggcggcacttgcgaattccctccccactctgaggagctggacggaggctccatcccactgagggctgggcatgggcctgcctggccctgaaggcacccacggggccactcccaccagggtgtggatgaaacctgttttcttttctcttcccaattcatactctttagcagcgaagaaaaaacaatatatatgtgaactaagaaaaggactataaatcatgctaccataaggacacatgcacacatatgtttattgtggcactattcacaatagtaaagacttggaaccaacccaaatgtccatcaatgatagactggattaagaaaatgtggcacatatacaccatggaatactatgcagccataaaaaaggatgagttcatgttctttgcagggacatggatgaagctggaaaccatcattctcagcaaaatatcacaaagacagaaaatcaaacaccacatgttctcactcatcggtgggaagtgaacaatgagaacacttggacacaaggcggggaccatcacacaccacagcctgtcaggggctgggggccagggggagggrtagcattaggagaaatacctaatgtaaatgacgagttggtgggtgcagcaatccaacatggcacatgtatacatatgtaacaaacctgcacgttgtgcacatgtaccctagaacttaaagtataattaaaaaaaaaaaaagaaaaaaaattccaggtacaaaggggaagtcatttatttttgtgccatgctgccttgcatttttggaatgcctgtccctggagatggagctcacatctttccggaaagctctgaaggtccctgcgtctcagtatagctgctctgtagctttttagctgtctggcccctcttaggtgttgagaaagttattaa

SEQ ID NO: 10018 - DNA, 560 bp, Homo sapiens
tgattggctttggccaatgggatgttggctaatgagatgcaagcagaagcttgactagtgcttgcacattggagattgtcctctcttgggaaagtgtgactactagcttgtgaaatagcccaggttagcctgttggatcatgagagacacatagtgctgtaaccctggtcacctcagctgatagccagccaattrtcaggcatgggagtgagatcatcatcagccagttgaactcagagctcattcaagaccagcagaactttgttatgccttcctgaagcttagacgtgatgtaggaggtacagcagccatattgtgtccatgaggcaagaagcactcactaaggcatgactgagcagaaaggtaagcagaaactagggcctctgatggcatcacagagctatagcaccagccccagaaagcctacctcttcactcctagttgtatgagaaaaagaaaatgtaattttattctgcccgtatagattggatctctgttgcatgcaaccagtattattcctaactgaaagattggttaattaaaaaaatagttttccctga

SEQ ID NO: 10019 - DNA, 623 bp, Homo sapiens
aaaaaaaatcttgtttttaatgcaaatacactacacacaataaaacaaagagagactgtatgtaagaagttcaatacacatcaatgtaattgtttctcattctaaattttaaagctatttcatgtcagctaaattcacgatggtcaaggaaaacggcaatcagttgcaaagcaatgctatggaaattgaaakaacaccaaattttgaggtagaagataattctgaacaatctcagctgtgctcatgggactcatttggcagaaacaagcatttctcttatacagttttggtttagtgctgaaggtggccgaattaaatgacttcaaacccccacccccaaagccttaagtttttagaaatacagttagcagtaataatggctttaattgtgtggatttaaaaaaataacaaatgccacaccaagtttttgattccattgaaagtcattaaaataaactttactgatgcttagggaacaaactcattattctgaaaactaataaagaaagaaaaagaatcatttatcccatcatgccagtagaagcagttttcgaggtaaccaaatagttgataagatacagtcctttttagaaaaattctagtcaatgagagaaatgacagaa

SEQ ID NO: 10020 - DNA, 548 bp, Homo sapiens
cccatccaatggtrgacattgggttgtttccaagttttgggctactacaaataaagttcttatgaacattcatttttcaaatacctatatggacataattttaattgcatttggtaataaattttgatttatatttacattgattatatactctattacttatatttatatttacattgatttttttttttgagacaaggtctccctctctcttcctggctggagtgcagtggcataatcacggttcactgcagcctcaccctcccgggctgaagcaatcctcccaccttggcctccctagtagctgggaccacaggcatgtgccaccactgcctggctaattttttaattttttgtagacaaggttttgccatgttgcccagggtggtctcaaaactcctagactcaagtgatatacccgtctcagcttcccaaagtgctgagattacaggcgtgagtcaccatgcccagcacattgattttatatgatcttaaattcagtacctattgtgttagataccatgctaagtattttcatattgttagat

SEQ ID NO: 10021 - DNA, 548 bp, Homo sapiens
cccatccaatggtagacattgggttgtttccaagttttgggctactacaaataaagttcttatgaacattcatttttcaaatacctatatggacataattttaattgcatttggtaataaattttgatttatatttacattgattatatactctattacttatatttatatttacattgatttttttttttgagacaaggtctccctctctcttcctggctggagtgcagtggcataatcacggttcactgcagcctcaccctcccrggctgaagcaatcctcccaccttggcctccctagtagctgggaccacaggcatgtgccaccactgcctggctaattttttaattttttgtagacaaggttttgccatgttgcccagggtggtctcaaaactcctagactcaagtgatatacccgtctcagcttcccaaagtgctgagattacaggcgtgagtcaccatgcccagcacattgattttatatgatcttaaattcagtacctattgtgttagataccatgctaagtattttcatattgttagat

SEQ ID NO: 10022 - DNA, 548 bp, Homo sapiens
cccatccaatggtagacattgggttgtttccaagttttgggctactacaaataaagttcttatgaacattcatttttcaaatacctatatggacataattttaattgcatttggtaataaattttgatttatatttacattgattatatactctattacttatatttatatttacattgatttttttttttgagacaaggtctccctctctcttcctggctggagtgcagtggcataatcacggttcactgcagcctcaccctcccgsgctgaagcaatcctcccaccttggcctccctagtagctgggaccacaggcatgtgccaccactgcctggctaattttttaattttttgtagacaaggttttgccatgttgcccagggtggtctcaaaactcctagactcaagtgatatacccgtctcagcttcccaaagtgctgagattacaggcgtgagtcaccatgcccagcacattgattttatatgatcttaaattcagtacctattgtgttagataccatgctaagtattttcatattgttagat

SEQ ID NO: 10023 - DNA, 573 bp, Homo sapiens
tcacttgagcccaggagatggaagttgcagtgagctgagatcatgccactgcattccagcctgggtgacagagtgagactctgtctcaaaaaaaataagtacagaaggaataatatcaccattayacagctcttaaacaacggatttgaggaataatcatcaatactaccccaaaaccattaggtgaaaagctgacaggaaactttataatggaaagttccgactagcaacatagcacatgtacagaagaagagaggatatcctacctgcttgaaaattcttttctttacagggaggaaaggtcaattagaaatacaaagggaagaagaaattcaccagtttacaccataactactcttttacattaaccactgttgtagatgaaagtctgcagtctcaagggcatggcagggtgttctgtatagtctgggccatcttccttaaagctggtgttcaccaagtacaaaagcgcctaccagaaatatttgtcagcgtccaacagacatggcaaggctattccatattcttttcttttcaggaaagctctgcccttctcatgatatcccatagcta

SEQ ID NO: 10024 - DNA, 521 bp, Homo sapiens
agcaagggtggggggaggtcaccagattttaagactgcaacaaagccacagtaataaaaaacaccacaggtgagtaggaagaacagaaaatataggaacagggccccccaaaaagggtcaccaccaatcagcagggaaaagacagactatttaatgaattatataggaagaaaaataaaggaacccttaaactttatatagaaagggggactctggacagactgaagacctcttatagattaagctaatattcaagaaaatgtagactatccttgtggccctggggttagggaaaggacttcaacaaaacacaaaccataggcaatggatttgatgacatcaaaatcaaggtttctgtccaatgaaggatgccacaaacagaattaacagagggatgaggcaacagtgaaaagatatccatgacatctaaaatagacaatgggaaattgctagagatgaygctggaaagcaaggctagggtgagctgtgaagggctgtcttagatcaagctaagaaatgtg

SEQ ID NO: 10025 - DNA, 555 bp, Homo sapiens
agggtgaaatctacattaagatgaaaaagctgtttattttatgctgtagccatayctttcaaaactcctcatccttcccaatatagagtcaggcggtgaaacttttatgaggacagtgctaacatcactgattttctctaggggtataaaaaatactgtcaaggccaaaccatgaatatttatgctaaaaagcaagagttagataaatgtagaataagacagtgagagaggagctgtggttggaacaggcgagcatggtagctggaatgagatattttatataagaaagagacagagtccagtggtccgtgagactaagacagaaagtggctattagcttacactgtgcatacaggaagaatagtccctgaggcttcagtaaatgcttcatgagttcagaaaaaatgaggtaaatgactacacaaaggaagtgaatagagacagatcagggcagaatcaacactgtggtcaggcagaacatgtaaacaatgcaagtaagggaggcccaccaaagtcaaagctccagaaactgcaatgaagaattacaaaacaggg

SEQ ID NO: 10026 - DNA, 555 bp, Homo sapiens
agggtgaaatctacattaagatgaaaaagctgtttattttatgctgtagccatacctttcaaaactcctcatccttcccaatatagagtcaggcggtgaaacttttatgaggacagtgctaacatcactgattttctctaggggtataaaaaatactgtcaaggccaaaccatgaatatttatgctaaaaagcaagagttagataaatgtagaataagacagtgagagaggagctgtggttggaacaggcgagcatggtagctggaatgagatattttatataagaaagagacagagtccagtggtccgtgagactaagacagaaagtggctattagcttacactgkgcatacaggaagaatagtccctgaggcttcagtaaatgcttcatgagttcagaaaaaatgaggtaaatgactacacaaaggaagtgaatagagacagatcagggcagaatcaacactgtggtcaggcagaacatgtaaacaatgcaagtaagggaggcccaccaaagtcaaagctccagaaactgcaatgaagaattacaaaacaggg

SEQ ID NO: 10027 - DNA, 610 bp, Homo sapiens
tcaggcttaacaatcacttatggatatttaaaagctaaagagagaaaacataggctatttgtccaattcttaattgtttagactcagtaaatccaatacttacaagaggaaatgggcttgactcaattcgaatatgttgtgtgtgattaaacatttgaagtagcccattgctgataatattcataagaattggaaaacagtgcaatctcttggtattacacacaactgaaaatctataatccttaaaacagaaacaaataaataatgttaatgctaaattcttaaagaacaaaggcaaggtttatgtataaaagatcctaacagtgccacatgcttgttgtgtgtccatcttcaagtgaactaaactttctgagcttyaccttcctcatctatgaaaaggaaatactaaatgggttgttatagggcttaaatgacactctattcatgtacattaagctctagcacagagtcagcatacaatcaatatgaatttttatttgtattactaattttagataattttgtctccattttgctgatggggaaatttcatttagtagagtttaaaagtctccctgacaaggagatgctgtcagtttatgatgaagaa

SEQ ID NO: 10028 - DNA, 615 bp, Homo sapiens
gcttgactcttttacccaaatcgacatatgctaaggtagcagactgagaatacttttttctcagttatttcgtgtagatattatagtatttaatgtattttctcaatatataaaaacaaactttattcaggtagttagctactgaataaaattccttaaatccataattatattggttgataattataagctataatatttttattgagtttaaacagtacaattaaatttagatcctttcaaatgtaaaagttatctaattcaaaacaaaactaagatagaaaatgttttacaaaaacttaggtaaacttcacagtttattaaataacaacccagaatgtttttctgagtcaagtttctgtatactagctttaatttctgcagttttaaaacagctaaaatgtagtactttttgtttttttcataaaagcaaaaaggcaaacataccttttgtttaccagaaactatgatagctccattgtatgagaggccatcagtaccatttctgttttcaaagtcatctacttccaaaagtatattttgatgcttcagtgattttataaaatcttcaatatttgattctaatatgaagttaataagrgaaggccatagaaa

SEQ ID NO: 10029 - DNA, 522 bp, Homo sapiens
tgacatacgtatttgagttatccaggcaagagccacagctgacggtggagaagctaagttagaaatcaaggacttcagaatatctttgaatactctgaagttacagccctaaaatgaagcagcaagatgcatctgttaatagaattcctgtctcagaggtgccgtgctgccatccaactggcactgggagtctggctttattgatagatggataagattgaacatgacacctgtgtccagtgaatcccctggygccatttaactagcacttaaagcagctgcttttgaaaaattaccttcagactgggcccaccctagcagaacaaaatcctcaccttaagtacttttccagttcccaataaatgaggatttttgccctgcaagagaactgagccatattttatttgaagccacatctgtcactttatttttatttcccctgctgtctaccttagatcacaatgcctgtgtcatggcaatatccttccaagggatcacagcaaccccctctttgaagacctt

SEQ ID NO: 10030 - DNA, 531 bp, Homo sapiens
ggagttcaagaccagcctggccaacatggtgaaaccccgtttctactaaaaatgcaaaaattagccaggcatagtggcacgcacctgtaatcccagctacttaggaggctgaggcaggagaatagcttgaacctgggaggggaggcggaggttgcagtgagccaagattgcgtcactacactccagcctgggcgacagagtgacactccatctcaaaaaaaaaaaaaaaagcaagtatgtatactcaagtcactgcagcctgactttccatcctcttctctccatggaacaggttctgccaaagtcaataatggagtccttttagtccctatttcactgggcctgtcagtagcatttgatacaatgatttctcctgggtttcatgcctccactctgctgatgttcatccaactattttagtctttgtttcttccctyctttacaagttctcctgccctaccctgtaccttaaataaagagttccatagttttgcactgaccttttttccccactctcacactctctgggtg

SEQ ID NO: 10031 - DNA, 589 bp, Homo sapiens
tgcaaatgagaatgggtccatggaaaaatgattatagggtcaaaccttaaaaataggaataccagggtgggattagaaatgaagatgcattgtcttcagatttactagaaatgtgtggcctttccaatatcgtaaatgaactaacacagaagcagaaaaccaaatatcacaagtttttacttacaagtggtggctaaacaaagaatacacatggacataaaaatggagaaagtagactctgggaactccaaaaggggaaagggtgggaggggaatgagggttgaaaaattacctattgtgtgcaatgtccaatatttgggtgatgggtacaatagaagcccaaccaccagcattatacatgcagtactcatgtaacaaagaaggacatatacyccctgaatctaaaatttaaaaaaagaaagttatggcctgtaaagagcagtttcaatcaccccgggaaggtgaagcaattaagtgtccaggtgcggaagcttttagatttgttgagcatcacgagattcagtccactgtgtaataaagcttcccaaatttgtttccgtaaccttgttctctgtctgaggtacaccct

SEQ ID NO: 10032 - DNA, 962 bp, Homo sapiens
agagggagccagagattctgatgagaaatcagrcttctgacttctatttttttccttgaaaatcactactctttatttttttctttttaatcacagaatatactgtcattctaggtaatgatgaaaacctaaataaatgactgtttactgaattcctactaaactccaggtactatgctaggcattttacagtttatatttaatatgtcaaattcgtttataaattttatatggaaaaaatttgtaataataggagaaagagaaattcaggattggaaagaaagatgttgatgagaaaaactcatggttttgcactacagctttagaggaagggagctgagtcaaaacccaccagaactgtcccttctgaatgggaaagaaggtcagctgttctctagtggcgggatggaaccccactaaaagaacctactgagcttcactctcctctggctaaaattatacaaatagaaacaggggcatgacttttctttatgggattctccctaaagtttccctaagacttttcctttctggaatatcaggaaataagaaaaaatggtgggtatcattattatttaataaatgtgaaatattatgatggagaaaaattaggaaacttgcccaaggcacaacttctcattactggggaatataaatcagtatacttgtccagacttaattagtgagcttccttaaatcattccaaacactattacagtcctccttacactgaatgttgattaaatgtatgcaaatctgttgcctttcctaagtttgaactactttactaaatgtgttcatttttactttcctcccacccccgttgtacttagtactgttcacccatcctttcaatcgatatttactgagttgtgtggcactgtgccaggaatagtctgtctcatggaatattgaatgtagttggtgctacagacaataataaatgccaacaataattatta

SEQ ID NO: 10033 - DNA, 962 bp, Homo sapiens
agagggagccagagattctgatgagaaatcaggcttctgacttctatttttttccttgaaaatcactactctttatttttttctttttaatcacagaatatactgtcattctaggtaatgatgaaaacctaaataaatgactgtttactgaattcctactaaactccaggtactatgctaggcattttacagtttatatttaatatgtcaaattcgtttataaattttatatggaaaaaatttgtaataataggagaaagagaaattcaggattggaaagaaagatgttgatgagaaaaactcatggttttgcactacagctttagaggaagggagctgagtcaaaacccaccagaactgtcccttctgaatgggaaagaaggtcagctgttctctagtggcgggatggaaccccactaaaagaacctactgagcttcactctcctctggctaaaattatacaaatagaaacaggggcatgacttttctttatgggattctccctaaagtttccctaagacttttcctttctggaatatcaggaaataagaaaaaatggtggrtatcattattatttaataaatgtgaaatattatgatggagaaaaattaggaaacttgcccaaggcacaacttctcattactggggaatataaatcagtatacttgtccagacttaattagtgagcttccttaaatcattccaaacactattacagtcctccttacactgaatgttgattaaatgtatgcaaatctgttgcctttcctaagtttgaactactttactaaatgtgttcatttttactttcctcccacccccgttgtacttagtactgttcacccatcctttcaatcgatatttactgagttgtgtggcactgtgccaggaatagtctgtctcatggaatattgaatgtagttggtgctacagacaataataaatgccaacaataattatta

SEQ ID NO: 10034 - DNA, 617 bp, Homo sapiens
aatttgccactttatccctattatctagctcaatacttttagtaggcactcaaatgttggttaaatgatttggagctaaattgtctggcgtttaggtaaggaatagcaattttttaaaaagggaatacatgctaggtcaggctgtggaaggtcacataatctgaggttatattcattttattcaacaggtcatagtgaccatttttaagatgtgagagaggactgccttaatactgaacactgaaatcttttatctataaagattaagtttttctccccactggttttcaggtatttaagcacccatattttcactgagtaggttctagaaggaaacatttccttaagaaagaggaaactgcaggataatgtgggcatcgattctttgagtgctatctcttctttctttcagcaacttctaggctggtgagagggaactgaggttcacaaaagatacacaattttttaaaaagtcttaaacacatccattttgatagaaaatagaggcagccgggcatggtggctcatgcatataatcccaacactctgggaggccaaactgtttaaagaccagccygggcaacacaatatgaccctgtccctacttaaaaaaaaaa

SEQ ID NO: 10035 - DNA, 522 bp, Homo sapiens
ttctttcatcagccattaatttatatcaattatttatcgagtcctgtgatgttgtgtgcttaaaaccacttaggactgggtgctcaaatgtgttctttaaagggacagattatagattccatttcaagatttttttttctcctgtgacttacatggaaagaaagaataagcagttgagatcaaaatcaatccaatccttaaaatgaagcaatttcccccacccttaaagttatggtgagaatttttacaactttctttttcgccagtagcttctccagttccatagatgatgctattcttaagaacattcttgatggttgaaaatgatagatacttaggaattgtcctgactcagatatctgcatattcctgattagacgacytcctgggtgtcctagccatacccacaattataagatcagaccctttccaggtttcttcatgacatctggtcacaaaagcatgtggagggtcttcagtttctaggcaacatgaactcaacactcagatccagctggtgac

SEQ ID NO: 10036 - DNA, 601 bp, Homo sapiens
cgcctgtaatcccagctactcaggaggctgaagcaggagaatcgcttgaacccaggaggcggagcttgcagtgagctgagatcacaccattgttctccggcctgggcaacaagagcgaaactccacctcaaaaaaaaaaaaaaaagaaacactgatctattgcattagtgtgtgcttacatttcatcacctaatgacaaagaaattgcagtgtagatcctcagggaaatttttttamagtaaaactattaggagccattgcctaattatccagaaataaactgctttgaaattttaataaattaaaagaaataattagacatcttttttccaacatggacaagctaaactcatgagcatgtttacatttgataagacactagacaaacctggatgcaaatacctcgttgcaaacttaaaactcaagtgaaaatggaaaaaactgagcaggcctgaaattctcatttaaaatgctgtttagaggtaatcggttctggatttctcaccttcctgaatgatcgaggcctctgtgcaaagggcactggcaagctttgttcgaggactgaatagcaaacagcagtcaggcgtcctgagacatgcca

SEQ ID NO: 10037 - DNA, 535 bp, Homo sapiens
agagtatgtataccctttccttatggtggataagacttgggtttgtggagtaaccatgtggagatctacctatcttggggccacgcaagaccatgcttctgtctataagttccctcaataaattacccaatacaaacaaagtggatttgtctaccacctcctttagtttcttggctccttcgacatctgggagctgttaagcatatatggccgttttcacagagctcctaggaaaaggagatataaagatccaagaagagtgggaaagagaaggtgttctgagagacaggaatgtaagagtgtattgacaaaagggaaaagatatcctttttctgtcccactaaaagtttacctagtttggactcttcctgttcacctaacatggcctaaagtaacaggtagctgtcctctctccctacctgctttccaaatagagagattatgcagcccccttcccccactgccacctgggaaacagccatgcacctgccttccagscttgcagcctgctcttctgcacccacttggtcgaccc

SEQ ID NO: 10038 - DNA, 574 bp, Homo sapiens
agcttggatgcaccctgagctgaactaggactgcccagtaattgtcaaccctttgggaacatttatggctgctttgaaaatctgatgaaagtcctaattggaacctcttttcacacaaaaatacacatctgccaatacacacaaaatatttgtgtataacttcaggggtcccagggcccctgaaaattcactcatgaatccttaggaatccacgcacccctatggaccaccactttaaccccacctctctgattcagaatgaactttcaacaaggttttcccatgaacwgtgggcaaagatagcagggctgggcacaaatgcccattgcacagcagaagtcaaacagggctggtctttggaaaaaggaaaagcagcaaagattagctttggagttcccagcctggcctttcttctacctcttcctggttatgttcataccctcccccattgctcctcaagggtttgagtttattaagcaaacactacctttgctccctatatgcctggtatgtaaagcacaggaaatgttttttaatcaacaacccagagtctttgcacttcctgtatctccgc

SEQ ID NO: 10039 - DNA, 560 bp, Homo sapiens
ccccaccccacaacagtccccggagtgtgatgttccccttcctgtgtccaygtgttctcattgttcggttcccacctatgagtgagaacatgcggtgtttggttttttatccttgcgatagttcgctgagaatgatggtttccagtttcatccatgtccctacaaaggacatgaactcatcattttttatggctgtgtagtattccatggtgtatatgtgccacattttcctaatccaaaacaggaaacataggcagtcctcgaaagattctggagctgttgagtggaaagccatcaggaattagcatatctctctttctgtcactgtctgtctgtctctcttcctctctgtctttttgtgtgtgtgtgcacgtgtggacgtgtatgagtgcttttctctgtttctctattctcacatgttgtttctcacctcaccttcattttggtcatccacttttgtctttttcctccctcagctgatcagttttcattacttgaccacacttatagccacattcaatgagtcctcaacggtgtccataggttattgaaaactgcga

SEQ ID NO: 10040 - DNA, 560 bp, Homo sapiens
ccccaccccacaacagtccccggagtgtgatgttccccttcctgtgtccacgtgttctcattgttcggttcccacctatgagtgagaacatgcggtgtttggttttttatccttgcgatagttcgctgagaatgatggtttccagtttcatccatgtccctacaaaggwcatgaactcatcattttttatggctgtgtagtattccatggtgtatatgtgccacattttcctaatccaaaacaggaaacataggcagtcctcgaaagattctggagctgttgagtggaaagccatcaggaattagcatatctctctttctgtcactgtctgtctgtctctcttcctctctgtctttttgtgtgtgtgtgcacgtgtggacgtgtatgagtgcttttctctgtttctctattctcacatgttgtttctcacctcaccttcattttggtcatccacttttgtctttttcctccctcagctgatcagttttcattacttgaccacacttatagccacattcaatgagtcctcaacggtgtccataggttattgaaaactgcga

SEQ ID NO: 10041 - DNA, 534 bp, Homo sapiens
gtcctattactggtatcagcatcaatctcacaaaggtttctctcttctctaagattcaaagtcagtcctcaggccaggcacggtggcttacgcctgtaatctcagcactttgggatgaggcgggtgggtcctttgaggtcaggagtttgagaccagcctggccaatgtggtgaaaccccgtctctactaaaaatacaaaaaaattagccaggtgtggtggcgggcgcctgtggtcccagctactcgggaggctgaggcaggagaatggcttgaacccgggaggcagaggttgcagtgagctgagatcactccactgcgctccagcctgggcaacagaacgagactccatctcaaaaaaaaaaaaaacaaaacacaggctgggtgcggtggctcacacctgtaatcccagcactttgggaggccgaggtgggcggatcacgaggtcaggagatcgagaccatcctggctaacatggtgaaaccctgcctctactaaaaayaaaaaattagctgggcgtggtggcgggcgcctgta

SEQ ID NO: 10042 - DNA, 1087 bp, Homo sapiens
ttttttcttttgatcttacagataataattcaaggcattcttttttaaaaaattgaaacactaggtataaagccaaaggtctcttgaatggtcacatccttcccccacccaccccaaactcatctatagctcctccttcccaaatactaaggcaagcactgctttgagctttttgtctttcttcccagattaaaaaaaaaaaaaattaaaaaacaggtgcgcaggactgggctaatctcagcactttgggaggccaatgcgggcagatcccctgaggtcaggagttcgagaccagcctggccaacatgatgaaaccctgtctctactaaaaatacaaaacttagccacgcatggtggtggcgcctgtaatcccagctactcgggaggctgaggcaggagaatcacttgaacccgggaggtggaagttgcagtgagcagagatcgtgccattgcacttcagcctgggcaacaagagctaaactccatctcgaaaaaaaaaaaatagatgcacaaattcaggattgtctaattcaaaataatacggctaacaattactgccttgtcttttccctctccttccactctctttcccctgtcacttagccctcattggtgataaaattccactcaatgcttggaatctggatgagccaacagggttcttgtcagaactgaataatcagagctggggagagaggcttggactgggggaggcatgcagatgccctctttaattaaaccaggctagaccaggtcaagggggcctgcccaggaaaatgagcagggaagcaaaaattaccaggcaaagccataagggagaagagtgcagaattgaagaaagraagccaagctggggtggagacgtggacaaggaggatggtggttctcaggcccacataagaccagaaaaacagggccaaatagggaaagccagaattgagcagaccatggtcataggcaaaagatggcattttgcccaaaggggccgtgtgctttgaccaggacttcctgccttggatgtgcttttgcacttttttttttctttctttgagacaagttcttgctctgtcacccaggctggagtgca

SEQ ID NO: 10043 - DNA, 1087 bp, Homo sapiens
ttttttcttttgatcttacagataataattcaaggcattcttttttaaaaaattgaaacactaggtataaagccaaaggtctcttgaatggtcacatccttcccccacccaccccaaactcatctatagctcctccttcccaaatactaaggcaagcactgctttgagctttttgtctttcttcccagattaaaaaaaaaaaaaattaaaaaacaggtgcgcaggactgggctaatctcagcactttgggaggccaatgcgggcagatcccctgaggtcaggagttcgagaccagcctggccaacatgatgaaaccctgtctctactaaaaatacaaaacttagccacgcatggtggtggcgcctgtaatcccagctactcgggaggctgaggcaggagaatcacttgaacccgggaggtggaagttgcagtgagcagagatcgtgccattgcacttcagcctgggcaacaagagctaaactccatctcgaaaaaaaaaaaatagatgcacaaattcaggattgtctaattcaaaataatacggctaacaattactgccttgtcttttccctctccttccactctctttcccctgtcacttagccctcattggtgataaaattccactcaatgcttggaatctggatgagccaacagggttcttgtcagaactgaataatcagagctggggagagaggcttggactgggggaggcatgcagatgccctctttaattaaaccaggctagaccaggtcaagggggcctgcccaggaaaatgagcagggaagcaaaaattaccaggcaaagccataagggagaagagtgcagaattgaagaaaggaagccaagctggggtggagacgtggacaaggaggatggtggttctcaggcccacataagaccagaaaaacagggccaaatagggaaagccagaawtgagcagaccatggtcataggcaaaagatggcattttgcccaaaggggccgtgtgctttgaccaggacttcctgccttggatgtgcttttgcacttttttttttctttctttgagacaagttcttgctctgtcacccaggctggagtgca

SEQ ID NO: 10044 - DNA, 567 bp, Homo sapiens
cacatcacctatgcctgccacatggtaagcgctcaatagctgttgcctgattttgttgctgactttcaggtgctgttgccagggtgagggtacattactatttctgccccaagaaccaggcttcccaggatgtgcagttgggaatattgatggagggggaataatgggtgaggtgatcagggcagctcaggctgggccctgcttagactgtaagtgtgaatggggaaaaggttctgaatccttgggtatggccaggaaacagatgaggagagcatctggtgcccagatgcctggcagctgtccttgtttgtggcaaatctggtaaaggctcatccagggacactgcagggctgggggagctctgcttgtttattagatattgggaaagctaactgaccatcagacaggggggttttgggcmgagctacctcccccatcagactaggatctcatctgaggcagggctcagatttccatttcaagggaaatctctatcaaggtggaggctcctgggcagcatgaattgtttctgtcccctcaaacaaggggagccctccttacccagtt

SEQ ID NO: 10045 - DNA, 556 bp, Homo sapiens
attaaatattgttaagtacctactgtatgtgagatatgattaagtaccaaggaatcaaaagagcttgttaccattaggggtggctagaacttaatcccatggtggagagagagagagagagagaaggaagaagaggaagaagaagaagagaagaagaagaggaggaggaggaggaagaagaagaagaagaggaggaggaggagaacaagaatgagaacaagaacaagaacaagaagaacaagaacgagaacaagaacaagaacaggaacaacaagaagaggagaaagttagaattgcctgtctctgggcagaggaagagtacagtttttgctcttgatgcagcctgttgtaccccatgatattactgcaggtatggagaaagatcttccactttttctttgtcacctgagacatgtggttcctgaatgtacttgtgatctkcaatgactcataagaaaaatgaagggtgcatatatcagtttacccactgagccaaaggtctgtgagactgtctcattttcttcctttcagagcttggaggaaaagatcagattta

SEQ ID NO: 10046 - DNA, 460 bp, Homo sapiens
gagagagagagagagagarggttgggagaagcaggcaagtgtgggactcctagctgggtggaaacgtgcagagggggctggggaaggcgagggcaccactagtccggaggagcaagggagacactgctggggataccaggaggggagtctttggggtgtcaccagaacagtccagttccttggcagatttttcaccagcagtgagctgggcacagaggttggggtttggccctctaaacacctgggtgtagaggtccagcctctggttacttggtcttcacagcgccccccaccttctgagctactcaagagatgggggacagtagcagtactgccaagaacagttgtgcaagttgcgcactgcacaagcatgccagacagaggctagagcagaagctaacatcatctgttcccctcaccacacattgcatctgcccagaggaagaggtaccttttattt

SEQ ID NO: 10047 - DNA, 460 bp, Homo sapiens
gagagagagagagagagaargttgggagaagcaggcaagtgtgggactcctagctgggtggaaacgtgcagagggggctggggaaggcgagggcaccactagtccggaggagcaagggagacactgctggggataccaggaggggagtctttggggtgtcaccagaacagtccagttccttggcagatttttcaccagcagtgagctgggcacagaggttggggtttggccctctaaacacctgggtgtagaggtccagcctctggttacttggtcttcacagcgccccccaccttctgagctactcaagagatgggggacagtagcagtactgccaagaacagttgtgcaagttgcgcactgcacaagcatgccagacagaggctagagcagaagctaacatcatctgttcccctcaccacacattgcatctgcccagaggaagaggtaccttttattt

SEQ ID NO: 10048 - DNA, 460 bp, Homo sapiens
gagagagagagagagagaaggttgggagaagcaggcaagtgtgggactcctrgctgggtggaaacgtgcagagggggctggggaaggcgagggcaccactagtccggaggagcaagggagacactgctggggataccaggaggggagtctttggggtgtcaccagaacagtccagttccttggcagatttttcaccagcagtgagctgggcacagaggttggggtttggccctctaaacacctgggtgtagaggtccagcctctggttacttggtcttcacagcgccccccaccttctgagctactcaagagatgggggacagtagcagtactgccaagaacagttgtgcaagttgcgcactgcacaagcatgccagacagaggctagagcagaagctaacatcatctgttcccctcaccacacattgcatctgcccagaggaagaggtaccttttattt

SEQ ID NO: 10049 - DNA, 460 bp, Homo sapiens
gagagagagagagagagaaggttgggagaagcaggcaagtgtgggactcctagctgggtggaaacgtgcagagggggctggggaaggcgagggcaccactagtccggaggagcaagggagacactgctggggataccaggaggggagtctttggggtgtcaccagaacagtccagttccttggcagatttttcaccagcartgagctgggcacagaggttggggtttggccctctaaacacctgggtgtagaggtccagcctctggttacttggtcttcacagcgccccccaccttctgagctactcaagagatgggggacagtagcagtactgccaagaacagttgtgcaagttgcgcactgcacaagcatgccagacagaggctagagcagaagctaacatcatctgttcccctcaccacacattgcatctgcccagaggaagaggtaccttttattt

SEQ ID NO: 10050 - DNA, 3708 bp, Homo sapiens
agaatggtgcccaacacatagtaggtgctcaatacatggaatagatgcagacaaggaagctcagaggaggaactttgtctccatccagggcagtactggcaggaaaccactctaagcgatgcctccccatgaccccatcatgctgtctttcctaacattctcagacatctataggttggtgcaaaagtaattgtggtttctgtcactaaaagtaatgacaaaactgcaattacttttgcaccaacctaatatatttcattattttaaatgatagcgtctagaagcagggcctgctttcctaatgagtagagcaggtgaggtataagggaagggaaagggtggcttcaaccacacaaaggatcctgactgagacccacctctgaaagcaggtgtgctttggaaatatgtttagtttttataaatagcccagaagcaagtttgcccagcatagcagaggaggcagctcgaccgctgctcaggagcgtgtggggcatgatgccgaggtctcctatgcctgcttcttcactgtaaagtgggaggatagcagcatgtaccacggagaacgtcctcagcattaaatgaggtgatgcctgaaagcatctaagtgcagtgcctggtaccgagcaggtcttttgcaaatgccagtgactgggagacgactatgtctgtcagtgctggtccctggctattccaagggccttagagacatcacgaggataaagacggctaagggacaggtagaaatgttgcttattttacattttaaaaaactatgggccaggcacggtggcttatgcctgtaatctcagcactttgggagaccaaggtgggtggatcacttgaggtcaggagttcaagaccatcctggccaacatggtaaaacccagtctctactaaaaatacaaaaattagccaggcatggtggcacatgtttgtaatcctagctacttgtgaggctgagacaggagaactgcttgaacccaggggacagaagctgcagtgaaccaagatggcgccactgcactcccgcctgggcaacagagcaagactcgtctcaaaacaaacaaacaaaaaccactgtggtcttcatttcttcaatgcttttgaaaataataccaagaacgtgagctaaagttagaatagtgagaattgaggagagagacccacagaaaacctaactcatatcacataaaaagtggaatgcattgccagagggtggcctctcttgacaagagccagccatgcttggaggtctcagaataaacaaggagaccccagaagaccctggattggagttaaagggaaaaaatcaacgctgagaccccctgcttagagaggtcactatgaaaccatgtcactaagggccagcccctcctgcccccctgaaaggccagaattttttttaaaggatggcctttgagcttttgattcttaaagagctcagaaatgtgcataacggcaagagtttaagaaaccgtgtagtgcagcttgttaaatcattggaaataaaagctaagcaagagttgcagaattagattacccaatatgaaagaaacatactttcatctcaagttcctctaaatagatgttattttctcttgctgtaaaggtaggctattttccttattattctttactgaagaaaaacaaggaagtgggagggtgggagatgaaaacccacgttggttaggtgccccgacattgcagagcaattctcatcaacattaatattgcagtagcccaggaaaaagaactgggaggttttcattgtacaggaacaaaacctagagatgaaaatgcagtcgcaagcgtaaaaaaagttattaagaaatctgttcaagcctcacgcttctccaatgattcaagataaccacatgagcagcttcaaatattatgcgttgacatcattcaaacagatagctcccagaggttggatatgacatcagggaattaccattcatcatacatttatgacaaatctaatgggctgaactgatttgtgactggttagagctcatgtgggtctctccaactatggccaccttgccacttaatgatcctccttgcttaagaagaacccccgtggaacccataacgtctcattggaataaggaacgggaaactcctcacaacccaaggtcaagtgcatgaggtgtggatcttcttaacgtccagagtcctgtcatttaaagagcaaatacggaacctcctcttgctggaggttaactccagcaaacagacagacagacccaggtttaagagtctactgtgttactttctggatgtgggaccatgggcaaggcatctcccctccgtgtgccctgtctcattttcaatctcaagattataatggcctctacctcttagcgcagttatgaagattaagtgaaatcatgcatataaagtattgagcacaattcttggcacagagcaggcatttaataaatgttaagctagagctgctgttacgcccagtaccagtaagataatgaagtaatagtatccactggggaaggtttgtaagaacctaacactccaaagacagtaatggtgccactctgggctcctccttccctgttgcccatatggcacatgcagtgagaacccacatcccctccagccaactcggctgtcacctgcagcttggagagacagttccctcccacatcagtgggtcccttattcaagcacctgcgtctctctacctaggagtaatcctccagccatgggaacctgctcagcctgtgttctgggcaggtcaggagttgcagagcgagcaaccgcatcactgatttctaatactgcacacataagatacccacttgtgtgcagaaactatcttcctttaggcttgtaatgcccttcacatgaaagattaaagagggaaataattatattctgtataaaaaccagatcaaatttatacacaaaatcatttgtctaaaaatttaagttgttttcaaataaaaattaaaatgcatttctgacatgcaaaataaattttaaaaattgagaaaaccacctatgtcataccatctttgtttttattaagtcaatagaaactgtgctactttattaaaatactgagttttatttcacatgtatatttttgtctccccatcatttccatgtctgaccactgctattactatgtcctgtcataacattccattcatacttaagaccaagcaaagggtgaagctccatctttaaaaactaaacaggcattttggacaacacattcttggcaatgaaacctggacaacatttatcaaacacgatagggaaatttatcactctgcattacaaaaaggacagccagatatcacctgttacaggaatgaaataagatggaaaatttttaacaaattgtttaaatgattttcttaaagagacttcctccactgccagagatcgggaatagcctcctggtcagtcatccagaagcaattcttcacataattgatgaactttgcttcctctctgggaaaagaatcacctttttctatatttgcttgcatttctgctctaacatcttctacagaactaggtcctttcggtgttttagcagttttttcctgtttcttgaaggattcttgcccttttgatcttggtgttgatgrtggttctgagtcttttcattttgatttgacttgtgtgcatttttggctggagtatctcatatatatttcttcactggtacttttc

SEQ ID NO: 10051 - DNA, 717 bp, Homo sapiens
atcacaatattttatgtgaaatagtttaaaaaatgctacattttcaaacaatattctagaaatcataaatacagttttaatatttaaaaattattgctcactttgccaccccaggtactactcaaaatgttaaagatcattcacagagtcggttcttctggattcttctgtaggagcttcagcagttcagttagttactagaataggaagcacccggggttgaaacccacaattctgtaatagcaggggctcttacatcatgaacacctaaggacaacaaaatggtctcattaatagtagtcaaaattagaagaataagaaagacaggcccatttcttgggacaaatagtataatatcggcagatgaatgagtgaaaacgaaaaacattccattttgctttttagttttctttcaagaagaatggactttagacgaagagtggcagaacaaacatcagtgagaggatatagaagcrtttgatgtgtgagattgtagagagaaagtgatgcttctctgaactgcatgactcccacaaattaaagtggtgaacacccaaggaaacttctcttgcatctcgaagccacctctaattgcttttagaagtgaattgaggctgagagtggtggctgacacctgtaatcccagtaatttgggaggccgaggcggggggatcacttgtagccaggagttcaagaccagcctggacagcatggcga

SEQ ID NO: 10052 - DNA, 717 bp, Homo sapiens
atcacaatattttatgtgaaatagtttaaaaaatgctacattttcaaacaatattctagaaatcataaatacagttttaatatttaaaaattattgctcactttgccaccccaggtactactcaaaatgttaaagatcattcacagagtcggttcttctggattcttctgtaggagcttcagcagttcagttagttactagaataggaagcacccggggttgaaacccacaattctgtaatagcaggggctcttacatcatgaacacctaaggacaacaaaatggtctcattaatagtagtcaaaattagaagaataagaaagacaggcccatttcttgggacaaatagtataatatcggcagatgaatgagtgaaaacgaaaaacattccattttgctttttagttttctttcaagaagaatggactttagacgaagagtggcagaacaaacatcagtgagaggatatagaagcgtttgatgtgtgagattgtagagagaaagkgatgcttctctgaactgcatgactcccacaaattaaagtggtgaacacccaaggaaacttctcttgcatctcgaagccacctctaattgcttttagaagtgaattgaggctgagagtggtggctgacacctgtaatcccagtaatttgggaggccgaggcggggggatcacttgtagccaggagttcaagaccagcctggacagcatggcga

SEQ ID NO: 10053 - DNA, 717 bp, Homo sapiens
atcacaatattttatgtgaaatagtttaaaaaatgctacattttcaaacaatattctagaaatcataaatacagttttaatatttaaaaattattgctcactttgccaccccaggtactactcaaaatgttaaagatcattcacagagtcggttcttctggattcttctgtaggagcttcagcagttcagttagttactagaataggaagcacccggggttgaaacccacaattctgtaatagcaggggctcttacatcatgaacacctaaggacaacaaaatggtctcattaatagtagtcaaaattagaagaataagaaagacaggcccatttcttgggacaaatagtataatatcggcagatgaatgagtgaaaacgaaaaacattccattttgctttttagttttctttcaagaagaatggactttagacgaagagtggcagaacaaacatcagtgagaggatatagaagcgtttgatgtgtgagattgtagagagaaagtgatgcttctctgaactgcatgactcccacaaattaaagtggtgracacccaaggaaacttctcttgcatctcgaagccacctctaattgcttttagaagtgaattgaggctgagagtggtggctgacacctgtaatcccagtaatttgggaggccgaggcggggggatcacttgtagccaggagttcaagaccagcctggacagcatggcga

SEQ ID NO: 10054 - DNA, 717 bp, Homo sapiens
atcacaatattttatgtgaaatagtttaaaaaatgctacattttcaaacaatattctagaaatcataaatacagttttaatatttaaaaattattgctcactttgccaccccaggtactactcaaaatgttaaagatcattcacagagtcggttcttctggattcttctgtaggagcttcagcagttcagttagttactagaataggaagcacccggggttgaaacccacaattctgtaatagcaggggctcttacatcatgaacacctaaggacaacaaaatggtctcattaatagtagtcaaaattagaagaataagaaagacaggcccatttcttgggacaaatagtataatatcggcagatgaatgagtgaaaacgaaaaacattccattttgctttttagttttctttcaagaagaatggactttagacgaagagtggcagaacaaacatcagtgagaggatatagaagcgtttgatgtgtgagattgtagagagaaagtgatgcttctctgaactgcatgactcccacaaattaaagtggtgaacacccaaggaaacttctcttgcatctcgaagccacctctaaktgcttttagaagtgaattgaggctgagagtggtggctgacacctgtaatcccagtaatttgggaggccgaggcggggggatcacttgtagccaggagttcaagaccagcctggacagcatggcga

SEQ ID NO: 10055 - DNA, 571 bp, Homo sapiens
taaataaaagatattttggagttagaaaagcttgggctggtattttaagcatagctccctctccctctacccccagcatccacacaattatacattcctgcagcttccctaccaccaacactcagacccaggtaacgaacacttctctctgctggacaactgctgttcattcttttttcatccactcacatctacttttttccyttctccagtgcattcatctagagatatctgaagtacaaatctcatcacatcaccacactctccacagctaaaccccttctctggcgttcactgctattagggaagtatccaagtttctggaccttggagaggggccgccattacttacttttccagcttcattttttttctttttctgttgtcttttctttctcctttcctccttccttttttcccatctcccctcctcctctctttatctttatttctttacctctgtactccattcacatggctttattcaatcttggtacacacttaattcctgcacagagattttttcgtgctattttctttaccttaaatactctcctcttccttctgtctt

SEQ ID NO: 10056 - DNA, 571 bp, Homo sapiens
taaataaaagatattttggagttagaaaagcttgggctggtattttaagcatagctccctctccctctacccccagcatccacacaattatacattcctgcagcttccctaccaccaacactcagacccaggtaacgaacacttctctctgctggacaactgctgttcattcttttttcatccactcacatctacttttttcccttctccagtgcattcatctagagatatctgaagtacaaatctcatcacatcaccacactctccacagctaaaccccttctctggcgttcactgctattagggaagtatccaagtttctggaccttggagaggggccgccattacttacttttccagcttcatwttttttctttttctgttgtcttttctttctcctttcctccttccttttttcccatctcccctcctcctctctttatctttatttctttacctctgtactccattcacatggctttattcaatcttggtacacacttaattcctgcacagagattttttcgtgctattttctttaccttaaatactctcctcttccttctgtctt

SEQ ID NO: 10057 - DNA, 575 bp, Homo sapiens
tagtaatttggatattttcttttgtgacgtgcgtgttaatgtttttgcccatttgtcatttgtagtgtccaggacttttaatatctttatttgtcaaaccttttaatatatccaggatatgagtcctttgtcagttaataagcattgcaaatacttcttctttttggtttccattaaaatgatgttctttttcatttggaatagggtaatacttgatttttaaaaattcaatcttccctggtgtttacctatttaattatttgcttgaaaaacaacttttagctttttgagttgtgtcatgcactttttatcaatttaattaataagattggtcatacgtactattttttcctactttctttatgcaatcatgcatgacataacatttcagtcaacatatgacagaccacatataccacagtagtcccagattataatgaagccgaaaaattcctgttcctagtgacatcatcattgtcctaacaccatagcacaatgcagttctcacgagtttttggtgatgctggtgtgaacaaacctattgcactaccrcttgtttaaaagtatagcgatac

SEQ ID NO: 10058 - DNA, 544 bp, Homo sapiens
gggactacaggcatgcaccaccacgcccaagtaatttttgtatttttagtagagacggggtttcaccatgttgaccaggctggtattgaactcctgagctcaggtgatccccacacctcagcctcccaaagtgccaggattagaggtgtaagccactgcacctggtcagtttttcttgattatcatgttccaaggcaaggagtgggggaagaaagcaagggaaaacttcttgtgyttggtgtgggaaggtttaggatagtatccagaaataaaataaaataaaataatctcaccacgcctgtaaattcctggacagcaaggctgatcagttatttgcacatccagcagctgcagcatgtcagtggcgactgccagggggagggatccagactgagacagagtccccgacacctgggtcactccatttgaggagggtgacacattcggtgacagagtggaaaagagtggagctcaatcctcagtctcgtagcgtttccttgcccccatacgtgtatctcaccagctcctgcctgactgacctcga

SEQ ID NO: 10059 - DNA, 577 bp, Homo sapiens
ggacatccgcaaacacgcaccccgcccctgccggcctagaggaaagacaaccaaaccaagggccaaaaacaaacgaagccattcaaccctgcaaagaatcaaagaaatgcaaattaaaacacgacagcctatcacactggcaaagggaaaaaagaataaaaatacatagcgctggcagggatctgaggggacagacgcagcgctaagggtggggctgtcaaatggcgtcgcttctgggggcaactttccaatgagcatcagaagtcacaaagatgtttgcctcccagaccctgcagctccctctccatgctctgtccttcagggtccggcgtggcacagcgacgagggccgcgtctgctggcgggacgggacgccacttgctccacctacatattcggcgtttctgttctttactatcatcgagtgttgcttttgtgacttgtactttttcaaatgccattattaaaaagtctaggtttttgtcctctggagagatgtatataatgcataattaaatgactgaggtcgtcgtgcagcacgcggagccgtatgygcttttaaacagccacagcgtgca

SEQ ID NO: 10060 - DNA, 631 bp, Homo sapiens
tatctcacagatatctcaggatcctttgaaactataggctccttgacttattagggtgcggaactgcacaactataacttttattccttgccaagtgttggtttaatttatttgaagttgtcatagtttccgattcctccttgtccttcctgtgaaacctaaacaacacccaacagtctctagggaaagaagcaaagagacactcaatgttttgttcactcaatgtgtcatctctaacacatacaaaattgtgttcgcacccctggtggcttgtggccaaygagagtttgtggtaaaagcatcttcactgaggaccagagctccttgggaacttgagcttggacagagcacatccttcctcgggagaggtcgagtcatccagcctctgaaactgctcttctgctcctcttcttggcttgtggatggccatcttttcctgggtcctcccatgtcatcctactgtgtttatcagtgtcccaatctccccttcttagaaagccatcagtcacattggattaaggcccatcctaatgcctcattttaacaaatgaattcttgaaaggccacatctctgaatacaattacatcccgacgacttcaggataggaaatactgggaagcacaattcatg

SEQ ID NO: 10061 - DNA, 590 bp, Homo sapiens
gctgtgtgtatttatcattttaaacctcatctctgaatctttctttttttttcttttttttttttttttttgagacagagtctctgtcrccaggctggagtgcagtggtacgatctctcctcccaggttcaagcaattctcctgcctcagcctcctgagtaactgggattacaggcacgtgccaccacgcctggctaatttttgtatttttagtagagacggggtttcaccatgttggccaggatggtctcgatctcttgacctcatgatccacccacctcggcctcccacagtgctgggattacaggcttgagccaccacgcccagcttgaatctttctatatagagatgttatcaagcacaatgaaggggtcaaataatgtgaacactctgggccctttgttgcatattactcagtagctttctggatgagctgcaccaatttatattaattgatattcttatgcatggaatgtgaagtgctcgtctcactgtatctcaccaccattaaatccataccttataaccagtttgcctacatggcacttgattccgcattttacccatttcacttccttgatgactagtga

SEQ ID NO: 10062 - DNA, 556 bp, Homo sapiens
tcaagtccaaggggtcctctacaagccttggaccctgaaacagacaagcataagcactatagctccaatagaagccacagttgcagttcatgggagcagtaagatggctccaccctacttcaccagacaaggctcagtaccagcttccagcctggtggtcctgctttgcctgaacttggccagcagctgcagcctcctgttgtcctaggaggtacccagacgacagrgccagcaatcccccagactccacccctgccactggtagccaggaaggcaatgcatgctagagcttccagcccagccatcctgcttttatgtgaactcagtcagtcaggtgcagccttctgttgtccccagaagcaaccagacaccagggatggtgagtgattcatccaccactgccactgttaatcaggtagtcaatgcatgctagagctaatagcccagcagtcccacttctgtgtggactgtgttgatgggtacagcatcctttcatcctgggaaacacctggatggcagggcaggcgaccccacccatccctgccactggtagcca

SEQ ID NO: 10063 - DNA, 580 bp, Homo sapiens
atccatttggcttctcacaagtccagcttgagcttctttacagtatgacaatctcaaggtagtcagaattcttacatggtggcaggcttcccccaaaacaaatattctcagagaccaaagcatactgtaagacttcttatgacctgacttcataaatcccagaatgttacttccaatattaagaccagtcaaagttcaaggaaagaaaaattagactctgctactcagtgagacagtagcaaagaacttgtggaatatgcccataatactaaaaggtttaaaataaaaggctgggaagaggacatctcctgcaaacacaaatraaaagaagagaaatgaatcagtataattaatataaaaatatttcaaagcaaaaacaaaaatcagaaagcagaattctgaagaaaagtaaattagacaggaagcaaaaataatatcaagaatggaaagggaaatatcactatagattctgtagaaagtatgagcatataactgaaaatttagattaaacaggaaaatacctgaaaaaatattatctacgtaactgactcgagtaaattaaactctgaatggtccttat

SEQ ID NO: 10064 - DNA, 568 bp, Homo sapiens
atgctgaatccaccacctgagctgggtgaccttgaccaggtgactttgcctctctgtgcctcaatttctccatctgtaaaaggggataacttggtatgcaacaagttctttaaaaaacaggggagggccggacgtggtggctcacacctgtaatcccagcactttgggaggccaaggcgggcggatcacgaggtcaggagatcgagaccatcctggctaacatggtgaaaccccatctctactaaaaatacaaaaaattggccgggcgtggtggcaggtgcctgtagccccagctactcaggaggctgaggaaggagaatggygtgaacccgggaggcggagcttgcagtgagccgagatggcgccactgcactccagcctgggcgacaaagcgagatcccgtctcagaaaaaaaaaataaataaaattaaaaaactgaaaaaaataaaagatctttggactcaaacagacctgggtttgtggtgtggattcacaatttatctgcagtgtagtcttggacaagtttcataacctcgtctcaaaaaaaaaaaaagaaaaaacaacaaca

SEQ ID NO: 10065 - DNA, 568 bp, Homo sapiens
atgctgaatccaccacctgagctgggtgaccttgaccaggtgactttgcctctctgtgcctcaatttctccatctgtaaaaggggataacttggtatgcaacaagttctttaaaaaacaggggagggccggacgtggtggctcacacctgtaatcccagcactttgggaggccaaggcgggcggatcacgaggtcaggagatcgagaccatcctggctaacatggtgaaaccccatctctactaaaaatacaaaaaattggccgggcgtggtggcaggtgcctgtagccccagctactcaggaggctgaggaaggagaatggcgtgaacccgggaggcggagcttgcagtragccgagatggcgccactgcactccagcctgggcgacaaagcgagatcccgtctcagaaaaaaaaaataaataaaattaaaaaactgaaaaaaataaaagatctttggactcaaacagacctgggtttgtggtgtggattcacaatttatctgcagtgtagtcttggacaagtttcataacctcgtctcaaaaaaaaaaaaagaaaaaacaacaaca

SEQ ID NO: 10066 - DNA, 542 bp, Homo sapiens
atgagatggagcccaagctcctccttggacctgggcttccaatgggtccagggccctcactccagctccacagaccccctccaccaagccataggggaggcgtggcttggaagcacacattggcacagagaccccagaagcccgtgtgcacacgtttccttaggtccacccctaagggcaacgagtccgggccccaacagccccataaaggccctcactctgctcacagctcatgcccaacacawggagtgcggccgggcgcgggactccctaggcctggggcacatgcaggtgcacacccaactcacacacattctccatgagcccacgctccggccacacaggcacacatgcccgcaccccatgcacatacaaatatgcacgtgctcacacacgggaacccttgacatccacgtgcatgtgcagacaagcttgggaacaaggggaccacgtccccctccagggatcccttcagggtgctgcagcctcactttagtgaggcaaacattgactgtttgccttgccatagccctgacaacggc

SEQ ID NO: 10067 - DNA, 553 bp, Homo sapiens
ccaagaagatgtgggaggcgggcaccagcctctggggaggggaggtgccaggccacaggcagctgcagcctggggacaggtgaccccagcaccctccggggcagtcctatgactgtttcttgcttcctgccctctgacttttagaggtgggtagccctggggtcctcccaggtctggacatcatcatcccagctagaggcatggagccccccaatcacagaggaagagacagtggtataagaggctccttatgtcgggtgtggtggctcacgcctgcaatcccagcactttgggaggctgaggcaggacaatcacttgaggtcaggagtttgagaccaacatggccaacatggtgaaagctcatctctactaaaattaaaaaaaataataataattagccgggcctggtggtgcatgcctgtaatcccagctactcaggaggctgagacacgagaatcacttgmgcccgggagatgaaggttgcagtgagctgagattgcaccactgcactgcagcctgggacacagagtgacactctctcaaaacaaaacaa

SEQ ID NO: 10068 - DNA, 553 bp, Homo sapiens
ccaagaagatgtgggaggcgggcaccagcctctggggaggggaggtgccaggccacaggcagctgcagcctggggacaggtgaccccagcaccctccggggcagtcctatgactgtttcttgcttcctgccctctgacttttagaggtgggtagccctggggtcctcccaggtctggacatcatcatcccagctagaggcatggagccccccaatcacagaggaagagacagtggtataagaggctccttatgtcgggtgtggtggctcacgcctgcaatcccagcactttgggaggctgaggcaggacaatcacttgaggtcaggagtttgagaccaacatggccaacatggtgaaagctcatctctactaaaattaaaaaaaataataataattagccgggcctggtggtgcatgcctgtaatcccagctactcaggaggctgagacacgagaatcacttgagcccgggagrtgaaggttgcagtgagctgagattgcaccactgcactgcagcctgggacacagagtgacactctctcaaaacaaaacaa

SEQ ID NO: 10069 - DNA, 2038 bp, Homo sapiens
ctggagcaggagaggcttcggyaacaggatgagaggctgtggcagcaggagactctgcgggagctggagaggctgcgggagctggagaggatgctggagctggggtgggaagccctgtacgagcagcgggccgagccacgcagcggcttcgaggagctggtacgttgccccacctggggaggctgccctcttccctagccctcaaggcctttgtttccccacctgtaaaatggggcattgtagccttcacatgaaatggtacttctaaaggcatctgtgagccagagccccgctctgatggctgtgggagagaggggatatttttctaacctgcctccacccttcccggtgccatgggaggcagacactaagttctggggtctccagttttagtgggtggccactgattgcttctctctgtccagaacaacgagaacaagagcacactgcagttggagcagcaagtaaaggagctggagaagtcgggtgagctgaaagagactgtaacctccgacccatccaagaagatgtgggaggcgggcaccagcctctggggaggggaggtgccaggccacaggcagctgcagcctggggacaggtgaccccagcaccctccggggcagtcctatgactgtttcttgcttcctgccctctgacttttagaggtgggtagccctggggccctcccaggtctggacatcatcatcatcccagctagaggcatggagccccccaatcacagaggaagagacagtggtataagaggctccttatgtcgggtgtggtggctcacgcctgcaatcccagcactttgggaggctgaggcaggacaatcacttgaggtcaggagtttgagaccaacatggccaacatggtgaaagctcatctctactaaaattaaaaataataataataattagccgggcctggtggtgcatgcctgtaatcccagctactcaggaggctgagacacgagaatcacttgagcccgggagatgaaggttgcagtgagctgagattgcaccactgcactgcagcctgggacacagagtgacactctctcaaaacaaaacaaaacagaaaaacaaaaaagactccttagattcaaactggattccggcctcggttccactggtcataattcaactactttgcatctctaagtctctgtttctttaacttcaaaaggaagttagccttttccttgcagaggtgctgaggattaaatgagataatacgtggaaacattaggcatgtagcacacttagcagatggtggttggctccgcctgcttttccaccagtctgtggcctacagtttacatgctgggaaaaaggacgtgagatttgatgctagggaaggaggcatggggttctaggcaagggagacagtctcttaggcctggagcaaggggccaggggcctgggcaggccacagagccccacagtgccctcgctaccctattaatgggccaggaatctggaagccagccaccacatgtcctcatgcccagggtcttccggcaggtggagctgaagagccaagaggctccgagtctgcagcagcagccagaccagtacctggagccccagtcccacaaggagcttggatgtgcggacaagcagggtggtgagtagagccctcaggcggggtgggcaggcaggagcaggggaggctcgcactgtgcccagattcccaccccctccctctctctgaagatcttagtgagctgagcctcactgatagcatggaggctgcaccgggagaggacagggagggttctcccccatgacaaccccactgcacagcagatccagcagctgcttcctctaatgcaggactccccaggagcacccaggcttgagtggagaagctgttggtacaggagaggcggcaggaggagcagaagaggctgcatgccattcttttcgggctgcggagaacagggagctaaacatcaccatcatctaagagcgggtcaagaaattgaaaaaaaaaaaaacaaaacatttaaggggttaatatcctacacaattca

SEQ ID NO: 10070 - DNA, 2038 bp, Homo sapiens
ctggagcaggagaggcttcggcaacaggatgagaggctgtggcagcaggagactctgcgggagctggagaggctgcgggagctggagaggatgctggagctggggtgggaagccctgtacgagcagcgggccgagccacgcagcggcttcgaggagctggtrcgttgccccacctggggaggctgccctcttccctagccctcaaggcctttgtttccccacctgtaaaatggggcattgtagccttcacatgaaatggtacttctaaaggcatctgtgagccagagccccgctctgatggctgtgggagagaggggatatttttctaacctgcctccacccttcccggtgccatgggaggcagacactaagttctggggtctccagttttagtgggtggccactgattgcttctctctgtccagaacaacgagaacaagagcacactgcagttggagcagcaagtaaaggagctggagaagtcgggtgagctgaaagagactgtaacctccgacccatccaagaagatgtgggaggcgggcaccagcctctggggaggggaggtgccaggccacaggcagctgcagcctggggacaggtgaccccagcaccctccggggcagtcctatgactgtttcttgcttcctgccctctgacttttagaggtgggtagccctggggccctcccaggtctggacatcatcatcatcccagctagaggcatggagccccccaatcacagaggaagagacagtggtataagaggctccttatgtcgggtgtggtggctcacgcctgcaatcccagcactttgggaggctgaggcaggacaatcacttgaggtcaggagtttgagaccaacatggccaacatggtgaaagctcatctctactaaaattaaaaataataataataattagccgggcctggtggtgcatgcctgtaatcccagctactcaggaggctgagacacgagaatcacttgagcccgggagatgaaggttgcagtgagctgagattgcaccactgcactgcagcctgggacacagagtgacactctctcaaaacaaaacaaaacagaaaaacaaaaaagactccttagattcaaactggattccggcctcggttccactggtcataattcaactactttgcatctctaagtctctgtttctttaacttcaaaaggaagttagccttttccttgcagaggtgctgaggattaaatgagataatacgtggaaacattaggcatgtagcacacttagcagatggtggttggctccgcctgcttttccaccagtctgtggcctacagtttacatgctgggaaaaaggacgtgagatttgatgctagggaaggaggcatggggttctaggcaagggagacagtctcttaggcctggagcaaggggccaggggcctgggcaggccacagagccccacagtgccctcgctaccctattaatgggccaggaatctggaagccagccaccacatgtcctcatgcccagggtcttccggcaggtggagctgaagagccaagaggctccgagtctgcagcagcagccagaccagtacctggagccccagtcccacaaggagcttggatgtgcggacaagcagggtggtgagtagagccctcaggcggggtgggcaggcaggagcaggggaggctcgcactgtgcccagattcccaccccctccctctctctgaagatcttagtgagctgagcctcactgatagcatggaggctgcaccgggagaggacagggagggttctcccccatgacaaccccactgcacagcagatccagcagctgcttcctctaatgcaggactccccaggagcacccaggcttgagtggagaagctgttggtacaggagaggcggcaggaggagcagaagaggctgcatgccattcttttcgggctgcggagaacagggagctaaacatcaccatcatctaagagcgggtcaagaaattgaaaaaaaaaaaaacaaaacatttaaggggttaatatcctacacaattca

SEQ ID NO: 10071 - DNA, 556 bp, Homo sapiens
tcagtgggagtgccgtggcccttatgcccaatgacaccatcctgtcacttcaggagtttctcataaaacaccattccccagaccaatggcgctgygagcttctggggcgtgggctgggcccagcatgtcagtgcgacccacagcggggctggagctgctgaatgtgcacaacacacttcaccccgggcctggttcaggagcgggcaaggcagctgtacaccctgtccttcagcaaactcctcttgatcgatggaatcgaagtcaggagcatcaccttagacgcagaacagaaacgtgcccatttcccagcttggtgctttcccacttctactttgactccttcaacccaatcctctttcacccgcatcaccaccaagtgtgatctcctttaaagagccagacactttattttgggggggcatggaggggtggagtctcactctgttgcccaggctagagggcagtggcacaatctcagcttattgcaacctccacctcctgggttcaagcgatttctggctagattttgttttgttttgttttgagacggagtctc

SEQ ID NO: 10072 - DNA, 528 bp, Homo sapiens
gggatattttatgggatggtcaggacatctgcatgtgaaagatgacattctaaactttagtgaggaagaagaggaagagccagccatggacactcaggaggtgatagagggaaacgggtgaattccaaaatgaggaaatgttatcagttagtatcagtaaggtaagaggctttcctgaacaaccccaaatcttcatgatgtcaaataataaaggtaagtgtattgctcagagtataagcccaaggcaggtcagtggggagggaggggtgttctgttatgttacagaatgttctagaatctttttattaggctaccatctcaacacaatattcagggtttttgctgaaacagmggaagaatagtatctcatgcaggcaatcaaatgtttcagctgggaagacacaaatgcatcatttccacccacagtccattggctaaaatgactcacacagctcatcaaacagcagaggcccaggaaatgtaatccgctcgtgtgcagaaggagggaagaatcagacagaggtgaac

SEQ ID NO: 10073 - DNA, 528 bp, Homo sapiens
gggatattttatgggatggtcaggacatctgcatgtgaaagatgacattctaaactttagtgaggaagaagaggaagagccagccatggacactcaggaggtgatagagggaaacgggtgaattccaaaatgaggaaatgttatcagttagtatcagtaaggtaagaggctttcctgaacaaccccaaatcttcatgatgtcaaataataaaggtaagtgtattgctcagagtataagcccaaggcaggtcagtggggagggaggggtgttctgttatgttacagaatgttctagaatctttttattaggctaccatctcaacacaatattcagggtttttgctgaaacagaggaagaatagtatctcatrcaggcaatcaaatgtttcagctgggaagacacaaatgcatcatttccacccacagtccattggctaaaatgactcacacagctcatcaaacagcagaggcccaggaaatgtaatccgctcgtgtgcagaaggagggaagaatcagacagaggtgaac

SEQ ID NO: 10074 - DNA, 528 bp, Homo sapiens
gggatattttatgggatggtcaggacatctgcatgtgaaagatgacattctaaactttagtgaggaagaagaggaagagccagccatggacactcaggaggtgatagagggaaacgggtgaattccaaaatgaggaaatgttatcagttagtatcagtaaggtaagaggctttcctgaacaaccccaaatcttcatgatgtcaaataataaaggtaagtgtattgctcagagtataagcccaaggcaggtcagtggggagggaggggtgttctgttatgttacagaatgttctagaatctttttattaggctaccatctcaacacaatattcagggtttttgctgaaacagaggaagaatagtatctcatgcaggcaatcaaatgtttcagctgggaagacacaaatgcatcatttcmacccacagtccattggctaaaatgactcacacagctcatcaaacagcagaggcccaggaaatgtaatccgctcgtgtgcagaaggagggaagaatcagacagaggtgaac

SEQ ID NO: 10075 - DNA, 700 bp, Homo sapiens
ccagctgggagagtataaggctctctgggaagcccttcataccgctctgcttttgcccttgctgttcctttggcctgstgtttactccctaccttgttcattcagcaaacttgccctcccgggagccagccaagcgtcaccttcctggagctaccttcccccacccccttcagggatgtcagtctgtcctaacacccctgtggcacttaccatggtgtctcatgaagagtccatgtgcaaaatagatttttacagggcttttaattacagtgtttttaatattcaatttaatatttaaattgaaatcatcccactatgttttggcctgagatctcatagttggattctcataaattaaatacccatgtgatgcatgtccacaagataagactgatgacagctgggtagggatgggcagaggagggctcaggacaggcacaccgagtgtggggtgcaggggatgtttcacatcggccctggttggtcccactgatgaacttctgggtcataccacccgtcttcctgttgcagggtcagctcctggaactcttcttgttcattaacccagaatgtcctcagtgtggtgtctatgccattcaggaccctcccagactaggtctgtggagagagagcgagaggcagggagacaagggttggttggagccgtgggctcgtgtgggtgtccctagcacgagctccc

SEQ ID NO: 10076 - DNA, 539 bp, Homo sapiens
agtaacacaattccctagtgaaccaaacctatggtatagacagtccacacctgacataccttctgcacataccaacaggtagaatggtaaggaaaaaaaaaaaaaacaccaaacaggaaaggcatgaaaacaataacttagttatatatggattgacatataatctatactgaaaaaccatgaatttatgtttttcaacaaacagtaatctttaaatgctgaccaactgaagtataagtgaataaaatcagatgccagatggccctgaatttcttcaattaaaatggactctatccttaaaatacaactgagtttaagatagttgagggtaaaaggtcagagaagagaaaagagcaagtgttggtttttatgtgtgtgtgtatgcatggatgtttctttgtttgaagtggttatcccatttctcccaaaaacatattttctagtcttttctccttatacccaccagayatgcaacctgaaaaaaaaaaaatccatgtcagagattctgccaaatgtatgccatggtattgtctccattg

SEQ ID NO: 10077 - DNA, 1334 bp, Homo sapiens
gcttcctatggttggcttggttgttcctgtgggagaagctggatttggccattctrttccctctgtacagtcacgggccccctctgggtgatgatgggtgggggacacagttctaattgtggttatccagaaatgttcttcattgcttcttggccttttggctaagatcaagtgcagaaaagttctgcccctgcccctgtttcccagcctcttggctgtcttactgccctgaagatgtgttggattgaagatacatgataagcctgagttggttggttttgctccccacttgaggttcaggtaaaacaattcattcttttgacaaaggtttatcaaaagcctttgactaaataccaaaaaaatggataagatccagtgtctgtcctcaaagtgttgacagtcatgatgccagctgaggaggaaaaccaacatgaaaacagatcaaacagcctgacaagtactgtgatgtgcacagcacagcagggaaacacccaacaccccaaatatgcatccgtcacctcctatgtgccagctcagggcacgtttttttttttttttttttttgagatggagtctcactctgtcacccaggctggagtgcaatggtgtgatctcggcttactgcaacctccacctcctgggttcaagcaattctcctgcctcagcctccagagtagctgggattacaggtgtgcgccaccacgcccagctaattttttttctatttttagtagagacggggtttcaccatgttggtcaggctggtctcgaactcctcacctcgtgatctgcccgcctcagcctttcaaagtgctgggattacaggtgtgagccaccgtgcccggccctaaattttttgtattttcagtagagacacaggttcaccatttggtcaggctggtctccatctcctgacctcaggtgatccccccaccttggtctcccaaagtgctgggattacaggtgtgagccaccgcacctggccctcctttcattccattgttatctctgtgaagtaagtgtgaatctcccagttctgtaagtgatggttcaatgctgggaagcagtagaggcaggattagttggtgtgtttctgttgacaccaggtctagtgcactttccattggaatccaattctgacattttccaaatgcctctgtgtctcggggctattgatttattttatttattttttgagacaggcccctggctggactgcagtggtgcagtctggctcacagcagcctcaacctcctggacccagatgatcttcctgcctcagcctcatgagtagttaggaccacaggtgcatgacatcacacccagctgatttt

SEQ ID NO: 10078 - DNA, 634 bp, Homo sapiens
tccagacttttgcatgcatcttcttgatgtgcttccagttatagacctttgaccattctagaaaggtgggatcaaaagtatacattaaccacagttatgtatttcctctctcacctgagatcctattaaaatgaaagtaaaagacccataaaagttataaacacagattgataaagacaacaagaagagagacatcagcagacaagagatatcaataaattagccaggcgcggtggctcacacctgtaatccctgcactttgggaggccgaggcaggtggatcacctgaggtcrggagtttgagaacaccctggccaacatggtgaaacaccgtctctactaaaaatacaaaaagttagccagatgtagtggcggggcctgtaatcccagctactcggaaggctgaggcatgagaatcacttgaacttgggaggcattggttgcagtgagccaagatcgtgccattgcactccagggtgggcaacaagagtgaaattctgtctcagaaaaaaagagatatcagtaagtttctggaagctaggaagcaggtggatgggtgccaacaggtgaagtagtgtagaggaagccacactaagtgtagacatggaaatggacgcagttcaggaagtaatct

SEQ ID NO: 10079 - DNA, 634 bp, Homo sapiens
tccagacttttgcatgcatcttcttgatgtgcttccagttatagacctttgaccattctagaaaggtgggatcaaaagtatacattaaccacagttatgtatttcctctctcacctgagatcctattaaaatgaaagtaaaagacccataaaagttataaacacagattgataaagacaacaagaagagagacatcagcagacaagagatatcaataaattagccaggcgcggtggctcacacctgtaatccctgcactttgggaggccgaggcaggtggatcacctgaggtcaggagtttgagaacaccctggccaacatggtgaaacaccgtctctactaaaaatacaaaaagttagccagatgtagtggcggggcctgtaatcccagctactcggraggctgaggcatgagaatcacttgaacttgggaggcattggttgcagtgagccaagatcgtgccattgcactccagggtgggcaacaagagtgaaattctgtctcagaaaaaaagagatatcagtaagtttctggaagctaggaagcaggtggatgggtgccaacaggtgaagtagtgtagaggaagccacactaagtgtagacatggaaatggacgcagttcaggaagtaatct

SEQ ID NO: 10080 - DNA, 588 bp, Homo sapiens
tgggctgctttttcctgtgggctcattactggattgcccatatatttttttcatgctgatttctttagcaattttgaaatgttaacgtgactgatgtgtttttgtgggtaacctcaaatcctttccagaataaggtcaggttgaagggagggtggaaggcagaggctcggtacctgtttgcctcttctctactgaataagaaatgtcgtgctggtcacagctgtgagcraccacatcccaccagcccacttccccagccctaacccagagcctgtgtgtgaccaagaatctccatgccttttccagctgtcagcagctgggcggtgcagcctgaataccccagatgtggtgttccatggggcatgggtctgtcctgtggaccccactgctccgggaggccaactctgccctctgatgcccgcaggtggtgtatttcacggcgtcactgccctattgcgtgctcatcatctacctcatcaggggcctcacgctccacggagccaccaatggcctcatgtacatgttcactcccaaggtacgggctgaagcggaagggccctacgggcacccctcacttatcctgccacc

SEQ ID NO: 10081 - DNA, 520 bp, Homo sapiens
tattaaagaaatgacctaccatttttgwaaatcttctcaaattcatcttgttcttcaagcttttgtcccacatgcaaaactcctagtctctggaataaaaaaccacacccagatttatgtgtaatagattttagcagacatggtttaggaagaaaaagcagtccccaaattttatctcatggtgcctggttgctggatgcaggccagaaatgtctgttgtctatagggggccccagctcacagcagccctctcctgcccagggcagactgcaaagcctctcctgagggcacctttgccttgcagcccccgcactcccttgagggatagcagcaggactatactcagggagagggtcagaagagagagtgaaagctgctataggattccagccgctacttcctccctccctcttacccccagtcttctactgcctctaccccttgagaccccctcacatgcatcatccctcaacttcttcacccctgagtcaccccagccttaccctctgtcccagggacc

SEQ ID NO: 10082 - DNA, 520 bp, Homo sapiens
gcaacagagccagacactttctcaaggaaaaacaaaaaaaaaattaaaatatcaaatgctgggaagagttcaatgaaatggatttactgattcattattggtgtcagtgtaaactggtatgacgctcttggaaaataatatatttattctctttaacccagtaattccacttctaggaattaacatgaaggaaataattcaagttaataataacatatacagatatattctctacggtgttatttataaaccaaaaatgtagcaatctgaatggcttagtaaattacggcacaacaatacaaccaccagaaactgtgattacataaatgctaagggaaaatggcaaaagtgaaaactgtgcatacacagactgaccctagttatggaaaatgtgacatccatgggcaagacacaaaaataaaaagagctgggttagggtgtgggcaatgtgaatattttttgttactgggttttaaagatgtttaattttttgctgtgtygtttttcaattaaaaaaaaa

SEQ ID NO: 10083 - DNA, 654 bp, Homo sapiens
atgagacaataatattccaacatattcaaataaaaaaggttgccagagcaatggcagaatcatgaaaaaaaagaattaaatattactcaatattagattgttgctggagtagatagaaactgccccaaaatttccagtttcacaatgtgaaaagaaaaacttcagccaaattaaatttaaaagagtttgagcagcgaatgattcacaaattgggcagtccccagaatcacagcggattcagagagactccagtgcaccaacgtggtggaagaagatttatggacagcaaaagaaaagtgatgtacasaaaatggaagtgaggtacagaaacaactagattggttacaggttggcatttgccttatttgaacatggtctaaacactcagtagtgtatgagtggttgaagtatgtggtcgaagtatggctgctgggattgaccaagactcagctattattacaggcacatacgcctaagttaggttttcaaccttgtctacctatgaagttagattactgttcatccacaaggactcaaatatagaagtacagagtccctcttaggccattatttagttcactttaagaacagtcatttaatttatatgtataagaatatttcttgaacttctgccttgccaatggctctttgacc

SEQ ID NO: 10084 - DNA, 546 bp, Homo sapiens
acagagagactccatttcaaataaataaataaataaaaataaagactttgtctatgaatgaggcttaatgctgcagacaactggtcagactctcagagctatttttcctcattacagaagattggatggcacatagcatatgctcaaagatgttcgatattatgataagatgacaaaaggaacataagcctgatgaaaatcatgagtcctaaattaaaatcagtacatgtggtctggcaacaggatacgatatttgaaactgggactatcccagaaacccccagatgtacagttatggctcctatagactccctaatgtttaattgaagttaaccatttgtccacatgaaaagagaggaggaaagaaatgwactaaccctgagagtatttactatgtgtgaagctatatcctaagggcttttctcccttgatcttatttaatccaaactaagaacccttaagagtagttattagttattatcactagattcaggtgaagaaactaaagcttagcatagttcaagtaactttttaaaagtaattgtc

SEQ ID NO: 10085 - DNA, 585 bp, Homo sapiens
ttgaatgacttaygtgaggtcacagagatgatgggtggtagccttaggtggcactcatttataaaagtataggcagatggctggtgtcattttcttcaagtttgatcagaggtgaatcagcgagatagagacctgtgggtttaacacagagataacctgagaagattgcacatctgctctgatacaggaccactttgtgggtgtgtgtgtatgtgtgtgtgtctgtgtgacagtggtgctccttttacctgaaagatcaaagtttctgaattattaggctgaaaatgcatttatggtgcatttcttaaaggtctcattagtatttaaatggtacaggaaagtgcagataaattgcgcattatgaaaagagccagtgggactggcaggtaacattatttccctggctacccaaatccatccgtcttcttccatgtttgtctcagcagaaatccatagttaggaagatactcttttggccaggttagggctgcactttgagtgcattttcccatgtttgaaataaagccagggccatgttgctgggtagttttgggtctttgaattctatctccatgactggcatgg

SEQ ID NO: 10086 - DNA, 585 bp, Homo sapiens
ttgaatgacttacgtgaggtcacagagatgatgggtgrtagccttaggtggcactcatttataaaagtataggcagatggctggtgtcattttcttcaagtttgatcagaggtgaatcagcgagatagagacctgtgggtttaacacagagataacctgagaagattgcacatctgctctgatacaggaccactttgtgggtgtgtgtgtatgtgtgtgtgtctgtgtgacagtggtgctccttttacctgaaagatcaaagtttctgaattattaggctgaaaatgcatttatggtgcatttcttaaaggtctcattagtatttaaatggtacaggaaagtgcagataaattgcgcattatgaaaagagccagtgggactggcaggtaacattatttccctggctacccaaatccatccgtcttcttccatgtttgtctcagcagaaatccatagttaggaagatactcttttggccaggttagggctgcactttgagtgcattttcccatgtttgaaataaagccagggccatgttgctgggtagttttgggtctttgaattctatctccatgactggcatgg

SEQ ID NO: 10087 - DNA, 528 bp, Homo sapiens
ttaaagagaattttttcacatctaatacataaaacatgatctccaccatctctctctctttaaacagctttgttaaatagtcagttgaacgacatctcccttgctgccatgaatccattagggaatcatatttacataggggattttacttgacaatctcaaatcacttggaaaacatcaaccttctcggcctctcagcaccctttggggagctgtatgcatactcctggtttatttctcscaccctcgtgtggtgacagtggctcccagaaaagtggacttggcagaaccagtgccccaactagtgctttccaggatacctctctcagggctgccccctgactcccacttgctggattgcttggacccatggagatgggcatgggaatggggctggtgcagctcctgccatcctcatcctcatcactcaaatgtacactgagcaggcatggagactccaacaaggaaagaagctggcatctcaacaatgacggcaacagtaagagtagctcatgtgtattgcttaat

SEQ ID NO: 10088 - DNA, 515 bp, Homo sapiens
tgcctctgctcccagtcaggtgacctggattctgttcccagctctgccactagctcgctgagtgacattgggtgagtctctaccctccctaggcctcagtttccaaactggaccaaaggcagacctaggggagtgtgtctgtcctcccttgcaggcggcaagtggctatatcttcccagagaggcctttgcaggagacctagtgtcttggccagcatgctccacttcggttctcagcggcactgctattgcccactcacctgagatactgggagacaccagatgcccccactgcctcactcccacactcagtcactgcsgccctttgctccctccccatcccttgagtttggccctccttggtgtctgtgtcaacatccctcactggtcccagccctcgcttttctcagtggatcaccgcagccacctcctgacggctctgcctggccccaggcaccctcacctctaatccattctccatactgcggctagagcgatttttccaaacttcaattc

SEQ ID NO: 10089 - DNA, 654 bp, Homo sapiens
aaccgggacaggtcacagcctggaaggaggaggtgaagacgtaggatgatcttgcaagtcacctggggcttatttcaaaatattatgtcaggctgggcacagtggctcatgcctgtaatcccagcactttgggaggccaaggcaggcagatcacctgaggtcaggagttcaagaccagcctggccaacatggtgaaaccccgtctctacgaaaaatacaaaaattagtcaggcatgggggcgtgcacctgtaatcgcagctacttgggaggctgaggtaggagaaccgcttgtacccgggaggcggaggttgcagtgagctgagattgygccattgcactccagcctgggtgacaagagtgagattccatctcaaaaacaaaaaataataaataggtcaaaacagttccccatatgatgtcatgagacgtaggattaatgaccagtcactgaacataggtcttttattttgaaatcctctgcatactgaggaggacgctggccttcagaaccgtatcactggtaggtgctgaggaatgggatggcgcagacacagaaacaggagtcagggaggccggtagacctctggggacaagcccagttctcatcattgtactacaaaaaatgtaaaaacttacaggatggcagtgatagg

SEQ ID NO: 10090 - DNA, 412 bp, Homo sapiens
caagaattataacaacagttagtgattaagggtacagcctcctttaaatcaactaggagggggaaaacatcaaaatgaaatacaaacagaagcaaataaacctaatttgtacttccaaggaacagaataactatactaaagggagaaaaggaaacccaagtaactgttggacccaatacttttgactacatacccccagtgtaaaggcaaagaaagctgcacaccaatattgaactctacatagaaagagtgccttcacagtgttatgggtatagccatatactgtgtattgtaagattgagcaaatgaatgaatgtattaaagtcacaaatagtgaactgaggaaggtttgcaataattctayggcgttggattggagctggaagattggagatatgcacacacacacaga

SEQ ID NO: 10091 - DNA, 536 bp, Homo sapiens
ttgggaggctgaggcaggaggatcccttgaggtcaggagttcaaggctgcagtgaactatgatcgtgccactgcactccagcctgggtgacagagcragaccctgtctcaggaaaaaaataaaaataaaaaaataaaaaaagggcttccattaccacgtgctcaccatgccctggtatcctgctaagtgctttacatgggcctacgacatgcagtccctagaagcacaatgaggtgtgccctactgtccacctgtccacctggcaggagcaggaacagctccagtatctcccaggcgtggctcccacgcctccagagtccagagtctgcccagctccagagtcccacagcctcccaggtgggcatttcccacctccccgagtccccctggcatcttggggccctggaccccagggtatcttgactggccccatctactatcttctctaagtgggagaatatgagtgatgtgctcacctctttaagccttggtttcctcatctgtaaaatggagcttcaatagaaccacccccgttg

SEQ ID NO: 10092 - DNA, 555 bp, Homo sapiens
tttagaatagattgcctgttcattaatgagaatttgtgctttaataattctcactgaaatatacattaaaaatttagtctctgaatcagcattagttatttacataaataacttaaccaaagatgtactgaaatgtatatyagtccattaaaaattctttatgaagaaaatggtatttaatggctttgtgagtcttgttaatgttcccatcctgtgactgacctgcagtttctaccaaaccaagactcacagtgatcaccgggtaccacagcaaatataatctcaaactttatattttttatgaccatctaaatgtttgaacactgactaaattttgaatttctattctatttgttgtaaataattatcatcataacccatttaagttctgatgatttggcaaggcatgaagaaagaaaagcaaaaaagaataaaactttcagtgttaacttttaaaaagcaaaatgaaactactacttcaaattttaagggaagacatcagtttttatccagcatcaactctctattacaatatggagaattatgcagtaacat

SEQ ID NO: 10093 - DNA, 555 bp, Homo sapiens
tttagaatagattgcctgttcattaatgagaatttgtgctttaataattctcactgaaatatacattaaaaatttagtctctgaatcagcattagttatttacataaataacttaaccaaagatgtactgaaatgtatattagtccattaaaaattctttatgaagaaaatggtatttaatggctttgtgagtcttgttaatgttcccatcctgtgactgacctgcagtttctaccaaaccaagactcacagtgatcaccgggtaccacagcaaatataatctcaaactttatattttttatgaccatctaaatgtttgaacactgactaaattttgaatttctattctatttgttgtaaataattatcatcataacccatttaagttctgatgatttggcaaggcatgaagaaagaaaagcaaaaaasaataaaactttcagtgttaacttttaaaaagcaaaatgaaactactacttcaaattttaagggaagacatcagtttttatccagcatcaactctctattacaatatggagaattatgcagtaacat

SEQ ID NO: 10094 - DNA, 565 bp, Homo sapiens
gtttaaggaaggatgaaaagcgytgctgcccaggctccctagtaatccagcacaatcattccagatgttgtgacccaccatttaaagggaattccttgtctggactgcctctctggggcagcttattagggagcataccctccaagggcttagagagaagcctcgggacagcacatctccaatcaagacttcagcacttagcagggactgtttagaaggtgcgattctcagcttgtctccttcataaagtgacaccaagcccttcctgccagacacagtcttgagtagtgatgtcatcagaggcttggaggctgtctttgtttcctgaattactaaggcagctgatgtttaactgacctgtcatactgaaggcaccataggggcagagagggctgacttcggggcaaagatctcaagagtagcaatggaccagaagtctcaagagaaactgccttatgatggttggggaagactgagctcatcccaaagaccagctgcatcaaatacagactaaatcccagcaatggagactggatggagcacgtcttaatgtttttaagtgaca

SEQ ID NO: 10095 - DNA, 519 bp, Homo sapiens
tgggcggattgcttgaggccaagagtttgagactagcttggccaacatggagaaacgttgtctctactaaaaatacaaaaattagccaggcatggtggtgcgtgcctattgtccgggctactcgggaggctgaggcatgagaatcacttgaacctgggaggcagaggctgcagtgagccaagattctgccactgcactccagcctgaacaacagagtgagactctgtctccaaaaaaaaaaaaaaaaaaaaaatatatatatatatatatatatatatagtgagatcaaaataccataaaatatagaaaatgttagtgtactttttgtatatgagaccttttttttwaaaaaaaaaaaaaaaaatgttctttgggaggccgaggtgggcggatcacctgaggtcaagagtttgagaccagcctggccaacatggtgaaccccgtctctactgaaaatacaaaattagccgggcatggtggtgggcgcctgtagtcccagctactcgggaggctgaggca

SEQ ID NO: 10096 - DNA, 519 bp, Homo sapiens
attttgtgggtayacagcaggtgtgtatatttggggggcacatgagatgttttgatacacgcatgcaatgtaccacagtcacatcatggagtgtgggggtctccatccctttgagcattgatcctttgtgttacaaacaatccacttatactcttttagttatttggaaatgtacaattaatttattattaactatagtcaccctattgtactattaagtagaaggtcttattccttctttctgttactgtacccgttaaccatccccaccttccccccaccatcctctcattacttttcccagcctccggtaattatccttctactctctatgtccatatgttcaattatgttgattctagatttgatgggcatctttagaccaaagaatctactgcacttcaaattcttcatgtgtgtaatgagaatagtgatggcactacctttgtagtgtttgggaatgatttggggagatacttttttgtgtaaagggcttagcaccctcaatacttatcaaag

SEQ ID NO: 10097 - DNA, 519 bp, Homo sapiens
attttgtgggtacacagcaggtgtgtatatttggggggcacatgagatgttttgatacacgcatgcaatgtaccacagtcacatcatggagtgtgggggtctccatccctttgagcattgatcctttgtgttacaaacaatccacttatactcttttagttatttggaaatgtacaattaatttattattaactatagtcaccctattgtactattaagtagaaggtcttattccttctttctgttactgtacccgttaaccatccccaccttccccccaccatcctctcattacttttcccagcctccggtaattatccttctactctctatgtccatatgttcaattatgttgattctagatttgatgggcatctttagaccaaagaatctactgcacttcaaattcttcatgtgtgtaatgagaatastgatggcactacctttgtagtgtttgggaatgatttggggagatacttttttgtgtaaagggcttagcaccctcaatacttatcaaag

SEQ ID NO: 10098 - DNA, 592 bp, Homo sapiens
gtctgtggcgcccacgcggaactcgaaagactgcagggcctcgtagtccagcgacctgagggcaaacaggtggccgttgtccgcgttgatggagaccagggaagagaggggcaggtgcgggtcctggggcggcagcagcgagtaggtgacctgggcgttgatgcctgagtctctgtctgtggcgctgacgctgccgatgtgcagggcggggctgttgttctcgcggacgaacagggtgtaggaggtttgggtgaaggcggggrcgttgtcattgacgtcggagacctgcacagttatgctctgctgggttttcagccttggtgtccccaaatcagtgaccgtgatagtgatgttgtactcggctctgctctctctgtccagcgcgccttctgttaccagggtgtagaaattctccacggaaggtcttagtagaaaggggagattgttctctattgaacaaataacctgttggttatgtccagagtctgcatctgaaacactgaaaactgccactgtgatctctggtaagttttctgggatgaggctgatgaagaacgacatggtgagttcaggggcattgtcattcacgtcc

SEQ ID NO: 10099 - DNA, 523 bp, Homo sapiens
aactatggggctcctggaattggttgactaagctgaggcttctgggcactgaaataacattatttaatgacagtgttaggaagaagctcttctgaaggcagtgaaacaggatggatgtctcgacaggaagagttagaaattcaccctttatttattattttcttccttttattttttaaaaatcagttttcttaggttgaaagaaattcaccctttatcaagaattatttatagttcctctggagtgagagaggaagacrttacccacgcagtgctctgtggaatcatctgagccaccacttctgccttggggacatcatctggggaagtatctagatcctttggctgaacaacgtgttttgaggtctttaatatgtcaccttaaggatgaggcctagagaacatggccttttgttgaacagtttgtaagctctcaaatgtgagtaaatgtgaggagggtcttgagagatataggaagctcaagaaacctagctagagtctctagactgttgagaaaagtggt

SEQ ID NO: 10100 - DNA, 523 bp, Homo sapiens
aactatggggctcctggaattggttgactaagctgaggcttctgggcactgaaataacattatttaatgacagtgttaggaagaagctcttctgaaggcagtgaaacaggatggatgtctcgacaggaagagttagaaattcaccctttatttattattttcttccttttattttttaaaaatcagttttcttaggttgaaagaaattcaccctttatcaagaattatttatagttcctctggagtgagagaggaagacattacccacgcagtgctctgtggaatcatctgagccaccacttctgccttggggacaycatctggggaagtatctagatcctttggctgaacaacgtgttttgaggtctttaatatgtcaccttaaggatgaggcctagagaacatggccttttgttgaacagtttgtaagctctcaaatgtgagtaaatgtgaggagggtcttgagagatataggaagctcaagaaacctagctagagtctctagactgttgagaaaagtggt

SEQ ID NO: 10101 - DNA, 571 bp, Homo sapiens
ggaatacttgcacatgttcacaaagaagcatgtacagggatttcattgcagcaatgcatgtaacaagaaaactaagcataatctaaacattcatcaatgggggaattattaaataaaccatgatgcatccatactatggattatgcaggagtttaaatgaatggggtgaccctctaagtactgggaaggaaagaaatctaaggcatatcatgaagtgaaagaatyaagttgcaagatgttaccctttatgcgaagaaaaaattttaaaaccacaaaacaaatctattttgctttatgtaaatatgtatgtaggtaaatgaggaaaagtctggaagcatgtatactaaatgcagagtagcattacttcagggatgagggagtagggcacaaggagagtttttgttatatctgttattgcatttttatatattaaaaatggaatcatgggctgcgggtggtggctcatgcctgtaatatgaacactttaagaggccaaggtgggaggatcacttgagcccaggagttcaagaccagcctaagcagcataggaagaccctgtctctacaaaaaa

SEQ ID NO: 10102 - DNA, 571 bp, Homo sapiens
ggaatacttgcacatgttcacaaagaagcatgtacagggatttcattgcagcaatgcatgtaacaagaaaactaagcataatctaaacattcatcaatgggggaattattaaataaaccatgatgcatccatactatggattatgcaggagtttaaatgaatggggtgaccctctaagtactgggaaggaaagaaatctaaggcatatcatgaagtgaaagaatcaagttgcaagatgttaccctttatgcgaagaaaaaattttaaaaccacaaaacaaatctattttgctttatgtaaatatgtatgtaggtaaatgaggaaaagtctggaagcatgtatactaaatgcagagtagcattacttcagggatgagggagtagggcacaaggagagtttttgttatatctgttattgcatttttatatattaaaaatggaatcatgggctgcgggtggtggctcatgcctgtaatatgaacactttaagaggccaargtgggaggatcacttgagcccaggagttcaagaccagcctaagcagcataggaagaccctgtctctacaaaaaa

SEQ ID NO: 10103 - DNA, 1082 bp, Homo sapiens
agaactctggaatagattttggagacgtttcttccagaatggcactccgggaaaaactgaaatgtaaaacttttgactggtacctgaaaaatgtttatccactcttgaagccactccacaccatcgtgggctatggaagagtatgtattatgaaattgcactttggattttaaatgtttgactgtgaaagacaatgcggcctgaatctcgtgattgcctgtcctgcccaagacgcccttcctacctcagctttctactcagctcttcgccctcaaccctctcagtttccttttgtcccttgctccccgatccccatctcttttccttctctctgcttctactccccttgaaaactatagctcttgcctggactcccccccgccccgcccccgtttctccagcagctgcagcgattggccttgtccgcctgaactccgcagaggcgcccctccctgtgtgtgtggtgatgggctgaggtgatgggtgtttcccggatgtgggcagcgcagcagcgcctcccttcggcgctggtctgtttcccagtgcttagaaaatgcctgccgggatcccagccctctgctccttgtggctggtcgttcctggtgtcctcggtgtgttggggaaaatgtaggccctgggagggatggcgcctcattctctgtcctttctaacagtgttgccgtgtgttttgtccccttcagatgaaaaacctattggatgaaaatgtctgcttggatcagggaccckttccaggcaacacccccatcatgtattactgccatgaattcagctcacaggtatcttccacaatcttcctggccctgcctgggcaagtctgtcgtggctcagcccctggtaaccattgctgggtctggactccgtgatacgtgatggggaggcaggagcggagcatcctgggtaagggtgaaatccagacctgcacttgtaactgagcacgtcttagtttcttcagaaagccgtggcaacgtagttccatttcagttacagggaggataggtagaaaagctatgctctgtcacattcattctgcatggtgatatttgcattgacaatcacctctg

SEQ ID NO: 10104 - DNA, 622 bp, Homo sapiens
ttttttggatacagaatcttgctttttcacccaggctggagtctagtggttcactgcagcctcgacttcttcagcttaagcaatcctcctgccttggcctccctagtagctaagaccacaggcatacaccaccatgcctagctaatttttaaactttttgtaaagatgggcctcagtatgttgyccagactggtcttgaacacctgggctcaagcaatcctctttcctcagcctcccaaagtgctgagattacaggcgtgagccaccccactgcctttaaatacttaccaaccccttctacatcccaggaacttgtgactgtaggttgattaggctgttggaagtttgcaggatggctaggatgtagtgaggtggttactgcagtgaccgagagggtgggtggtgagcgcctagccggaaggagtggcagatgaaagctgagacatgtcaaggcaggaagtgacagagtttggcagtagggttgatggagaaggtgatggaataccaaagttgtgggtttcatacgtgggtctctggctgtactctgccacaatcatttaattaagggttgtcttgtgcatccagcatctcagaaatggtctcctgagaaaaaaatgccttc

SEQ ID NO: 10105 - DNA, 608 bp, Homo sapiens
tgggtgacagagagagaccctgtcgctgttttttaaaaacaaaaaggaaacatttgccaactttagagtactttctgattttatgagctctgagcaaggttgggggtgttctctgcaggcctgaaggggcttctgtaccggaaggctatagtcaaggctgaggcctacaggtgccggaggcggacaggctgcgagtgtctgcccagggtggggtggcagcactggccactgtgctggccactgacgtcagcctcccccggcagcagattgtgtgtggtcggcatgtggtaggggcaggatccaaacccagcccttgcctgatggyagagcttcactgctccaaacggtctggaacaccactgttttaattaagtgtgcaattcagtgtgcaagtgtcttgtaattaagtgtgcctctgtttcctcatctataaaacagggagaacttcgtattctccttcttgggaatctgaggactctgaaaatcccagtgcagggatgctcgcggaagcatcagcagggatgtccgccccagccgctgactcagaagcccaacacgcagagaatgtaaagctagaggtgccatgctggggcctggggcacttctag

SEQ ID NO: 10106 - DNA, 556 bp, Homo sapiens
ttttctatggggttaaaagacatagctaatggtgctattgagttttaaactagattatacataggaaacactccacacacagtaaatgctcaataaggaagagctatttgcattattgttactactaatgctgacaagaggaggctctgcaacaaaaacaccaaacgttcctatgatgrtatagtaaatcaacataatccaatttactctttggtttcatgggtatctggtcaaaataaatctattacgggaagtgaccatcactggaagagctgatacgtatccagtctgaggctaaaatataaaaaccaaatcctagatttggggactcaactgacgtgctgcccataggtgagcaagagttggagatcccataagcaaacttcatccaggtgtcatggaaaattatgttggaaagataggataggccaggcttgatttttgagtaaagggaatttggtctgcttttttttttttttttttttttttttttaaccaggcacatgctgtaactcagtgggattaatttagtttaatgaagaagcaaaagtggcct

SEQ ID NO: 10107 - DNA, 504 bp, Homo sapiens
ctggaccccgattctgcttggagccaagataaagtgagagaagtaatatttaccctctcccttgaaacagctggaaagtcacacaaaatatatgaaatgattgtttttaagctattgaacataaagcaatgaacaatgatctctgagataaggaacatgagatgaactctatgattgctctagcttagtgtttgcagagagattccagatcatagtgcagaggagaacccaggtagaacttgggagtcttgaggacattgcagtkaacagtaccagagtatagagagttacactgatacagaacgctggagatttgtggagaagagacttagagtaaacagataagtactaatgactgcctgtgtgtgaggagagaatacttatgaacttcttcataagtccagtatttaccctgatacaagaatattacaagaaaagactattacaaaacaaatgtcattcacagatgcaaacatatagagatagatgaaaaaaatgtatcaa

SEQ ID NO: 10108 - DNA, 540 bp, Homo sapiens
ccacttcagccttaaggaagggattctgcccaagaactctgctcaaggattcagccacaaaacgctaggatttggacacacatgattaacccgccaagagaaaggagaataaagatgggacatgtcagtgttatttaccatgtcatccttgaatcctctggcatatgacttatatttgacattaagctgagtgagttagayaaataggaaaactgacttggccccctgattcacttggttctatcaaacccatcatgcctgtctactgctctccgcttgtcatcagtccactcctgtagattattcccgttcagactctggtcatcccagaggcagtcttcccctttggcttaggtagaaagacattgtaaaaattgtcacttcagattaggaaacgcttagcccagtggttctcaactggaaatcattttgcccaccaggagaaattataaccataataggtccattgcctggtgcacacagcaactcaatatgctcggacaccaggttgcagcagagcaagaggtttaatcatagggc

SEQ ID NO: 10109 - DNA, 567 bp, Homo sapiens
cgtctctactaaaaatagaaaaattagctgggtgtggtggcacgtgcctgtaatctcagctactcgggaggctgaggcaggagaattgcttgaacctgggaagcggaggttgcagtgagccgagattgcgccactgcactccagcctggtgacggagcgagactccgtctcaaaaataaataaataaaataaataaataaataaataaataaataaataaataaatttgtrttctttttctcctattaatttgccttttatcagtaattttcagcaaaccttcagagggtgatggggaagttttccctgtgtccccctaagattaatatgcacacagggtagttgtagcagatgctgtccgtgccccacccaatatctatgcatccacaccatttccatgtggtccccaacactgctgactggcaccatccccatctctgcgcctgagcgcattcttcctagaaccactgcaggctgtcctagaatcgtgggccacagttgctgggaaattaacaacactctgggagtcaccctcagctaacagctgatagggattggcatagaaat

SEQ ID NO: 10110 - DNA, 549 bp, Homo sapiens
gtccaatgagctcttttatcttagattccatcaattgcttaaaaatcataccacatttaagtttgtttcactgttgttggatcatggccttttggtcggtttggtttttgtgtgtgtgcgttctttgttgtgttttccagaggatctaatcgcctacttttttctccatttgtttgcctttatcatgtcctcgttagttttcacaatagytcagtcatacgccctattcccaaattccttttcttcttggagactttcctactgccgaagagatggagcctgagttccagcaaacctttggatggagctactgatgtgccggagatccgggcagtacaggaacgtggtgaacacaccaggagtgtgccctcagcaaagtgcagaccatgagacattcaggttaaagggcttcttcggcagataaattttaagtaaacgaaagtgaccaatggttggtgtgtgtgtatgtttgcaatggggaaaactaaattctagtgtcgggacacacttttccataaggaaatgtgatgaaatgtgttctataagatg

SEQ ID NO: 10111 - DNA, 549 bp, Homo sapiens
gtccaatgagctcttttatcttagattccatcaattgcttaaaaatcataccacatttaagtttgtttcactgttgttggatcatggccttttggtcggtttggtttttgtgtgtgtgcgttctttgttgtgttttccagaggatctaatcgcctacttttttctccatttgtttgcctttatcatgtcctcgttagttttcacaatagttcagtcatacgccctattcccaaattccttttcttcttggagactttcctactgccgaagagatggagcctgagttccagcaaacctttggatggagctactgatgtgcyggagatccgggcagtacaggaacgtggtgaacacaccaggagtgtgccctcagcaaagtgcagaccatgagacattcaggttaaagggcttcttcggcagataaattttaagtaaacgaaagtgaccaatggttggtgtgtgtgtatgtttgcaatggggaaaactaaattctagtgtcgggacacacttttccataaggaaatgtgatgaaatgtgttctataagatg

SEQ ID NO: 10112 - DNA, 499 bp, Homo sapiens
taaattaaattttcagttttgaattattgtaccaaatgagtatatggagtctgacaccacattggtatgtggtatagtcctgttctagttcctggagatgactcattttcccacttacagtcccacatagttgacaaggaactggctactctttctttctcctggctttatgcacacagcatcattcaatatctgggcatgatggggaactataccctacmcttgccttctggtggggactctggagcccctccccacccaggcccatctcccattcccatgagctcccctgcttctgctttcactcagtgctgctatttggagaagttggcttccaggtgctttccttgactaatttctggcttggttatgcatttattcgttctatgatgatatattttacgtgcttttaaacaacgggcttggaggggctgaggttttctctgtcagctgagacatcttaaaactattattctgttattcaattggtatagattaa

SEQ ID NO: 10113 - DNA, 558 bp, Homo sapiens
tgctgatctgacaggaggcagagctcaggtggtcgcctgccactcacctcctgctatgcagcccagttcccaaccggccacggactggtactggtctgtggcccgggggttgggggacccctgaactagagagaagaggaaggtcatmatataaaatcataagcctgggcaatatagtgagactgtatctctacaaaaataaaaatagctggccatggtggcacctgcctgtaatcccaactactcaggaggctgaggcaggattgcttgagttgaggctgcagtgagctgatagtgccaccgcactccagcctgggtgacagagcaagaccctgtctcaaaaaaaaaaaaaaaaaattataaagcacactgaattttaactccttagactcatacttgggaaatcaggtaattccttgaagccacctcaagaagactaggtatgaaggcagcagaagtctcttgatcttgctccctggcaggagtgagctctggcctgtccacctgccttctagcctgactccaggcttagatttcaggaatgggggggagttgtgg

SEQ ID NO: 10114 - DNA, 539 bp, Homo sapiens
atctgcctttctcacccttgttctctcgcaaatatatggtgaaattttacagaaattaaatatgtggtgacatcatcaccctcacagctaatggaatgtgagctttatatattcttatgtttaaaatttttatcatttgtaatttctgatatgcaaaatgttaatagacataatctacatgaacagcagctctttgggatcctcaataatttttaaaagtttataggagtcctaagaacaaaatgtataagaactgctagtctgacctgaagtttatttatttttaccatatgtaaaggagccacctctgttgcctcactttctcagtgagctttaataaatattaaatatatacrttattttcagttgctatctagtattgcttgtacaccttggtattgtaagacacaaggttgagtggatttgttacagttttgactgcaccatttacttgagtggatttgttagttttgactgcaccatttactatgtgatcacagacaagctgctttagctttctcttttgtcaaataatgttt

SEQ ID NO: 10115 - DNA, 539 bp, Homo sapiens
atctgcctttctcacccttgttctctcgcaaatatatggtgaaattttacagaaattaaatatgtggtgacatcatcaccctcacagctaatggaatgtgagctttatatattcttatgtttaaaatttttatcatttgtaatttctgatatgcaaaatgttaatagacataatctacatgaacagcagctctttgggatcctcaataatttttaaaagtttataggagtcctaagaacaaaatgtataagaactgctagtctgacctgaagtttatttatttttaccatatgtaaaggagccacctctgttgcctcactttctcagtgagctttaataaatattaaatatatacgttattttcagttgctatctagtattgcttgtacaccttggtattgtaagacacaaggttgagtggatttgttacagttttgactgcaccatttacttgagtggatttgttagttttgactgcaccatttactatgtgatcacagacaagctgctttagctttctcttttgtcaaakaatgttt

SEQ ID NO: 10116 - DNA, 648 bp, Homo sapiens
acatctataggtcagtgtcccacagcctcccagaccctggggtccaaagcagggaggagagtggctggccagggagggcctcagaggctgaaaggaaggcccactcaccctggcccgcacctggacttcttctggtagagacactttcatcgtcactctgggcaacgccatcaccagcatcctggctggctttgccatcttctccgtgstgggctacatgtctcaggagctgggcgtgcctgtggaccaagtagccaaagcaggtgggcaggctgccaggcctcagtggggtgagcatgtgtgttgggtagagatggggctgggccagtggaccagcaagattatggatgggggccaggcgcggtggctcatgcctgtgatcccagcactttgggaggccaaggtgggcggatcgcttgaggtcaggagttcgagaccagcctggtcaacctggtgagtcccagtgtctactaaaaatacaaaaagtagccgggcgtggtggcacatgcctgtaatcccagtactcaggaggctgaggcaggagaatcgcttgaacccgggaggtggaggttgcaatgagccaagattgggtcactgccctctagcatgggcaacagagcaagactctgcctcaaaaaaaaaaaaaaa

SEQ ID NO: 10117 - DNA, 569 bp, Homo sapiens
agtcaagattgggccactgcactccagcctggcgagagagagagactccgtaaaaaaaaaaaaaaaaaaaaaaaaaaagaccagacatggtggctcatgtctgtaatcccagcactttgggaggccgaggcgggtggatcacgaggtcaagagatcgagaccatcttggccaacatggtgaaaccccgtctctactaaaaataaaaaaattagctagggcatggtgatacacgtctgtagtcccagctactcgggaggctgaagcaggagaatcgcttcaacctgggaggcggaggttgcagtgagccgagatcgcaccactgcactccagcatggtgacagagagagactctgtctcaaaaaaaagaaaaaaaaagaaagaaagacagggagagagggagggagggaaaaagaaagaaagaagaatgaagggaggaagagagaaagaaaaacgagagagggaaagaaagaggaaggaaggagaagaaaagaaaagaaaaaagaacagagtaagaacaacaacamaaaaaaaaacctgtagtaatcaggcccaacacagactcaagcca

SEQ ID NO: 10118 - DNA, 516 bp, Homo sapiens
cactcaaaggtggaagcaaaaacgccaactcagaaaagccagtcgctgctgctgtcaggagcctgaaatccacctcaacagtgggccgctgctcaagtccctatcaccattgcagtaccagrtcccaccaccctatcaccattcctctcatggagtctcaaaccagggaggggaaataatatctaagaggagtggaggagcagaatccttccccaaacctgcggactcctggaatggagaaagggaaggccctggcgtttcaggagatgcctggggagtcgtgtttcctgtgttagggagacctggatgacatgcctcagcttctgctcgcaagccccctcccatgacctctccaacagcctgtagggaaatcccttgcaaataaatagtatacagactaagcaaccaactactgtgtggaatggtgaacagggagggcagtgaatcaccaggtactatgggaagactagagctaggccagactctggaaagaatttgttgacagtcattggagga

SEQ ID NO: 10119 - DNA, 639 bp, Homo sapiens
cccagaaagccgcagtctytcagcaaattccacgggctgggtgagactcagatccggccaacagcatgccgggcgttctttacatatcatcttatctactggaggaagcatcctggtggcagcgaagggcacgggcctcagaggcaggcagctgaagtgaacaggctctgcaacctaccagctgtacagcccagggcaagttacctaacctctctgagctccagctgcctcatctgtaaaagggcataacaccttcctctcaggtttgctgtggaaatcatgcctgtaaagtgtttaccaagtgtttgtcactcccagaaagtactagataaatggtaattaacattaaattattgcaccattccctcaaggtagagattattgtcttctctccaccagtgaggaagatgacgctcagagacattaagcaactggctcagagtcacagagctgctgctcaggaggcagagcagggggttcaaaccaaggccttctgacttcaggtgcactgttcttctccaaacaccacaggcttgcagaggacgctaaaggaacagaaacaacagcagagcctgcccctagccctgcggaagtttgcagcctcaagtcacagggacagagctgtggaaccctgaatca

SEQ ID NO: 10120 - DNA, 1315 bp, Homo sapiens
ccatctccctctctgtataagcctccccactgacgagatgtgtttgagaagagctttgggtgctttgagacggtacgaaaatcctggtaaaagggaggcttgatgctggagaagctccccatatcctcccaagccccgcctccagaaccccaaccactctgaccagcgagtgcccagtgtgagcttggacatctcgggggagcaaaagagatgtggacccagggccatgtgggcacgaatgagcacctccaaaacctactcccacatctggaaggtcccagcaaaagccatctggctgcttagtcagtagtcgcaggatgatccagctgagagccccacaggcagatagcccaagcaagcaaatctgtccaactcctgccaatcacagcacagactccccagcycccagagggccccagggctggggtgggggtggggtggggatggggtggctctgagcatggactgaggttacttcccagcccaggactccaggagggagcagaggccagagcgactgagaaggaagcagggcgaccagggataatggatcaaccgctgggaacatggagccgtgtccctgtgattccaggatgcacaggttttcatgctcatccccgtaagtccccagacagaagaaatgagcctgagcaagccagacagagaggtcccggtggaacgtgctctggaccaacctacgttctccactctgatacaggctccagacggagaggtcccggtggaacgtgctctggaccaacctacgttctccactccgatacaggctgtgccgggcccaccacggagcctggagagagcagcaaatggcagctggagggaaatgaggggcccctcccacccccacacttcccagacagcccacaagtggggttccccaggtgtcagacgctggggtgcctcagcaggcaactgcaggagccagcaacatgacttggggctgcctggtggagaaattccccagggaacaaatcattgcacagctttagggccctctaggaaggctgagagatgggatggaaatagatacagagaacaacaggaagtcatgaaaagaaaaataagctggcgatcctgattccaatcagcagaacccttcctaggcctcagagtactttcaggatcaccatcccattgcagcccactgacaaggctcccaggttggccaggcaagtttgattaagatttgattcccaccttaccgaggagaagctgaagtcaaagatcctcccagggagtcaatggcagagcagcagggtagcccaagccttcccccagccagctatggcctgcggcg

SEQ ID NO: 10121 - DNA, 534 bp, Homo sapiens
atcctgggagttaaaggctgccgtgagccgagatcgagccactgcactccagcctgggtgacagagtgagaccttgtctcaaaaaaaaaaaaaaaagttaaatggtgtaaattgtgttaagtataaatggtgttaagtacaatgggaaaaggctggtttgggtttgagaattgtgggttgggggctgtaatttttaatagattcaattttttaagctcagttccagttttacagaaaaattaagaagacaatatgtcacagatgggaactgaacaatgagaacacatggacacaggaaggggaacatcacactctggggactgttgtggggtggggggaggggggagggatagcattaggagaaatacctagtgctaaatgatgagttaatgggtgcagcacaccagtatggcacatgtatacatatgtaactaaccggcacattgtgcacatgtaccctaaaayttaaagtataataataaaaaaaaagattacacaacaaaaaaataaataaaataaattcttgaagagcta

SEQ ID NO: 10122 - DNA, 517 bp, Homo sapiens
gtttagataggcaaatccacagagacaggaagcagatttgcggttgccaggggctgtggggagggggaatgggagtgatggctaatggatttcctttggggatgatgaaaaagttctggaactaggtagtggtgatggttgcacaacaatgtgaatgtcctcgatgccactgaattgcatacctacaatggttaaaatggtaaaatttatattatgtgtgtttcatcacaataataagaaaaaagatgagcttccttcagacaaacacatgggagcttgcagcttggagactcgggagaagatgtgtgtgagacggttacccgcacaatgggtgggttccatagcttgggtcaagagttcaagaccagcctgtgcaacatggcaaaaccccrtccgtctctacaaaaattagccaggtatggtagtgcaaacctgtagtcccagctacttgggagcctgagatgggaggatggcttgagcctgggagccagaggttgcaccactgcacttcagcctg

SEQ ID NO: 10123 - DNA, 557 bp, Homo sapiens
cagtgagccaagattgcaccactgcactacagcctgggtgaaagagtgagacctcatctcaaaaaaaataataataacaaaaaataagaaagcatagcatagtgcctggcacagagtgaatactcaagaaatactggttgaggccaggmgcagtggcacacgcctgtaatcccagcactttgggaggccgaggtgggcagatcacttgaggtcaggagtttgagaccagcctggacaacatggcaaaactgcatctctactaaaaacacaaaaattagctgggcacctgtaatcccagctacttgagagactgaggcaggagaatcacttgaacccgggcggcagaggctgcagtgagccgagatcgcgccattgcattccagcctgggtgacagagcgagactccgtctcaaaaaaagagagaaatactagttgaaagagaggaagttagcaatatgtcttaagcacacacactctggaaccagattgcctgcttttcttttgtttttttctttgagacggagtctcgctctgttacccagtctggagtgcagtgg

SEQ ID NO: 10124 - DNA, 557 bp, Homo sapiens
cagtgagccaagattgcaccactgcactacagcctgggtgaaagagtgagacctcatctcaaaaaaaataataataacaaaaaataagaaagcatagcatagtgcctggcacagagtgaatactcaagaaatactggttgaggccaggagcagtggcacacgcctgtaatcccagcactttgggaggccgaggtgggcagatcacttgaggtcaggagtttgagaccagcctggacaacatggcaaaactgcatctctactaaaaacacaaaaattagctgggcacctgtaatcccagctacttgagagactgaggcaggagaatcacttgaacccgggcggcagaggctgcagtgagccgagatcgygccattgcattccagcctgggtgacagagcgagactccgtctcaaaaaaagagagaaatactagttgaaagagaggaagttagcaatatgtcttaagcacacacactctggaaccagattgcctgcttttcttttgtttttttctttgagacggagtctcgctctgttacccagtctggagtgcagtgg

SEQ ID NO: 10125 - DNA, 557 bp, Homo sapiens
cagtgagccaagattgcaccactgcactacagcctgggtgaaagagtgagacctcatctcaaaaaaaataataataacaaaaaataagaaagcatagcatagtgcctggcacagagtgaatactcaagaaatactggttgaggccaggagcagtggcacacgcctgtaatcccagcactttgggaggccgaggtgggcagatcacttgaggtcaggagtttgagaccagcctggacaacatggcaaaactgcatctctactaaaaacacaaaaattagctgggcacctgtaatcccagctacttgagagactgaggcaggagaatcacttgaacccgggcggcagaggctgcagtgagccgagatcgcgccattgcattccagcctgggtgacagagcragactccgtctcaaaaaaagagagaaatactagttgaaagagaggaagttagcaatatgtcttaagcacacacactctggaaccagattgcctgcttttcttttgtttttttctttgagacggagtctcgctctgttacccagtctggagtgcagtgg

SEQ ID NO: 10126 - DNA, 557 bp, Homo sapiens
cagtgagccaagattgcaccactgcactacagcctgggtgaaagagtgagacctcatctcaaaaaaaataataataacaaaaaataagaaagcatagcatagtgcctggcacagagtgaatactcaagaaatactggttgaggccaggagcagtggcacacgcctgtaatcccagcactttgggaggccgaggtgggcagatcacttgaggtcaggagtttgagaccagcctggacaacatggcaaaactgcatctctactaaaaacacaaaaattagctgggcacctgtaatcccagctacttgagagactgaggcaggagaatcacttgaacccgggcggcagaggctgcagtgagccgagatcgcgccattgcattccagcctgggtgacagagcgagactccgtctcaaaaaaagagagaaatactagttgaaagagaggaagttagcaatatgtcttaagcacacacactctggaaccagattrcctgcttttcttttgtttttttctttgagacggagtctcgctctgttacccagtctggagtgcagtgg

SEQ ID NO: 10127 - DNA, 551 bp, Homo sapiens
ctacgggcgggagcggattgctgagctactgggcatggacctggccacactagagatcacmgcccacaatgagcgcaagcccaacccgccgccagggctgctgacctggtgagcccaggacacccctgcacaggcctggggcatgcaggggaggtgactggagtctgacactcaagcatctctccccacccccgcccccacaggctcatgtccatcgatgtcaagtaccagatctggaagttcggggtcatcttcacagacaacgtgagcaggggcccacagactggggagggactctgcaggggtggggcgttaggagggttcccaacgtcgggtgttcctgaccaaagaatgactcctgggaccctgagtggctgtgaccctagggtatcttcttatccacacaaggctccttatccccctagacatcttattagtattattattactatttttttttaaatagctgggattgggtgtggtggctcacgcctgtactcccaacactttgagaagccaaggctggtggatcactggagcccagagtttga

SEQ ID NO: 10128 - DNA, 586 bp, Homo sapiens
tgttttagatgattttgctggtctgcttatgggatttactatgcaaagcttctttatccactcacctggaaagcctatgttgtgaagtatataattacataatcttttgagtggaacatttagctattttctgatagttttaaaagtgactttaatgagctattttcagatagttttaaaagtgactttaatgagcaatgaggtggtagaataaagaaggggtagtttagaggatactgttctttctttgtggccctaagggattgacagtgtcaatatatgggaaggcaaagagtaagactctcttttccttgcatcatgtacttttagacctcccctagagatgaagatttttaaacactaaatattaaatagcctaagtgagatttgcaaacttctagatcatcatattaacactttctyttaagtgaatatccaaataagacttttaaaagtgatatgatcaagaaaactctagagggttttctttttccacctggttttgcatgggagcctgaggtagtaaaagaagctaccattgagaaatgatggtaagatttaaaggtaaagggttcttacaggtgcc

SEQ ID NO: 10129 - DNA, 830 bp, Homo sapiens
cagattccgcatggctaacgagcttcggggagatgccacagatgtccggagactgtcctttgagtggcaagagacaagaggaggcagggctcagttagactgcggcctgggaagggggagcttctccaagcccaccctgcagagcctggctcccgcccctctcatccccacacagacccactcactcactgtgtggccttgcccaagccacaccgccaccctgatcctccgtgcccgggtctgtgaagcagggcaggaactcccygccacctgcctgccctttaggctgtaggaatgattcaaccacttcaggggcccgaggcacctctgcctgatacaaaaggtgcttcgggaaatgttggagataaaaatcagcacctaggcctgggcggtggctcacgcctgtaatcccagcactttgggaggccgaggcgggcagatcacaaggtcaggagttcgagaccaccctggccaacatagtgaaaccccatttctactaaaaatacaaaaatcagccgggcgtggtgccgcgtgcctgtaatcccagctactcaggaggctaaggcaggagaatcgcttgaacccgggaggtggaggttgcagtgagccaagattgcgccactgcactctggcctgggcgacagagcgagactctcttaaaaaaaaaaaaaaaaaaatcagcacctcaattgaggtgggtgctgttagagtttggaaacagtgttcttcaccatgttgtgtggggggcgactgggtatgtggggcggggctggggggtcttcactgagctcgatggagtgcagggcctgggggggactgcaccatgggag

SEQ ID NO: 10130 - DNA, 830 bp, Homo sapiens
cagattccgcatggctaacgagcttcggggagatgccacagatgtccggagactgtcctttgagtggcaagagacaagaggaggcagggctcagttagactgcggcctgggaagggggagcttctccaagcccaccctgcagagcctggctcccgcccctctcatccccacacagacccactcactcactgtgtggccttgcccaagccacaccgccaccctgatcctccgtgcccgggtctgtgaagcagggcaggaactccctgccacctgcctgccctttaggctgtaggaatgattcaaccacttcaggggcccgaggcacctctgcctgatacaaaaggtgcttcgggaaatgttggagataaaaatcagcacctaggcctgggcrgtggctcacgcctgtaatcccagcactttgggaggccgaggcgggcagatcacaaggtcaggagttcgagaccaccctggccaacatagtgaaaccccatttctactaaaaatacaaaaatcagccgggcgtggtgccgcgtgcctgtaatcccagctactcaggaggctaaggcaggagaatcgcttgaacccgggaggtggaggttgcagtgagccaagattgcgccactgcactctggcctgggcgacagagcgagactctcttaaaaaaaaaaaaaaaaaaatcagcacctcaattgaggtgggtgctgttagagtttggaaacagtgttcttcaccatgttgtgtggggggcgactgggtatgtggggcggggctggggggtcttcactgagctcgatggagtgcagggcctgggggggactgcaccatgggag

SEQ ID NO: 10131 - DNA, 830 bp, Homo sapiens
cagattccgcatggctaacgagcttcggggagatgccacagatgtccggagactgtcctttgagtggcaagagacaagaggaggcagggctcagttagactgcggcctgggaagggggagcttctccaagcccaccctgcagagcctggctcccgcccctctcatccccacacagacccactcactcactgtgtggccttgcccaagccacaccgccaccctgatcctccgtgcccgggtctgtgaagcagggcaggaactccctgccacctgcctgccctttaggctgtaggaatgattcaaccacttcaggggcccgaggcacctctgcctgatacaaaaggtgcttcgggaaatgttggagataaaaatcagcacctaggcctgggcggtggctcacgcctgtaatcccagcactttgggaggccgaggcgggcagatcacaaggtcaggagttcgagaccaccctggccaacatagtgaaaccccatttctactaaaaatacaaaaatcagccgggcgtggtgccgcgtgcctgtaatcccagctactcrggaggctaaggcaggagaatcgcttgaacccgggaggtggaggttgcagtgagccaagattgcgccactgcactctggcctgggcgacagagcgagactctcttaaaaaaaaaaaaaaaaaaatcagcacctcaattgaggtgggtgctgttagagtttggaaacagtgttcttcaccatgttgtgtggggggcgactgggtatgtggggcggggctggggggtcttcactgagctcgatggagtgcagggcctgggggggactgcaccatgggag

SEQ ID NO: 10132 - DNA, 830 bp, Homo sapiens
cagattccgcatggctaacgagcttcggggagatgccacagatgtccggagactgtcctttgagtggcaagagacaagaggaggcagggctcagttagactgcggcctgggaagggggagcttctccaagcccaccctgcagagcctggctcccgcccctctcatccccacacagacccactcactcactgtgtggccttgcccaagccacaccgccaccctgatcctccgtgcccgggtctgtgaagcagggcaggaactccctgccacctgcctgccctttaggctgtaggaatgattcaaccacttcaggggcccgaggcacctctgcctgatacaaaaggtgcttcgggaaatgttggagataaaaatcagcacctaggcctgggcggtggctcacgcctgtaatcccagcactttgggaggccgaggcgggcagatcacaaggtcaggagttcgagaccaccctggccaacatagtgaaaccccatttctactaaaaatacaaaaatcagccgggcgtggtgccgcgtgcctgtaatcccagctactcaggaggctaaggcaggagaatcgcttgaacccrggaggtggaggttgcagtgagccaagattgcgccactgcactctggcctgggcgacagagcgagactctcttaaaaaaaaaaaaaaaaaaatcagcacctcaattgaggtgggtgctgttagagtttggaaacagtgttcttcaccatgttgtgtggggggcgactgggtatgtggggcggggctggggggtcttcactgagctcgatggagtgcagggcctgggggggactgcaccatgggag

SEQ ID NO: 10133 - DNA, 537 bp, Homo sapiens
aagctggctaggcaagtacgtaatctgcagggcaggccatcagctgaagttgctgtctacatgcagaattttcctccttcagggaaacctcagttcttctctttagttctttcaactgattgaatcaggcacacccagatgatctaggataacctcctttacttaaagtcaactgattatagacatcaattttatctacaaaataccttcacagcaacacctagattagagtttgattgaataactggaaactatagcctagtcaagttgacacataacacagaccatcacaaagggagaatgattaattatcaatgatgctgggcttcctgcatgagaatttacatgatatttcctctacaygtgtcctgtatccgtttagtggcttgacattataatagtagctaagtctgacaaacatttattttcttagaaatgtgatacatatagaaataattttctcagctcaattttccatgactgagtctttagcataattactccatccaggccattcatacactggcaaccattata

SEQ ID NO: 10134 - DNA, 1542 bp, Homo sapiens
agtactaaagttctaaataacatttaaattagacagtgtttgaatttggaatctgcctcggctctgccaatgactaaccatttgatctagtcaactcattactttctctgtgcctcagttttctcctttctaaaattgggactgtggagattatcaaaggtctctaactcaataaagtgcatacaggagatatgtggagggtaaggattagggcaaacaggtcttctaagaggcagcctccactcagccccagcagtttgttacaaaggaaaaacacaaatgcaatattgcttcagaatgtagtatttctagaaatgctgaaactccagatttttttttcactaaaactcacatgaaatgttcacaatgaattcaattaagaaaataaaaacatcataggctgaaagtgacccacagtttaattctttttgtcttggggttaggtcagcactaacaataatttgacccaagatcatgtaaccttccttaacaaaggaaggttatttgtttgagtatatgatttatcagctttctcaagatctcttaaacataagaagagacttgtaaagtgaatctttttatatttctgagagtgggagtactgatttttcttagaaaaatttctttcctctctgtatatatactgctgtattatggcattttgatatcagagcaactttataagatttgatagcaaaatgatcactactcaagtttcaatgaccatttttattcctagaatctcaaataaaataccttcaggtctatatatgaatttttcctcttagggctaatattttctatacatttaaattaaatatataatcatgatgtttagaaaataagctgaccaatgaaaagttaaaagctatttggaaataaaatggtaatattaattgaggagtaattgagaacatgtatcctacttgaagaaatactgaagtatttaaaaataatagtcattaaaattattacaatacatgagaagataaaaatcctgaatattaaatagaaaaatgctaaaaggtatttttaatatgccattaattacttttttaagttgctgagttaaaaaacactggcaggaaaaaaaaagaaaataccaagatgctagaatggatggttgagggaaaaaaattataaatgctcttcttccttttctttttctggctgtgaccctatcaattaaaatttcttttctttttctcttttttttgagatggagtttcactcttgttgcccaggctggagtgcagtggcatgatcctggctcagtgcagcttccacctcctggattcaagtaattctcctgcctcagcctcccaagtagctgggattctcctgcctcagcctcctgagtagctggcatgtaccaccacaccaggctaattttatatttttagtagagacagggtccctccatgttggtgaggctggtcttgaactcccaacctcagktgatccacccaccttggcctcccaaagtgctgggattacaggtgtgagccactgcaccgggccaattaaaatttcatatgcata

SEQ ID NO: 10135 - DNA, 1542 bp, Homo sapiens
agtactaaagttctaaataacatttaaattagacagtgtttgaatttggaatctgcctcggctctgccaatgactaaccatttgatctagtcaactcattactttctctgtgcctcagttttctcctttctaaaattgggactgtggagattatcaaaggtctctaactcaataaagtgcatacaggagatatgtggagggtaaggattagggcaaacaggtcttctaagaggcagcctccactcagccccagcagtttgttacaaaggaaaaacacaaatgcaatattgcttcagaatgtagtatttctagaaatgctgaaactccagatttttttttcactaaaactcacatgaaatgttcacaatgaattcaattaagaaaataaaaacatcataggctgaaagtgacccacagtttaattctttttgtcttggggttaggtcagcactaacaataatttgacccaagatcatgtaaccttccttaacaaaggaaggttatttgtttgagtatatgatttatcagctttctcaagatctcttaaacataagaagagacttgtaaagtgaatctttttatatttctgagagtgggagtactgatttttcttagaaaaatttctttcctctctgtatatatactgctgtattatggcattttgatatcagagcaactttataagatttgatagcaaaatgatcactactcaagtttcaatgaccatttttattcctagaatctcaaataaaataccttcaggtctatatatgaatttttcctcttagggctaatattttctatacatttaaattaaatatataatcatgatgtttagaaaataagctgaccaatgaaaagttaaaagctatttggaaataaaatggtaatattaattgaggagtaattgagaacatgtatcctacttgaagaaatactgaagtatttaaaaataatagtcattaaaattattacaatacatgagaagataaaaatcctgaatattaaatagaaaaatgctaaaaggtatttttaatatgccattaattacttttttaagttgctgagttaaaaaacactggcaggaaaaaaaaagaaaataccaagatgctagaatggatggttgagggaaaaaaattataaatgctcttcttccttttctttttctggctgtgaccctatcaattaaaatttcttttctttttctcttttttttgagatggagtttcactcttgttgcccaggctggagtgcagtggcatgatcctggctcagtgcagcttccacctcctggattcaagtaattctcctgcctcagcctcccaagtagctgggattctcctgcctcagcctcctgagtagctggcatgtaccaccacaccaggctaattttatatttttagtagagacagggtccctccatgttggtgaggctggtcttgaactcccaacctcagttgatccacccaccttggcctcccaaagtgctgggattacaggtgtgagccactgcrccgggccaattaaaatttcatatgcata

SEQ ID NO: 10136 - DNA, 596 bp, Homo sapiens
gggaatatttgaagcaaattagggaacattaaagacactacagctgaggtccaaaaaagcagaaagtactgagacttgggctaattcaatcaaggaagactcttggaaactgggtggtcagagggccccgggagggtgagtgtaatcaygttgtgagggtgatctgcctgtaacacccatcaccccattgatttccagtattaatctggtagcaataactatcaatctatatgtacttacataggagcttatagttcacacactgcatcacatacattggcacattaaaaaacttttttgctatctattgttactgaatagctaacacttgatgattcaaagagtttttttaggttttattttgtttttaattgacacataatagttgtacttatttatggggtacagtgtgatttttaaaggcaaaataagatgaaaaattgaaaaagttatctgaataattcaaacccaatactaatgtcatttgcatcattctgtgttagcagacaactttcaacttccaaattaacatcagcatatttttttgtaattcaatctttcagtaattaactatagtaacttatctgcattgttcg

SEQ ID NO: 10137 - DNA, 543 bp, Homo sapiens
aagcaaacgctgaatatcttgtagaaagagattatgaatcagcttgtaaaatatggagtggaaatgaaatgctcttaactttacacaaaatgggtatcaccactgctacttttcccattttgcaggtaagatattttttctacctgtgaaacgtatttagtgaattagaagtgatttagtcgtgactaaatccagattaaatctagtgagtaacccagaattgttaaatatagcaatttaattttttaaaaattttattatctaaatttgataatctttaagtgatggcatgggtaaattgtgggtgaaaatatagcattatttagtttgaaggaaattagtctttaaagggattaattgctttgtttaaagctaaaaggagtcaatatttttaggttgtagacttacttagtcaattgtaaaagttaaaattttagaaaataaaaagaggagaaattcctatttygttcatcttaatttagaaattataaacctgatattcatggagagatcatgagtaggctttggaagactatgaaactt

SEQ ID NO: 10138 - DNA, 515 bp, Homo sapiens
cgcagcagcgggagagcgacgctggccccctggcgatcctggcgctgcgaccgcggtggtagcgcgaatgggaggtggagcggagccactgcgccgagggacgcttcaaaaactctttgagtttcagcccttcgcggatccgaggatgtgacagttgttcgagttaaagggtcttaaggcgatcggttgatccaaaagcagctgaatctttagaagacccacgcaggaggattccttgaggccaggagttcgagaccagcctgggccacaaagcaagatcactgtctctacaaaagaaattttacttgctgggcgcggtggctcacgcctgtaatctcagcactctggaaggccgaggcgggcggatcacgaggtcaggaaatcgagaccatcctggctaacacagkgaccccgtcttttctaaaaaatacaaaaaattagctgggcgtggtggcgggcgccggtagtcccagctactcgggaggctgaagcaggagaatggcgtgaacctggga

SEQ ID NO: 10139 - DNA, 522 bp, Homo sapiens
tcactgcagtctcaacctccacaagctcaggtgatccttctgcttcaatttttgtatttttagtagagatggggtttcaccatgtttcccaggctggtctagaactcctgggcttaaacaatcctcctgccttggcctctgaaagtactgggattgcaggtgtgagctactgtgcttagcttctatttgcttttttgtctatcctttaaataataaaaatggagagccaggcacagtggcttgcatctgtaatctcagtgatgcttgagaccacaagtttgagaccagcctgggcaacagagtgagatcccatttctacaaaaaaaaaaaaaaaaaaaagtcatgcagatgtcgtggagcacttgtagtcccagctactcaggaggctgaggtgggaggatctcttcaatgcaggagttcagagctgcagggagctatgattgcaccactgtgccccagcctgagagacagagtaagaccatgcctctaaaaataaaaatagtaataattmtaacaataata

SEQ ID NO: 10140 - DNA, 1534 bp, Homo sapiens
gagcagattccatcgttgtgtaatggacggcacatcacggcccgatgctgggatgggaggcttgggtctgttgaacgggcgccaggtcgggtccccagttcctatcaccttaggtgacgttccagcctcttccacttgtttgagtttcaggctccttgaatctccttcgatgtctgggagagctgctrtgttcaccccgttgaggccagctgacccccagcccaccccagcatcacggcttctgtgccctccatgcctggaccacctcgcgcccgcttgtttacgctctgattcctccatggtcttgctgtacccagtaacctagcacgtagtagcacctcaggaaacatgtgttgaattaggacttcccataaaaacagaaagcatgaaggggatccagatggtgtcaagcattagctcttctaagctgcgtcagagtcgtgccccggagcacgtctcctgcagcagcatcgccccgtcacggcaccgcctcacagctcccaccacgacacatgcaacgtgcaaagaggacacagggagctgcgacttccgtggctggtggcaaagaaatggggcagcactttcacagccatgccaggaacctaattcagccaacctggaaataactatcccagccacggccttgccagaagcccagctcagccaacctggagattgttatcccagccacagccttgccgagagcccaactcagccaacccagagatagctatcccagccacggacttgccagaagcccagctcagccaacctggagatcgttaccccagccatggccttgccaggaacctaactcagccaacccggagatagctatcccagccatggcttgccaggagcccaactcagccaacctggagatagctatcccagccatggcttgccaggagcccaactcagccaacctggaaattgttatcccagccacaagtgtgggtcccacttaaatggaggaaggatgagtcacaaaagcagggtaatgtggcctatcccgtgcctgtatcgctggcaggtgggaagcctaattcttaggccctaagcatagcccgccgcaccgattgcaggctggtcccaccgtgagcagacagcactcctggctccactccacagcttagccaggaggattcaggcaggtccaagcccattaccagacctcgctgtggaaggcggctgacattcgaacccactggatgggcatctaagtctctgacctttgctgatggtcggttcccagagctgcctcccctgccctcaccccaagagacctcctgacctgtgagtatctctagaactctccagaagtcagatgcagggagctgcccaggctcagtgagtggtccgttcattacaaggttctctccaccacagataacacaagcacagcctggctcagtgagtggtccattcattacaaggttctcttcaccacagataacacaagcacagccttagcacagagcattgggttggatcatgcatcacgttcatgcaataccgaagcattttcaagaca

SEQ ID NO: 10141 - DNA, 577 bp, Homo sapiens
gtaattcaggggcaattcagaggcatgaagtttcagacgagactgagagccatggagtttgctttaatctccggaacatggaggattaaccgtgtgaccttgggtgagtcccccccggctgtggctcttcatgtctgcagtgggttttagagaaaggcctgtctccctatstcacagagatttgggaacaagaaatgaaaactgatgcagaaaccactcaaagctccttggaataaagatactatctgaattgcaggagcctatgaagaaaacccctaatgcgaagttaaatcttaaaatcaaatccttccaggtgctctgtctcctgggctgcacccctctctcctgactcttttccatcttcctccaaaccaaagtcgctggggatgtgtgggtggctggtgggacagccctaatttgacctgtgagcatcctaaggacatgatgcccctaccccttcatggaactagaaataatacatacaaaaccctaaaacacgtgtccagaaacagcacggagctctgaaataatacatacaaaaccctaaaacaagcacgtatccagaaacaacagcaca

SEQ ID NO: 10142 - DNA, 560 bp, Homo sapiens
cagaggccgtcagctttgggcgagtgagagcttcagagggccctgagccccacggtgatcacgcattcaaaatgtttgctgcactcagctacataaatattacagggaaagagaaagtggagggcaggggagaggcagcctcaccacagccccggagaaccagagtgaggcaaatgtagttttccgggcctcctgacctgccagtctcggaatcccaaatccagagcagcggcagaggacaagsggccgcggggagtgaggggagcgtgctgaggtgggggttggaccgcaggaaccccaccaggctggccgggaacttgcctttcacctcctgcaggtgcctctgcctggctgagaagaagttcttttgtggaagacccacgctgggtgttcccatctggttctctcctggacggcttgacgttgctagctccagtagttaccctccactgcacagcgagttatcccgaaacttagcttaacacaaccatgttttatcttacagtttctgtgggcctggggtcctggtgtggaccagctgggggttccagctgcgtccc

SEQ ID NO: 10143 - DNA, 522 bp, Homo sapiens
cactccaaatttcactataggacctgccagcttgtatttttgtctcttgagtctacgccaaaaccaaaactggcaatcccaaccactcatcacttaaaaactargagattcttttttttttttttttctgagacagagtctcactctgtcgccaggctggagtgcagtggcgcaatctcagctcaccaccttctccgcctcccgggttcaagcgattctcctccctcagactcctgagtagctgggactacaggcgcaccaccacacccggctaatttgtgtgtgtgtgtgtgtgtgtgtgtgtgtgtgtgtgtgtgtgtgtatttttaatagagatggggtttcaccatattggccaggatgatattgatctcctgaccttgtgatctgcccacctcagcctctgaaagtgctgggattacaggcgtgagccaccgcacccggccgagattcattaatcttaaaggcttggtcaaagagcaagtattaaaacaggaatgtcactttcagtttcatcttgtg

SEQ ID NO: 10144 - DNA, 713 bp, Homo sapiens
tttatttgcggaagtctgataggaagctaattatagacatttaggacacaggaggaaggtctgagctgcaggcatatattgggaagaagttagaatataattagagatgaagatcccttgaagaaaggaagaggggaaggaaggaggaaagacaaaaagaaagagaaaagagataatagagctacgttaaaaatttttctacaacttaaagtatagaaaaatacaatttaattgaaattcagttttatttaaatctacaaaactatgttttccaaattaaaacctatggctaagtctgccttcctatcttgtcatagagctaacaaagggatacttatggtattatgttacatatctggaaaaaaacwtaatgtaaactgagtatactaaaaaaatagacttaacatattttactttttaattagcttgttaaataataatgctcatttcatccacatttctctcaaggaataccctttctggacaacagtaaatgcattttgttataatagaaagaaaaaaaaaacacctcttagaaagggaagatggttagtgttagaatgacagtctgattcaccacccaacaaaaaaaaaaatgatttttttctcatcaaaatacagtctttcattactcagtcatttactacaaggtatcttttttggtagagcacatgtcaaaaactcattaaaatgaatgaacaaatataacaaga

SEQ ID NO: 10145 - DNA, 473 bp, Homo sapiens
ctgcacttcacaaaaagcaacagtactgccacattggagaacaggtgagatttaaacctatctgtatcgagttgagtgatgagattatgttctaaartcactcccacagagagctgcaaaataggcatttcctgtggctctcaatcaccttatgggccagagatagactataatgtgtgtctgaactgggagttatgagccttgaaacaaaggtgtgatagggaaacagattgtattgctgcctatctagaataggaagccagtgcagcctcctcactcctcctgcagagacctcagcacatttcaccaggagctcacccccagtcacccttgttagggctggtgcctgcattctccattgggatattcatgggcaaaccaggggctccagctccctaaccaccacccccatgggacaggaagctcaggacacagggcatcccactgtccaacccttcacctgaaataacaga

SEQ ID NO: 10146 - DNA, 544 bp, Homo sapiens
gtttacattacaaagggttacatcacagtagtaaggacaaaagtaaatcagagctttttgtgagcaatatggctcagcctcaaaaatcttaacttctgaaaaagaattacagttatttggaattgtttgtgccaataactgtcttccataagtaaatatacacaaagaagaagtaaattattgtccacaaggttattctacaattttacaaagggaggtgtttaacataataaaaagttaacaagaatatgaaaaaagggaatgtgaataaaaaccagtagaaacracagacaatagaatctgacatgcagagaaactggacatgtaagatatcaggaagaaatacccaaataactaagggattttcttgttcaagtttataagagaaaagatggagaatttcagcagataaacgaaaagaattaaaaataattggaaattttagaattttaaaagcaactaattaagaaattggttgatgattgaatagagaattattctacttcttacaatagctgagtatgtgattcagatcatctctctg

SEQ ID NO: 10147 - DNA, 558 bp, Homo sapiens
ccctcccacctactctgatccctacacctccctgttcctgagcctgtagttctttctgaattcccaggttccctcatcctgaccattggtatctgtcgttttccacatagtgtctagttcctcctatgctggagaatctttcatccctaatataacatatttaaaattaggatctaactttagaggtaatttcatttagtcctctcatttcaaaaaactgagatccaacaaaacgcagttaatgagagagccagggctcaaacccccactgcctgattctaggttttggcacattccattatacgaggctgttttgtggttcatcttctccatctgagcacgcagtgaagggccacrtctgatagacacttgggcatcatgaaggttagtgagtcagcctgaaggacacttcactaacacttactgttagcaagggcatgtctagttcatagcttttcttatccaccattgttcttcattctgaaaagaaagcttagttgtctaattggtaatttctggaagaaataagaaagagtacccgtgtaaatataaataaat

SEQ ID NO: 10148 - DNA, 558 bp, Homo sapiens
ccctcccacctactctgatccctacacctccctgttcctgagcctgtagttctttctgaattcccaggttccctcatcctgaccattggtatctgtcgttttccacatagtgtctagttcctcctatgctggagaatctttcatccctaatataacatatttaaaattaggatctaactttagaggtaatttcatttagtcctctcatttcaaaaaactgagatccaacaaaacgcagttaatgagagagccagggctcaaacccccactgcctgattctaggttttggcacattccattatacgaggctgttttgtggttcatcttctccatctgagcacgcagtgaagggccacgtctgatagacacttgggcatcatgaaggttagtgagtcagcctgaaggacacttcactaacacttrctgttagcaagggcatgtctagttcatagcttttcttatccaccattgttcttcattctgaaaagaaagcttagttgtctaattggtaatttctggaagaaataagaaagagtacccgtgtaaatataaataaat

SEQ ID NO: 10149 - DNA, 558 bp, Homo sapiens
ccctcccacctactctgatccctacacctccctgttcctgagcctgtagttctttctgaattcccaggttccctcatcctgaccattggtatctgtcgttttccacatagtgtctagttcctcctatgctggagaatctttcatccctaatataacatatttaaaattaggatctaactttagaggtaatttcatttagtcctctcatttcaaaaaactgagatccaacaaaacgcagttaatgagagagccagggctcaaacccccactgcctgattctaggttttggcacattccattatacgaggctgttttgtggttcatcttctccatctgagcacgcagtgaagggccacgtctgatagacacttgggcatcatgaaggttagtgagtcagcctgaaggacacttcactaacacttactgttagcaagggcatgtctagttcatarcttttcttatccaccattgttcttcattctgaaaagaaagcttagttgtctaattggtaatttctggaagaaataagaaagagtacccgtgtaaatataaataaat

SEQ ID NO: 10150 - DNA, 558 bp, Homo sapiens
ccctcccacctactctgatccctacacctccctgttcctgagcctgtagttctttctgaattcccaggttccctcatcctgaccattggtatctgtcgttttccacatagtgtctagttcctcctatgctggagaatctttcatccctaatataacatatttaaaattaggatctaactttagaggtaatttcatttagtcctctcatttcaaaaaactgagatccaacaaaacgcagttaatgagagagccagggctcaaacccccactgcctgattctaggttttggcacattccattatacgaggctgttttgtggttcatcttctccatctgagcacgcagtgaagggccacgtctgatagacacttgggcatcatgaaggttagtgagtcagcctgaaggacacttcactaacacttactgttagcaagggcatgtctagttcatagcttttcttatccaccattgytcttcattctgaaaagaaagcttagttgtctaattggtaatttctggaagaaataagaaagagtacccgtgtaaatataaataaat

SEQ ID NO: 10151 - DNA, 599 bp, Homo sapiens
tgagaggccaaggcaggaggatctcttgaggccaggagttggagacaagcctaggcagaatagcaagacccccatctctgcaaaaaaattttaaaaaattattggctgggtgcagtggctcacgcctgtaatcccagcactttgggaggccgaggtgggtgggatcacctgaggtcaggagttcragaccagcctggccaacatggcaaaaccccatctctactaaaaatacaaaaattagctgggcgtggtggctgacgcctgtaatcccagctactcaggggactgaggcaggagaatcgcttgaccccaagaagcaaagactgcaatgagccaagatcatgccactgaactctagcctgggcaacagagcaagactccatctcaagaaaaaaaaaaaaaagaaaaaagaaacaaacaaaaacaaaaaaactgatgagccctgactacctgccagacaatgaacacacacacacacacacattctgttctcaagagtctgaccgtttctcagtacagaagagctcaaaagaacaatgtgagaagttactactacactgagacactactacgctgtgtgagaggcactattacaaggg

SEQ ID NO: 10152 - DNA, 1051 bp, Homo sapiens
tacagggacaaagacaactctatcctgccctcaagtaattcacatacaaagcagattatgataaggcctatgacacaggtgtaagcaaggctctgcaggcaatatagatgatgcaattaattctggatcagcgaaagcatgaagaggccgagttgtttgaatcttgatgtatgagtagaattttgtctggaggatctagaggggttccagttaatgtggtttgggcttattgtatgaacagcaaccctgttctaaaccaggggaaaataccattccttcctgtgtcctatttctgttcattacacatttgagtactttattgctataatctgtttacatgtctgtctcctccactggacagccagctccagaaggagcagacacagactccctttcatcgttattcccctgcagtacctgacagggcagcccttgacacaagttaaaatgctaccattcaacttccgtaactgtaaattagctattaggtcacttgcaacttccttcaatctctctaccacccaaccttgtatctgtaatgagacatagatagtcatttttaaaagaaaaaaaatctacaagtctaccacagtttcacacagagctgctaggaacagcacttaatgtatatgctccattgtgttcaattaattattcttaactaatgttgctgcttctatttattccatattattactccctatatcaacctttttattttacaaatcaaagttctgggggatattaacaagtgtgtcatgggagagtggaatgaacaatattctgaggtcaaatgaatttcaaaaatgctgggttaaaccaaartatttgaaggcaggtaatctcagggcattcaatatgctaatattaaattgaatttcaagaaaggagtggaatatttatggtttttccctatagcctcagagcatcctggccgcatttttctatggaaggtaaggaatactttctgggaaatgtattcaagttagcagcatttacgggttgaagaaaccaataaatctcagtgggatatcttcagtaaatataagca

SEQ ID NO: 10153 - DNA, 518 bp, Homo sapiens
tactacatacatagrtaatggacaaagtttcatattagttcattctactagttattatgcactaggtatatttctattgcattttattttcttaagctgatcatggcccactcaattaattccctaaccttctatcgtgttacaacctacattatgaaaaaccaaatatgcaaaagagttgaaatgtttaaagtgctacagagctcgaggacattattttaagaaaggtcagccacattcataactgtgctacactagggattcttaattgtgatagttgacaggaagagtattgcataaataaacaaaaacatagcactacaggatgaagggagattctgactaagctacataaacacagtctacactggtgaaattttaaccaaaggcagcattctctctatcacccttcagatccttcctctcagtactccccctaccctatttctcttcatctcccttctcctctttccaattcaacatacaaacccactcatcatggccttttccctcaagat

SEQ ID NO: 10154 - DNA, 2554 bp, Homo sapiens
agggccaggtctcacgggttcctgcttcgacatggtgttttgagtgtaggggctgctggaggcagggagggagagacttacacagagggacacagacacagaatgagagagacagacaggcaaagagacaaacggagacaaagacagaggcaaagagagatcaagggtctgcaatatttcaaggatgtttcactcttggagtttggtgggaaaacaagaatcagagtggaaaggccccttgggggaggaaacaggatctaaagatggctaagatttcactgatgaaggtcagtgagcttgctcttgaaaacaggcttgtcctggctgggcatggtggctcatgcctgyaatcccagcacttttggaggctgaggtgggagaactgcttgagcccaggagtttgagaccaggagaccagcctgggcaacacagcaagaccacacgtctctctaaaaaagaataaataaataaataaataagcagcttgtccttaacttgattcactattctctgctgcctttaattctgtttactttatttacttgcttaattaatctctttttttgactagtgcagaagtaaacttagccagggtccatatgtttggacaaaccatttataaagtgttgccattcatgaacagaacatgtgataaaattgcaaagaatttactacacaccacacacaaacccacccacccacacgcgtgcatgtgcacacatgcatgcccacagacacacaaatgagtacaagtaaaactcaagaaacctgaataagatcagtagattgtatcaatgtcaatatcctggttgtgatagtgtactattattctgatgttatactagatgttaccactgggggaacctgggtagggggtgcactggatctctctgtattatttcttacagctgcatacgaatctagaattatcttgaaataaaaagttttattaaaagagtgttgccggccaggcgcggtggctcacgcctgtaatcccagcactttgggaggccgaggcgggcggatcacgaggtcaggagatcgagaccatcctggctaaaacggtgaaaccccgtctctactaaaaatacaaaaaattagccgggcgtagtggcgggcgcctgtagtcccagctacttgggaggctgaggcaggagaatggtgtgaacccgggaggcggagcttgcagtgagccgagattgcgccactgcactccagcctgggcgacagagcgagactccgtctcaaaaaaaaaaaaaaaaaaaaaagagtgttgccaaagctctttccaaaattcaccttatagtgatttcaggcagcagactgtcatgtcttttgcaaatgggcaagtctggggcctcagctggtgatgagctgcccctctgcagatgctgtaagagcagatgaagggagacaccttggaaggtccctagcactcacagagtacctactgtgtgctgggcatcaccttgtcatcttcacaacaatctgcaaagtacatgctgatgcgcccccttagagatgaggaagctgaaggtgacgtgccttacccagcaaaggatggaattcagattccaattcaaggctctatgcccaaagccaaaataaagacgaactccaagcctcatcctcacattgccctcctgtcttcatatcttcatagaactgcttaaatgttagcatgcctgggagtcacctggggactgggttataatgcaggctctagttctgaggttctgcatgtctaataagctccaagacactactgaggccaccacactttgagcactaaggccccatcccaccacccagaatcaaagatggtcaatttttttttttttttgaggcaggatctcactctgtcactcaggctggagtacaatggcacgacaacagctcactgcagcctcgacctcctaggctcaagtgatcctcccacctcagcctcccaagtagctgcgactacaagcatgcaccaccacacctggctaatttttttttattttttgtaaaggtggggtctccctatgttgcccaggctggtcttgaactcctggactcaagtgatcctcccaccttgagatcccaaattgctaggtgagccaccacgactggccttattttttatttcttcaggttttgagttcacaagaaaacatttcaacagagtgtagattttaatccatttttaaatcataattcttatcattttattgtgttaaatgtaaattttcctcttttctaaaattaacagagctcatactctgtggaatttcagttcagtgagaaaagtgtcaattacataataaatggtgatggcataactacctatctgattggaagaaaataaaattagatgtctacccagtttattaaaaatgaatttcaagcctgggcaacatagcgagatcctgcttctgcaaaaaaaattaaaaattagctgaatgggatggcgtgtgcctacagtcccagctactcagaaggctgaggtaggaggattgcttgtacccaggagttcaaggctgcagtgagctatgatcccaccactgcaccc

SEQ ID NO: 10155 - DNA, 2554 bp, Homo sapiens
agggccaggtctcacgggttcctgcttcgacatggtgttttgagtgtaggggctgctggaggcagggagggagagacttacacagagggacacagacacagaatgagagagacagacaggcaaagagacaaacggagacaaagacagaggcaaagagagatcaagggtctgcaatatttcaaggatgtttcactcttggagtttggtgggaaaacaagaatcagagtggaaaggccccttgggggaggaaacaggatctaaagatggctaagatttcactgatgaaggtcagtgagcttgctcttgaaaacaggcttgtcctggctgggcatggtggctcatgcctgcaatcccagcacttttggaggctgaggtgggagaactgcttgagcccaggagtttgagaccaggagaccagcctgggcaacacagcaagaccacacgtctctcyaaaaaagaataaataaataaataaataagcagcttgtccttaacttgattcactattctctgctgcctttaattctgtttactttatttacttgcttaattaatctctttttttgactagtgcagaagtaaacttagccagggtccatatgtttggacaaaccatttataaagtgttgccattcatgaacagaacatgtgataaaattgcaaagaatttactacacaccacacacaaacccacccacccacacgcgtgcatgtgcacacatgcatgcccacagacacacaaatgagtacaagtaaaactcaagaaacctgaataagatcagtagattgtatcaatgtcaatatcctggttgtgatagtgtactattattctgatgttatactagatgttaccactgggggaacctgggtagggggtgcactggatctctctgtattatttcttacagctgcatacgaatctagaattatcttgaaataaaaagttttattaaaagagtgttgccggccaggcgcggtggctcacgcctgtaatcccagcactttgggaggccgaggcgggcggatcacgaggtcaggagatcgagaccatcctggctaaaacggtgaaaccccgtctctactaaaaatacaaaaaattagccgggcgtagtggcgggcgcctgtagtcccagctacttgggaggctgaggcaggagaatggtgtgaacccgggaggcggagcttgcagtgagccgagattgcgccactgcactccagcctgggcgacagagcgagactccgtctcaaaaaaaaaaaaaaaaaaaaaagagtgttgccaaagctctttccaaaattcaccttatagtgatttcaggcagcagactgtcatgtcttttgcaaatgggcaagtctggggcctcagctggtgatgagctgcccctctgcagatgctgtaagagcagatgaagggagacaccttggaaggtccctagcactcacagagtacctactgtgtgctgggcatcaccttgtcatcttcacaacaatctgcaaagtacatgctgatgcgcccccttagagatgaggaagctgaaggtgacgtgccttacccagcaaaggatggaattcagattccaattcaaggctctatgcccaaagccaaaataaagacgaactccaagcctcatcctcacattgccctcctgtcttcatatcttcatagaactgcttaaatgttagcatgcctgggagtcacctggggactgggttataatgcaggctctagttctgaggttctgcatgtctaataagctccaagacactactgaggccaccacactttgagcactaaggccccatcccaccacccagaatcaaagatggtcaatttttttttttttttgaggcaggatctcactctgtcactcaggctggagtacaatggcacgacaacagctcactgcagcctcgacctcctaggctcaagtgatcctcccacctcagcctcccaagtagctgcgactacaagcatgcaccaccacacctggctaatttttttttattttttgtaaaggtggggtctccctatgttgcccaggctggtcttgaactcctggactcaagtgatcctcccaccttgagatcccaaattgctaggtgagccaccacgactggccttattttttatttcttcaggttttgagttcacaagaaaacatttcaacagagtgtagattttaatccatttttaaatcataattcttatcattttattgtgttaaatgtaaattttcctcttttctaaaattaacagagctcatactctgtggaatttcagttcagtgagaaaagtgtcaattacataataaatggtgatggcataactacctatctgattggaagaaaataaaattagatgtctacccagtttattaaaaatgaatttcaagcctgggcaacatagcgagatcctgcttctgcaaaaaaaattaaaaattagctgaatgggatggcgtgtgcctacagtcccagctactcagaaggctgaggtaggaggattgcttgtacccaggagttcaaggctgcagtgagctatgatcccaccactgcaccc

SEQ ID NO: 10156 - DNA, 528 bp, Homo sapiens
tagaattctatgtcccatgaagtaatacattctttatttaaactatggcataaccaaaaaaaaaaatttagttatctgatatgttgaaaaatctgccatcttaagctggtgtcggctgtgtgatctcctgtgtacagatgaggtgttcagttgcaaggactgaggaggacaagccttgacaacctccatgtccactccagatccaccctgctccagcctaagtctcctgagtcttcattcaggaaggtatgagtgaggtcacagagggcacctatccatacacggcaggccacagcccccacaacaatggagaagacaatggggctgggtgaaaattatgtttggaaagggtttcttcttaatagaaaattcaaaattattatgtggcrctgtcaatgaccctttacacctgtgatagatggaatgacgcccactcaatctctttttgtcctctggccttccttatttcaggaccatgaggggaagcatcagaagtcttagcagctgtcaatatttcaagagccatga

SEQ ID NO: 10157 - DNA, 585 bp, Homo sapiens
ttttcaaaacccccacaatgaacacattttattcttggaggaaaaacaaattattttaaaatttagttttaagactgttaaattcagggagctaaayttgatttgttgtcatagaaaatcaatagtactgaacgttgtccaaattccgggagcatttctctccataaatattttcaaaatctatacaaagaaaaccttttttgcttgaaaattcaaggcttcagtaaaaggcccctaaaggaatcatattaataattcacaaagtcttagctttcttcttagatattaagaaaactatctaaaagtaataacaaaaaaagtgtacttaattttacccagcatgtaacaattgttcactgagatcttaaagagtttcataatagctgtgttttaagactattagaagacaaaaacgcaatataatatatgcatttttaattttctaaattatcagactgaattatttaggattaaaattcaccatgagttttacctagaaacttatatttagctatttctctaccacctataatttcaagtttaggatgaaatacaccatgtttgggtgaaagatgcacaaaagaa

SEQ ID NO: 10158 - DNA, 530 bp, Homo sapiens
atccacagcaagccagtcctctaaggctcaagaaagctgctgagtgtggaaagggtcttatctgtgtgtgctccacattccactgcagctgagggacactgaaagcactgtgctctgggttttatactctaggtggcactaggatcactgagaacaagcgctgcagtacaccctgttctgggaggaacaaggacacaatatggattattctggacatcacctctctatctcagaaagttgcattcycggttattctgagaactacaagttgcagggagagctggattggccaagatcacccaaggacctatcctcctgtgggtgcattcccagagaaccagttcaggttaggggaatcataagactagttgtattccaagaaacacattttgggaaatgctagattaaatagtaacaaagttaatacaggacaggcacacattttatttgcagtatgctttattgtgcttcacagatactgcatgttcttttgtttgttttttttgcaaattaatcgtttgtggcaaccc

SEQ ID NO: 10159 - DNA, 578 bp, Homo sapiens
aggagaatagcgtgaagctgggaggcggagcttgcagtgagccgagatcgygccactgcactccagcctgggcgatggagcgagactccgtctcaaaaaacaaaaaaacaaaaaacaaaaaaaaaaccagtcttttataagacagtatagtattggcacaagaatagacaaatcaatgaaacagaaacggatccagatttatgaaatttactcaactaattttcctgaagtcatgcttcatcttgaatgtatacttggtttttctaaaaatgattttctattcttttattttctttctgtgtttaggtataagtgtgctagcggagtgtctagattgtcctgaattgaaagcaactgcagatgactttattcatcagcactttactgaagtttacaaaactgatgaatttcttcaacttgatgtcaagcgagtaacacatcttctcaaccaggacactctgactgtgagagcagaggatcaggtgactaaattgccttctcacatttttcttaataaaaatgtctttattggtttcttaaaactcatgtttggacacatgacaagggaaagagtcata

SEQ ID NO: 10160 - DNA, 635 bp, Homo sapiens
cacagaattttagagttcatgaatggcaattcctttaattatatagaaatccagagagatgattgtactccaggtaacatagaactatacaacaagagctaaagccacagactagatgtctccattccctgacccctatttacagtctctctgattgcatacttaacctgaagaaaaaactccagatttagcaaatatttgtttatagtctcaaaatttttttcttacaagctttgcctttccagaccatctaacattaaatacatattcaattaaaaaaaatttttattgaaaagatataaaccctgcctgtctaggatagcagtatatttgtttacttaacattaatacccccmaaaaaagcagaataatgtttaagagggtaaaactctgttaaaagatgcacttacagcctctgaaattagaaatattttaagaagaaaaattacttattctagattgttaacaggaagataatcagttttgcagatagattagccaactcacatctagccttcagttatgagaaagtcctttgaaaccatcagtaaaatactgaaagaatgtgataggcctgatgatgtagtaagaaaaagaacacagaagactgtggccaagatgacttttcttacgtg

SEQ ID NO: 10161 - DNA, 551 bp, Homo sapiens
ggcatttgtgatggcagtgccaagcatctagaaggtactcgcctgctttaatttcttgagatattacaaaataaaatattacagttattgccttattcacagtatacaaaggtattttatcatacaaactgttgatcctacagggactggtcatggaggagagtctatttttggcctaggattgtatggtgatcaagcaagcttttttgagacagaaaacgtcccaagaattaagcacaagaagaagggcacaatgtccatggtgaataatgacagtgatcaacatggatctcagtttcttatcactacaggagaaaatctagattaccttgatggtaccatacagtatttggtgaggtgwcagaaggcattgacataattaagaaaataaatgagacctttgttgacaaggactttgtaccatatcaggatatcaggataaattatatagtgattttagatggtccattttgatgacattcctgatttattaatccctgatcaatcaccagaacctacaagggaacaattaaagagtggtagagttgaca

SEQ ID NO: 10162 - DNA, 593 bp, Homo sapiens
aatgttgtactagatgagcaggcagaagactccaagtcaagtcactcacacacaagtaaaaatcacaagaagaaaacccatcactgctctgaagtaaaagaagatgaagactacataccaatcaaaaatattaatccagataagtatgagaaagtttggagtttggtcactacgaagaagaagaaagctgttgggagaaatgaaagagtaaaaagagagaccgaactcagaactgaagtcgtagctgatcgcragagaggaatggccattatagtaatagtcacaaatccaaataccagacatctttatgaaagagaaaggagtaaaaagagactgaagcagaaatccaaagaaaaatccaaagataaagaaaaatctaagtacagatgaaagatgaagaggcagaattgagtggctaacatattcacccttgtctaacttagagtgccaggaaagcaggtgttcagattttgtgtcagagcttgttatttttttcatactaggattatcaccctttagattattaatactgattatatagggcactgaaagaactcaacattttctttgtatacttttttacactaatgtta

SEQ ID NO: 10163 - DNA, 551 bp, Homo sapiens
tgggctccagcaatcctcccattttagcctctggagtatccaggaccacaggcrtgtgccaccacacctggctaattttttaatttttatagagacgtggtctccctatgttacccagactggtcttgaactcctgggctcaaggaatcctctcaccttgggctcccaaactgctggtattacagagccaccagtgctgaccctgaatctgttatacttagagaaactaaaccatccatgcccaaaatttggtgggctcttcaagttaaaaattctgatgtttttatagtccctcctaaagactgtggtaatactgagctccaagtaaggagaatgtgaattatatattaatttgaacttcatcgtaatgtaaaaactttaaactgtaaagcagattttgaggtggttatttgctctacgcaatatctaacttatgtgcaggtaaaatgacccaatttacaaaatgttatttacgcaaactttttaggaagtcagttacacaaggttgaggttcatctgaggttgtaaaaacatattaactgaatagtgta

SEQ ID NO: 10164 - DNA, 551 bp, Homo sapiens
tgggctccagcaatcctcccattttagcctctggagtatccaggaccacaggcatgtgccaccacacctggctaattttttaatttttatagagacgtggtctccctatgttacccagactggtcttgaactcctgggctcaaggaatcctctcaccttgggctcccaaactgctggtattacagagccaccagtgctgaccctgaatctgttatacttagagaaactaaaccatccatgcccaaaatttggtgggctcttcaagttaaaaattctgatgtttttatagtccctcctaaagactgtggtaatactgagctccaagtaaggagaatgtgaattatatattaatttgaacttcatcgtaatgtaaaaactttaaactgtaaagcagattttgaggtggttatttgctctacrcaatatctaacttatgtgcaggtaaaatgacccaatttacaaaatgttatttacgcaaactttttaggaagtcagttacacaaggttgaggttcatctgaggttgtaaaaacatattaactgaatagtgta

SEQ ID NO: 10165 - DNA, 1318 bp, Homo sapiens
gcgctccatgggaggcaaagaaaaagagaaaacaacgagggacacaaagaatgtactattccatggagaaaggggactgctattgagttctgaagaatatattatgaccatctgttttctgtcttcttcgtggtgagaaacttgaagatagggagcatatcttactcatctttgtgttcctggaacctactgttaggtgctcaacacggacaagtgttaacggaatgaatgagatgatgtgtccgctgtggcactgggagagataaaatgttgtacctttctcagaagagcaaccctagacagatatttgggtagcacacggaattttggcttcctgtgatattaatacctttgttgtgattttatgctctttaataattaattcagttaggtattcttatggtgagagtgtttgctgtttgccccgcatttcaggtattttccaaagtgtgctggtttggggtagaggagagaagaaaaagttgacattggctatattctataaagctaatttcctaacccttgattgccctaacacagacgtcagaaaagcacatgtggattaaagaaaatgttttagtaaaaactatgagcaaaaccattaaaggtttagttacattgcttttggaacatacgtagactcttagtagcttttattccctcatgtggacactgtgtttttaacaatcagactaataatactatactttattgccttttacaaaatcatgaatgaaataataatactttgtgacatttcagaattttcttagtttaattttgtaagcaacaccatattttatgctttcaaactttttcttttatatttgacatctggacagaatctctcattactgagacagatcccaaattcctctcaaaycatttttctaagagtaatatatttaaacccccattagacatagaatttattataaatgaaagtgcccaatatcatgttttcaggaaaatacatacaaatcaatagaaaactcaagaaaattatagaaatggaagagattttcagatattatttggtttgtttccatttctcctttcagctttacatatggcacagcagagagaaatatggatcaatgctttcgttcactggtaatgaatttgaacattataaaatttgtatttattcaacatttattgaaaactgtgcagagagctggggatttacatttttctgtgtaaaggggtccatcgtatagttctctgaaggcacacatgtaggttgtcttgacttgggcatgttatggtagaagtggggcagaggtgctcaaatgaaggaatggccatttacagcagg

SEQ ID NO: 10166 - DNA, 563 bp, Homo sapiens
atccttttctctaggacattactaagcatgttcttgagggtgcctgtactgtgctcaaaacagtttgggggaaagatgctttgcagcgtaataggtttatttactgcaggattgatttaatatgccaaggtgcactttcagcctcctagaggggatgcagtgcagcatttcaaaaccacttaaatacaaaaggcctcttggagaagcattgaggaagaccttctctatagtacagagtttgaggaattctggaggggggaaatgacaaaattctgattctcaaataaattcttttaaataaacaaattcactaaaaggaaagtcatgtgagacaaagtgtttttctcaagcaattatctggaacagggacttcacttggagttctcattttagctcccgtttctccgttttcawgtaggtaaaatgggtctcaaaacttcaggaatgatattttttttttaaaaagagtatgtaaagctgaaggttttgcaatgtagtatttctttactttttagactcaattcatgttgttccttgttatctcctcttgcaagcagcacaga

SEQ ID NO: 10167 - DNA, 676 bp, Homo sapiens
tgcactccagcctgggcaacagagcaaggctccgcctcaaaaaaaaaaaaaaagaaaaaaaggaagaaaatcttcccaagtagatagtggtgacggtggcacaaccttgtgattatgctagaagccactgatctgtacactttaaaacgataaattatgtgtggcatgtgrattctcaattctcaataataagaattctgtctggaaagcctctactaagagaattggcttgtacccagcgcacattcttagtcattgggacatctaggcagtggtcttcaaacctagccactgcgtagaaccacctggagagtttttaatatccatgttcccaggccacagccacaaccagttaaatcagtaaacctaggttggacctaaaccttagtatcttttaaagttccctacgtgattccgatgtgtagtcaagttttagaactactgatctagcccatggtttgaaccttcctgatggtaccgactgtgccctgtcttgaatcttatttttttcatttattttattttatttttttaagagaggagtcttgctgtgtcactcagttggaatgcagtggcgtgattatagctcactgcagcctcaaatgcctgggctcaagcaatcctcccaccacagcctcttgagtagctgggactacaggcgagtgccacacaccca

SEQ ID NO: 10168 - DNA, 526 bp, Homo sapiens
aatagaaaggataaatagcaaaatgtatccagctaaaatatagtgcgacctagaatatggggtttgggtgctaccacaagacaaaaggaaggaatagagagatagaaatttttttttttttaagttaggggatgtaaagaagagaamtgtaagttttcacgtttttatgataaggttttataaaggaaagaaaggacataaatggaggtgaaaatatattttatgaaataaggggtgagagttaattagattagaggataatgaaagacctcagattgaaaaatattacagtgtgctgaaaaattagataaggaaaatccacaatatagacaacttacagtgaatgataagaataaaaatggcaataataatatattaaaattttttcagaaaaaaacagatcatttaatatttagcttctccacagcaatacaaggaaaactaaaggggcaatattttcaaagtgttaaacaaaattaaacttaaaatttttaataagataaatttaaaaaataaagctattttc

SEQ ID NO: 10169 - DNA, 526 bp, Homo sapiens
aatagaaaggataaatagcaaaatgtatccagctaaaatatagtgcgacctagaatatggggtttgggtgctaccacaagacaaaaggaaggaatagagagatagaaatttttttttttttaagttaggggatgtaaagaagagaactgtaagttttcacgtttttatgataaggttttataaaggaaagaaaggacataaatggaggtgaaaatatattttatgaaataaggggtgagagttaattagattagaggataatgaaagacctcagattgaaaaatattacagtgtgctgaaaaattagataaggaaaatccacaatatagacaacttacagtgaatgataagaataaaaatggcaataataatatattaaaattttttcagaaaaaaacagatcatttaatatttagcttctccacagcaatacaaggaaaactaaaggggcaatattttcaaagtgttaaacaaaattaaacttaaaatttttaataagataaatttaaaaamtaaagctattttc

SEQ ID NO: 10170 - DNA, 547 bp, Homo sapiens
tgctaagtgaaagaggaagcatccactaatgctacacattatttaactttgtatatatgaagtgtccagaactgcaatcttttaatccagatagtagatgaatgattgtctacacctagggttgaaggtggggaatggggaataattgctaatgagtatggggttttgtatggagtgatgaaactgttctaaaattgtattgcggtgatggtttcacaactctgtgattacacaaaaatccgagaattgtgtactttaaatgggtgagttttatggtacacaaattatctcaataaagctgttaaaaaagcaagtgatcattttatcctgcctctactgtttgggatcagatttggtcatttaatgtaatattttctatcctttccagtaaataccaattgcaaatgtgatatscatgtcatcggtatcatcatcctaatcattgatacatactgtaagttaaaataaagttaatggcaaagttattttgtatgctattaatatccttcctctatggtattcatgattgctttttgtccatgttcat

SEQ ID NO: 10171 - DNA, 518 bp, Homo sapiens
gccagaaggcaatgaaatgaaatcttaaaatttctgataaaaaccttgcaatcttaaaattcaatacccagaaattgatgttttaaaagagcatgaagatattttcaracaaacaaaaaacaaaaccaatagctgccattggattggcggtaaagtcattcagtaaaggaaatgttaaatgtgtttaggcagaaagaaaatcatccaaagaatgaataaaagtgaataaaatggctagaaatgtttgtaaatacaaacaaatattgactgttccaaacaacaatgagctagccaggctagactgttgagcttgggcttccagcacagtgaccctgcccccgcttgaaatctgtaggtgggcacagctgtgttcccctagaaaacatccagagatgtgtggcctcccacccctactgctcctaatcaggcaagacttaccaacatgggaagtccctgagcagaagagtagcccccattctcagaacactgagagggttgagatacccatgttcttgggc

SEQ ID NO: 10172 - DNA, 642 bp, Homo sapiens
ccaaacaaggtcctttaagtttctctaagtcttaagtcctattaacacttttattttgcagcttcaatttgttgaagaaactggaatttctgtcctatggaatttcccacattctagatttagcatattaasgtgcttttcaatctcctgtgtgtttttacttattagatgtagaggcttgattagattcaggctcaatttcatttgtcttaggcagtaattcatcataattcaacatggtgtgttgggttgttgctattgcaacacaacagaagcatgtctcattgttcctttttcagtaatactaagattgaacatcaggttcagatgttatgaacctaagccaccaaataaatgcttctcatcaacttttcatttcatgcttttagcagctggatctgttccttcattagaggtggcaaaatggcgatttcctaatcttattcctctcatatttacctatgattcttacatgaagaactttcccttatcagggtaacttgatacacaaagaagttgggataaatgattcatttttcccatgaacaattttcaaaatattgaattggtgccctagtaacctccaaaagtgaccaatgagtttttaaaatagcattatgatctcatggccgttttatatat

SEQ ID NO: 10173 - DNA, 642 bp, Homo sapiens
ccaaacaaggtcctttaagtttctctaagtcttaagtcctattaacacttttattttgcagcttcaatttgttgaagaaactggaatttctgtcctatggaatttcccacattctagatttagcatattaaggtgcttttcaatctcctgtgtgtttttacttattagatgtagaggcttgattagattcaggctcaatttcatttgtcttaggcagtaattcatcataattcaacatggtgtgttgggttgttgctattgcaacacaacagaagcatgtctcattgttcctttttcagtaatactaagattgaacatcaggttcagatkttatgaacctaagccaccaaataaatgcttctcatcaacttttcatttcatgcttttagcagctggatctgttccttcattagaggtggcaaaatggcgatttcctaatcttattcctctcatatttacctatgattcttacatgaagaactttcccttatcagggtaacttgatacacaaagaagttgggataaatgattcatttttcccatgaacaattttcaaaatattgaattggtgccctagtaacctccaaaagtgaccaatgagtttttaaaatagcattatgatctcatggccgttttatatat

SEQ ID NO: 10174 - DNA, 581 bp, Homo sapiens
caccaggtaacttgggtccaactctagtaatctcctagaaaaagcaaatagtcacaattttatagaccaaaactcttttttacctttaatgttgtggaactaaatactttaaacactcccaaaaattgcctaaaaatgaaattaaatttgaaatcatttatatttaactatcaactgaacagctgcatttttgatataccccttaattatttatgcatattcatatacagtaaacaagacactgaagaaacaggagtttctgccttttaaccaaagaaataatatcatgttttgtatccacatagtggcagcaaagaagaaacctaacattcattcagaatattaatggagcacaagccctcaagttgggggaaataccactagtttagraaaggggctgctttggcttaagtgccaagccaaaccacttcagcattttgaacacatacgtctgtgtattcccataaaaaccatctgtataactattagagaactcactccaccgtagcttactttcatgtctgacactaaagcagagaccaattcacattcctatttgcatccctagaaccaaaaggaag

SEQ ID NO: 10175 - DNA, 651 bp, Homo sapiens
ctgcctcttaccttctcccaccgtgccccatcccctccactctgtccgcagcaccctcaccttcccttctcgtccctccttcactcgcacaggcccctccagcagcagctgtctggtgtgctcagatgcaacccccagcatgggggacgtcaggtccagggtggagaatgggcgcaggttctgagggacacagaggggaggggtcagggcgctcggcagtctgcctggacttcctggccaagggcggctcctggttctgccaccaacacctttctgtttgtatccttcccccatgggctagagaaagcctcccagggcctcctttttgctcttctgacctgtaccccttggactgtcaccaccaggtaggaatgatggacacccttgtagcacccaagtacggggtgttctggccttgcagccctccccttcaccagtatccctgggaccttgcttttcctgggtcccttccctttgccctctcaccttctccacctcatcactgggtggctccagcacctcgtagggcccgatgcgttgtgctgcagccgccaagctctcttgctcttcgccctggcggacctgcccattgatrtgtcgcaggaatgactccacggcttcaatctaggtggggttgggggtgtgggagga

SEQ ID NO: 10176 - DNA, 588 bp, Homo sapiens
cttgcctcagcctctgatttctcaagaactcattataaggcaatttctttttgagatggagtctagctcttgtagtccaagctggagtgcagtgccacgatctcagctcactgcaacctctacctaccaggttcaagcaattcttctgcctcagcctcccgagtagctgggattacaggcttccacaaccacgtccaggtaatttttgtatttttagtaragactgagtttcaccatgttggccagtctggtcgtgaactcctgacctcaggtgatctacccgcctcagcctcacaaagtgttgggattacagctgtgagccaccatgcccagctgatagggcaacgtcttaagaggctggatagcttctcttaattgctatggaaataatgctttttaaaatcaatgtgtaatagtttgattatttatgacaacacaagagaatggttggatcaaggcagtcaacatattttaaagccagggagcttgtatggcagcttttattattttaaagtttttttttaaaggaatattttttatttacgtgtaacctatagaaaagtgcacatgttataactacagactttg

SEQ ID NO: 10177 - DNA, 588 bp, Homo sapiens
cttgcctcagcctctgatttctcaagaactcattataaggcaatttctttttgagatggagtctagctcttgtagtccaagctggagtgcagtgccacgatctcagctcactgcaacctctacctaccaggttcaagcaattcttctgcctcagcctcccgagtagctgggattacaggcttccacaaccacgtccaggtaatttttgtatttttagtagagactgagtttcaccatgttggccagtctggtcgtgaactcctgacctcaggtgatctacccgcctcagcctcacaaagtgttgggattacagctgtgagccaccatgcccagctgatagggcaacgtcttaagaggctggatagcttctcttaattgctatggaaataatgctttttaaaatcaatgtgtaatagtttgattatttaygacaacacaagagaatggttggatcaaggcagtcaacatattttaaagccagggagcttgtatggcagcttttattattttaaagtttttttttaaaggaatattttttatttacgtgtaacctatagaaaagtgcacatgttataactacagactttg

SEQ ID NO: 10178 - DNA, 536 bp, Homo sapiens
tgacatatacagcttttatcattcattttactactctgcctcactaattcttaagtacctttaattgttttttcaattttctagatatttagtgtcaacatctgcaaactaaacattgttgtagctttaaaatatatgttaataatttaacaattgctttagctttctggtttatcaagaatcttcaaagccatgttaagtaagagtggtactggtgttcattctrtatttttcccttgatttttaaaagaaatatataattgcttttttctttccaatgatatttgctgttaagtaatggtcatgttcttctactcttatcttacctagagattttttaggaatagcctcacatttttaggcaatttaccaaatgcctttccatcatcacctcccatgaatataaacagatggttttctcctttaatttaataaaataaatgatcttaagccattcattcatgctttcatccaatattaaaaatattggtcattatcttgaatatagtagaatctatcgagttgtaatttagaat

SEQ ID NO: 10179 - DNA, 536 bp, Homo sapiens
tgacatatacagcttttatcattcattttactactctgcctcactaattcttaagtacctttaattgttttttcaattttctagatatttagtgtcaacatctgcaaactaaacattgttgtagctttaaaatatatgttaataatttaacaattgctttagctttctggtttatcaagaatcttcaaagccatgttaagtaagagtggtactggtgttcattctgtatttttcccttgatttttaaaagaaatatataattgcttttttctttccaatgatatttgctgttaagtaatggtcatgttcttctastcttatcttacctagagattttttaggaatagcctcacatttttaggcaatttaccaaatgcctttccatcatcacctcccatgaatataaacagatggttttctcctttaatttaataaaataaatgatcttaagccattcattcatgctttcatccaatattaaaaatattggtcattatcttgaatatagtagaatctatcgagttgtaatttagaat

SEQ ID NO: 10180 - DNA, 509 bp, Homo sapiens
atgggggacatctaattcaaacttggggggtcaaggaagccttcccagaggaggtaagccctgagctgtgaaacataggataagcaagagtcatctccatcaggtaggaggtaggggcctcagaccacctgtccagggttgaaagagagacagaacatgccagtgtggctgccggggaaggagcatctaacataagatgaggatggagaggtgggcaggggtcagcccaaccaagagcaatggagagccatggaagaatttttaacagaaaattagatstgtaatttagaataatcacagtgagtactgttgaattgctggctggatacaataagagaatagtaatagctaatatttatacaacactatgtgacagactctaggcactttataggcattagaacattagattacttaatccatatgttttgctaatatatatattaacaatagtagtagttaatatatatgattactaacaatagtaattatgtgagagagatagacca

SEQ ID NO: 10181 - DNA, 574 bp, Homo sapiens
tggttttagttctgtttgcgtttttaaagttaattatttacgagtaattctcayattaaattccttgtccagcttgtttattaattattaagtagaatactgtactgatttcttggcagtagcagggaaggaatatatagaacatacagaagccctgcacttcagaaatgttaagtcagtgtctttttttttttttttttttttttttttaaagagagagtctcactctgttgcccagcctggagtgcagaggtgtgatctcagctcactgcaacctctgcctcccgggttcaagcaattctgctgcctcagccttccgagtagctgggattacaagtgcatgcctccatgcccagctaatttttgtattttttgtagtgacggggtttctccctgttggccaggctggtctcgaactcctgacctcaagtgatccacccgcctcagcctcccaaagtgctgggagtacaggcgtgagctaccacacctggctaagtcagtgtctcattatctttccattggaataaatagctttactcttgtcaatttgtgcttagaatagtgttttgcatgg

SEQ ID NO: 10182 - DNA, 532 bp, Homo sapiens
tttggctctgatcttcccagagctggtgcttagagagagtcctgatgggccacatgattcatagcacccatggaaattgggcggtctaagggagtcactattcagcttcaatcaggaattgccatatgggaacattattgccagatctttcagttttcaagaggacctgggaacctgaatttatatwaaaaaaagctcagttttaatatattgaaaataaattcttcttattttcaaaacactgagccaaagaaatatgaccatgagccaaatccaaagcatgactgataatttgcgaccagtcctaaagggggaaaagaatgcatgatcttcagagaagccaacaaagtaaactgtttaagaaaatattgtatgtgcaataaatatgacctgaagaaaatataccaaaatgaactttgtttatacttttattataatagactgtattgatgtttgtttctttacatctggttccctaaggagtcagtttctcaaaggaagggatggtttctcttatagctagcatctgatc

SEQ ID NO: 10183 - DNA, 679 bp, Homo sapiens
taatagrccacagtatggtgtaaacataacttttataggcactgagaaaacagaaaaatttatgtggctcactttattgctgtggtctgaactgaacctgcaatatccgaggtatgcctgtgtgttgcttcccaatctatgggatgtgtgtgactcctaggaaggagagatgattttagactgtaaaggaatacagcctaaatagtgtcgaatcacagagcaagacagttacccctccttgcaactttctttaaatcctcttgatctcaggcaagaagaaaggctcagcctgggatgagagtggctttaacacccctctaacctgttaatctcccccacctttaaacggcagagaacaagatccaggcttagaaccctcagctgaagtaggacccatgtagaatctaatttaatgttgctttgttcccactgcattgatttttatgaggtatcttttatgcacggcagtcctgcttcttttccatcaaagggatgaatataacatttccttttaaaataagtattttaataatattgaactgattttaaaatttaaataatattttaaaataaatatgtcaattaatagtattttaatcattaaaaatataatgagaatctttgagtaccattcatgagtcttatatacggcagaaggtatgaagctagcacaaggatg

SEQ ID NO: 10184 - DNA, 507 bp, Homo sapiens
ccagctgtccctcaggagctgaaaagcacactgacctcaaacagaccttccatttaaaatcagtgagagaggccgggtgtggtggctcacacctgtgatctcagcactttgggaggctgaaacaggcagatcacctcagcccaggagttcaagaccagcctgggcaacacggcaaaactccgtctctacaaaaaaatacaaatatcagccagaggctgaggaggaaggatggcttgagctcaggaggcggaggttgcagcgagccgagatcataccactgcactccagcctgggcgtcagacccagaccctgttccaaaaaattaaaaaaccaaaaaaaaaaaaaamaaaaacccacacaattaaaaatagaaaaattaagtccgcaagagcacataggtgaagaggaagcggtggctgatctgggcggaagctggaggtcactgggagtcaggaatgcagcactcatcagtacgaaacccggaaacagctcctagaaggccctctg

SEQ ID NO: 10185 - DNA, 507 bp, Homo sapiens
ccagctgtccctcaggagctgaaaagcacactgacctcaaacagaccttccatttaaaatcagtgagagaggccgggtgtggtggctcacacctgtgatctcagcactttgggaggctgaaacaggcagatcacctcagcccaggagttcaagaccagcctgggcaacacggcaaaactccgtctctacaaaaaaatacaaatatcagccagaggctgaggaggaaggatggcttgagctcaggaggcggaggttgcagcgagccgagatcataccactgcactccagcctgggcgtcagacccagaccctgttccaaaaaattaaaaaaccaaaaaaaaaaaaaacaaaaacccacacaattaaaaatagaaaaattaagtccgcaagagcacataggtgaagaggaagcggtggctgatctgggcggaagctggaggtcactgggagtcaggaatgcagcactcatcagtacgaaacccggaaacagctcctrgaaggccctctg

SEQ ID NO: 10186 - DNA, 1016 bp, Homo sapiens
atcctcctcctcctccttcctcagtcctaacacacaatcccaacaccgattctcctcacctcccacgtgaagagctctcttctatgtctaattacttcctgctccattgctactttctttttccagggccaatcctctctcaacaagatcagtgctaccaattccacccttgtcccctttccaacatttccgcccacctctcaccatccctgcaatccgttttgcacactctaggaagagtaatcctcctaaagattcattcaagagatattataaagatgagaattacagatgaarataatagcaatgagggaaataaagaggttgttgagaccaggagtgatgagggggttggcatatgctttaactgggaagactgacagctgcccctctaaagggtgacatttgagatgagctctgggatgaccaatggggaagagcattgaggactagggagtggacattgcaaaggccctgagacaatgcatatcttatttagaaatgggggtgggcatgtgcacactcccactccaccagatgatccagccaggagatggctgtgtgtgctctgactctcttgccctaacaagatggaacaccaagaccaaagtgacgggctacaattgcaaccctgctcaacaacctccatcggtgctgcttccagcatgctgacaggctagtgcagaaagatgcccagcgagctgttgggaaggattgtggcaccaggatcgcagggtctgggtcaccatctctctgttgggcccagatgcatgaaaccccagcctccgtgagaggtgaaaggtgagcacggaggggaagcactggcagctgtgcccgagtgtgcggcagatggagctcaaaggctgcagggagctgaggcgaggacaaacatctgctgctggcagccttcctcccaaacaacagaagctctggtagctgagcctccagcctggtcttgataaatgagccatcatcttaggcgggcacagggtggagcccctctttctaaacataca

SEQ ID NO: 10187 - DNA, 1016 bp, Homo sapiens
atcctcctcctcctccttcctcagtcctaacacacaatcccaacaccgattctcctcacctcccacgtgaagagctctcttctatgtctaattacttcctgctccattgctactttctttttccagggccaatcctctctcaacaagatcagtgctaccaattccacccttgtcccctttccaacatttccgcccacctctcaccatccctgcaatccgttttgcacactctaggaagagtaatcctcctaaagattcattcaagagatattataaagatgagaattacagatgaagataatagcaatgagggaaataaagaggttgttgagaccaggagtgatgagggggttggcatatgctttaactgggaagactgacagctgcccctctaaagggtgacatttgagatgagctctgggatgaccaatggggaagagcattgaggactagggagtggacattgcaaaggccctgagacaatgcatatcttatttagaaatgggggtgggcaygtgcacactcccactccaccagatgatccagccaggagatggctgtgtgtgctctgactctcttgccctaacaagatggaacaccaagaccaaagtgacgggctacaattgcaaccctgctcaacaacctccatcggtgctgcttccagcatgctgacaggctagtgcagaaagatgcccagcgagctgttgggaaggattgtggcaccaggatcgcagggtctgggtcaccatctctctgttgggcccagatgcatgaaaccccagcctccgtgagaggtgaaaggtgagcacggaggggaagcactggcagctgtgcccgagtgtgcggcagatggagctcaaaggctgcagggagctgaggcgaggacaaacatctgctgctggcagccttcctcccaaacaacagaagctctggtagctgagcctccagcctggtcttgataaatgagccatcatcttaggcgggcacagggtggagcccctctttctaaacataca

SEQ ID NO: 10188 - DNA, 1016 bp, Homo sapiens
atcctcctcctcctccttcctcagtcctaacacacaatcccaacaccgattctcctcacctcccacgtgaagagctctcttctatgtctaattacttcctgctccattgctactttctttttccagggccaatcctctctcaacaagatcagtgctaccaattccacccttgtcccctttccaacatttccgcccacctctcaccatccctgcaatccgttttgcacactctaggaagagtaatcctcctaaagattcattcaagagatattataaagatgagaattacagatgaagataatagcaatgagggaaataaagaggttgttgagaccaggagtgatgagggggttggcatatgctttaactgggaagactgacagctgcccctctaaagggtgacatttgagatgagctctgggatgaccaatggggaagagcattgaggactagggagtggacattgcaaaggccctgagacaatgcatatcttatttagaaatgggggtgggcatgtgcacactcccactccaccagatgatccagccaggagatggctgtgtgtgctctgactctcttgccctaacaagatggaacaccaagaccaaagtgacgggctacaattgcaaccctgctcaacaacctccatcggtgctgcttccagcatgctgacaggctastgcagaaagatgcccagcgagctgttgggaaggattgtggcaccaggatcgcagggtctgggtcaccatctctctgttgggcccagatgcatgaaaccccagcctccgtgagaggtgaaaggtgagcacggaggggaagcactggcagctgtgcccgagtgtgcggcagatggagctcaaaggctgcagggagctgaggcgaggacaaacatctgctgctggcagccttcctcccaaacaacagaagctctggtagctgagcctccagcctggtcttgataaatgagccatcatcttaggcgggcacagggtggagcccctctttctaaacataca

SEQ ID NO: 10189 - DNA, 1016 bp, Homo sapiens
atcctcctcctcctccttcctcagtcctaacacacaatcccaacaccgattctcctcacctcccacgtgaagagctctcttctatgtctaattacttcctgctccattgctactttctttttccagggccaatcctctctcaacaagatcagtgctaccaattccacccttgtcccctttccaacatttccgcccacctctcaccatccctgcaatccgttttgcacactctaggaagagtaatcctcctaaagattcattcaagagatattataaagatgagaattacagatgaagataatagcaatgagggaaataaagaggttgttgagaccaggagtgatgagggggttggcatatgctttaactgggaagactgacagctgcccctctaaagggtgacatttgagatgagctctgggatgaccaatggggaagagcattgaggactagggagtggacattgcaaaggccctgagacaatgcatatcttatttagaaatgggggtgggcatgtgcacactcccactccaccagatgatccagccaggagatggctgtgtgtgctctgactctcttgccctaacaagatggaacaccaagaccaaagtgacgggctacaattgcaaccctgctcaacaacctccatcggtgctgcttccagcatgctgacaggctagtgcagaaagatgcccagcragctgttgggaaggattgtggcaccaggatcgcagggtctgggtcaccatctctctgttgggcccagatgcatgaaaccccagcctccgtgagaggtgaaaggtgagcacggaggggaagcactggcagctgtgcccgagtgtgcggcagatggagctcaaaggctgcagggagctgaggcgaggacaaacatctgctgctggcagccttcctcccaaacaacagaagctctggtagctgagcctccagcctggtcttgataaatgagccatcatcttaggcgggcacagggtggagcccctctttctaaacataca

SEQ ID NO: 10190 - DNA, 482 bp, Homo sapiens
atccagggattcaaaaaaaccagctacttctcggccaagctccctgaagcagaggttgctctctgctggcctcgtcacctgctcctggcccagcccagccaagcagcaggactcacagctctggcccatcccctatctctgggcttcctcagagagggtgtcctacagtggtcagcatgcccgcgtggggacaggagcagcttctctgaacacatgtccccagtttctcawtgcccctgcagagatggaaccttccaggtgaaagctctctttcccctcagagtgatactaagtagcaatttaaaaacaccatgacaagcccagagaaagagcagaaggcaggagaattctttagtttttattttttagagacagggtctcgccctgtcacccaggctagggtgcagtagcgtgatcacagctcactgcagcctcaaattcctgggctcaagtgatcctcccacttcagcctcccatgtagc

SEQ ID NO: 10191 - DNA, 518 bp, Homo sapiens
aagtatgatactatataatattacagcaacattgtgttgctgtaatggtagacacagtatacatttgttaaaatccatagaatgtacagcaccaagaatgcaacaatgtaaagtatagactttgggtgctaacgatgcatcaatatgggttcatacagttttatgacataatttaaagaaacataaaaaagtatttggttataatagtgataataacagtaaaagataaaaccagttataatatagaatgttaactgtaagtaaaattgtattaaatataggataatatgaatatatagaacaatatttagaggaaaagagaacatcatttataccgaatttttaagggaaatcagtagaggaaatttcaggacatgagacttctgttgtgcatgctgctttgtcagcttcctttaagaccctgaattayttatctacactgggcaagggatgtcgagtactgcctctcattctttattgcacttcagaattatctgggtggtctaagaacagcaatg

SEQ ID NO: 10192 - DNA, 571 bp, Homo sapiens
cctattgttctcctgaatacatacagagttaaaaagatttttcaaacctatttcattgactcactcacaaatgccaccagaaagaaacattttcagtcagtattattattccatcctatatgattttctctaactatgcatggaattacatagacggttcaatataaaacatggcagattttggccctatgtaatgctcctaaaaagcaccatgtcacatatatttttaaagatttttaacataaaaagtaacagtttgcacatcataaaacataaaatcactccagtgtgcactggttagcaattcctttacacagttattctgtactgtagcatacaacacttaacacatttcccttcacagtattttttcactaggaaaatgaattgatataaagaagctcagaatacagcttcaggaatccagattattagcataacttaactgagaaaaacataagtgaagataaattatttytttctctcagggcatggtaaaacttctacatataatttggcttttctcaaaacacagcaacacttcatgttacccataactcaaatatcagtt

SEQ ID NO: 10193 - DNA, 551 bp, Homo sapiens
gagccttctaaaatttggatttatatttaaattctgttctagtgatgaaatttcattcctaagctacaaaccagcaagataaaccaggcaaatcattttgcttcattttttcttttcatgctcccatccttagacttaaaataatcccagcagaaaatgataaaccctatttcctagtattctatcattagacagactgttctaataagtaatattttaagaaacaaaataaccaagagttcattgattaaacaaacaactagtttgttcaacaaatagttatwgaatgctatttactatactcatatttttggcaatacagcaataaacaaatacacacaatcctttacctcatgcacattatcatctaaagggggagagaaacatttattacataaacttaaatatatctatctacattcaaaaagtatttatcaagctcctttacggcataggagttgggtaaaaatggtgcacaaaatacatatgaccaatgttttcatggagtctaatgaagaagactgtattagcctattttcatgctgctgata

SEQ ID NO: 10194 - DNA, 637 bp, Homo sapiens
ccagtttaaccgcccttatctttaattcttaatctgataacacaaagaagcaagacaggaaagattcattctgggagaggcagcagccacatatagtaccctgggagcacgggctgtggtgctgttggcaacagtctttagcaacctgtttcagggtttgattctggctgtggtcctgtgtgcccagcccccctgcattcctgccttttctccagcctggctctttagactcactgtcctttttgcatcctacccagtgtccttcaaaacaaaatcttcttatcaatgggagaaaatatttgcaaatgtacatctgacaaggggctaatacacaaaacatacacagaactcaaaaaactcaagagcataaaaacaacccaatttaaaaatggacaaaggggctgggtgcagtggctcacatctataatcccagccctttgggaggccaaggcaggcaggtcacttaagccaggaattcaagaccagcctaggcaacatggcgaaaccccgtctctacaaaaaaatacaaaaaattagccgggcgtggtggcacgtgcatgtagtcccagctactggggaggctgaggtggraggatcatctacacccagggggtagtggctgcagtgagccgtgatc

SEQ ID NO: 10195 - DNA, 580 bp, Homo sapiens
gcattttacagtatgtacattatatcttgatgcaaataaataataaatatttttaaataattgactgattaaacaaaactaataactatgtataatgcagtttataacataagtaaaagaaaaatacatgrcaataataaatgttaattgtcccaaaagtgacttacaaattaattgcatgcctattcaaaattgcagcaggatatttttgtataaattgataaacctatcctaaatctcatatagaaatgcaaatgacctgaagagcgaaaacagctttgaaaaggaagaacaaatgtgcaggatccataagaatataaaaatcttaaagactgaaaatacccactgttgtcaagggtacagaataagagaaactgtcttatggtgttgttaggagtctaaattgcataccctatgagccagcaattccactcctagctatatactaacaggaatacaggcacatgtgtacaaggagacacctactaaagtgttcctatcatagcatcacacatcacaataaccaaaacctggaaacaatccaaatgttcatcagtagtagaacagatcaactgttgtc

SEQ ID NO: 10196 - DNA, 580 bp, Homo sapiens
gcattttacagtatgtacattatatcttgatgcaaataaataataaatatttttaaataattgactgattaaacaaaactaataactatgtataatgcagtttataacataagtaaaagaaaaatacatggcaataataaatgttaattgtcccaaaagtgacttacaaattaattgcatgcctattcaaaattgcagcaggatatttttgtataaattgataaacctatcctaaatctcatatagaaatgcaaatgacctgaagagcgaaaacagctttgaaaaggaakaacaaatgtgcaggatccataagaatataaaaatcttaaagactgaaaatacccactgttgtcaagggtacagaataagagaaactgtcttatggtgttgttaggagtctaaattgcataccctatgagccagcaattccactcctagctatatactaacaggaatacaggcacatgtgtacaaggagacacctactaaagtgttcctatcatagcatcacacatcacaataaccaaaacctggaaacaatccaaatgttcatcagtagtagaacagatcaactgttgtc

SEQ ID NO: 10197 - DNA, 614 bp, Homo sapiens
aaaaattaggttgtcaagaaacctgttcataatacacctcagtaggtcaagagaaatgtaattttgatgtagacataatttgatttctcactctgctctgttgttttcacgctttctggtcttaatcaaaattgtcttttatttgaattcttatgaatgagtcttcttgtagactgcatggtccctccatcgtattttagaaactaaaaaataattaccaaatgtcratgtggttggtactatagatagcaagagatgaaataaaaccagtgggaagccagacaagtaaggaacagatgcaaagtgtggactctaaggggtcttggatactgaatattcaattataagatctcagagtcttgttacatgcagcttgattcagaaacaagagaagcacaagggaagctactcagcaaaactaattcatctcagccatgtgaatgtattcgtctcctatgaccctcacattgtgcaagacagtagctccaaaagaactaaaggaattagggcacgtcatcattttctagtttaattagattttttatagatattaattgaaaacagtataatatagtgtgctcaaattaatatagcctgcattgtatacaagtgtc

SEQ ID NO: 10198 - DNA, 555 bp, Homo sapiens
ggtggaatagcattatgacattaagttgcattctgatttaatgttgatgcaccttatggtacactgtcatgtttcattgtactatctaagatctccataaagtctctcttttaagtgcatttttgagactctttctataagcaaaaatgatagcttaagaagtttggctcttaaaaycatgacaccactgtctgcatttacctctcttaaaggcattaggccacatcagaaccttaaaacaccccatcttcttaaacaaagtcacggagtcgactgactgcttctatagagatgtcatttgagctttgctaagcagtagttccattaaccatgaaaagctcaggaaaactggaataatgaggaaagaaatcagagcaagaccataaaagcccagttcatttcaaggagaaagcagtaaccatccctccccactacattttaaatatcacaacgaatttacgtaacaaactaaacaattcactgaaagcacactttatgtacaactttaatttcttcctactgtgttcattaccaagctgttttctttctttaggg

SEQ ID NO: 10199 - DNA, 519 bp, Homo sapiens
accagtagcacagtagaccacaaaattattcagtaaaaccttggtgccagttcctgtaaattcaaacaatatgaaaaatgtgcattttgaaaaatcaaggctggtatgtttttcacrtacataattatttgaatcattgctcacagcaatgtggcagaacatggcatctttggtgatttcttccaatctttgtctttaaaaaatatatatacatctctagttatctcaaggctttgccccaccatttactgaaattgtttactacattgtatctcctctcccagattgttaaattacaaatattatgaaagctattattaggaatatatgttacacaacaaatcaatggataacttaattggaaaaggtcctcaaatgtttcctataacctgggtacacagaaggaacatttatccttctggatcatgttcaaatagaaaagccattgtactgggttttacagcctttcttgggcatatgtgcaaatgagaagctaaatattttggaagcctattgtgt

SEQ ID NO: 10200 - DNA, 519 bp, Homo sapiens
accagtagcacagtagaccacaaaattattcagtaaaaccttggtgccagttcctgtaaattcaaacaatatgaaaaatgtgcattttgaaaaatcaaggctggtatgtttttcacatacataattatttgaatcattgctcacrgcaatgtggcagaacatggcatctttggtgatttcttccaatctttgtctttaaaaaatatatatacatctctagttatctcaaggctttgccccaccatttactgaaattgtttactacattgtatctcctctcccagattgttaaattacaaatattatgaaagctattattaggaatatatgttacacaacaaatcaatggataacttaattggaaaaggtcctcaaatgtttcctataacctgggtacacagaaggaacatttatccttctggatcatgttcaaatagaaaagccattgtactgggttttacagcctttcttgggcatatgtgcaaatgagaagctaaatattttggaagcctattgtgt

SEQ ID NO: 10201 - DNA, 519 bp, Homo sapiens
accagtagcacagtagaccacaaaattattcagtaaaaccttggtgccagttcctgtaaattcaaacaatatgaaaaatgtgcattttgaaaaatcaaggctggtatgtttttcacatacataattatttgaatcattgctcacagcaatgtggcagaacatggcatctttggtgatttcttccaatctttgtctttaaaaaatatatatacatctctagttatctcaaggctytgccccaccatttactgaaattgtttactacattgtatctcctctcccagattgttaaattacaaatattatgaaagctattattaggaatatatgttacacaacaaatcaatggataacttaattggaaaaggtcctcaaatgtttcctataacctgggtacacagaaggaacatttatccttctggatcatgttcaaatagaaaagccattgtactgggttttacagcctttcttgggcatatgtgcaaatgagaagctaaatattttggaagcctattgtgt

SEQ ID NO: 10202 - DNA, 555 bp, Homo sapiens
agtatcattttctgctaattttcctaataatttgcactaatattttagatagactttaaaacaaaggagaacaactcatcttaactcaagtaatttgyaacaacacttactcagaacctaggacatttcttttttttttttttttcataagaaaagtcatttattgagtttaaaaagtgctacacaaagtaaagcacctgcagcacaggaacttccctgagaggcctctgcagtgcctggagcagtgagaaggaaaaggaggagaggaggggcgctgggcaagggtagctgggtgtgagctgaatttcctgtctcctcactctaaccaatactgttgcttagtttaacgtcttatttgctccggcaaggaaaataaatatttcaattagtaaagtttctactggcaacagaggttgctatttcaaggaggaggagaaaatagtatgtggaaaaaatagttttcctcattttttattttctgtgtatatacatgtaagtacacacctgtaggtagctaaaatatataagtaaatatgatatcaaattattatccaa

SEQ ID NO: 10203 - DNA, 546 bp, Homo sapiens
ccccctaaaaattaaatttaaaaaagagagaaagcattccctaaagaaagcacttccttcgaggcacctttggactgtgcctttgacatctgtgccattgtgagtgtccacagggtgctggggcagtcttcagctggttgttaatttatcaatgtcagggccagtgtctgtcacttcactcagtccctagcccagaatcgtgaccagcagatgcctaatcrgttctagcatgataaatatgccaggcctctcactaaaccctccttgtccttccttcattcattcattcactccacatgcatcaaatgcctgatttctatagtgagaatataaaatcaggcccaggcaatttaatccttttctgaagcgtggatgtgttgaaactactaactttaactcatttatacagcgagaatctaataacaaacaagacctggtttctgcctgcattgtgctcattttcagccctttcctagattaggctcagccagcgtcctccccggaatactctacctgcagctcacttaactccagcagctatggcta

SEQ ID NO: 10204 - DNA, 546 bp, Homo sapiens
ccccctaaaaattaaatttaaaaaagagagaaagcattccctaaagaaagcacttccttcgaggcacctttggactgtgcctttgacatctgtgccattgtgagtgtccacagggtgctggggcagtcttcagctggttgttaatttatcaatgtcagggccagtgtctgtcacttcactcagtccctagcccagaatcgtgaccagcagatgcctaatcggttctagcatgataaatatgccaggcctctcactaaaccctccttgtccttccttcattcattcattcactccacatgcatcaaatgcctgatttctatagtragaatataaaatcaggcccaggcaatttaatccttttctgaagcgtggatgtgttgaaactactaactttaactcatttatacagcgagaatctaataacaaacaagacctggtttctgcctgcattgtgctcattttcagccctttcctagattaggctcagccagcgtcctccccggaatactctacctgcagctcacttaactccagcagctatggcta

SEQ ID NO: 10205 - DNA, 546 bp, Homo sapiens
ccccctaaaaattaaatttaaaaaagagagaaagcattccctaaagaaagcacttccttcgaggcacctttggactgtgcctttgacatctgtgccattgtgagtgtccacagggtgctggggcagtcttcagctggttgttaatttatcaatgtcagggccagtgtctgtcacttcactcagtccctagcccagaatcgtgaccagcagatgcctaatcggttctagcatgataaatatgccaggcctctcactaaaccctccttgtccttccttcattcattcattcactccacatgcatcaaatgcctgatttctatagtgagaatataaaatcaggcccaggcaatttaatccttttctgaagcgtggatgtgttgaaactactaactttaactcatttatacagygagaatctaataacaaacaagacctggtttctgcctgcattgtgctcattttcagccctttcctagattaggctcagccagcgtcctccccggaatactctacctgcagctcacttaactccagcagctatggcta

SEQ ID NO: 10206 - DNA, 546 bp, Homo sapiens
ccccctaaaaattaaatttaaaaaagagagaaagcattccctaaagaaagcacttccttcgaggcacctttggactgtgcctttgacatctgtgccattgtgagtgtccacagggtgctggggcagtcttcagctggttgttaatttatcaatgtcagggccagtgtctgtcacttcactcagtccctagcccagaatcgtgaccagcagatgcctaatcggttctagcatgataaatatgccaggcctctcactaaaccctccttgtccttccttcattcattcattcactccacatgcatcaaatgcctgatttctatagtgagaatataaaatcaggcccaggcaatttaatccttttctgaagcgtggatgtgttgaaactactaactttaactcatttatacagcgagaatctaataacaaacaagacctggtttctgcctgcattgtgctcattttcagycctttcctagattaggctcagccagcgtcctccccggaatactctacctgcagctcacttaactccagcagctatggcta

SEQ ID NO: 10207 - DNA, 546 bp, Homo sapiens
ccccctaaaaattaaatttaaaaaagagagaaagcattccctaaagaaagcacttccttcgaggcacctttggactgtgcctttgacatctgtgccattgtgagtgtccacagggtgctggggcagtcttcagctggttgttaatttatcaatgtcagggccagtgtctgtcacttcactcagtccctagcccagaatcgtgaccagcagatgcctaatcggttctagcatgataaatatgccaggcctctcactaaaccctccttgtccttccttcattcattcattcactccacatgcatcaaatgcctgatttctatagtgagaatataaaatcaggcccaggcaatttaatccttttctgaagcgtggatgtgttgaaactactaactttaactcatttatacagcgagaatctaataacaaacaagacctggtttctgcctgcattgtgctcattttcagccctttcctagattaggctcagccrgcgtcctccccggaatactctacctgcagctcacttaactccagcagctatggcta

SEQ ID NO: 10208 - DNA, 383 bp, Homo sapiens
ctggcagtacctgcgtctgagctcaggacttcagaccaagatggaagtcccttagaccaataacataaaaatcactttttaactcaggtgctgtgggtagggagcaagggcagctatactgtcctttcagaagctctcctgggctgtggaaagtgcccacgagcctggcagatcacggaggaaggaggcagaagttccaggcccagaacctgttgrggaagcagagaagaggcaatgaggatggcaggccagatcaatgcccctcaaccttcagcatgcccaggatgcacctggccacgttactcatgcacgtgcctgtagcacgtgctcgagcagagcctgagattctgcatttccagcaagttcctgggtggtttgtggat

SEQ ID NO: 10209 - DNA, 495 bp, Homo sapiens
tgtggcccccaaggcagggtgcacagctcagcagctgatcatcggctggatttccaaccctcaggagcactggagctgccgccctgctcaggcacacacgctgtcagacacaggctctcagcatacacatgcatgcatgcatgagtgtatacacacagtaatgcatactagttaaacactcacatcattttaattattacttttggctaggatttattgaagcataatttactaaagcttctccagaagccactaactccaaaagacagaatcacaatacagggcatatgctgtgggcctctgggttgggccaagaatttcagactgggcgccatgaccaagggcaatctgcagtcactcaagagtacttggaagattgatttagcagtggtgcttggaacagactgggcsaggaagggctagaagcagggagagtcatttaaaagttatagtattgatttaggatcagggtgaaaaggaactgaagtggagcaa

SEQ ID NO: 10210 - DNA, 524 bp, Homo sapiens
atgaatgaatgaatgaatgaataaatgaatgaatgggctaagctgataaatgtagagcaactgataggatttcctatttggaaaccccacagctttttacccttttttttcccatcaaggtcttagttctttgggaattaacaccattctgtcttccctaacaataccatgaggtcttttggggaaggaggtaaatgttggacataataaattacaccaaaccctattgaacatcaatcatgttttagacactgcattagaactggaaacacaaaagtggataaaacatgcccttggaggattcccaatctagaaggggaggtggatcaatagccaattcattacaataagtactatgccagctgtccagaccagacagctgcactaccaacagcagagagagcctaattcaggctgggaactttaggccragagggttgcatatggcaaggcacagagataagaaagagcagggcatgttcaagaaactgaaaatggttttagagaacaggctacaggagaga

SEQ ID NO: 10211 - DNA, 612 bp, Homo sapiens
tcaatcttcagttttgaagttcttctcaccccaatttaaatcagcctcccatagcctatattggaggtccattgtgggactgagtttgctataataaagagagtattgggttagaagactacaaacagagattatttaggctggggtgaaagaatcttctaacttgaggaagatccaatattggctggtcctgtgtgaagcaactccatccttctgttactctttaggtaccaccttcatctcttcttggaaaccaccatcattaccatataatcatcctgtagaagccagwtcaaaattagaccaggtgtgggacaggagagaaaaggtgtgtggggggagtaatcattatctgtttgattttctgtattgcccctccaataaaccagagaccacactgagttgagtactattccctcattatatttaataatatctttctctgcctgcattaatttcctggatgaccttatttagtcccatggtcttgaatcccagtctgaatgatgatgactaccaaatctgtattgacagtcatgaccctcctctgaactccaaactatgtgttcaatcatctgcttagaaggttcttttggatgcttaatgagcaat

SEQ ID NO: 10212 - DNA, 586 bp, Homo sapiens
ttttctttactaagtatctgtttagatcatttgcacttaaaaacatcaggttgggccgggcgcggtggctcacacctataatcccagcactttgggaggccaagacgggtgaatcacgaggtcaggagttcgagaccagcctggccaacatggccataacattgaacaaaatatttattatttctttatttaagaaatattggctgggcgcagtggctcatgcctgtaatcccagaactttgggaggccaaggcgggtgaatcacaaggtcaggagttcgagaccagtctggccaacatggtgaaatcccgtctctactaaaaatataaaaaattagttgggcatggtggcaggcgcctgtaatcccagctactcaggaggccaaggcaggagaattgcttgaatctgggaggcagaagttgcagtgagccgagatcatgccactgcactccagcccaggcgacagtgmgagactccgtctcaaaataaataaataaataaaaatcaggtcatttttcttactgagttgtaagagtcctttttatattctggatacaagtcctttatcagatacatacttttccaa

SEQ ID NO: 10213 - DNA, 401 bp, Homo sapiens
tttttttagggaatatatttttcagcctgtcacagaggcaaactgctttgctaagaattgggaactgaatttcctattagaaatttagaatacttctcaaggaagatgagggagaatggatgagacaaaaagtaaatatctactaatatggctatattatgaatttgctatgggtacatttatataaatccatggaacaccaaagtcatgtacatcaaactgataaggatggatgctgagcaaaatgtagggatgatagttcttagatttcagaaatgctaaatggaaactttaatcttattaataggtattttatttttcatttattgtttatttatttatttttgagatggagtttcactcttgtcgcccaggctggactgcaatggcgmaatctccac

SEQ ID NO: 10214 - DNA, 552 bp, Homo sapiens
ctcaagtttagaacactgctttaaaaatgttccttgaggccgagtgcggtggctcatgcctgtaatcccagcatgttgggaggctgaggcgggtggatcacctgaggtaaggagtttgagaacagcctggccaacatggtgaaacaccatctctactgaaacaaacaaacaaacaaacaaacaaaacaaaaattagctgggcatggtggtgcgtgcctgtagtcccagctactcgggaggctgaggcaggaggatcattgaacccaggaagcagaggttgcagggaggtgagattgtgccatggcaccccagcctgtgcaacagcgagactccatctccaaaaaaacaaaacaaaacaaaaacaaacaaaaaaaggttcttgaacacagaaatcatttgaatgaagacataatattgtggggttttttgaaatttgtaaaaaagttaatttgtaaactaatttttcttccattatactttgaagattttaagktttaataatgtttattttgttgagagcaggatttattttcctactgattttactctcca

SEQ ID NO: 10215 - DNA, 528 bp, Homo sapiens
tcagggaaaaaagccaccatgtggtattaacttctaggaatcttttttgaccgcaacttattcatcttcctctgagtgccatatgccaaataacaaattatagatctccttacatcttgatttattcacatggatatctatgaaaagctccaattttggaggaagatacagaaatttacaaatagaaagtcacataccaaaatagttaaataacatgaaaagatgtttgacatcattagccattggggaggtcaaattaaaaccrcaatgagatataactacacacttatcagaatggctaaagttaaaaatagtgaaataccaaatgctggggaggatgaaaagaaatcagattactcacacatttctggtagaaatgtaaaatggtacagctactctggaaaacagattggcagtttcttataaaattcaacatgaagttatcatatgattcagtgattgtactcctgggcatttatcccagagaaataaaaacatatgttcatataaaaaacctatacagaaatg

SEQ ID NO: 10216 - DNA, 556 bp, Homo sapiens
tggagactatgttatactgtatatacacacataaccacgcaggcatccacctccatatacactgcagaaaccttccacttaaaacgtacttccctatgatggtgaagttgttggagtttcaattacgcggtaaacttaaaacagttattctctaaaaggcttgtgctcacataagcgtacaatatgtatttaaaaagtgcagtttgtaacctcgttgttgaattagcaagcgggttccgtatttaaattgttcatttcattctagaacaataataacgctaagtaataaagattctgtgaaacattttaattcatcggatgtgttgctttatcttaggctgctactgagtttcaattaagagtgtatggaaaaacraataaactatcagactgtctcttttttttttttttttttttttgtatttttaaaaactaagatttttcggctaactactaagctagttattaaaaagccacagccatcctgggctccttgcaagaacaatgcggcaaatgatcgaggtggtgccggccaggctgatgactttatatgctg

SEQ ID NO: 10217 - DNA, 571 bp, Homo sapiens
caacaattttaaaaattgatgacaaatcttaagatgtgaaaattacatatttaggtctcttattcattaaacatctccagctggagcctttgagagtcaggactctaagtccatcaaaccaatcataaaaggaaaaagtattaataacgtgtattgagtgctcacatacgctagatagctttagggacactgtcttatttaatccctagggcatctcaactttagtgggttctttgaagtcagaggctgtgctgktttttattcatctaggtattgccagtccgtgaaatagttcctaacacagagtagaagcctcttgttactatcaaaggcctctgtgttcgatattctgcactcagaaccatacatatcctatttaatcatctcaagaattctgtgagttaagaattgccgcattttgtagcagggaaaaccatagggaaagtaaaggagcttgctgcaaatcacaccttcagtagtcaatggcgatgaaacttgaggacctgattcaattcgccaaacgatctccattcactgaaagagaaaacggaagcaaagagaggtgaagtaa

SEQ ID NO: 10218 - DNA, 604 bp, Homo sapiens
atgggcctgccccatcacggacatgcagtctcccatgggggcctgctcctgtcatgtatggcatggaagagcatagaaagctgtttgcacacttgtaggtgacaaagagaaaatagaaaggggctgagagtcacatgctcagccactgcacccaaactcacccatcaagkagctcacgcttcctcccttgaggggaagggaaaagggggatacaggaaaccaaggagctaggagtgttttctgaaaaagtccctacacacaaaaatggaagactagggaatgtatcctccctgcatgtaacagagaagtaaatgataacaacagatgtcaactacaagtagaaaatgagacttaacttttaaatacagagagtaaaaaatatgcatccaaatggttagagtgctcaacatttttagttataaaaagatatttctctcacctgccatggagaccccataataccctagagataatatagttcacagtggttgccattatctgatttagcattttcctacagatgaaggataaacaagtgccttagttccagctgctataataaagtagtatagactgggtgacttataaagaacagaaatttccc

SEQ ID NO: 10219 - DNA, 541 bp, Homo sapiens
tcatagctaaagactgggaaaacacaactcaagaaaggatggctgtgggcaaagccaagcagcctggtttagcaccccctagcggaagaaggggrcaatgtttatggtccctgcttctggttagctaaggaacttaaccgctggaattccgtgcaaggtcatttctctaagcaggaatcaactcaagctctgatcctccctaatagcataactatttgccacgcatctagccaagagttagttaatgctgcttccacagggaaagaggccgtggtcagaccagcctttaatgagcatcccagggcctggctagacttggagggagggagcatattgagatattagtcgaagctccaaaacaataggtgcctgcgccctctaagtagctcatgtgttacagatctgacaagtctcattgatttaaatagctggagcactgcttggattttaatctccttcacccttataccaaggaggtcgctgtttaaatgcttttacttaataatgtaaacacctgtcacacgccaggggcaaagctatt

SEQ ID NO: 10220 - DNA, 511 bp, Homo sapiens
ctatcacgaggactgcaagagggaagtccactccatgattcaatcacctcccaccaggcccctcccctgacacatgrggattacaatttgagatgagatttaggtggggacacggagccaaaccatatcagtctttcaatctgtaactcaaataatttatgaccctttcctgcccctcacccccacactagaccttgggaaagccatgtgcaggaagatatgccacttgcagcaagggttttctcattttatgtagagtagtacaaaagataaataagacaacatattccgggatttggggtctttttcttcacttaagaatcagagaccagtgcatgctactgatgtaactcataaaaaataatgggtgagacaagaggccagaggtccctgcacatgcaatcaataaggccagaagaaaggagaaatccccatgacaggcaaatccttgatgagcttctctgttccaaccactgggacacagtacagtaaatggcaaatgaatagggga

SEQ ID NO: 10221 - DNA, 517 bp, Homo sapiens
aattttttgctgtgtgagatccaagaacctgctcttggggtctgggacaagaccccttttcaggtgatatttcctctggtgactgccagaccttaatgaggtgagacctcctttctggtaacaataccaactttcttcctttgtccttccttttactttcacatttctatawtgtaatatttagggtgtgtgtgtgtgtgtgtgtgtgcgtgtgtgtgtaagtggtatatggttgtgcttttaaagactttatacctgatctgacaatcattgcttttctattgtttatttctttaagttgaactataacttacatataagtgaggaaagaaaagaacttttatctgaggaaaaagaacttttgcgtgaggaatgtgaaccctttcaaaatattaggagaaaagaggcatgaaaatgagacagcaatcatgttctattctgccctttcgagctatgtactaatctcttgaaactgcttgcaattgccacaagtattaattagcctaataatgtctca

SEQ ID NO: 10222 - DNA, 580 bp, Homo sapiens
ttgcagacattaaggaaaggaagcattccaaacacaagagtgtggtgggtaaggccaaagtctgctggaaatagctgtaaggtccgtgtggaaatgcagggatcattcggggagaaaatggtatattcatagtgcactggattgagaaggaatgcacgacacatgaagaaatagaggcagccagttcagttagagaagcctaaataggtaggagatgtacatgattaaggaatattttattaaaataaggggaaatgagcccacrcaaatacaaaaaagaaggagaaagaaactgaagttagtgttagggaaagctggtgagccaagtccctggggagcttcctccctgaactcctgcacctccctagagagagttgttccaacagcacctccactctgatcatggttatgtaccccacacccgacagccaacattctgtggaattggaagactttccagtgtgtgtcaggtgtgattccagcattcagacttcctgacttgccatgtatgacaggtgcacacaaagtcactggcctcagactttccttcccatctctaatcaacctgacaattatcggc

SEQ ID NO: 10223 - DNA, 613 bp, Homo sapiens
actgtaacagacaataaaatgacagtgccttaaaataaagaatggtttttcttygtaacagatggcagagcatcaagttagaaggacccttaatcacctgatctaaggcaggctatcaccatgaccacaattcatccaatgggatggggagacgagaatgggagcttgttgcttccctttaagaatataacccaggtacttgggaggctgaggcaggagaatggtgtgagctcgggaggcggagcttgcagtgagccgagatcgcgccactgcactccagcctgggcgacagaccgagactccatctcaaaaaaaaaaaaagaatataactcaggaaatgtatggattatttccacttatatcttattgtttagaacttagtgtaatggccccatctcactgcaggtgaggttgggaactctggtccttacagtgagaagccatactattagctaagattctcttactatgaaagaaaaaaacatatattactgagaaactatttttcttcacaattttctattttgaaaaaagagtattttacccttgtaaataatccccactagcgtgtgcatgcacacacacacacacatcaactcactttgcatccctg

SEQ ID NO: 10224 - DNA, 613 bp, Homo sapiens
actgtaacagacaataaaatgacagtgccttaaaataaagaatggtttttcttcgtaacagatggcagagcatcaagttagaaggacccttaatcacctgatctaaggcaggctatcaccatgaccacaattcatccaatgggatggggagacgagaatgggagcttgttgcttccctttaagaatataacccaggtacttgggaggctgaggcaggagaatggygtgagctcgggaggcggagcttgcagtgagccgagatcgcgccactgcactccagcctgggcgacagaccgagactccatctcaaaaaaaaaaaaagaatataactcaggaaatgtatggattatttccacttatatcttattgtttagaacttagtgtaatggccccatctcactgcaggtgaggttgggaactctggtccttacagtgagaagccatactattagctaagattctcttactatgaaagaaaaaaacatatattactgagaaactatttttcttcacaattttctattttgaaaaaagagtattttacccttgtaaataatccccactagcgtgtgcatgcacacacacacacacatcaactcactttgcatccctg

SEQ ID NO: 10225 - DNA, 524 bp, Homo sapiens
tcactattttctttttccttgctcacaactcagctgttgagctggaggttgtcatctaactcactagctgtagtctttcatctacaatctccctttagatttccattctaaattatggaatctcacggtgagaagagactctacaggtgaaatcatctggatttcaccatgggcctctataatacacctccctcactggccacacagaattcctgctgccccatygtggtggacatgattgtcctggtgaagtttggcctagtgccagtgcagcctcacggccacacctatggaaaatgaagaaagcccgtgcttacaattccaactaagctcaaagaggtcaggaattcacactaaggatgatagagcaggactgtccattgccccctcaagacaaggggactccagggcactgggttcatgctgagcctcaatattccagaagcctgggcaggtgcatgggggcgggggtaggccagaagggagacattgggaccccctttggaccaatatcagaaaggcat

SEQ ID NO: 10226 - DNA, 524 bp, Homo sapiens
tcactattttctttttccttgctcacaactcagctgttgagctggaggttgtcatctaactcactagctgtagtctttcatctacaatctccctttagatttccattctaaattatggaatctcacggtgagaagagactctacaggtgaaatcatctggatttcaccatgggcctctataatacacctccctcactggccacacagaattcctgctgccccatcgtggtggacatgattgtcctggtgaagtttggcctagtgccagtgcagcctcacggccacacctatggaaaatgaagaaagcccrtgcttacaattccaactaagctcaaagaggtcaggaattcacactaaggatgatagagcaggactgtccattgccccctcaagacaaggggactccagggcactgggttcatgctgagcctcaatattccagaagcctgggcaggtgcatgggggcgggggtaggccagaagggagacattgggaccccctttggaccaatatcagaaaggcat

SEQ ID NO: 10227 - DNA, 524 bp, Homo sapiens
tcactattttctttttccttgctcacaactcagctgttgagctggaggttgtcatctaactcactagctgtagtctttcatctacaatctccctttagatttccattctaaattatggaatctcacggtgagaagagactctacaggtgaaatcatctggatttcaccatgggcctctataatacacctccctcactggccacacagaattcctgctgccccatcgtggtggacatgattgtcctggtgaagtttggcctagtgccagtgcagcctcacggccacacctatggaaaatgaagaaagcccgtgcttacaattccaactaagctcaaagaggtcaggaattcacactaaggatgatagagcaggactgtccattgccccctcaagacaaggggrctccagggcactgggttcatgctgagcctcaatattccagaagcctgggcaggtgcatgggggcgggggtaggccagaagggagacattgggaccccctttggaccaatatcagaaaggcat

SEQ ID NO: 10228 - DNA, 524 bp, Homo sapiens
tcactattttctttttccttgctcacaactcagctgttgagctggaggttgtcatctaactcactagctgtagtctttcatctacaatctccctttagatttccattctaaattatggaatctcacggtgagaagagactctacaggtgaaatcatctggatttcaccatgggcctctataatacacctccctcactggccacacagaattcctgctgccccatcgtggtggacatgattgtcctggtgaagtttggcctagtgccagtgcagcctcacggccacacctatggaaaatgaagaaagcccgtgcttacaattccaactaagctcaaagaggtcaggaattcacactaaggatgatagagcaggactgtccattgccccctcaagacaaggggactccagggcactgggttcatgctgagcctcaatattccagaagcctgggcaggtgcatgggggcgggggtaggccagaagggagacattgggrccccctttggaccaatatcagaaaggcat

SEQ ID NO: 10229 - DNA, 542 bp, Homo sapiens
tcttascaccgtttccagagactttgtttttttgagttgctctgtagcccgggctggagtgcagtggcatgatcacggctcactgcagtctctgcctcaccagctcaagtcattctcccacctcagcctcccaagtacctaggactacaggtgcacaccaccacacctggctaattttttgtagtctttgtagagacaaagtttcaccatgttgcctaagctggtcttgaactcctgagctcaagggatcagcccgctttggccttgcaaagtgctggaattacagatgtgagccatggtacctggccactgagggtggtgggaggtttacagagctccttatggtgtcatgctggatgtggaaccaaacaggattacattttatatttaattatgtctttttaaatttgaaacatttcctcactttgtttttcctgactttgacttttttttttttttttttttgagagggagttttgctcttgttgcccaggctagagtgcaatggtgcaatcttggctcaccgcaacctccgcctcgcg

SEQ ID NO: 10230 - DNA, 542 bp, Homo sapiens
tcttagcaccgtttccagagactttgtttttttgagttgctctgtagcccgggctggagtgcagtggcatgatcacggctcactgcagtctctgcctcaccagctcaagtcattctcccacctcagcctcccaagtacctaggactacaggtgcacaccaccacacctggctaattttttgtagtctttgtagagacaaagtttcaccatgttgcctargctggtcttgaactcctgagctcaagggatcagcccgctttggccttgcaaagtgctggaattacagatgtgagccatggtacctggccactgagggtggtgggaggtttacagagctccttatggtgtcatgctggatgtggaaccaaacaggattacattttatatttaattatgtctttttaaatttgaaacatttcctcactttgtttttcctgactttgacttttttttttttttttttttgagagggagttttgctcttgttgcccaggctagagtgcaatggtgcaatcttggctcaccgcaacctccgcctcgcg

SEQ ID NO: 10231 - DNA, 544 bp, Homo sapiens
tatttctaccagagagaatattaatggcagtgtcaataatttttaacccaaaaactgaaatactttaaagcaattcaggttagagattgtctgcaaagcaagttgaaagacctattatttgcgttttctaaatggaattgtcttaacaatgttaacaagttaaatgtatacaagtaacaagaggagtgcttatttattatcacatagattttctacagatatttatcaccaaaaatattgatgtacacccaaataatatatataattgttgatgacacaaaaagcaaaaaaaaaaaaaaaaaaaaacagaaaaagaaaaagaatcaactgatggttctactgctcaattttcaatgtgttytctttcaataatggcacatttaacaaattcagtccttgcttattgagttttcatatataatgaattacatttaaatgtaatcctactaaccttgttcctatttgattatgggaatgattgcataattactaatgataattaccccatacatgtataaaatacatgtataaaataccattaccc

SEQ ID NO: 10232 - DNA, 592 bp, Homo sapiens
ttccagtattctcttttcttcaagactaacacatttgaaaagagctcaacattaaaaataaaagtatcataaaaaaaggctcagaaattacccctatgatttaggaaagatgttagaaacattttacataataaagtattcaaaaaatattaataaaaataactcaatgctcctatcattgatctcagcattaactgagccaggatatatgtgtctaatgcaagtcagtcaaatcactacttktcattacaaaataggtcaattattcaaaattagtagtatatgaattatgtttttatataaattccctcgagttgacatttagtctcaatgatatgcaaacatacacacaaatacacatgcacacatgaacatacatgcacaaatttattaacttaaccaaagacagtatatatgtgtatgggcatgtgcttgtgtctttgtgtatacataaatatattacattttcattttttaattaattttggcacgtcaaagaagctcatgaccaagaaagatccataaataaaatgaagaaattaggggtgatttcctcaaatctcactgaagagtggcagaatatgccactttg

SEQ ID NO: 10233 - DNA, 743 bp, Homo sapiens
agcctactgttttttttttttttttttttttttgagacagagtcttgctctgtggcccaggctggagtgcagtggcgagatctcggctctctgcaagctccacctcccaggttcacgccattctcctgcctcagcctcccgagtaactgggactacaggcgcccgccaccacgccgggctaattttttgtatttttcgtagagacggggtttcaccatgttagccaggatggtctcgatctcctgacctcgtratctgcccaccttgggctcccaaaatgttgggattacaggcgtgagccaccacgcccagcctagcctactcttttaagcattagcaaataagaacagaagagtagtggaaatgtagtcgataaatgtaaatatataatattgctgatttttgagcaactgcagaagatgggtaactctatgtgacctaaatgttagaatccacattttaggaaagagatagatgacttataggaaacttgggctacatgtaccacagttacagatctgcacacaagaaggaaacagagtatcaagagatgaaactatgagccagaaatagaatgcttaagtggaatcttaagaaagatggatattatatatgagattcaacaggcaaagacagaatggaggcacccagacacaaacaagaatgccatgaagtacagtcaggatcattctgggagtgtttgaagaattgaacaatagtatgctattaaatggctcgtggaa

SEQ ID NO: 10234 - DNA, 579 bp, Homo sapiens
tttcttatattctttttagatctatctctttttcatgctttgtcttgcagactcacttgaagaataacaaaccactaccaacttaacactcctttataaacaatggggacctagagtctaaagaactttgaagaaatgatcaaaattaaggatttaaaagaccctatgtaatattatccrattgttgtttgtttgttagatggtagttgacttaaaagtataaagactgggatactactatttttaaccaattattcactgtgtaaatcattctgggtgatgatcaaactcatagaaaacatattttaaactccaaataagataaatttatcaaagtcaacaggcaacatggcagcatagcagcataagtggatccttatttgagttaaatttaactgtgtgcatagaggctaccaatgatttttaggtgctctttagagttctttaattccacacccacttgctatctctcactgataaacttttggcttcttgatgctttatgattataatcagctgagtatcatcatatggaaattgatgattcttgataatgtgcaaaatacttgccttatacaa

SEQ ID NO: 10235 - DNA, 579 bp, Homo sapiens
tttcttatattctttttagatctatctctttttcatgctttgtcttgcagactcacttgaagaataacaaaccactaccaacttaacactcctttataaacaatggggacctagagtctaaagaactttgaagaaatgatcaaaattaaggatttaaaagaccctatgtaatattatccgattgttgtttgtttgttagatggtagttgacttaaaagtataaagactgggatactactatttttaaccaattattcactgtgtaaatcattctgggtgatgatcaaactcatagaaaacatattttaaactccaaataagataaatttatcaaagtcaacaggcaacatggcagcatagcagcataagtggatccttatttgagttaaatttaactgtgtgcatagaggctaccaatgatttttaggtgctctttagagttctttaattccacacccacttgctatctctcactgataaacttttggcttcttgatgctttatgattataatcagctgagtatcatcatatggaaatkgatgattcttgataatgtgcaaaatacttgccttatacaa

SEQ ID NO: 10236 - DNA, 579 bp, Homo sapiens
tttcttatattctttttagatctatctctttttcatgctttgtcttgcagactcacttgaagaataacaaaccactaccaacttaacactcctttataaacaatggggacctagagtctaaagaactttgaagaaatgatcaaaattaaggatttaaaagaccctatgtaatattatccgattgttgtttgtttgttagatggtagttgacttaaaagtataaagactgggatactactatttttaaccaattattcactgtgtaaatcattctgggtgatgatcaaactcatagaaaacatattttaaactccaaataagataaatttatcaaagtcaacaggcaacatggcagcatagcagcataagtggatccttatttgagttaaatttaactgtgtgcatagaggctaccaatgatttttaggtgctctttagagttctttaattccacacccacttgctatctctcactgataaacttttggcttcttgatgctttatgattataatcagctgagtatcatcatatggaaattsatgattcttgataatgtgcaaaatacttgccttatacaa

SEQ ID NO: 10237 - DNA, 579 bp, Homo sapiens
tttcttatattctttttagatctatctctttttcatgctttgtcttgcagactcacttgaagaataacaaaccactaccaacttaacactcctttataaacaatggggacctagagtctaaagaactttgaagaaatgatcaaaattaaggatttaaaagaccctatgtaatattatccgattgttgtttgtttgttagatggtagttgacttaaaagtataaagactgggatactactatttttaaccaattattcactgtgtaaatcattctgggtgatgatcaaactcatagaaaacatattttaaactccaaataagataaatttatcaaagtcaacaggcaacatggcagcatagcagcataagtggatccttatttgagttaaatttaactgtgtgcatagaggctaccaatgatttttaggtgctctttagagttctttaattccacacccacttgctatctctcactgataaacttttggcttcttgatgctttatgattataatcagctgagtatcatcatatggaaattgaygattcttgataatgtgcaaaatacttgccttatacaa

SEQ ID NO: 10238 - DNA, 585 bp, Homo sapiens
tgagtgttgtttcacactgctaaatttgtagtcatttctacatagcaacagagaacaaatacaaatattataatactatttataaaacttaaaaatctaaatattgagttctttargtatccacatataagtgcatatttctaaaaatcaaggaaatcacatacacaattctagatggaaatttttagcggggtgggagtattggaatgattaggcaaatacacgattgatgcaaagatgggacagaaatgaaagactgtcattagcatattatcaaacattacctttattaagcaaaaaaagccaatggttaaatatgcatttaaatgtttaattagaaactaaattattcgttgtgcacatgtaccctagaacttaaagtataataaaaaatttttttttaaaatagccattctccctggtataagagggttaaaaaaagaaactaaatttttatatttattatataattatataaatatttatatataagtataaacataaatatatataaatttatattaaattaaatagaatttaattttaaatttaatttaaaagtttaaatatgcgtttaacctgatc

SEQ ID NO: 10239 - DNA, 585 bp, Homo sapiens
tgagtgttgtttcacactgctaaatttgtagtcatttctacatagcaacagagaacaaatacaaatattataatactatttataaaacttaaaaatctaaatattgagttctttaggtatccacatataagtgcatatttctaaaaatcaaggaaatcacatacacaattctagatggaaatttttagcggggtgggagtattggaatgattaggcaaatacacgattgatgcaaagatgggacagaaatgaaagactgtcatyagcatattatcaaacattacctttattaagcaaaaaaagccaatggttaaatatgcatttaaatgtttaattagaaactaaattattcgttgtgcacatgtaccctagaacttaaagtataataaaaaatttttttttaaaatagccattctccctggtataagagggttaaaaaaagaaactaaatttttatatttattatataattatataaatatttatatataagtataaacataaatatatataaatttatattaaattaaatagaatttaattttaaatttaatttaaaagtttaaatatgcgtttaacctgatc

SEQ ID NO: 10240 - DNA, 585 bp, Homo sapiens
tgagtgttgtttcacactgctaaatttgtagtcatttctacatagcaacagagaacaaatacaaatattataatactatttataaaacttaaaaatctaaatattgagttctttaggtatccacatataagtgcatatttctaaaaatcaaggaaatcacatacacaattctagatggaaatttttagcggggtgggagtattggaatgattaggcaaatacacgattgatgcaaagatgggacagaaatgaaagactgtcattagcatattatcaaacattacctttattaagcaaaaaaagccaatggttaaatatgcatttaaatgtttaattagaaactaaattattcgttgtgcacatgtaccctagaacttaaagtataataaaaaattttttttwaaaatagccattctccctggtataagagggttaaaaaaagaaactaaatttttatatttattatataattatataaatatttatatataagtataaacataaatatatataaatttatattaaattaaatagaatttaattttaaatttaatttaaaagtttaaatatgcgtttaacctgatc

SEQ ID NO: 10241 - DNA, 467 bp, Homo sapiens
tgcataattacacacaccaggaagcatccaccaatgcacacatcacaataaatgtgtgcttaattacaagtcaccatgcatatatgcttaattacacatyctgctacctgcaggattaattacatgtcgtattacatgcacacaatcagaagaggtgacatttgatgacattaaaagagctaggagaacataaaggagcaatttttaaacagttgcataatgtgtgtgcttttttttctttccacagaaggcatcagacattaatttctagtcaatcaatcaagaagcacttattgaaccagccctgtcaattttacttttatagtgtctcttgtatcgatcctttcctttccattttcatgatcactaatgtcatctcttgcctgacagactaaggtaatgggaaggacaatgcattcaaatgttctctctcctaaccctgggccagcaccttggtccaaggcact

SEQ ID NO: 10242 - DNA, 1412 bp, Homo sapiens
ataatttctttaagtaattttatcatatagatgtttatatataaacttttagctcatctggaaattattttgatgtatagcattaggcataaaattagcttaaaaattaatagccacttgaactaaagtattactacataggtagattccttgcaacaaagaaatgtttaagaatttgtaaaaattctgtttaaagtacatttcaaagaagtagatttgattatactttattcacttacattttattggacttcctagttcacagtggtagggaggagggtttacactagacagaataatgttaattaatccttcctactccctaagtagtaattaccacccaacctttatgggtactttattttcttttccttcatttctctcctaatcacctttatatttctagctttgtcttaagcctccactgatttaatcaaggagaatgaaacaggaatagcataatggctaaaatagcaagacgaagctgggcacttttgctagtagtgttgattttttttctaacacatcaatatatagccctatgtaaaaacactgactttgtagagatgattggttcttcaaaaacagaatggtaccattgatttattttgcacgatgtcttggttataggtaaatattttatgatgttggaatatggaaagcatgaatccacccaagtgtttaacatgagagaatttatttttactttctttgtccctgtttcctgtggcaatattctgtttaattcaactggaactttgtatccttacaatatatagagtaccagcttaatcgagagagtgcttgaagaagattgcccagatagcagctcctcttgtcacaaatggaatcagactcctcttatataggagatataaaattggcatggtgggctgaatgacagcaaggctgaaggaaagctacttagacagaaaaggtatctcaaaaaggcgctgtattgaccaagaagacatctgagatgtcaaaaggtgatagtaaaagaaagtatgggttcctaccttctctgtagaaactcactcaaaaccaagttagtctcctcaccaatccagatttgagaggaacaaccagagaartgtcttgcttccccaaggtcttttcaaaggcaaatttaaagctatgcattttccttcattttacattgacttcattttacatctctaaactgtatatgtcgttgggtcttctacctcaacaggtaacttcatctgtgaacactggggcgatttcaactgagcaaccactattacagacagagctaagcctgctagaagtcactgtatttatcagtcatctgccaatgacatccaagccatgtatcatacactcaaacttcaggtggaggagtagagagctatttagaaaatctaactctgtcctcctaataacacttc

SEQ ID NO: 10243 - DNA, 503 bp, Homo sapiens
ctgttagctgtttgagatcctcttgactcccagtgtgtctgggaaaattctgacccagcagccatcagcctcctccgcacatggcttcccacatactgatatcatccctctgagaccaacatcgagtttcttgcagcaatattggcttcttggccttggcttttggtccctctctcagcttggttctgtctctggccttacactttctgctctaactctgawcccacagtgatcatccttcttagttatattctactcagactgaccacagctgagttaatattctcttaatatccagctttgacacaggatatagtcttatccctggcatgcacagagtagacacacgataagtatttgttgaaatattgctaaataaagcaggtgactgaatattgccactggttgtttctgaattgctggttgatattacagacttacagatttatctcatttatttagcctcaattagggctttgttaatcaatctatctcaaaaccat

SEQ ID NO: 10244 - DNA, 575 bp, Homo sapiens
ccagtcaccagggaaattggattcgtgtgcagggaactaggtggggggagcagtaggagagtattcaaagaagtcatccagatccttcttctcaggggttaaagggaggacatgatggaataatttaagaaggacacaggcagaaccgaagtaaatgttagaatggttggaagtgattagatgatgataaaattctccttgaatacttgctactgagtatcatcacagtaacattgttaggtgtttttccccattttatagatgaaaaaactgagtccgagaattaataagcctaaggtatatagcttatgtgtggcaaagccagttttcaaacctaagtccaccagaatcctgctgttagtcccactgcactatgctgcaaagaagaaagatgaacggctgggcctgctgggtaggagtttagaagggagacaggaggggacagcatgaagctgaagtgtgtagctgtgctcaggagactgtcctgagggataggcagggcatttgggcttcggaagaagagakgtaagctgcagcaggagggaagcaggggttgcagtctaggatcagaaata

SEQ ID NO: 10245 - DNA, 566 bp, Homo sapiens
acctccactcctaaattcctcatgtgtgtccgtgtcctaaattttcttggtacgggacaacgaaccctgggtatctaccccagacaatgtagctgcctccttctcacctacaagtgggagctaagccatgaggttgcaaaggcataagaatgatataatggactttcgagacacatggggaaggaagggaggaaagtgagggctaaaagactatacgttgggtatagtgtatattggtctgttgatgggtacagmaaaatctcggaaatcaccactaaaaaacttatgaatataaccaaaaccacctgttcccccaaaaacaattgaaataaaataagttgctataaactgaaaaaagctccccctttttttcttgaagtcccagatgttttttaaagaaatgtctacaaactgttctataccattcatcccaccaactggtttgaggttgcagagacaactgaaatgtttcacaaataagtaagaatatgcaaaataagatatattaaatatgaaaatcctaagttcattctggtacttatgttttcttttgcattgatacaaaa

SEQ ID NO: 10246 - DNA, 549 bp, Homo sapiens
tgaaattgcagcaaaattcagagtgyggaatttctatttatcagaatgtgataaatgtcaggataataagcctctcgagggaacaaacagtttccttgagcactgctgcgagggctattatgaacagacactgccaggccatgtgtgaggcacagagcaaaatcccccgcctctccttaggctgagcatcactagtgatttaaaattcagaacatcatgacaccagtgacaaagggatcgctagaaagaagtcctcagtgcatttgagatatttccagttcattgtaaagaagaaaatgaatagatggcaattaaaaccaaactttatatatcccagctattgtgtgaagtatgtacggaattgtgatcagagaaaagacaaaaataaccccagcttgaattatgttatgtattttaagaaaaggatgtgttttgaagtaattgacatttcaaagcttagcaggaataattagtcttgatgtcacctttatttaaatcaattttagtacaaatcagaaattaaaatattaaccaactagcttgattgtc

SEQ ID NO: 10247 - DNA, 549 bp, Homo sapiens
agtgggtgacctcggtcgagtcacatcccttctctccttagtttcctcctccagaaatatctaccccaagggatgctgggagtgttaaatagaataacatgttataaactgggaagcactgtatgaaaagattgtgattattctggagtattgcaacttcttgcaaaattttacaagtggctaagagttgtcttcgatgcttttctgtgaccctcccgactgtatttcatgctttacttagacccccaaccaagcttgtctctccagatcatgctgtacactgtgaatcttacccatggttcccaattgaacttactgtttgtgtatcattggaattttattcaattatagaatgacctaattgtcatttaggcgattaattattttgctcgtgaaccatagaaaggtttaatttttaatcaggaatttctgcagwcccaaagccttcaagcaaaaggaatgactatctaatggtgaaatttcacatagatcaatgggactcaataactttagaaagaaaatatttgttttacttctagtcaagaatac

SEQ ID NO: 10248 - DNA, 536 bp, Homo sapiens
tgtcaggccacccaaaaatgacccctttcagtccccagggacaacagtgcaggctgtactgtgttagtattttgaactccgtaggtgccggatgacaaatattttcgagtagggtttataccggatatgatcaaacaaaccatgtatgtgtacacaccaggcagagtaacctctgccacctgttttccagcacatgggggcacggcctgaggaatccacatctcgcarctgcttgctccttactgcccctggttgcttcaaactcctgagaggggtgctgccagagaaccccctcttctatgtgttctgaggattcagccttcgtgaatctggcctggcaggctggaacctttccaacaaggccctcccagggcttgcttcccagggcagttgggcacatctctgagtggacactgccccctcgaggccgtgcccactatgacacctgggagagctgagctcacacaagagaaacagaccaaggtggatgctttccttccaagtgtcctccctgggtgcctcaagattgaaccaaa

SEQ ID NO: 10249 - DNA, 514 bp, Homo sapiens
tgataagctccctgcttccaaacccttaaatgtccttaatctgtaagaaagaacactcctgaccaaaattggccaggaggccctctcaggtttattctctgaaataaacctgtccttgactgtggagctgctttcccgtttctttcctctttctttaactcttacagagagcagctggaatggccccacaggctacagcccgtgtcggtgtgggatgcgagggagaggagccaggatggccccacatgctttccttggctgcctgggcgggtgmagcagccacctgagagggccgtctgaggacacgaggcggcatcagcctcatgagatctgggatgtgcacgggacgtccatgaagccgtcggagatgtgtgtctgggcagggtgctgacagggagggtgggtttctgtggcatttgggtttgggggatgaagccgtgcaggggtgtgaggcctgagggttgcagcagatgcctgtgtccacatctggacagcattgctggctaacgccaac

SEQ ID NO: 10250 - DNA, 598 bp, Homo sapiens
gttgcagaggaatggatactgcagagggttttgacttgaatgcctggtataggaagtgggaaataaagatatacagacctaagaaaagcatgtttacacaagagaccgagagcaaatcaaggactaacttgccttataagagatgaaatgagatgggaattaggaggaacactgttctgaaaattgttgtaatataataagatgtttgattcatggtcatagatatcaacacatcaagacttactgtcagtatcacttggctgaatatcaagttagtatattacaacattttcaacacaaatcaaattatataatttctttcaatgtaagtctacaactagttgctttcttaatawtaatatctttaacttttaaaacttgtacttagaaaatacacatatgattatgacttactaaagaaataccagacttctagccctttaaaaatacagagcatgtatgtttgtgtgtatgtttaaactgccctttccatctggcttagactcttttctccagatctgtaacatctggccatcaactttgaccctgagatgggatctaaaaatcaccccgccatctggcattctttctagttgtg

SEQ ID NO: 10251 - DNA, 561 bp, Homo sapiens
aaaggcttcagtgagtgggtattaagattgccatttgcggaaataaaactgaaggcaccagagaatgttcttttccagcaattgagctgccaygtgttctcaaatttaccgctaatctaaaaaagaccttcctcttgatttgtatttatgatagaaatatttacatagcgccaagatgtgtggcaaatcaagggttgccacaatgtgaatctcaatgaaaaggttgttctgcctttataatttatgtgcatgtttgagttatattttactcatgatcacttctcttatgaaataggcaactatttttgtaaggttttgtaaagaaattgatgtgtgctttctttctcaacatagtcctatatcctccctttctactttttttcctctaataatatggtaggtacattaagatgtagaaactaggatgcacattgacctataatagcaaaatttgtatcagaaggctgcccattaagaagcttcatttctttgactacagtaaaacattcatcagtaaaagcatagaattttcattgaaatgaaatgttaaatagtctattg

SEQ ID NO: 10252 - DNA, 561 bp, Homo sapiens
aaaggcttcagtgagtgggtattaagattgccatttgcggaaataaaactgaaggcaccagagaatgttcttttccagcaattgagctgccacgtgttctcaaatttaccgctaatctaaaaaagaccttcctcttgatttgtayttatgatagaaatatttacatagcgccaagatgtgtggcaaatcaagggttgccacaatgtgaatctcaatgaaaaggttgttctgcctttataatttatgtgcatgtttgagttatattttactcatgatcacttctcttatgaaataggcaactatttttgtaaggttttgtaaagaaattgatgtgtgctttctttctcaacatagtcctatatcctccctttctactttttttcctctaataatatggtaggtacattaagatgtagaaactaggatgcacattgacctataatagcaaaatttgtatcagaaggctgcccattaagaagcttcatttctttgactacagtaaaacattcatcagtaaaagcatagaattttcattgaaatgaaatgttaaatagtctattg

SEQ ID NO: 10253 - DNA, 561 bp, Homo sapiens
aaaggcttcagtgagtgggtattaagattgccatttgcggaaataaaactgaaggcaccagagaatgttcttttccagcaattgagctgccacgtgttctcaaatttaccgctaatctaaaaaagaccttcctcttgatttgtatttatgatagaaatatttacatagcgccaagatgtgtggcaaatcaagggttgccacaatgtgaatctcaatgaaaaggttgttctgcctttataatttatgtgcatgtttgagttatattttactcatgatcacttctcttatgaaataggcaactatttttgtaaggttttgyaaagaaattgatgtgtgctttctttctcaacatagtcctatatcctccctttctactttttttcctctaataatatggtaggtacattaagatgtagaaactaggatgcacattgacctataatagcaaaatttgtatcagaaggctgcccattaagaagcttcatttctttgactacagtaaaacattcatcagtaaaagcatagaattttcattgaaatgaaatgttaaatagtctattg

SEQ ID NO: 10254 - DNA, 958 bp, Homo sapiens
atgtgctgcaggtggtaaccagcaaccagagagtgtccggatgcaccttaataaccaggagctgcattagtcagcatattttcagcatgtgtctcatctttagtacacttacttaattgagcatcagagaagccgtgaccaaattaatattcaagcaaagctttggattagtaaccgaatgaaagccacatggctcccttgctgttcggctgagtggtgatcactgtttcatacaattgccagatgtccagctttgagaacatgatactcaaaaaagaataaaatcagcttggttttcatgagcaagtaaatgatgagtcagatctacccgtttcattgatgcaggagaatagaagggcttgaagaccatcaatgcagagccaactggggaaggcatcaagcctgttatggagtgaagtggaagaaagaatactgactcggagaagagggacctttattctagtcactcccttgctcttactagctatgtggcattggcaagggaccttggtctctgaaaatcaggttttacacctgtaacataaagtgagaacatatacctcatggggttgtgatgagcattagccagaatatagttaggagaacacagtgggaatttaacggaaggtagctgggtcagagtaactgtggccctttggatcagaatggtgctcaaagtcagtgtgactatggcccctttggtcacagtgacacttagggacctcatggtctgagtctccattcracaagacaaaccagtatagaccaggacccagaggctggacaaaaaatacacctggatagggcaaaccctagaagtcagccagctgcaaaaactgagtgaaagggcaaagaggtgggacaaaggatagggtaagtgtggaaaatggagacatattgcagatcagatgcccagtcaagcatcagaaagctctgatacctggtcctgacaagtgag

SEQ ID NO: 10255 - DNA, 662 bp, Homo sapiens
tcggctcactacaacctctgccttctgagttcaagcaattctcctgcctcagcctggctaatttttgtattcttgttaattcgacctgcgtaatcaagcattaggcaggggcttggagaaaactcttaaattatgattcataccatgtctaagttgatacataatattttacaaccatcawcaactgtggatggactctctacatgacagagaaaacagatttttcgtgaccagaagtctcagattttctgcaagaatctaaaaactattgtattttattttttgagaaggagtttcactgttgtcacccaggctggagtggaatggtgccaccttggatcactgcaacctctgcctcctgggttcaagcaattctcttccctcagtctcttgagtagctgggatagcaggcacctgctaccatgcccagctaatttttgtatttttagtagagacgccattttgccatgttggccaggctggtcttgaactcctgacctcaggtgatttgcacacctcagcctcccaaagtgctgggattacaggtgtgagccaccacgcctggcccatcttttttctttaaatattatgtaccttatttatgtattgttcatttttaattttattgttctaaacagatttatttatataatcagtctgta

SEQ ID NO: 10256 - DNA, 633 bp, Homo sapiens
gctgttcctgaaacttccttgttcaattctgctttggattccatgggatcctctggtagccaaaaaattcctttttggttgagccagccagaattagttcattttatttgtacaaaagaagcttagctaacaatacacttctaaaagattgtgtatattctcatatctctgaaatcttaatgaaattcaatgagaaatgacacactttttcattatatgtatatgctgttatatacaagtatataagcgagatctcaaatttataccttgctttggcctgaagtattgtaatagctcccccytcccaagaggagacactgcctctactttattctttcgtaagtgcttgccagttatcttttaggacacagatcaatatttgaaaacgtaacaggttcctatttgataaaaataaagtccaaactcttcttcaagaattcaagctatttcttagtctggggcaatcaacactttgacactatcttgttatgaacccaatatatatcagagatagcagccaattaatctgcagacccccaaacatatcatacttctcagcttatagtgttcactctgctgaaacataatgttgaaaacttttcaaactccatatatgtagagttcaaatgtcac

SEQ ID NO: 10257 - DNA, 675 bp, Homo sapiens
gcatgccagctacctatattgagcaagcagtccttcaaatataaatataaacaaacaaccaagaataataagacagctgaggaaaaccagcagcaaagagtagagtgactacaatgaatacacagtgcaagtgtctgaccaaaaaaaaaaaaaaaaattcaatgggaattaaaaaaaactatctgtatcttcagaaatatttacttaagtattattgtaaagagcacacaaaagagcaggttgctattaaaacagatcaattagcaattatacaaatgacttcatggaaaaaaaatagcttcttaccatcaaaaattcaagacttattaaaagagtcaaggtaaattttacaaaatctggcattcaatcaaaagttgccaaaaatgcaggaaaaaaaaaaaaacaggaaaagacccatagtgaaaataggaataaaacagaaactgactcagatgatagsagacaggacattagaacagttgttatatctgtagtccatatattttaaaatgtagctagcagacaggacattagaacaattgttatatctgtagtccatatatttcaaaatgtagctagagcaaagactggacatatatttaaaaaacacgcaaatcaaacttctagaaatgaaaactacaatgtctgaaatgaaaaatacagtggacggttttt

SEQ ID NO: 10258 - DNA, 665 bp, Homo sapiens
gaataactttcctgtagaacagatttctgagatttggtgtcccattcttcatttctggatgtagttttcatctttactgtcaaataactgaatgaaacatccaaactgactttcatgaattttcttarggagatagagtgaaataaaattatgacccactttgcagagcacagaattccaactatattttcattttagctggctgtttcacgatagcaattctctgggtctcttttcacagatacaagtataactatgcccaataattatatctatggtaataaactgaaagagctagtatctttgaggtttccacattgccaactcccgaaaatgtggagaagggtgaagtttctaatataaaagtaagaagaatgtcatggagtagaaacataaagtactcaagttttcctttctgttacttgtattataataaaaaaggagacagcaggataagtgcttcaatattgtgtttctcatgtgtttttgaaaatgtgtaggaatattttaatagttttggtttcctttctttttttttttttaagatgccaccataggggcctgttggggagcaaagggattatgttttccttgatgttaagtgaattagccaaacatagacttcctgttcattcttggtttttttccacgtcgtatatgcctat

SEQ ID NO: 10259 - DNA, 665 bp, Homo sapiens
gaataactttcctgtagaacagatttctgagatttggtgtcccattcttcatttctggatgtagttttcatctttactgtcaaataactgaatgaaacatccaaactgactttcatgaattttcttagggagatagagtgaaataaaattatgacccactttgcagagcacagaattccaactatattttcattttagctggctgtttcacgatagcaattctctgggtctcttttcacagatacaagtataactatgcccaataattatatctatggtaataaactgaaagagctagtatctttgargtttccacattgccaactcccgaaaatgtggagaagggtgaagtttctaatataaaagtaagaagaatgtcatggagtagaaacataaagtactcaagttttcctttctgttacttgtattataataaaaaaggagacagcaggataagtgcttcaatattgtgtttctcatgtgtttttgaaaatgtgtaggaatattttaatagttttggtttcctttctttttttttttttaagatgccaccataggggcctgttggggagcaaagggattatgttttccttgatgttaagtgaattagccaaacatagacttcctgttcattcttggtttttttccacgtcgtatatgcctat

SEQ ID NO: 10260 - DNA, 665 bp, Homo sapiens
gaataactttcctgtagaacagatttctgagatttggtgtcccattcttcatttctggatgtagttttcatctttactgtcaaataactgaatgaaacatccaaactgactttcatgaattttcttagggagatagagtgaaataaaattatgacccactttgcagagcacagaattccaactatattttcattttagctggctgtttcacgatagcaattctctgggtctcttttcacagatacaagtataactatgcccaataattatatctatggtaataaactgaaagagctagtatctttgaggtttccacattgccaactcccgaaaatgtggagaagggtgaagtttctaatataaaagtaagaagaatgtcatggagtagaaacataaagtactcaagttttcctttctgttacttgtattataataaaaaaggagacagcaggataagtgcttcaatattgtgtttctcatgtgtttttgaaaatgtgtargaatattttaatagttttggtttcctttctttttttttttttaagatgccaccataggggcctgttggggagcaaagggattatgttttccttgatgttaagtgaattagccaaacatagacttcctgttcattcttggtttttttccacgtcgtatatgcctat

SEQ ID NO: 10261 - DNA, 665 bp, Homo sapiens
gaataactttcctgtagaacagatttctgagatttggtgtcccattcttcatttctggatgtagttttcatctttactgtcaaataactgaatgaaacatccaaactgactttcatgaattttcttagggagatagagtgaaataaaattatgacccactttgcagagcacagaattccaactatattttcattttagctggctgtttcacgatagcaattctctgggtctcttttcacagatacaagtataactatgcccaataattatatctatggtaataaactgaaagagctagtatctttgaggtttccacattgccaactcccgaaaatgtggagaagggtgaagtttctaatataaaagtaagaagaatgtcatggagtagaaacataaagtactcaagttttcctttctgttacttgtattataataaaaaaggagacagcaggataagtgcttcaatattgtgtttctcatgtgtttttgaaaatgtgtaggaatattttaatagttttggtttcctttctttttttttttttaagatgccaccataggggcctgttggggagcaaarggattatgttttccttgatgttaagtgaattagccaaacatagacttcctgttcattcttggtttttttccacgtcgtatatgcctat

SEQ ID NO: 10262 - DNA, 666 bp, Homo sapiens
aataggcatatacgacgtggaaaaaaaccaagaatgaacaggaagtctatgtttggctaattcacttaacatcaaggaaaacataatccctttgctccccaacaggcccctatggtggcatcttaaaaaaaaaaaaagaaaggaaaccaaaactattaaaatattcytacacattttcaaaaacacatgagaaacacaatattgaagcacttatcctgctgtctccttttttattataatacaagtaacagaaaggaaaacttgagtactttatgtttctactccatgacattcttcttacttttatattagaaacttcacccttctccacattttcgggagttggcaatgtggaaacctcaaagatactagctctttcagtttattaccatagatataattattgggcatagatgtacttgtatctgtgaaaagagacccagagaattgctatcgtgaaacagccagctaaaatgaaaatatagttggaattctgtgctctgaaaagtgggtcataattttatttcactctatctccctaagaaaattcatgaaagtcagtttggatgtttcattcagttatttgacagtaaagatgaaaactacatccagaaatgaagaatgggacaccaaatctcagaaatctgttctacaggaaagttattc

SEQ ID NO: 10263 - DNA, 666 bp, Homo sapiens
aataggcatatacgacgtggaaaaaaaccaagaatgaacaggaagtctatgtttggctaattcacttaacatcaaggaaaacataatccctttgctccccaacaggcccctatggtggcatcttaaaaaaaaaaaaagaaaggaaaccaaaactattaaaatattcctacacattttcaaaaacacatgagaaacacaatattgaagcacttatcctgctgtctccttttttattataatacaagtaacagaaaggaaaacttgagtactttatgtttctactccatgacattcttcttacttttatattagaaacttcaccyttctccacattttcgggagttggcaatgtggaaacctcaaagatactagctctttcagtttattaccatagatataattattgggcatagatgtacttgtatctgtgaaaagagacccagagaattgctatcgtgaaacagccagctaaaatgaaaatatagttggaattctgtgctctgaaaagtgggtcataattttatttcactctatctccctaagaaaattcatgaaagtcagtttggatgtttcattcagttatttgacagtaaagatgaaaactacatccagaaatgaagaatgggacaccaaatctcagaaatctgttctacaggaaagttattc

SEQ ID NO: 10264 - DNA, 666 bp, Homo sapiens
aataggcatatacgacgtggaaaaaaaccaagaatgaacaggaagtctatgtttggctaattcacttaacatcaaggaaaacataatccctttgctccccaacaggcccctatggtggcatcttaaaaaaaaaaaaagaaaggaaaccaaaactattaaaatattcctacacattttcaaaaacacatgagaaacacaatattgaagcacttatcctgctgtctccttttttattataatacaagtaacagaaaggaaaacttgagtactttatgtttctactccatgacattcttcttacttttatattagaaacttcacccttctccacattttcgggagttggcaatgtggaaacytcaaagatactagctctttcagtttattaccatagatataattattgggcatagatgtacttgtatctgtgaaaagagacccagagaattgctatcgtgaaacagccagctaaaatgaaaatatagttggaattctgtgctctgaaaagtgggtcataattttatttcactctatctccctaagaaaattcatgaaagtcagtttggatgtttcattcagttatttgacagtaaagatgaaaactacatccagaaatgaagaatgggacaccaaatctcagaaatctgttctacaggaaagttattc

SEQ ID NO: 10265 - DNA, 666 bp, Homo sapiens
aataggcatatacgacgtggaaaaaaaccaagaatgaacaggaagtctatgtttggctaattcacttaacatcaaggaaaacataatccctttgctccccaacaggcccctatggtggcatcttaaaaaaaaaaaaagaaaggaaaccaaaactattaaaatattcctacacattttcaaaaacacatgagaaacacaatattgaagcacttatcctgctgtctccttttttattataatacaagtaacagaaaggaaaacttgagtactttatgtttctactccatgacattcttcttacttttatattagaaacttcacccttctccacattttcgggagttggcaatgtggaaacctcaaagatactagctctttcagtttattaccatagatataattattgggcatagwtgtacttgtatctgtgaaaagagacccagagaattgctatcgtgaaacagccagctaaaatgaaaatatagttggaattctgtgctctgaaaagtgggtcataattttatttcactctatctccctaagaaaattcatgaaagtcagtttggatgtttcattcagttatttgacagtaaagatgaaaactacatccagaaatgaagaatgggacaccaaatctcagaaatctgttctacaggaaagttattc

SEQ ID NO: 10266 - DNA, 666 bp, Homo sapiens
aataggcatatacgacgtggaaaaaaaccaagaatgaacaggaagtctatgtttggctaattcacttaacatcaaggaaaacataatccctttgctccccaacaggcccctatggtggcatcttaaaaaaaaaaaaagaaaggaaaccaaaactattaaaatattcctacacattttcaaaaacacatgagaaacacaatattgaagcacttatcctgctgtctccttttttattataatacaagtaacagaaaggaaaacttgagtactttatgtttctactccatgacattcttcttacttttatattagaaacttcacccttctccacattttcgggagttggcaatgtggaaacctcaaagatactagctctttcagtttattaccatagatataattattgggcatagatrtacttgtatctgtgaaaagagacccagagaattgctatcgtgaaacagccagctaaaatgaaaatatagttggaattctgtgctctgaaaagtgggtcataattttatttcactctatctccctaagaaaattcatgaaagtcagtttggatgtttcattcagttatttgacagtaaagatgaaaactacatccagaaatgaagaatgggacaccaaatctcagaaatctgttctacaggaaagttattc

SEQ ID NO: 10267 - DNA, 666 bp, Homo sapiens
aataggcatatacgacgtggaaaaaaaccaagaatgaacaggaagtctatgtttggctaattcacttaacatcaaggaaaacataatccctttgctccccaacaggcccctatggtggcatcttaaaaaaaaaaaaagaaaggaaaccaaaactattaaaatattcctacacattttcaaaaacacatgagaaacacaatattgaagcacttatcctgctgtctccttttttattataatacaagtaacagaaaggaaaacttgagtactttatgtttctactccatgacattcttcttacttttatattagaaacttcacccttctccacattttcgggagttggcaatgtggaaacctcaaagatactagctctttcagtttattaccatagatataattattgggcatagatgtacttgtatctgtgaaaagagacccagagaattgctatcgtgaaacagccagctaaaatgaaaatatagttggaattctgtgctctgmaaagtgggtcataattttatttcactctatctccctaagaaaattcatgaaagtcagtttggatgtttcattcagttatttgacagtaaagatgaaaactacatccagaaatgaagaatgggacaccaaatctcagaaatctgttctacaggaaagttattc

SEQ ID NO: 10268 - DNA, 687 bp, Homo sapiens
ataaaaatcacttaaaaatagtaataggcatatacgacgtggaaaaaaaccaagaatgaacaggaagtctatgtttggctaattcacttaacatcaaggaaaacataatccctttgctccccaacaggcccytatggtggcatcttaaaaaaaaaaaaaaaaggaaaccaaaactattaaaatattcctacacattttcaaaaacacatgagaaacacaatattgaagcacttatcctgctgtctccttttttattataatacaagtaacagaaaggaaaacttgagtactttatgtttctactccatgacattcttcttacttttatattagaaacttcacccttctccacattttcgggagttggcaatgtggaaacctcaaagatactagctctttcagtttattaccatagatataattattgggcatagatatacttgtatctgtgaaaagagacccagagaattgctatcgtgaaacagccagctaaaatgaaaatatagttggaattctgtgctctgaaaagtgggtcataattttatttcactctatctccctaagaaaattcatgaaagtcagtttggatgtttcattcagttatttgacagtaaagatgaaaactacatccagaaatgaagaatgggacaccaaatctcagaaatctgttctacaggaaagttattc

SEQ ID NO: 10269 - DNA, 687 bp, Homo sapiens
ataaaaatcacttaaaaatagtaataggcatatacgacgtggaaaaaaaccaagaatgaacaggaagtctatgtttggctaattcacttaacatcaaggaaaacataatccctttgctccccaacaggcccctatggtggcatcttaaaaaaaaaaaaaaaaggaaaccaaaactattaaaatattcytacacattttcaaaaacacatgagaaacacaatattgaagcacttatcctgctgtctccttttttattataatacaagtaacagaaaggaaaacttgagtactttatgtttctactccatgacattcttcttacttttatattagaaacttcacccttctccacattttcgggagttggcaatgtggaaacctcaaagatactagctctttcagtttattaccatagatataattattgggcatagatatacttgtatctgtgaaaagagacccagagaattgctatcgtgaaacagccagctaaaatgaaaatatagttggaattctgtgctctgaaaagtgggtcataattttatttcactctatctccctaagaaaattcatgaaagtcagtttggatgtttcattcagttatttgacagtaaagatgaaaactacatccagaaatgaagaatgggacaccaaatctcagaaatctgttctacaggaaagttattc

SEQ ID NO: 10270 - DNA, 687 bp, Homo sapiens
ataaaaatcacttaaaaatagtaataggcatatacgacgtggaaaaaaaccaagaatgaacaggaagtctatgtttggctaattcacttaacatcaaggaaaacataatccctttgctccccaacaggcccctatggtggcatcttaaaaaaaaaaaaaaaaggaaaccaaaactattaaaatattcctacacattttcaaaaacacatgagaaacacaatattgaagcacttatcctgctgtctccttttttattataatacaagtaacagaaaggaaaacttgagtactttatgtttctactccatgacattcttcttacttttatattagaaacttcacccttctccacattttcgggagttggcaatgtggaaacctcaaagatactagctctttcagtttattaccatagatataattattgggcatagwtatacttgtatctgtgaaaagagacccagagaattgctatcgtgaaacagccagctaaaatgaaaatatagttggaattctgtgctctgaaaagtgggtcataattttatttcactctatctccctaagaaaattcatgaaagtcagtttggatgtttcattcagttatttgacagtaaagatgaaaactacatccagaaatgaagaatgggacaccaaatctcagaaatctgttctacaggaaagttattc

SEQ ID NO: 10271 - DNA, 687 bp, Homo sapiens
ataaaaatcacttaaaaatagtaataggcatatacgacgtggaaaaaaaccaagaatgaacaggaagtctatgtttggctaattcacttaacatcaaggaaaacataatccctttgctccccaacaggcccctatggtggcatcttaaaaaaaaaaaaaaaaggaaaccaaaactattaaaatattcctacacattttcaaaaacacatgagaaacacaatattgaagcacttatcctgctgtctccttttttattataatacaagtaacagaaaggaaaacttgagtactttatgtttctactccatgacattcttcttacttttatattagaaacttcacccttctccacattttcgggagttggcaatgtggaaacctcaaagatactagctctttcagtttattaccatagatataattattgggcatagatatacttgtatctgtgaaaagagacccagagaattgctatcgtgaaacagccagctaaaatgaaaatatagttggaattctgtgctctgmaaagtgggtcataattttatttcactctatctccctaagaaaattcatgaaagtcagtttggatgtttcattcagttatttgacagtaaagatgaaaactacatccagaaatgaagaatgggacaccaaatctcagaaatctgttctacaggaaagttattc

SEQ ID NO: 10272 - DNA, 589 bp, Homo sapiens
gggataacaggcgtgagacactgtgctcggctaaggtcacactaaytgttagctgggagtggaccccaaacctgttgaaagaacccatcagctttcctttaagaaggtaatgccacagaccacaacagataattgagggttattctgtgagcttccactaaagctaaaacatgtgtggaagggacagaagagaggataacaggtttgctggcctgtttaccacttggggacgtttggatggatgatgaagaagaaaaagaatcaaaaggactggggctcatcacaggtgggaatagtataatattagctcttcattcagaaccatggtagcaaaaagagagaaaactgcatctgtggactgaattattcccctcagccctctaccccagtgtgtcttctttttgggaatagagtagaaagccaggaaaatggtggggatctaggaggaagcaggcatctcctctgacttgcacgtccccctgtttcactgtcctttgttaactcactgtgtttgacagccacatctgtggtcagccaggggtgcagctgctcctactggtagctaatggccatagaacaccaggggcgt

SEQ ID NO: 10273 - DNA, 659 bp, Homo sapiens
ggagggaggggtataggtggagcccacgggatttttaggggagtgaaactatcccatatgacactataatggtggatacatttgtctaaacccatagaatgtacaacacckagagttaactccaatgtaaactgtaaactttagttaataataatgtatcaatgttagcccaccaattgtaacaaatgtgccacatgaatgcaattattatattgcataattattatattattggataatataataatattacataatattaatatattagtaataagggaaactaggggtggggcttgtataggaatgctctgtccttcctgctagatttttctgaaatctaaaactgatcttacaaataagctctattaataaaaaaagaaattagggcagccatggtgtttcacacctgtaatccaggactttgggagaatcacttcaggtcaggagttggagaccagcctggccaacatagtgaaaccctgtctctactaagaacacaaaaattagccagccatggtggcacatgcctgtaatctactcgggaggctgaggcaagagaaacgcttgaacccgggaggcagagattgcagtgagccgagatcgcaccacgtcactccaccctgggcaacagagagagaccctgtctcaaaaaataa

SEQ ID NO: 10274 - DNA, 236 bp, Homo sapiens
cgattctgccgcagcctcccgagtagctgggactacaggcatgtgccaccaygcacagctaattttgtatttttagtagagatggggtttcaccatgttggcgaggctggtctcgaactcctgacctcaaatgatccgcctgcctaggccttccaaagtgttgggattacaggcatgagtcaccatgcccggcccaaagaattagaatttttaccaaaactatagccctctattgc

SEQ ID NO: 10275 - DNA, 236 bp, Homo sapiens
cgattctgccgcagcctcccgagtagctgggactacaggcatgtgccaccacgcacagctaattttgtatttttagtagagatggggtttcaccatgttggcgaggctggtctcgaactcctgacctcaaatgatccgcctgcctaggccttccaaagtgttgggattacaggcatgagtcaccatgcccggcccaamgaattagaatttttaccaaaactatagccctctattgc

SEQ ID NO: 10276 - DNA, 530 bp, Homo sapiens
gcaaaatttgcatgagtaaaactataaagcattcctggaaaaaaacacaaaagtagatctcggtgaacagaaatacacatcaggttcttaccttagaatattcaacatcataaagatgttaattctcactggggcaatttataaacctaaaataatcctaataaaacaccatatttgtcttaagctacaagctgattagttagcttattcataaaaatagataaaaagtaaaactttatgaaagaaaatcagtgagaggaaggatgacaagatgaaattttaaaatatgctataaagtctctataaataaaatagwgtgggattagtgcataaacagaccaatgacccaatatagtatatctgattatagaccaaaatatatatgaaatctcagtatatgataaaggcatcatctgaaatgggtggggaagggactttaataaagtgtgagacaataactaaatgtaaaagataaaattgaatccattcttcacactacacacaaggataaattgcaaaaggatcagata

SEQ ID NO: 10277 - DNA, 1094 bp, Homo sapiens
caggcagatttactttcacgcccaatctactcctagctcatagtattatagtgaaattccattttagttttaaaatagatatagtagcacctatctttaaaagattacttgaagaaagtgtccatgccatactatgcatcatagctttgctttgaaatctcattaaaaatacaaaatgattagaatatgtaatttgcaagtgactattgcctgattcttttgtaatgtttattttgtttttaaatctcttaaccaatattgaaagtgtttttcagtctctaaagtagctgtgagaaaaaaaaatcctactgaagtaaacatttcaagaagcatttatttttgcacttaaacagtcaatatttaatcagtaggttaaacatccaatttcagggttcaaatgcaagctggctgctaacaaaaccactggcaataaatagtatgagtgttctttcatgcagccataaattactgtctattatcactaagctgttgtgaacaaaacctcaaaaaagttgaattggtcataaacttaaaaaatgaatgcatgcaaaatggtcagttttgcatgactcatttgagaatgaaggataatatacccactgtaatgtaaattctctccatgcggagtgttgttgtcttactctcaatatattccatggcagggacatttaatggtacaatacaaatgcaaacatttaattctttctgccaaacactcaatggcaatacatcacatcacacactaagcaaagctaggcaagaaatttgctatatagttaacagtattcaaaattgttataatatattcttttattttcttcactccttatccttatccttatcttcactccttttttcagcacataatacttttgttccactgatgaagcatataaatataatgycacttctttctctgatacacatagctaattttatttttagtgagagtaaacatataggtgtatcctaaatctgaactacaactctcaacttctagcttccaaatcacaagcaaattagaaaagaaatcttgatctgtttttatcttttatagaaaaagttgaattgttaactggtttcttttgtttgat

SEQ ID NO: 10278 - DNA, 716 bp, Homo sapiens
gcaaatcaagaagggatacaaagatgcctaaacagctggtaagacaagtttagttgccttctaaactattatgtgtcacctttgcatccactccaaccataaggaattttctacttactatagaattaaaggaaaatatttactaacaggataaaaataccttgcaacaaagcctcctgggtatttatcccaattatgagttgtgaagagaaatatatttttatctagatacatattttaaaattcttttgcagaacaatgcttatgttttctatagctaattgctgtaagcctgtaacacaaaccaaacttacagtagctcaacacatagaagttaaaaataagtcagtcttataactttgacttttggttttgttcattggctttttacttaaaataataattttaagaggtgatgaatacctgtccacatccattcctatctggcctagaataattaactgactataagtccctctgccatagggagtcctgccaagggacaaaaaacaaaacaaaacaaaacaaaaaaaacactgtagagttatatgacttctcctgtgacaaaacctccttttctctccccaaaacatcagtatagggtacaatacaaaagcagtgagaaaaatagatttgtctactgataacaagtcctatgacratttatttatgtatatattttttgagacagggtcttactcattgtccaggctgga

SEQ ID NO: 10279 - DNA, 628 bp, Homo sapiens
caaacacaaacaattgaacaaacmatggaagcaagtccttttgcctaaaggaacacagagggtcatgcggatgttgctcctccaaggatttcggtgttccccaacggctagttttgggtctagttcttctggaagatcttattcttggggagctacaggttctggcgtttggggctctttcaggttctatctccattttcccctcaattcctccccattctgctataataaaaaaaaattctcacctccggaagatcccgcctgtgcctccccgccagcctttcaggaggtctggacgtctggtccaccgctccccggcttctttccccgcttttgcttttcccctcccctgctcccgccctccggcctcaggacccgaccaccgcccagctgagcccccgcggctccacggcgcagaaggggcactggaggccctgcccgttgccgccccgcggggtgccaagaagtccacgtaaataaatgctttgtaaaaggaacttccccatggaaaaatctctcatgatttcttctcaaggctcttcaaaggactaaaagctaaaaggatggattcattcgacaagtcctagtcctgcgccctggtgagtgccagaccctgctccccgcgagg

SEQ ID NO: 10280 - DNA, 487 bp, Homo sapiens
ttccaaggcctgctcagtcgtcctgccgggcgggccctgaggatgcaagggacggaggaagtttcgtgcgtgcgcccttcctatagcgcccagtagaactgacagtacctgtctctgtggcgcaatcggttagcgcgttcggctgttaaccgaaaggttggtggttcgagcccacccagggacgcttgtttgagcttttaaagtattcatgcattgtcaatcactagataaatggggaagattttatcttcctggagtcctaagccactaatttgtgacttatccatgtcaagggccagcccacctccccraccggattcttaaccgggtatctcctgaaatcctgggtttatacgtgtgtaactcaggaatcctgaaacagagacctaggaacccacttctggtgtgataaaattctaattcagtccgttatacgcttaaacgagtaatttacatgccttcattttttcatatgttaataatagga

SEQ ID NO: 10281 - DNA, 487 bp, Homo sapiens
ttccaaggcctgctcagtcgtcctgccgggcgggccctgaggatgcaagggacggaggaagtttcgtgcgtgcgcccttcctatagcgcccagtagaactgacagtacctgtctctgtggcgcaatcggttagcgcgttcggctgttaaccgaaaggttggtggttcgagcccacccagggacgcttgtttgagcttttaaagtattcatgcattgtcaatcactagataaatggggaagattttatcttcctggagtcctaagccactaatttgtgacttatccatgtcaagggccagcccacctccccaaccggattcttaaccgggtatctcctgaaatcctgggtttatacgtgtgtaactcaggaatcctgaaacagagmcctaggaacccacttctggtgtgataaaattctaattcagtccgttatacgcttaaacgagtaatttacatgccttcattttttcatatgttaataatagga

SEQ ID NO: 10282 - DNA, 633 bp, Homo sapiens
atagtgggaaagggagttccagatatagtggggacataaaagtgggaagagagttgagttttgggaaacagggccatttaggcttacctgggttggtgagtcatgggagacaagctggagagcttcactggggcagcccgtggaggacccctggacgctgtccccccggggctgtgagcctctgagagaggtgattggagtggtgcttttgcatcatgtaggttggctctgactgaggagagaccrgagggatgaggaatgaaaatggttgctggtgatttctagcttcagaggggggcagatggcaagagaaactgaggatgagatggtgggtggagtagagaattgcctgttcttgatttcagaaagggtgaagctggaaggaggaattaaagattgatcttgatattccagttggaatgttgagtataacatctctgctttaaccagaaataaaagatgacaggaggagaaactggcttttcaaggggatgaagttgaaaagtaatgacaattattcacttttggagaaaatttgtgacatttcttgagagtataatcagaacagttccttataatttgcatagcattttaacatttccaaagtgcttttacatactacttccttttttt

SEQ ID NO: 10283 - DNA, 494 bp, Homo sapiens
gtgccctggccagggaaattgtagggagagagggttcccaggtgtgagctatgaagtgctgtcctgggttgggcatgggctatgttcatgtgccgagattccwtgtgttattcagccgaacactctcactggtcaatccagaggtttcgtgtgcacaggatcaccggttatccatgtggcttcttattccacaagggcagaaggaggtcatggcaatagatagtgtgactcagggagaacaacgtgggctcaggagctgatgaaaactgagtctgcatctcatcgctggcacattactagccttaaacaagtcatgccaattctccaaacagcagcttcctcatttataaaatgatgatcaacatgcgcctgctttctctctctctctgtctctctctctctgtctctctctctcacacacacacacacacacacacacacacacacacagacaccttgcatggtagtggtgagaattagagatatgtctaaaa

SEQ ID NO: 10284 - DNA, 553 bp, Homo sapiens
ttttyagtagagacagggtttcaccttgttagccaggatggtcttgatctcctgaactcgtgatcctccctcctcggaactcctttcaatccatcttttcccaggctggcttacactttgagtatccccaggattaaggaagaaagctccccaggaaacagaatccaaatgtcattgaagagtctcctgggtcattagaacccaagagagccaggagttatggcttacaaagtaggaaaaacaattcaattgagtagaaacaaacagccctggaagttctctcaaactccttgaagtccagactcatagaactgaggctcagagaggagcagaagccccagacttccgaggacctgcctcttcccagaggtgacgtgtggactgtccacccctcagggaaactcacagtctctcccagggtgagtccttaccctacaaggcacatcagcaagatggtcattatcagcataacacatggtccccaacgtttgcaccccaaatacccacaaaagtacagatggttcccgacttaggatggttcttaattgaaaac

SEQ ID NO: 10285 - DNA, 553 bp, Homo sapiens
tttttagtagagacagggtttcaccttgttagccaggatggtcttgatctcctgaactcgtgatcctccckcctcggaactcctttcaatccatcttttcccaggctggcttacactttgagtatccccaggattaaggaagaaagctccccaggaaacagaatccaaatgtcattgaagagtctcctgggtcattagaacccaagagagccaggagttatggcttacaaagtaggaaaaacaattcaattgagtagaaacaaacagccctggaagttctctcaaactccttgaagtccagactcatagaactgaggctcagagaggagcagaagccccagacttccgaggacctgcctcttcccagaggtgacgtgtggactgtccacccctcagggaaactcacagtctctcccagggtgagtccttaccctacaaggcacatcagcaagatggtcattatcagcataacacatggtccccaacgtttgcaccccaaatacccacaaaagtacagatggttcccgacttaggatggttcttaattgaaaac

SEQ ID NO: 10286 - DNA, 553 bp, Homo sapiens
tttttagtagagacagggtttcaccttgttagccaggatggtcttgatctcctgaactcgtgatcctccctcctcggaactcctttcaatccatcttttcccaggctggcttacactttgagtatccccaggattaaggaagaaagctccccaggaaacagaatccaaatgtcattgaagagtctccygggtcattagaacccaagagagccaggagttatggcttacaaagtaggaaaaacaattcaattgagtagaaacaaacagccctggaagttctctcaaactccttgaagtccagactcatagaactgaggctcagagaggagcagaagccccagacttccgaggacctgcctcttcccagaggtgacgtgtggactgtccacccctcagggaaactcacagtctctcccagggtgagtccttaccctacaaggcacatcagcaagatggtcattatcagcataacacatggtccccaacgtttgcaccccaaatacccacaaaagtacagatggttcccgacttaggatggttcttaattgaaaac

SEQ ID NO: 10287 - DNA, 529 bp, Homo sapiens
aagcaacatttttcacttaaaaatatgtcctgaattttacttcatgtcattaaatatcttgcaaaaacatcatatttaatktttttttttttttttttttttttttttttgagacggagtctcgctctgtcgcccaggctggagtgcagtggcgggatctcggctcactgcaagctccgcctcccgggttcacgccattctcctgcctcagcctcccaagtagctgggactacaggcgcccgccactacgcccggctaattttttgtatttttagtagagacggggtttcaccgttttagccgggatggtctcgatctcctgacctcgtgatccgcccgcctcggcctcccaaagtgctgggattacaggcgtgagccaccgcgcccggcccatatttaatgtttaagagcagtccattatataaatattcctaattttatataagtcaactgaatggaaattatgtagaacattaaagagctgaaaagacaccatggtagggaaaaggggaaaaaaccctacagggca

SEQ ID NO: 10288 - DNA, 527 bp, Homo sapiens
gcattaatgcaaattaatgttgttacaggtttttattccctttggagtaaaattaaaactaaataaatcaaacagtaattagaaaactcaataagaaagctatttagcttaaaactgacaatgtttataccagtgctttattcactacagttttattgtgctattctgtcttgatattttagtgaaaaaaaaaattwaaaaaaaattcagcttatttttgccaaaatttcaccaaattgctttaacccataaatattttcaaaaacattcccaaactgtctgtcccactgaattggccgatcagtgtagacttgcccccttgtattgctgtttaactgcatcacgtacatacatctggtatccccatccagctttaacctcttagagaacagatatgttagcttacatacttttgagtagggtggccaacttgtcttggtatgcccaagactttcctaatttggggaatgaaaggtccacatccagggaatgcccttagtatcaggcatagtgggatagttggtcac

SEQ ID NO: 10289 - DNA, 758 bp, Homo sapiens
gcttgtttatttgtactaccaatatagaaaagagaataggatgttacttttgtgattgtattataaagtctcatgatcttgttagctgattctctctattgctttcttggcttgcatgctttgatgaagcaagctgccatgttgaagagatccacctggcaaggaacagaatatagcctttggccaagagccagcaaggagccgagaccctcagtccaacagcctatgagggaatgaatcctaccaacaaccacagagggttagaagcagatacttccctagctgagtcttcagatgaggccctaggcttgactgacaccttaattgcagccatagctgcacccagtccactgtacataatgtgttaaaattaactccctttgtggcaattctatttctaacatttacaatgtaaagtttccagtgtacagaagtgygactaacatatgtcttatgtatattatactatagcaatcaaatatttactttgaaattccatataataaatttttatatactgtatggcaacttggtgattttaatgtagccaaatggaaatctggtcttatgtttgtttacttttgacaaagaaaggtgataaaacctcttgtagatgagctgaaagtttcttagtttagcagatgttttttgtacaagaatgcactattgtatttacttaacatctgtaatgagattttgtttgctttatcaattgcctaacatatttgtatctcattgttcttgttaaagaacttact

SEQ ID NO: 10290 - DNA, 520 bp, Homo sapiens
ccatattgaaagacccaccataaactagactctccaactcaaacaaatagcttctttcaccttctcttcctaagtcactactacagcactgtcgatattagtgacctatcatagagcaataagaaataaacttggttttcctttataaatgggttggtctggtagatggcaatggacaatctgttttatatttagatcattctcttttcaataaataggtctctgtcttgaaaaactaaggattacatgtgcttgatatgatcttttctgcacatgttagcaasaaaatgttctgggcctttcatgaaaaggagaaattttggtattcaatctatcattaaattccataaaattagggttgccatattaagcaaataaaaatacagaacagccagttaaatttaaatttcaaggaaacaataagtaatttcaaattataagtgtgtcccaaatattgcatggggtcctgtgtcttatcaagcaaccctacataaaacctgtgctgcaggacttgtggctc

SEQ ID NO: 10291 - DNA, 541 bp, Homo sapiens
caaaacatattctaatgcacattttctttctttcctttcttttgaaaggtttcttcctgtttccatgtgcgtttattgtcctggagaatttaatttgtgtcaggtttttcatcattgctagggaaactcctccctatagtgcagagaaagtcakttacaaattcagctaaatggcaagggtcagtaacccgaggtctctgctctgtgcctcacttcaactctgctgctcacacagatttctaggctagggtggcatcattttccctgaaaagctttggagcattgcctcagaagacggctctgaaataccttcaacttctcagcattttgccagccctctatgactaatctgaaaatgaatcttttgagagaaaggaggaggaaaaaagcaaaaagccaccctcccaagacaaacaatgagaaattgttaaaaataatagatgctttattgtttctctttctaaaggccatatttttggctggctttagctattatttattcccatggggcacatttcatttttctctgaaagattgtata

SEQ ID NO: 10292 - DNA, 577 bp, Homo sapiens
actgtgcaggcccttgggcaagcatacttgtgaacaaaatgcctttacagtcatcccttcttccaaaacacaggcagcttcacgctttgttgagctggtacttgagtcctgcagaggcacacaggttctgatgcgatggcttcgagaaaacagacygtgtctactttagatatctaaagtcagcctactacacccagacattctcttatccatctccagttaggctggaaaaaggaagactcagagtggcttgatggctaattccatgtgctctgatggagtgtcaggaagaaggacaaggtccattatgaccagtgggcaaaatgatagccagtgggtggaagcaatgggaggaagcttctagcccatccagcaggggttctttctcctcattaggatggtctgaagctggaatgagccagctctcaagctcacaattggcttatcactgaagatgtccagaggggggcctccactgacaacccttgacactaattctttgcatggtcttggcccagcatcacagagtgacgcagactggcctcacaggagcagctctggaaaatggagagacatc

SEQ ID NO: 10293 - DNA, 577 bp, Homo sapiens
actgtgcaggcccttgggcaagcatacttgtgaacaaaatgcctttacagtcatcccttcttccaaaacacaggcagcttcacgctttgttgagctggtacttgagtcctgcagaggcacacaggttctgatgcgatggcttcgagaaaacagaccrtgtctactttagatatctaaagtcagcctactacacccagacattctcttatccatctccagttaggctggaaaaaggaagactcagagtggcttgatggctaattccatgtgctctgatggagtgtcaggaagaaggacaaggtccattatgaccagtgggcaaaatgatagccagtgggtggaagcaatgggaggaagcttctagcccatccagcaggggttctttctcctcattaggatggtctgaagctggaatgagccagctctcaagctcacaattggcttatcactgaagatgtccagaggggggcctccactgacaacccttgacactaattctttgcatggtcttggcccagcatcacagagtgacgcagactggcctcacaggagcagctctggaaaatggagagacatc

SEQ ID NO: 10294 - DNA, 577 bp, Homo sapiens
actgtgcaggcccttgggcaagcatacttgtgaacaaaatgcctttacagtcatcccttcttccaaaacacaggcagcttcacgctttgttgagctggtacttgagtcctgcagaggcacacaggttctgatgcgatggcttcgagaaaacagaccgtgtctactttagatatctaaagtcagcctactacacccagacattctcttatccatctccagttaggctggaaaaaggaagactcagagtggcttgatggctaattccatgtgctctgatggagtgtcaggaagaaggacaaggtccattatgaccagtgggcaaaatgatagccagtgggtggaagcaatgggaggaagcttctagcccatccagcaggggttctttctcctcattaggatggtctgaagctggaatgagccagctctcaagctcacaattggcttatcactgaaratgtccagaggggggcctccactgacaacccttgacactaattctttgcatggtcttggcccagcatcacagagtgacgcagactggcctcacaggagcagctctggaaaatggagagacatc

SEQ ID NO: 10295 - DNA, 577 bp, Homo sapiens
actgtgcaggcccttgggcaagcatacttgtgaacaaaatgcctttacagtcatcccttcttccaaaacacaggcagcttcacgctttgttgagctggtacttgagtcctgcagaggcacacaggttctgatgcgatggcttcgagaaaacagaccgtgtctactttagatatctaaagtcagcctactacacccagacattctcttatccatctccagttaggctggaaaaaggaagactcagagtggcttgatggctaattccatgtgctctgatggagtgtcaggaagaaggacaaggtccattatgaccagtgggcaaaatgatagccagtgggtggaagcaatgggaggaagcttctagcccatccagcaggggttctttctcctcattaggatggtctgaagctggaatgagccagctctcaagctcacaattggcttatcactgaagatgtccagaggggggcctccactgacaacccttgacactaattctttgcrtggtcttggcccagcatcacagagtgacgcagactggcctcacaggagcagctctggaaaatggagagacatc

SEQ ID NO: 10296 - DNA, 569 bp, Homo sapiens
tgatgaatgaatgctaaatacacgacttactggtagaaggcgtcagagagtcgactccttaaataacccagcacacagtccgccagcctcggctccaccaaaaatcgatgggagcctgccatgggcgaggaccttctcttgtatttgtgtaatcccagtcccagatccccgactggtcagggactttgttctccagctttgcccaagatgacagttgggctcagagctggtgatgtgacttgcccaaagtcacacaggtagcaagtagcacgtcgggatttgaatccgggttaaaggactccacgtccagtgctctttctatccaaactccagagggaggggaccctgctgacaccttaatstaccctggcctccctggaggcttttctcattggaatcccagagttactaagacttataaaggatagaactgtccccttaatcccgggcatgggggctaatgccagtaatcctagcacttagggatggagaggtgggaggatggattcagcctgagttcgagaccagcctgcgcaacatagcaagatcccgtctcaaaaaaataaaaa

SEQ ID NO: 10297 - DNA, 504 bp, Homo sapiens
tcatgtgatttatacaataatggaagtgagtctatacatgcttttgagtgatttttaaaaattattttatttaaaaacttacaaatataaactggattactaagtgtatatcacaaragtatctaatttgaatagcgagaactacatacgctattacataggaaaaaaaagtgttttaacccaaaagggcatagtgatcgactaattcaagtggcccaacaagcttggagggcacccaccaccccacctggcagaattattccaggcttctgccaacattgtgacattttaagagtctggtaaaagcaggaagtttttagtaacaatggaattaatttatcagcaattaaatcctttaaagcatctgacagttatcctgcattacaattaatttggatccacttacaggcaaattacaaaagagaggaaagaatttccagatttccaaccatcatctgaattccccttccccacatgcctagtaggagatggcagaaaatgaga

SEQ ID NO: 10298 - DNA, 504 bp, Homo sapiens
tcatgtgatttatacaataatggaagtgagtctatacatgcttttgagtgatttttaaaaattattttatttaaaaacttacaaatataaactggattactaagtgtatatcacaagagtatctaatttgaatagcgagaactacatacgctattacataggaaaaaaaagtgttttaacccaaaagggcatagtgatcgactaattcaagtggcccaacaagcttggagggcacccaccaccccacctggcagaattattccaggcttytgccaacattgtgacattttaagagtctggtaaaagcaggaagtttttagtaacaatggaattaatttatcagcaattaaatcctttaaagcatctgacagttatcctgcattacaattaatttggatccacttacaggcaaattacaaaagagaggaaagaatttccagatttccaaccatcatctgaattccccttccccacatgcctagtaggagatggcagaaaatgaga

SEQ ID NO: 10299 - DNA, 550 bp, Homo sapiens
gagcccagcatgctgccaccacctcatccgtttgagacaaataggagagtcttgaactcacaccgtccttgcaactcaaccccaatacagcctgtccctttgtttgaattatatcatcacctcctacctgcagtgagccacaggactcatgtctgtttgaaactaatattatgtttctgcagacacctgttcacctctgtttggaatgagaatgaaaggaacctctgactacataaccatgaactgagccactttttctcactgcttccaaattctatagaccctgaatatccatcatgcctctagatatttatcatatttactcagcacatatttttgaagtattgccacattttcatatttcatctccatgcctcccctaaatattaggtggctatagcctaaatatttaataaaactgtggctcagtaaagttaggaaacatttttaatgtgacctgttagtagaacaataagaagactgaatccccagttkccaaagtttctttctttttttaatgtaattgtgaagtttcttgttagagggattc

SEQ ID NO: 10300 - DNA, 1297 bp, Homo sapiens
tttccacatgagttcaaaggtaccctggtggctgaggggccactgggtcagtgcacacacctgctgcccacagcgacaaacgcagaaactcctcagtgagctcgagaccaaaggagctttgtagatgcagaacaaaaagcagacccaaggtccartgcagatacgttaccactagtagcgaccacatcctctggaagaaggcatgctctaaaacaggcagtgtgatctgcagccacggggggtaactgacagcaagggcctgacaggcatggcctgtgactacggagcacgcctgtcccccaggctgagcatcacatacacccctcggttgtggagcagggaacctcaggcttggaagacgcactttctctgccagggctctttttaccttctcaaaaccaacccatctatatttttaagttgtactctttaacacttcagcacatgaatatattttctaaggaaaccattccaataggatagctaagtcaaagcaccccttgaatccggagccgctgatccctggacccttctcagagcaagccttggtagtggtctgtacacagtgcctggggtcctgccggcctgtctcccatgcattcacctgcgtgttggcatgtatagaaaaaggacagaatattatttttttattttttagacatggacttttgctctatcacccaggctgaagtgcagtggtgccatcatagctgtgtgtagccccgaaatcctgggctcaaggggtcttcctgcctcagcctcccaagtagctgggattacaggcatgagccactacagctggccagaattttgttttgtatgtattcgtgtttttaataaaaatagcatcacagcataagtaactgttttgcaatttactttttttcaattgactgtgtttccacatcaattcttagagctctgtgtctcagcctttttaactgttgcatagaagtagggtccagagacaaccaagaaccagcctgccaggagtcctgatggccattctcagcagactgaaggacatcatgaggtccctggggagccaccaaagggtctttgagctggagagagagatggggagatttaggttttaacagcgtctccctggctatggagaggagaatgaattacagggagtgaggctggagcaggaacaccagggaggaagttctgacactgaaccaggcgagggacgctggtggcccggatgagggcagtggcagtaagaatggagtggctggggaaggccaagggacatttagatggaagaatcaagagacctggccactggctg

SEQ ID NO: 10301 - DNA, 619 bp, Homo sapiens
tgggcattgggcatcaggcacacaccagtgaaggagacatcatcttgccctccagaatgaaccctgaactccacatgatgaccagagatggatctcctttcttagaactcggaaaccaagcaaatggccagagttttacaagaagcataaatagccaaggggtttcctggccaaagaagctacgtcttgggcctacaaaaggcactaccacctttggcaaaataggggtgagtgaaggccgtgcaattcatgagccaaggaccttctcacaggagtgaaactggcrttttgctacacagggcatatttcaggtaaacacacaggcaatggaacataaagataggtgtgtttattgcctctaggtagcaagcgattaaggacttctaagtgtgtcaccagaagcgatgcttagggccaccgaggcaagctttactccctcattcaaaattatggatgttgcctcgccagtggatcatgcgatcgttcatgctataaaacaagtcaggcgtaagaaactgctctctaacaaaggatctcaaccttggaggagagttctgtatcattcattgtcttacagacaattgtaagacaaatctggggaatcaagaaccttattctc

SEQ ID NO: 10302 - DNA, 619 bp, Homo sapiens
tgggcattgggcatcaggcacacaccagtgaaggagacatcatcttgccctccagaatgaaccctgaactccacatgatgaccagagatggatctcctttcttagaactcggaaaccaagcaaatggccagagttttacaagaagcataaatagccaaggggtttcctggccaaagaagctacgtcttgggcctacaaaaggcactaccacctttggcaaaataggggtgagtgaaggccgtgcaattcatgagccaaggaccttctcacaggagtgaaactggcgttttgctacrcagggcatatttcaggtaaacacacaggcaatggaacataaagataggtgtgtttattgcctctaggtagcaagcgattaaggacttctaagtgtgtcaccagaagcgatgcttagggccaccgaggcaagctttactccctcattcaaaattatggatgttgcctcgccagtggatcatgcgatcgttcatgctataaaacaagtcaggcgtaagaaactgctctctaacaaaggatctcaaccttggaggagagttctgtatcattcattgtcttacagacaattgtaagacaaatctggggaatcaagaaccttattctc

SEQ ID NO: 10303 - DNA, 619 bp, Homo sapiens
tgggcattgggcatcaggcacacaccagtgaaggagacatcatcttgccctccagaatgaaccctgaactccacatgatgaccagagatggatctcctttcttagaactcggaaaccaagcaaatggccagagttttacaagaagcataaatagccaaggggtttcctggccaaagaagctacgtcttgggcctacaaaaggcactaccacctttggcaaaataggggtgagtgaaggccgtgcaattcatgagccaaggaccttctcacaggagtgaaactggcgttttgctacacagggcatatttcaggtaaacacacaggcaatggaacataaagataggtgtgtttattgcctctaggtagcaagcgattaaggacttctaagtgtgtcaccagaagcgatgcttagggccaccgaggcaagctttactccctcattcaaaattatggatgttgcctcgccagtggatcatgcgatcgttcatgctataaaacaagtcaggcgtaagaaactgctctctaacaaaggatctcaaccttggaggagagttctgyatcattcattgtcttacagacaattgtaagacaaatctggggaatcaagaaccttattctc

SEQ ID NO: 10304 - DNA, 565 bp, Homo sapiens
ataaataagctttctatggttaaaaactgtgcacttggagatagaaatcagattacaacaacaaacacaacaaaagaataggatggtatcatttcccatcccacagtcccgtttgttaagcaaaacctgccgtaagacaaaaaaccctcctaggttagaaaagccgcactgtgctctccttggtggcccctctccttataggaagcctctggggcagctgtgagcagcaggtttgggcagggggtcrgggaagatctgtctttcctgacattccccgaggtctccagtcccataaggtgcctgacacccaccacaagaacatttcttaagaaacatctcactcaactttcagacattttagattcatttcaaacaagtaggtgtccccccaatacatggatatatatatatgtataagctgttcttatcaaacttagagttataatcattgaaaagcaattgttacattgtttacagcattttatggagccctcctcccccccgcaaggtggtaaatatttatatttctctcattcatgtccagtgttgtctgagacgtctacta

SEQ ID NO: 10305 - DNA, 496 bp, Homo sapiens
ccccccaccactctatttccctcctcttctgaagttcctactccaatatcccaggggcttatgtatcccaatcctcgtctcagttgacattactcctgtcttgctgccccagacacatcctcctttttcccaccaactagaacttggccactctcttgaattctgcagctcctcaaggtaatatattctcacaaagccaccatttccaaagcacccctaccctacaacactcccagactggcagggagctgaagtttccagtctmtgccaaatgtcccagaatcacccttcgtcctctctgccttactgtccccctgtaccactccacttccatgccctgaccctagggcaagtgacaattctttcaagggaaaaatcagtacccgcttttcacattaacattgtataacactctgcagccccaccatcatggtagtcctgccttatttgaggttttgctttctgcagtttcagttactcatggtcaactgtggtc

SEQ ID NO: 10306 - DNA, 496 bp, Homo sapiens
ccccccaccactctatttccctcctcttctgaagttcctactccaatatcccaggggcttatgtatcccaatcctcgtctcagttgacattactcctgtcttgctgccccagacacatcctcctttttcccaccaactagaacttggccactctcttgaattctgcagctcctcaaggtaatatattctcacaaagccaccatttccaaagcacccctaccctacaacactcccagactggcagggagctgaagtttccagtctatgccaaatgtcccagaatcacccttcgtcctctctgccttactgtccccctgtaccactccacttccatgccctgaccctagggcaagtgacaattctttcaagggaaaaatcagtacccgcttttcacattaacattgtrtaacactctgcagccccaccatcatggtagtcctgccttatttgaggttttgctttctgcagtttcagttactcatggtcaactgtggtc

SEQ ID NO: 10307 - DNA, 637 bp, Homo sapiens
atcctactgggtgtgaagtggtatcttcttgtggttagcttgtaagattttgtgtgtcttaatttgtctttcaaagctagagtgataggaaatattttccagtccttgcatttgagctaatcttagtgcttacccagtgccactggtttagttatggttttcttatccatcctttgatgagtattcacctaaacatatttacatcaactaacttcagaagtggaagtgaacttttaagtaactctccagacatggttcactgagacagtaaactaaaaatttactttaagcattctcaagaatgttttactttatttactttcaaaatatattaacttttttccatcaatatttgatatttaacttggaaaaaggatttttaaaggatgaaactgaaagtaagacattaacatttaggtggctgtaggttttttgttcatatgttaaatacttctgtgtttctgtagcactgagttcattagattcataaatatttacatttctgtcttccccagactgaacgcctcccaggctagagactgggacttaattatccctgtatccccattgcttaatatagtgcttggcatttaataggcactaatrtccattgcatgtgcagacattgtagacaaac

SEQ ID NO: 10308 - DNA, 525 bp, Homo sapiens
gataggtgaaggagggatctctataaatgaagtactttgaatattagtgttgttaaatatccatgtttattagtcattggcattttgtaaattgcttttcttgaaagttttttgcctatttcttttatgtgggttcaccttttgttctttttgatttgtcaagattctgcattaaattgagaatgaaaacctttgttttatatactttagttttttcaatttrtaatttggcttttaattttctcactctttttaccattcagaagttaaagttttttattttcaattgtgaaaatctgttccttcatgattggtatctgtcattctttcaaaaaatattgttatctgtcatgtttcaaaaaaatatttccaggctgggcccaatggctcacgcctataatcccaacactttggcaggccaaagcggggggatcacttgaggacatgagttcaagaccagcctggccaacatagcaaagctccatctctactaaaaatacaaaaagttagctgggtgtggtggca

SEQ ID NO: 10309 - DNA, 595 bp, Homo sapiens
ttaggtaattactttttctaccacttctactcgaggtagacaggaaggaagctacggcatgatttccactctgatcacatactcttttttgactctccatgtctagtccaatatacatagtctagtgtatagtaactattacaagtataccaaaatataaatggcttcaaggtatatataacctaaggttaaaacaaattagaattcatattatgataattaacatggcacagagttaaagtatttactgttaawaattcacttagaataataggcatgtttagcctaagtaaccgatggcacaatacttatatgtctaggaggaattctttttatattagctttcaaaagagataataagatcctttccacatggtttgggcttacccctttgacttagagcatgccactttttactagatgtaaaaatgccataaaggtctaagtcacaggaaagtaacacgggttggccacacctgattctttcttaactcttacaccttgaaggcagaaagactagaataaaacccaagcatttggatgttaccagaaatatctataatatttccttttggaaacataaatgaaaatttta

SEQ ID NO: 10310 - DNA, 610 bp, Homo sapiens
ttgggggctgtttttcattaaaaggaaaatcttacccaggacttccttaccctcactatctgcctaaatttctttttaactcctatatcgctatggctgatgggaaaaaatactcattaaaaatatcgtggcataataatatatgctgtattgtaggaaatctaaaatctataaagtgggttttcttttaattacagaatttgcatcttcccctgatcccttttaccacagtcctgtttttctatttcttcatttgctggtgctctgggcattgttttcwctgtaagtcctatatccagaggtgccactcatgtatacaaatctgagctacgagggtttaaacagtaatttaaatggtgatattgtacttgggataattgctgcaaatgttatgatttattttttcctatagacaacagcttgaccctagcaactaacacaatctatcacctgctgccaagcaaccaagagcaagaaaagaagtggttagaaaaggtatcaccagctctggagttttatggtcagtaaagtatggaagaataaaaagaggctctcaaaataagtcagagcacagcaaatacttctctaaaccaagttctgattttatact

SEQ ID NO: 10311 - DNA, 634 bp, Homo sapiens
cagtgataagataagcaaagtgttttaaaccaaagaaacatgggctagtatatacagccagatgtcaatgagggtaccctggtatcmtgggtcaagagtcattaatatattgcagttaaaaagtcattttactgaaatttatggaaaaacaaagaaaataaaaaatgttttcttttacattaatttgctgtgctgtaaattttaggtgttgcctgattagttgttctatgggattcttctttgacctttttaggtacagacagtgcaaaggtggtgtgcctagtgagcttggatgtatcaaacagctgtaagaaaatctctccaaccttctctgaataaaggaggaatgtggtgtttattgaggaacaggcaacccttacatttgaataaaagatgccatatagtgagtccattactcattttcatattcttcctgtttacttctgtcagtatgctgtgttttactttagtaaattaaactattgcatcaattatttttcccaattaccctgtttggtagcactctcttaacgttcttaaagttaactgtagcctctttaataatctgcttccacagcctgttctcaccctgcttgactcttacctagtttgacattcccaataccctctattc

SEQ ID NO: 10312 - DNA, 644 bp, Homo sapiens
ttgaaaacactttttaaaaaatttgaaagccttcttgacttagtttttgtttttacctgttaggagtagatttgggagaagcttattttacaggcgtgttcataattttaatccgtgttgtagagtgtgtcacagtatacagccaaatcaccaggtttatttcccctctcagaaaaccagatttcctctctcaagttgtgtgtgtgtgttttttttaacttttattttaggttctggggcacatgtggtttgttacataggtaaacttgtgtcactggggttcattgtacagattaattcataacccaggtattaagcccactacccaatagttgtcttttctgcctctctccgtcctcccacccctcaccctcaagtagaccscgctgtctgttgtttccttcttcgtgtccatgagttcttatcatttagctcccacttgtaagtgagagcatgaggtatttgattttctgttcctgtgttagtttgctaaggataacaacagcctccagctccatccacgttcccacgaaagacatgaacctgttcttttttatggctgctctcaggtttaaaaattagagaaagagaataattttttttgtgcttctgaatggaagttgtaattcatggaaaatagaata

SEQ ID NO: 10313 - DNA, 592 bp, Homo sapiens
tggggatatgcatggaatcaggtgagaaagtaccccctaaaaatctgcaccccctaaaaaggcggtgacaattttatagcatctttatgtcttgtgtatgccatgatttcaccacaatctcaggatttggagggcatcttttatgataacctcttacaaatgagaaaactgaagctcaaaaagcttgaatgacttgcttacaggtctcatcatctgaagataaaactagttgtaaaatgaaggttttttgactccccgtcctttgatctgtagcacatggctttgaacttccaaagtgctcttctctggataagaaaaatgcagctatagatatggggatataaaatgatttgatggcagtcaaataaatagtggatgagccaggactcaaactcctgtttcctaaattatctctaaccactaatagtaaaaattttgwgtttatattgttgttgtttgttaagtaataaaaatctcacctagcagagaagaagggtgccgcagggaaatgagacctgaactagggaaacagagacctggggtctctggctgtgtcacttgttcactgtgtgagagctttgacaagtcactt

SEQ ID NO: 10314 - DNA, 516 bp, Homo sapiens
atgaatggtggtaaaatctgtgaattatgtgaaataactgtaatgtacrtatatttttattctaataaacttttgaatcctagattggattttattagaaaaaataaaaataaaacatacattgactcttccccagagtcactgggggagctattgacatttcggttgggtatgttttgatgtcaggtctgtcaggtacataataagatgtttgacatctctggagaatgccaggatcctcataattgtgacaaccaaaaacatgtccatgcatttctagatgcaccctagggaattggcactgccatggattgagaaccactgctctaacttcttacaggttttcacatctgtcctattacatttagagcaatgttagagaattaaaatctcttaaaatctcaaaagggaatcatttacctgaaattcgttcagcttcatgttggtgtccttttctcctattaaactaaaataaaaaataaacttaatacagaataagcctgtttatagaatgca

SEQ ID NO: 10315 - DNA, 543 bp, Homo sapiens
gcaccatgtatttaagcacttgactaatctgcagcccagttaaatggaatggtcccactggacggagctgcccagccagttgcttctcagtgagcattaactggtgagggagctactctggaccgtgccggcctttgcctccgctgagctcttgctcagccctaaccaaggttgaacgtggattcggggccccaccagtgagggaaactgaggcagggggccagaagggcacacagttggaggagacccaaagaatatcccaagaatatctggtccaagtctctgtttggaggatgggactgccgagccctgagggcagggatggtgtggatcacatggaggatcaggctgaggtgggtctggaacccaggtgtcctgctcccaacccagggccattgttcctgcattgcgtgtctcagatacatttggggttgagcgacaaaatcatccaggagggaagaataaaggyaggggctggggtgggacagggacctcggtgtaggctgtgtgcagtttaattgctcacctgcttgttgaactctg

SEQ ID NO: 10316 - DNA, 624 bp, Homo sapiens
atgggttctccagggttccttcctccatgctcttctcactttatgtcccttctcaaagtgagctgtctcrtcccatggcctcaatcactacccacaggctggaaggaaaagtgagtggcagggccgtaggtagggtcgtaaataccatgttaaggattgagggtgctaagagcccagaaagcatgggattgttggtggggggcttgtgacatggccagatattcattttgaaaagcttctggtcatagctgtgtggggtttgtgtacctgtggtctcagtgaggggtcctgagcctcttcactgagtagggtgaagggatagagagtggggcatggatttcacaaggtttcaaggtaaaaccagcaagggcttgatcaggagcactaaagggaaggagctgaagtggggtgactcccaggtttccagctggggctggaacaggcaatcaggtttgggcaggagatgctgcactgagtcttggactgctgtgtttgaatcatctttggttcttcaaggtgggggtgtccagcaggcaactagctgtgggctctaccctcacagagtgggcaggacagagttgtccacatgaaattctgtaacatccatgagcagggtgagctcat

SEQ ID NO: 10317 - DNA, 624 bp, Homo sapiens
atgggttctccagggttccttcctccatgctcttctcactttatgtcccttctcaaagtgagctgtctcgtcccatggcctcaatcactacccacaggctggaaggaaaagtgagtggcagggccgtaggtagggtcgtaaataccatgttaaggattgagggtgctaagagcccagaaagcatgggattgttggtggggggcttgtgacatggccagatattcattttgaaaagcttctggtcatagctgtgtggggtttgtgtacctgtggtctcagtgaggggtcctgagcctcttcactgagtagggtgaagggatagagagtgggscatggatttcacaaggtttcaaggtaaaaccagcaagggcttgatcaggagcactaaagggaaggagctgaagtggggtgactcccaggtttccagctggggctggaacaggcaatcaggtttgggcaggagatgctgcactgagtcttggactgctgtgtttgaatcatctttggttcttcaaggtgggggtgtccagcaggcaactagctgtgggctctaccctcacagagtgggcaggacagagttgtccacatgaaattctgtaacatccatgagcagggtgagctcat

SEQ ID NO: 10318 - DNA, 595 bp, Homo sapiens
agctctggaagataatcctgtgctgttttttatgtagaaaaaaacataaggctgggtgcagtgctcacacctacaatccctgcagttttggaggtcatggcgggaggatcacctgaggccaggagtttgaggccagcctcagcaacatagcatctacatctatttttaatttttattttttaaagaaaaacaatagaagagaaggctgatcccaagctacagggtttttttgtttgtttgtttgttttggagacagagtcttgctctgtctcccaggctgsagtgcagtggcacaacctcggctccctgcaactttcacctccgggttcaaacaaattctcctgcctcagcctcccaagtagctgggactacaggcacccgtctgtacgtccgactaacttttgtaaaaatagtagagacaaggtttcaccatgttggccaggctggtctcgaactcctgacttcaagtgatccacccacctcggcctcccaaagtgctgggattacaggcatgagctactgcgcccagatgccaagctagagttttaaggcaggaaatgagagaaagatattgagagaggaaaaccaggtggta

SEQ ID NO: 10319 - DNA, 595 bp, Homo sapiens
agctctggaagataatcctgtgctgttttttatgtagaaaaaaacataaggctgggtgcagtgctcacacctacaatccctgcagttttggaggtcatggcgggaggatcacctgaggccaggagtttgaggccagcctcagcaacatagcatctacatctatttttaatttttattttttaaagaaaaacaatagaagagaaggctgatcccaagctacagggtttttttgtttgtttgtttgttttggagacagagtcttgctctgtctcccaggctggagtgcagtggcacaacctcggctccctgcaactttcacctccgggttcaaacaaattctcctgcctcagcctcccaagyagctgggactacaggcacccgtctgtacgtccgactaacttttgtaaaaatagtagagacaaggtttcaccatgttggccaggctggtctcgaactcctgacttcaagtgatccacccacctcggcctcccaaagtgctgggattacaggcatgagctactgcgcccagatgccaagctagagttttaaggcaggaaatgagagaaagatattgagagaggaaaaccaggtggta

SEQ ID NO: 10320 - DNA, 595 bp, Homo sapiens
agctctggaagataatcctgtgctgttttttatgtagaaaaaaacataaggctgggtgcagtgctcacacctacaatccctgcagttttggaggtcatggcgggaggatcacctgaggccaggagtttgaggccagcctcagcaacatagcatctacatctatttttaatttttattttttaaagaaaaacaatagaagagaaggctgatcccaagctacagggtttttttgtttgtttgtttgttttggagacagagtcttgctctgtctcccaggctggagtgcagtggcacaacctcggctccctgcaactttcacctccgggttcaaacaaattctcctgcctcagcctcccaagtagctgggactacaggcacccgtctgtacgtccgactaacttttgtaaaaatagtagagacaaggtttcaccatgttggccaggctggtctcgaactcctgacttcaagtgatccacccacctcggcctcccaaagtgctgggattayaggcatgagctactgcgcccagatgccaagctagagttttaaggcaggaaatgagagaaagatattgagagaggaaaaccaggtggta

SEQ ID NO: 10321 - DNA, 620 bp, Homo sapiens
aactaaatacatcaaaaaacatatataaaacgtagttgtggtttggtgttccttggaggaaagactctctaggttaaaaagaatcwatatttcctagctgtaatcagatttgtacggataatataagccaccattactatggccttttcctcctcagctggtgctaaaacctctggacagcttagagaaaagtaaattttgctctgtggataatacgtgaggtttactacatttcatatttcgtcttgcatggtccagtgtgtccatcaacacaattttacaaaatatcaaatccagtccaataaatgtttaagtcatgttctctctgcttgggtacctagaactgttagcttatttgatttaattatacaagagcaaataaataaaacacaattaccagaaaatttcaagctatgcatgctcaataaatttattcatttcaccaccagaaaacatgccaaatagtctggcagaaaattcaaatgatctgatgatatttgattaaaactgaagtaaaatcaatggggagaaaacttcagtcattcccaacaggaaactcagatcacataagaattaagttaactcttggataatatttaagattcactatttgaaaagcc

SEQ ID NO: 10322 - DNA, 620 bp, Homo sapiens
aactaaatacatcaaaaaacatatataaaacgtagttgtggtttggtgttccttggaggaaagactctctaggttaaaaagaatcaatatttcctagctgtaatcagatttgtayggataatataagccaccattactatggccttttcctcctcagctggtgctaaaacctctggacagcttagagaaaagtaaattttgctctgtggataatacgtgaggtttactacatttcatatttcgtcttgcatggtccagtgtgtccatcaacacaattttacaaaatatcaaatccagtccaataaatgtttaagtcatgttctctctgcttgggtacctagaactgttagcttatttgatttaattatacaagagcaaataaataaaacacaattaccagaaaatttcaagctatgcatgctcaataaatttattcatttcaccaccagaaaacatgccaaatagtctggcagaaaattcaaatgatctgatgatatttgattaaaactgaagtaaaatcaatggggagaaaacttcagtcattcccaacaggaaactcagatcacataagaattaagttaactcttggataatatttaagattcactatttgaaaagcc

SEQ ID NO: 10323 - DNA, 626 bp, Homo sapiens
atcacctgaagttcaagaccagtctggccaacatggtgaaacctcatctctagtaaaaatacaaaaattagccaggcgtagtggtgtgtgtctgtaatcccagctactcggaggctgaggcaggagaattgcctgagcccaggaggcggagattgcagtgagccgagatcgagccactgcactgcagcctgggtggcgagtgaaactctattgcacaaaaaaaaaaaaaacaaacttgggcaacgaattcaactttttgtttgtgttcaggccagacgttatttctctggctttcccattggcattaaacacatttaaacatttgtacgcaagaataccctctaaaggtggtcattcacatgttgtaagatgtgtttcctatgccatcaaaatgtcgatgatttaaaaatacattcaggaaacccagtcactgagcgaacagccccaccctctccaggctgagagatactttaacccccagcagatggtccccacttaccttgtgaggacggggtgagggtggtagtgcccgctggggacctcaagtgaggagggatragaatggcgttgagagacggttggatggagagttctagaaacaggaattgacatgctagtcagggtag

SEQ ID NO: 10324 - DNA, 1035 bp, Homo sapiens
tttgttgaaattgaacttgtaggtgaaccgtttccccttggtcttgtgcagaatgcgcttgttatagtaatagctgtgggtacagaaatgccattgggaaggtcaggtacgtgggacccaggtctagactccacaccttaacacgcacttaggtgtggttcccaaaggccaactgaggaacgtaggccacaaaagacaaatcaagtgcccagagggtgggtaccagctctctcctcacatctaaggcaggactagaggatccactggtgactgtaatctctcctcaggatacgtctgtgttaccaaggggctcagggaagggctgggagtggcccaaggtcacacagctaggatttggcaaagccaggggtcagacccaatgcttgttcccacaggcaaggggctgtgcaaccccrggggggcactccacatgtgctcaggggtccccagcccgtcctcaccgcagggcccggctcagcttgtcgtaattcatctggggcttgcacttgcgaacgccccacagccgggccacctcatcagggtctttgatgacgaattccccgtagtccccctgccaggcaatgacgccctggtactcctccttccgcagcagctccaggataaagtgccacagctggatctgccttgagccaggggacgactctggcttgtaggcccaatccgggaaggcaaaccctggggacgggaggcagggagtggcctggggtcaggctgccaagtccagggctctgggtcccatcccagggtccacctctgccctgccttcaacatggggaaatctgtctcacctcagccaagtcaagatctgatttaagagaagacagtgcgtgtctgtctgtctgcatgtgaggggctagacaggagctgggggggaggggaagctggagcccgctccagcgacaccgggagaaacaggaaaccgtcggcggtgggtcccggggccagtgccagggggccaggcaccaagccaggctggcgggcagggctgccagtgggggaggggcaggaaggggc

SEQ ID NO: 10325 - DNA, 547 bp, Homo sapiens
tggcttcctgatcgatcaggaagatttccttcctcgaagaaaagcatctccatcacagaaaatggaagaaaaagctcctcgttgcagtacactcttatcctgtccctttcctgctcaaagacacacccaggtgtcttggcatttggttaaaatgactgaactaccccaggtcacaccctcaacctcttgggttacttgttttcattcagagcaatatacagcagcacagagggattgactccacttatgcggaacaatccagggcaaaagaaaacaggagtctttcattcaggttcctaggacagtgcccaaatcatctcccactcagacttccccactaaacaggagcaaaagagtccacttacgaacaggamctcacatggccagcataccacatcacacaaaactgatgaagtttgtctcccaaaatgcattctcaggcagagaaatcataactcaggatataaagaaccaacagaccaaggaaaactatccctcacaagttactaccatataaagacacagagcctacggggacaatggttag

SEQ ID NO: 10326 - DNA, 549 bp, Homo sapiens
tcaccatgttagccaggatggtctcgaattcctgacctcatgatctgcccgcctctgcctcccaaagtgctgggattacaggggtgagccaccrcggccaaccagaaaaaccaacttttcttttttttttttttaattttattattattatactttaagttttagggtacatgtgcacaacgtgcaggcttgttacatatgtatacatgtgccatgttggtgtgctgcacccattaactcgtcatttagcattaggtatatctcctaatgctatccctccccaacttttcaattaaatagtaagcaatacatgttgtcaaaatacagtggcaacgggaaccgaatagatgtgaagcaatgagtgagccaccaattactaaaatatgtggtcctgagtaaacaagagcttaacggagagatgagaggcgcctgtgaagttggaaaaggtgggcataagaatgtgtgctaactagacctgaagtctaggccggctgaggggtgagctttggaaacacccagtttcacaggaaatactcaggcatgtattga

SEQ ID NO: 10327 - DNA, 556 bp, Homo sapiens
tctatcattaaactgcttggggtcggccaggaatctccctcattagaatgcctgaagttgaccaagtgtctcccccattagaatgcctgttgtcacccaggtgtctctatcatcaaactgcctgggttcagccaggagtctctcttattagaatgcatggggtcgcctacatggagccattgaaaggaacaacacccttgatgcagaagatttagcaccactatctctgttccatctgggcttatatgtacttttactttttggtggtgaaattggctgatgattttcctttttcttccctggactattgtgccaactgccaggctgcctcctgcccttacagccctaaatggctgccttctttccatcaactcccaacttcttccagtgaaatttaattgtctcaatgccyccccctcccccattctctccattttctcccaagaagcatgactcgattatttgcatattttgagaaactgctgcagattagttctttttgccagttctccctggaactcctggccttttgtggagggaaggatggacagaatgg

SEQ ID NO: 10328 - DNA, 556 bp, Homo sapiens
tctatcattaaactgcttggggtcggccaggaatctccctcattagaatgcctgaagttgaccaagtgtctcccccattagaatgcctgttgtcacccaggtgtctctatcatcaaactgcctgggttcagccaggagtctctcttattagaatgcatggggtcgcctacatggagccattgaaaggaacaacacccttgatgcagaagatttagcaccactatctctgttccatctgggcttatatgtacttttactttttggtggtgaaattggctgatgattttcctttttcttccctggactattgtgccaactgccaggctgcctcctgcccttacagccctaaatggctgccttctttccatcaactcccaacttcttccagtgaaatttaattgtctcaatgcctccccctcccccattctctccattttctcccaagaagcatgactcgattatttgcatattttgagaaactgctgcagattagttctttttgccagttctccctggaactcctggccttttgtggagggarggatggacagaatgg

SEQ ID NO: 10329 - DNA, 582 bp, Homo sapiens
gagggttgtatttagccaccagcttggtaagtctagggtcgagaggatggctctcakcagcagcagtaccattcaggtccagcagagggatcggatcgtgattcactgtgccctgggcgtcttccaggtctctacagggtggccttctgatgatctcggcctcctgattccctcagactatttcgacatccttcctttgtttttcctaaccttactttcagtttgtttccacagtccttagagtgactttctatttttttcttgttttctctttatattttcctgtgctccttcctgcttgatgaagttgacagagagaaatcgagagtgagagatagaaagagattagaagaatttaattgtgatattaattacctgttacctttgttcactcccatttatttgtctttaatattgtttgtagttatatctttgttattgttaaatattcactgttggatttttttctgtttggagtgaacaaaggtgaaaagtaattaataacacaattaagattttctcctgtctcgctgtttgtgtctgtctgtctgtctctctctccaagatgtcagctgagaggat

SEQ ID NO: 10330 - DNA, 644 bp, Homo sapiens
acaaacctgcacattctgcacatgtatcccagaacttaaagtaaaaaagaaaaagaaaaaggtgctatggaagcacacagggtgcatatctaaaccagaatggaagggtcacatagggcctcccaaagaaggtgatgtttaagtgactcatatagtacctgtaactaccatctaaaagcatgttgatttctacttagggtcagtttggggtccaactaaaagcttattaaaaacagaactgctacctctttgccaaaggtgcaacccacagggcccagcgcacaggtcagcaagcataaaaatattgattcatgatgaataaaacgccagtaaggggcaaaataacagacataaggagagggtaacttttcagccaaggtaatgataaatgccaggaggaaaaatcacaatgatgatgtgggtcagagagaagaataagaacagtatcttggccaggtgcagtggcccacacctgtaatttcaacaytttgggaggctgtggcaggagaatcacttaaggccaggagttcgagaccagcctgggaaatatatcaagatcctgtctacacaaaaaaatttaaaaattagccaggcattgtgaggcaatgcctgtagccctagcaacttgggaggctgaggtagga

SEQ ID NO: 10331 - DNA, 506 bp, Homo sapiens
tggatacaaattagaattttagatgtaattgcaaaagaaaaaaaaagtcaacccccaaaatgggcatccatctattcaagtaattttttttttctttttttttcttttgagacagagtctctttgtcatgcaggctggagtgcagtggtgcaatctcagctcactgcaacctccacctctccagttcaagcgattctsgtgcctcagcctcccaagtagctgggattacaagtgtgagctaccacacccagctaatttttgtatttttggtagagatgggattttgccatgttagccaggctggtcttgaactcctagccccaagcgatcttctcccctcggccccccaaagtgctgcgattacaggcatgagccactgcgcccagcctttccacataatctttaaccttggtgtctcataaggcattatgttaaattatgtgaaatgagcatttatgaataagactcctttttaccatcataaagtttaaatccagaataataga

SEQ ID NO: 10332 - DNA, 552 bp, Homo sapiens
ctgtggtgcctggggctggagctgagcgctgggtaccccccttcccggggagggcttgactggcctctgatggcacccccgtctttccccagcgccggcatcggccgcacaggcaccatcattgtcatcgacatgctcatggagaacatctccaccaagggtgaggggcacctgggggtttgggggtggggggtgagcagcccctcggtgtccgcctatgcctggacctgaggtttgactgccccccacccaggcctggactgtgacattgacatccagaagaccatccagatggtgcgggcgcagcgctcgggcatggtgcagacggaggcgcagtacaagttcatctacgtggccatcgcccagttcattgaaaccactaagaagaagctggaggtcctgcaggtgcgtgcagagcagggcctggsgggggggggggctgcagtgcaggatgggtgccacctggccctgctgggaccaccaccttcccactgtccctctgcccacagtcgcagaagggccaggagtcggagtacgggaacatcacctatc

SEQ ID NO: 10333 - DNA, 525 bp, Homo sapiens
agagcaggacttgtgagtgagaaagatgtaattccaagcagaggggagrataggaaacaggaaaattctgaagttttccttcagggaagccttcctttctaggaagctggtcctccgtccatgcttacctccagagaaacgtctgtcccattccaaccggatgtctccaaggtaaagggagctaggccattgttatcagtaaccagggtctggttgaaggttccatttgtgccataaatcaccagaaacactagatggttcttgaggaaggagtcatcatggcccctaactcttatctgaaggacaaagatcattacggattagaattaggtttggagtaagcttgagtatgaggtaaagtgaaatattaggttggtgcaaactaattgtggtttttggcactaaaagtaataacagaatttctaagaatacatttcaggaaagagtcctgaaaaagataaatgtgattcaagcttttgaactaggatctgtgaggaaccgaaaaacaaacagaagtaacagccc

SEQ ID NO: 10334 - DNA, 516 bp, Homo sapiens
tgtacagtggcctcctgggctggacacacagtcaggctctcctctttctattcaacctcactctatttggagagtccgaaagctagtactgtgtttcccagactgcttggctggggatctggatgtgaatgaggttctgccaatgagatgcttcaatgctaggttagagttatgggttaaattgtkttcctcataaagatctgttgaagttctaaggtcaaatacctgtaaatgtgaattccccttatttggaaatagggtctttatagacgtaatcaatttaagaacatttaagaaggtgtcattagagaggaccccaatctaatatgactggttttttgtttttttttgtttttttgttttttttggagatagagtcttgctctgtcacccaggctggagtgcagtggcgcaattgcagctcactggagcctccgcctcccaggttcaagtgattctcttgcctcagcctcccgagtaactggaactacaggtgcatgccaccacacttggcta

SEQ ID NO: 10335 - DNA, 846 bp, Homo sapiens
tgagatattgagcagcatccttgtcctcgtacagttatcaggtaaaatacagagtgtgtcagttcaatttgaatttcaaataagcaacaaataattgtcattgtctgtgtatccaattatcaatgctgcaggtctgtaattggtcctccatagcacacttacattatgatgtaaactcatattatggttatcacaagtaatacttatttataaatttattcttgttgttttttcttttgtctgaaatgtaaatttaactaggcctcctatatttttatttgcttaatctgttaacattacaatagatgccagcagcatccgtccaattttaactgaaatgtctccaggcattattaaatgtcccctaggggggcaaaattgccctgtgtggagaaccactgtcctaaagggatttcatcctttgcacatggaaatctcgtggtctattctctggatattttaattttattcacacatttaaaatttcgttttaggcctgcaatgtccaggttatttttctagggtttactttttgttctatcgattaccatataattaactttttaaaatactttctgcaatgttgaaaatttgtcttttgtctttactgctgaaaattatattatttgcttgcaatatgttcttttttttcttagagagaacgtaattgttcttcaaaatctgcttccaattatttcattttaaatatttattaytgttaccttaaacttgcgattgtgttcttttatttaacctgctatttttacatgctttctcattacatttttaagaggagacgttcttattaaattcaattctgtaaactgattggttatccctgatttg

SEQ ID NO: 10336 - DNA, 718 bp, Homo sapiens
tgggggaagaatgttaccaggaccaggtcgaggctgttaaagacctccaggagagagcaytgtgggccgaacaacaagcttctagtaaagatcatgcaagtggacacatttgagatgtattttgaaggtggaagaaattagataagctaatgggtagtgcctggagggagtgaggatttttgaaccactaggtaaacacctgtgagtaacagagaaaaagttgggatgtgttatgaaagatgaatcctaaaatttcatatgttgaagactgatgcttcaggacctcagaatgtgaacatccatagtagaagggaattgtgttgttgacggctgccacccactctaggtgcccaagctcctgcagcagtcctacttctccctttcacccacactcactcccagacagtgtccctttcagctcttccatcaccccttcttttgatttggctggtgagagcatagctggtatttatactttcttgatatgctagtctcttttgctgattgttgacattggagaaggtcatggaagggacctgagctgagcgacctttaggagcatttcctgttcttttcctgtactctgctgccaaggagaaatctgtctttcaccaggcttgcagctttctccgttacccacatcatcaggcaatatctgtctggcacccctctttgttccctttctctggccttcctttttgacatgatggttgacctg

SEQ ID NO: 10337 - DNA, 718 bp, Homo sapiens
tgggggaagaatgttaccaggaccaggtcgaggctgttaaagacctccaggagagagcattgtgggccgaacaacaagcttctagtaaagatcatgcaagtggacacatttgagatgtattttgaaggtggaagaaattagataagctaatgggtagtgcctggagggagtgaggatttttgaaccactaggtaaacacctgtgagtaacagagaaaaagttgggatgtgttatgaaagatgaatcctaaaatttcatatgttgaagactgatgcttcaggacctcagaatgtgaacatccatagtagaagggaattgtgttgttgacggctgccacccactctaggtgcccaagctcctgcagcagtcctacttctccctttcacccacactcactcccagacagtgtccctttcagctcttccatcaccccttcttttgatttggctggtgagagcatagctggtatttatactttcttgatatgctagtctcttttgctgattgttgacattggagaaggtcatggaagggacctgagctgagcgacctttaggagcatttcctgttctyttcctgtactctgctgccaaggagaaatctgtctttcaccaggcttgcagctttctccgttacccacatcatcaggcaatatctgtctggcacccctctttgttccctttctctggccttcctttttgacatgatggttgacctg

SEQ ID NO: 10338 - DNA, 531 bp, Homo sapiens
tcagctcacagttcctaagactgtgcttgacattgacaatgacgtcgagatcctcaatagatctttacagaaggggtgggatttgtcctctgctttgtcatatggaagatttggatatggagaaggcctgtcatatagctctgagctggggaaatggtttccttgtcacctgctttttaaatttcctcatactgttatataataatayagacttggagccctaattcagggagactttaggtataagtactgtctggttgaaatacaaaccaagaccttaaaaataggttggataaatatgttttcttttgttttgctatgtgtgaattgaaattgttggattattgctccatctgattggcagcatgcttgttgcctagtgtgaagtcttcatgagggaagctgagcagtcactccttagtactgtaggtctgatttggggcttttctgtgtctttttcattattgaaactgtgcatcattaaaaatcacagaaggatttactcaactaataggcaataaatactatttt

SEQ ID NO: 10339 - DNA, 552 bp, Homo sapiens
ggctgcaggagagatgaatcagagtgtattatcttcctgttatgtggtgtgcccaggcctggtggaggctttttctgttgctcctggtgattgcttgctacaaatgtgtctggcaggctcccccttgcctaggtgtagtggtttcctgctcatcttaaacaatgggactctgttgagcttttctttctctataaccagtcactgcagattataggttaaacaatgttacctacaacatgttaactggacttcagtctacaggttggggcctctgttaagtgggtgaagtaaagtgatatgcactttttgtggcttagaatcctgagaagcccagaaacctgtagctaatggcctttgagccacaggtaactatggtgtatctgctaatgttcatttttaacaggtgtaactcatccagtgcgatgttacttggcctgttttctgtgtagcttacccagctgagttattctttgcatatatattgctaatatttttatgtatgtgcrtggcattctcaacaatgctttccttaatatttgtcttttggtaaag

SEQ ID NO: 10340 - DNA, 553 bp, Homo sapiens
catgacttttctctacagtattgctccattcagggcaacttatctttttacctgggaggaacttatttccattagaattggaacactagccacatattttgcatttaaaatgtttcatgtgattaaacacggaaagaaatgttattacttctgtttcttaggcctgtgctcctctaactgattcttcttttgtgcctggaacaatgcctttaatttgaaaacaagtaaggcagccctctgattactaagcacactgttagtggaaactggcagccaagtgctggtaacagggcttaagagaagagcagctttataatcccccctcyaccaaatcctcttgcacagactggctactcagcagtgtacagtgtgacttgtgtagtcatacatccccactttaacaaccctcgcttctctcttcatttttgcaccctcctaccccttcccattgtgattcttgttttaatcggtttttctcttcttccttaacagagctattaagaatggcaaaggattgcatagcaagaaggaagtgcctatccaccgtgttgca

SEQ ID NO: 10341 - DNA, 491 bp, Homo sapiens
tttggatataagtgctttgttaggctgtgtgatgtacatatattttctccctgtcagtgccttgcgtttcattctcttaacagtgtctttttcccagagcataagttttaaattttgataaagtctaatttaccactttttttcttttacacatctggggttcgtctaacaactctscctaatccagagcttgccagatttttttggtaaaaggtcagatagtaaggccaggcatggtggctcatgcctgtaatcccagcacttcgggaggccaaggcaggcggatcacctgaggttgggagtttgagactagcctgaccaacatggcgaaaccccgtctctactaaaaatacaaaaaattagccggtcgtggtggcacatgcctgtaatcccagctactcgggaggctgaggcaggagaatggcttgaacccaggaggcggaggttgcagtgagtcgagattgcgccattgcactccagcctaggcaaca

SEQ ID NO: 10342 - DNA, 491 bp, Homo sapiens
tttggatataagtgctttgttaggctgtgtgatgtacatatattttctccctgtcagtgccttgcgtttcattctcttaacagtgtctttttcccagagcataagttttaaattttgataaagtctaatttaccactttttttcttttacacatctggggttcgtctaacaactctccctaatccagagcttgccagayttttttggtaaaaggtcagatagtaaggccaggcatggtggctcatgcctgtaatcccagcacttcgggaggccaaggcaggcggatcacctgaggttgggagtttgagactagcctgaccaacatggcgaaaccccgtctctactaaaaatacaaaaaattagccggtcgtggtggcacatgcctgtaatcccagctactcgggaggctgaggcaggagaatggcttgaacccaggaggcggaggttgcagtgagtcgagattgcgccattgcactccagcctaggcaaca

SEQ ID NO: 10343 - DNA, 810 bp, Homo sapiens
gaaaccattggtggaattatactatgagaatgatgacgacagtttttacattgctcacagccccttccccgaccaaggccctgacctcactgtctctgcttgccccaggctgtgcccagctgtcatcttcgttttccttggttggggtgtacccgtgggtcccacctatttcatcatcattgcgtttccaagctgcrcacctctataagcgatgcgtgtactcgctcatccaatggacactctcactttctcaacctctccctcgggggagaaacatgtaggtcacatccaatctctttgctgttccaaatcgcacagacatgaacatctttccagaaagcacctctttgttctttagatcagtggatttccaatcttttttgtatccctgaaaacctttggttaaatgaaatcttacagagaacacccacacagtctatgtataaacagacaaaaaggaacaacttggtggggtgggtggggtggggaggggagtccagtgtcccccatgagctccttttagtggccctgggggaggatcagtggaacggccttgacaactatttggacatcctccccttagggcaaatctccccaaactagggtctctgggtaagaggatatgactctctttagcactccccaaacattttgcaaattttatccccaaaggttgcctcactttttcagccatcagcagtttctgtggttggtcacctacccccttctatcatgactctatttctgctaatgtcatacatgcagaatgtccctccttgttgaaatctatatttctttaataaccattga

SEQ ID NO: 10344 - DNA, 555 bp, Homo sapiens
ctaaaaatacaaaaattagccaggcgtggtggcgggtacctataatcccagctactcgggaggctgaggcatgagaatcacttgaactcgggaggtagaggttgcagtgagctgagatcgcgccaatgcactccagactgggtgacagagcgagactctgtctcaaaaaaaaaaaaaaaagaaagaaaaagaaaaggtgtgtggacacctcacaagacagagccccagagccctacatcattacttcaaggcctctgactgttttcttttgaaactctctgtctctctctctctctgagtgctccgttaatattttgttggaggaacaaaaacagcagggtcagcctcctcagggggtgaaataagctctgtctggtgcagcctggttctggccacggagacccaccctcccctcagcctggctccagaggaaggagcaccagtggggayagacccaccccactgtcgggggagcagagactggcagcaggcctgcctctgaggcccccgcgggagccgtgctgtcacctcgaccccgctgtcacgggggacaga

SEQ ID NO: 10345 - DNA, 528 bp, Homo sapiens
tgctctaaagacaataaggtaataagaaaggaataaatcagttaaacttgaaattatgacccatatcattgagatggtaggtggtgttgcttataccacatggcataaagggacaagtgcaatagttgcattttattatttttgtgagttttgaaactatttaattaacataaatacagtttttatctccaaattatattttcttttggagaagtctgaaaataatatatatgcatatgatgctagaggtggagtgtctgctcctgctcccataaacttcaattttggccaccatataatttgctttgaccaatagacatgatgctctgagatacagaagctatctttgtcaccactggtaaggarccaaagatatatacatgcatatcaacacatttgctcctgaacattaaagagaaggaatgttgagtagtttgaagacagaaatgggctgcaatagcaacaaattatgcttataaaaatagattgtcatttcacacattttacaaatttcgatattaataatag

SEQ ID NO: 10346 - DNA, 527 bp, Homo sapiens
tacataaaccttctctttttttgagctaatttgtttcctttactctagattagtggtagttttagaaattgaatgacataaaatattgtttcccacacctttacattcattttgtaccacttatttatttatttatgtattttgcaaacggagtcttgctttgtcacccaagctggagtgcagtggcacagtcttggttcactgcaacctctgccttctgggttcaagcacttctgcctcagcctcccgggtagctgagactacagacatgcaccaccacgcctggctaattttttgtattttagtagagrcagggttttgccatgttgcccaggctgatcttgaactcctgagctcaggcagtcctcctgcctcggcctctcaaagtattgagattacaggcgtgagccaccattcctggccctgtaccagttatttttgattcgatagtactgggtagtggaacttagaacccgcagatttaaaatacttaaatattctaaagattctgtcaggaaacaagtttt

SEQ ID NO: 10347 - DNA, 527 bp, Homo sapiens
tacataaaccttctctttttttgagctaatttgtttcctttactctagattagtggtagttttagaaattgaatgacataaaatattgtttcccacacctttacattcattttgtaccacttatttatttatttatgtattttgcaaacggagtcttgctttgtcacccaagctggagtgcagtggcacagtcttggttcactgcaacctctgccttctgggttcaagcacttctgcctcagcctcccgggtagctgagactacagacatgcaccaccacgcctggctaattttttgtattttagtagagacagggttttgccatgttgcccaggctgatcttgaactcctgagctcaggcagtcctcctgcctcggcctctcaaagtrttgagattacaggcgtgagccaccattcctggccctgtaccagttatttttgattcgatagtactgggtagtggaacttagaacccgcagatttaaaatacttaaatattctaaagattctgtcaggaaacaagtttt

SEQ ID NO: 10348 - DNA, 596 bp, Homo sapiens
agtacaaggtgaaatacacactgaaaatagggtcagtggaggtgctaactctggaggcaagaggattgggtgctttcatgggaagggtaagctcaggatgttaagttacttacgtatcttacagagccttcaagtttrgggaactggatcagggtgttgcagggagggaggtgatctgtaatttaactaggcttctacatctctaatctctttagaacaaacctctgagacaagatgtccaaaaccaactcccttggggtcttccttatttctgttaccttggctttcaggggaaatccctgaggtacgattagaagagaacctctgctatgcaattccataccctctgggtcaatttgggcattccattttctctgacaaatgcgcaccagcttgtccccagcttgtcctccaactggtaggaggtgtgggaaggaagagcaatccaagggcttgctctgtgctgggcttctgcacagttcccacatactcttcatgcctgttgtttctccctgtcagaagctggctgcagcacagcctgagctgaatgctggcctttgcggtgggatggtttgctttaccagtcattctttatc

SEQ ID NO: 10349 - DNA, 522 bp, Homo sapiens
caacctgctccatggtaatcatctcctgctcaactctgctcttctgatctcctgagaattgtgcagccattgttaggcctccatcctgccttgggctgtgctgccgaatgccagccttgcttttcaaggcttactgccttgttttttggaagccttgtcttttgttagcttggcctcctgtgcttccttcagatgagaactcacctcgcagsttagtctccgactgagccagagtgttacatatgcttgacctgaactgaatgtagtctggcctgagagcagagggacaaacaagatgacctgcagggaatctgctggtgtgcgtattatgtgactatgctgcctcttttaaaacttttaaaaccaaagtataatatacagatagaaaggtgtgtgtgccataaatatacagcttcctgcatcttccatgcaaccaatacccagatgaaggaaaaacattatcagcaccccaggaaactccagtccccatgctctccattagtgcctccctagggttggcca

SEQ ID NO: 10350 - DNA, 1064 bp, Homo sapiens
cagggtttgctgtggcattcaaatttagacctgacaactacaaatcatgctgtccccactccactgttttctctaccaaactaaagagaatcaaataagaagaaatcaggatattaaagatactaagacttcacctaaaacatgaccaaagaatgtacaatataataaagatccaatgaatttaaacttgagacaaaagtgctgagaggaattcttcccccttttcctgctaattctatagacgagagggtcaaggccacattccccagttcagctgtaccagagagcctggcctgcatttcagggtgctgcaaacttgtctagactattgttgaagttcccttcttgattcctatttgtgcataaattctttgtgtctgttttctccatcaattatgccacagagagaacttaaaatcccccctttttacctgcaacctctgacaaatgaaaatgtttaaaatggaataatgttaaatatgcaacgtagcatttaccagatatctgctgcaatcataaaatgggattaataaagatcattcatgctactctgtcctgtaataaatctaagaaccaaagatgaaaactcctccaagaaatcgtgagtggcattctcatggaatgttccctattacaaaattaatttttcatatttaaattactactgttgggaaaatgtcataaataaattatttagaaataacattgaaggtttttttccctagactagtaacttttacaacttaacggaaatgtctaattttatataatgcttcattagttgaatgttcataaaaacttctaataagctccagatctctatacatacacagatcaacatgtgtccctttgccyttttccttattaatcccaggcctcctattcatcacaggactgttctaacgcattttcctaaggttttcatcaattttactgactaataaaatgactaaaggcttcagatattagtttaaacaagaagtacagttctaacttaatttcaatggaaaactattttccactgcataaataagtctgcatcattcagtattccttatccaaga

SEQ ID NO: 10351 - DNA, 980 bp, Homo sapiens
ctgctggtgggttttagggattaaagtcagaaggtatctctctgggattgagaaaaaaatatattctgactgagtctggggaagagagtggtgatgaagaaaaatgaaggcattagggtctcattctaatttgttaccttcacacttttgcttgaaggctgagtcctccatcatctgagtagattaaagtaaggtgagaaactgccctgtatggggggcagatgttaaggatatataattgcctactggaggggtgaggagactgaaagtcagggagtcagcctgaagctgtggggatcagaagtgggaacccaggagtggggaaagtgggtggatagtgggaaatctggaaatccatgatcccgagggagaggcacagcatacaaggctgaaaaatagaaaatggttcttaggcagtttcaggtctcaactgttcagttatacctttatttttttcaatygtttctataagctagattcaaataaactaacttaaaagaggcaaacctacaagcaagaaaatatcaacttgaatgccaatttaagtaatttaccaagataagtttaactacctatataactggactacaatgctggaaaatctattctggaagtgattttaaaatgagaggcttgtctggtgagcacagaggtagaacaaggggagatagtcttaggacataaatgtttaataacaacggctgatagcccagggtgtcttcacaagagggacacacggggattggaaggctcaagatcatgaactagggccccactaacctgccaatgctaggctctctgattctgttttccaaagtcccagggtgtctctttcccatctcttatccttggcacactcattttttagataagctagtaccttttattatagaggatccattttaaaaatcttggttgtttactccaaatcattttgtctctaaggcatcttctgcatgtatatatatatatatatatat

SEQ ID NO: 10352 - DNA, 533 bp, Homo sapiens
ggaaaagttgcttatttattttgtttcagttttctctattacaaaatggtaataaygacaccaaacttatagggtgatagtgaagattaaatataatgtatgaaaagcaacttgtatagcacctaggatgattgcagcaggtaaccagctaatgcatggtcactgctgttgttttagggtaggttcttttttttttttttttgagatggagtctcgctctgtcacccaggctggagtgcagtggcatgatctcagctcactgcaagctccaccttctgggttcacgccattctcctgcctcagcctcctcagtagctgggactacaggcaccccccaccatgcccggctaatttttttgtatttttagtagagacagggtttcaccgagttagccaggatggtcttaatctcctgaccttgtgatcagcccgcctcggccttccaaagtgctgggattacaggcgtgagccaccacgcccggccattttagggtaggttcttaagctagggtggaaatttatggagaagatgg

SEQ ID NO: 10353 - DNA, 947 bp, Homo sapiens
aacagatgtggctgcctggaacaggtgccatccttctataaaagggagacgaagacattggaatggggaagggcatcagaattgggtttgcaaagaaaagggtcaagatagattcattcatggagatcacgtgaggggcggatgctgtctttttacaaactaaatccctttctacgtgggtcctatgggaggtattcttccgtgaaatctaccaattccaaaactgactcagtgattttgctacgttttcacttttgggggttgttttagaatgaagtttcaaggtcattgtgtctcttctgttctttcgcttaagagcaacatggtagaatgcctaggcaacaccaaggggttcagaagaattatttctgtttttccgcaaggcttaataagaaagcagcgtattctccctgaggaaaatgacagttcatgagggccaaatatatttctgtaaattgtgaaggataataatattgttccaattaagctcttcatgctcacagtatagaggccaacctgaccttatacaaataggacagtaggaaaagaaagaggtgctattgccaaaatactctcacctggaagataaatgtctcaactaagcagttgccaaaaaactctagagaaactaggagcatcattttattgtttcaaacagatgactagatgaatttttaaattgagaaactatcgggagctggaatcagggaatttgaaagtatcagccatgcttagccaagtggcctttctcagggtctaggatttcttatgttccaataacaaagccgaaatcctttaggcaaacagtcctagaaaaaaaatttattattggttcactagrtgaatttaactttgagctcctaaagtatatttgttttactgagtattggtgatgttttctaggaggcttccctataattcatttgccctaaaaatgatcaaggcca

SEQ ID NO: 10354 - DNA, 533 bp, Homo sapiens
ttttttgatgagtaggctctctaataacaggcaaccacaatccaatatgtaattttaatttgaagtcatcccagatatacacttgtaaatgttttattttaatarccttacataagtttcaatcacaagtaaagcatatagtgttttatttatgaaatagtacaatgttagtttattccccccgaccacattattgacccatgtcatccttagctgcagaataaattattttctagattgtgtataagtatacactttcattacaattccacttgtgacaaagataacagaaatatttgtatattaattcaaactggattttgttgagttaatgtaatgcactattgagctttcattgcaaatcaaagaaacataggaatggagcccatgaaagaaaaaaaaaagatgttttgtataatatgtttataatatccttaaagatgttcataaaatcatgaagtaaggttgcaaatttcagggctgttaaagcaaaagtagcatggcattgagtagcctaagtgtctttccttcca

SEQ ID NO: 10355 - DNA, 574 bp, Homo sapiens
atggggctgattaactgggaggcaggaggaagaagagaaagtgtgcagcacgatgatgactctctgtggaatttattttcagcaagatcactatgaatagtacccagtgctttctgcatcccagagaaagcaccgagtacagaaatccctggattatagaaagttcttctaaaattttgtcttgagaacccctgccattccccatcttctattgtgtcacctttttttctgcatctsacaggaaaggtggcatctgaatctgtctccctggagctcccagtggacattgttcctgactcgaccaaggcttatgttacggttctgggtaagcagttagagattcttgactcagaaaggaaaaggcgaatggaggctgcaaaggtgtggagtggggcgggacatacggacctatccggagagtgtaactaataacaagtgatgaaggaaaaagagcgtattttatataggagggaaatacagtgtaggcaacagtacagatgggattagacttgtactctagttaaaaatggaagagagtcagggtaggaagaaggtaaggtcgctgatgcttgat

SEQ ID NO: 10356 - DNA, 574 bp, Homo sapiens
atggggctgattaactgggaggcaggaggaagaagagaaagtgtgcagcacgatgatgactctctgtggaatttattttcagcaagatcactatgaatagtacccagtgctttctgcatcccagagaaagcaccgagtacagaaatccctggattatagaaagttcttctaaaattttgtcttgagaacccctgccattccccatcttctattgtgtcacctttttttctgcatctcacaggaaaggtggcatctgaatctgtctccctggagctcccagtggacattgttcctgactcgaccaaggcttatgttacggttctgggtaagcagttagagattcttgactcagaaaggaaaaggcgaatggaggctgcaaaggtgtggagtggggcgggacatacggacctatccggagagtgtaactaataacaagtgatgaaggaaaaagagcstattttatataggagggaaatacagtgtaggcaacagtacagatgggattagacttgtactctagttaaaaatggaagagagtcagggtaggaagaaggtaaggtcgctgatgcttgat

SEQ ID NO: 10357 - DNA, 507 bp, Homo sapiens
cagctactcgggaagccgtctgaacctgggagatagaggttgtaygttgcagtgaactgagatcgcgccactacaatcctgcctgggcgaccgagtgagacttcgtctcaaaaaaaaaaaaaaaaaagatgtgggcatccatgggtagatctgcggcttggtggcagcaccattagggctcactcctagcctgtggaggtttgactcttcccaagcctgcattaaaataggccccttcagctgaggagataccatggttcacttaaaaaagcagctgatacctcgccaaccactaccctctgtaaacagggtcatagccaaataaagattttggtttcttctgcaccttccaagcagatctgcctgcttggacctgcagacgagggaaaaaacagcagggaaacactctgggctgcctatagccagactctcgttccattctccagatctctcttgctcacccagcatcctgttttattcaaagtgccctacaatcacatttctgga

SEQ ID NO: 10358 - DNA, 507 bp, Homo sapiens
cagctactcgggaagccgtctgaacctgggagatagaggttgtatgttgcagtgaactgagatcgcgccactacaatcctgcctgggcgaccgagtgagacttcgtctcaaaaaaaaaaaaaaaaaagatgtgggcatccatgggtrgatctgcggcttggtggcagcaccattagggctcactcctagcctgtggaggtttgactcttcccaagcctgcattaaaataggccccttcagctgaggagataccatggttcacttaaaaaagcagctgatacctcgccaaccactaccctctgtaaacagggtcatagccaaataaagattttggtttcttctgcaccttccaagcagatctgcctgcttggacctgcagacgagggaaaaaacagcagggaaacactctgggctgcctatagccagactctcgttccattctccagatctctcttgctcacccagcatcctgttttattcaaagtgccctacaatcacatttctgga

SEQ ID NO: 10359 - DNA, 577 bp, Homo sapiens
ctctactaaaaatacaaaaattagcagggcatggtggcatgcacctgtagtcccagctactcgggaagctgagccaggagaatcacttgaacctgggaggtggaggttgcagtgtgccgagatcacgccactgcaytccagagcctgggtgacagagcgagaccctgtttcaaaaaaacaaacaaaaacaaacaaacaaataggacttgtttaattttaagtttttctatgcaatgtattttaactttcagcccttactatcagttattcctttgttttttagacacagggtctcattctgtagccttggctggagtacaagggccttatcatcatagctcattgcagcctcaaactcctgggcttgagatcctcctactgcagcttcttgagtagctgggactacagaatagctgtagtcccagcgtgcatcaccacacacagctattttttttttctatagacacgggtctccctacattccccagattggtctcgaattcttggcctcaagcaatcctcccacctcggcctcccaaagcactgggtttacaggcatgagccaccaaacccacca

SEQ ID NO: 10360 - DNA, 1454 bp, Homo sapiens
tgccctggtgctgttctttttgcaatatcagaattagtaacataaaacagagggcctggataccaaattcatgagtgacatgttgttcggagggaaagcaagtaggttgaaatgccatgttagtcaatgccatcatccttatctcgtgtaccatataatacgtacacataagccatgctgccagtagtcccttccctctctgttccaggccttggagaaccatggtcacttttgagaagtaccacaaattagagtcatctggagaattccaccaagcatggcagcatgtttgacactcaataagttattattaaagaattacattatggactgacttaatggatagactataaactaaagcattgaagaatggtctggaaagatgaagccttgaaactggttaagagaagaggtcgtgagagggacaatgtgccattgtatcattctggttccgtacattggttaagtacgggagccagactgcttgggttcaaatctaggtcttacacctgcatgttatgttacttaccccctttacacttaagtttccttatttgtaaaacaaagatcagaatatcagcccctttctctagagggcattcttgaagagccaatgtataagcacattcactgggcttagaaagatatacaggacacagcagcacttatcagcattattggttattattgttgtcattattatttaaattatttttcattagataaagagctagtaagaagtaggcttagtctgaatcattccagaggtcagaaatagtattagcagatgaagaaaaactttctaataatctgagcagccctgaaatgggaatgggttgttctgaagaacacctcacccctggaaatctgccaatcattttctatgacgtttttgagagagttcatatgaaaacatattttatttgtttcaattcaagtgctcctcatgggagtccctttgacccaaccctaccccaaaatggtataggaggaccaatgcgtgtgtcttgggagaaggctgggataatatgactcatttaggctacacagagaggactcacttctctgtggtctgctagtatctgcacctaaaaaactttgagtattgttcggctccagaggagaagacttcaaactgaaatttagtgctcagattcacagagtagggggtgggaaagacatttacatatgtaagacaagaataaagtttcaaagaaaatacttcaatgaaatgagatttctttttaaaaagggagttcaaggtaagaaacaaaggctttgggctgcaaagccaaactgtctgggttgaaattgtttccttcccttattagctttgtgaycttgagctattgtttaacatccttctgcctgaatttgcttaaccaaaattcaggacagtaatagaacctacctcagatggctgttgtgaggattaaatggtgtctttctgtgtg

SEQ ID NO: 10361 - DNA, 524 bp, Homo sapiens
taccagcaaggacaaatgtggggcagattgagcattggttatatttcttttttttyttttttttttttttttttgagatggagtttcactcttgttgcccaggccggagggcagtggcgcaatatcagctcactgcaacctctgcctcccatattcaagcaattctcctgcctcagcttcctgagtagctgggattacaggcatgtgccaccacacccagataattttgtattttttagtacagatagggtctaaccatgttggtggtatcgaactcctgacctcagatgatctacccacttcagcctcccaaagtgctgggattacaggcatgagccactgtgcccggcagagcatttgttataacttacaaatcgttcctagtagcaaagctaacttttattatttttctgtatgagcttgaaaatcactgactagttaaaaaaggcaacttatttttattgcaatcatgttaaatttgtaaattaatgaaaacattaattctacatgtcacatgtcctttc

SEQ ID NO: 10362 - DNA, 524 bp, Homo sapiens
taccagcaaggacaaatgtggggcagattgagcattggttatatttctttttttttttttttttttttttttttgagatggagtttcactcttgttgcccaggccggagggcagtggcgcaatatcagctcactgcaacctctgcctcccatattcaagcrattctcctgcctcagcttcctgagtagctgggattacaggcatgtgccaccacacccagataattttgtattttttagtacagatagggtctaaccatgttggtggtatcgaactcctgacctcagatgatctacccacttcagcctcccaaagtgctgggattacaggcatgagccactgtgcccggcagagcatttgttataacttacaaatcgttcctagtagcaaagctaacttttattatttttctgtatgagcttgaaaatcactgactagttaaaaaaggcaacttatttttattgcaatcatgttaaatttgtaaattaatgaaaacattaattctacatgtcacatgtcctttc

SEQ ID NO: 10363 - DNA, 524 bp, Homo sapiens
taccagcaaggacaaatgtggggcagattgagcattggttatatttctttttttttttttttttttttttttttgagatggagtttcactcttgttgcccaggccggagggcagtggcgcaatatcagctcactgcaacctctgcctcccatattcaagcaattctcctgcctcagcttcctgagtagctgggattacaggcatgtgccaccacacccagataattttgtattttttagtacagatagggtctaaccatgttggtggtatcgaactcctgacctcagatratctacccacttcagcctcccaaagtgctgggattacaggcatgagccactgtgcccggcagagcatttgttataacttacaaatcgttcctagtagcaaagctaacttttattatttttctgtatgagcttgaaaatcactgactagttaaaaaaggcaacttatttttattgcaatcatgttaaatttgtaaattaatgaaaacattaattctacatgtcacatgtcctttc

SEQ ID NO: 10364 - DNA, 524 bp, Homo sapiens
taccagcaaggacaaatgtggggcagattgagcattggttatatttctttttttttttttttttttttttttttgagatggagtttcactcttgttgcccaggccggagggcagtggcgcaatatcagctcactgcaacctctgcctcccatattcaagcaattctcctgcctcagcttcctgagtagctgggattacaggcatgtgccaccacacccagataattttgtattttttagtacagatagggtctaaccatgttggtggtatcgaactcctgacctcagatgatcyacccacttcagcctcccaaagtgctgggattacaggcatgagccactgtgcccggcagagcatttgttataacttacaaatcgttcctagtagcaaagctaacttttattatttttctgtatgagcttgaaaatcactgactagttaaaaaaggcaacttatttttattgcaatcatgttaaatttgtaaattaatgaaaacattaattctacatgtcacatgtcctttc

SEQ ID NO: 10365 - DNA, 570 bp, Homo sapiens
ctgacaaataatattaaaataaccctgaagatattagagtaagtgaaataagtcagaaaagacaaataccatagattctgctgttataaggtcccaagaatagtcaaatgcatacagacagaaagtagaatggtgcttgcctggggctgggtggaagggagaacagagagctattgtttaatgacagagggtttcagttttacaagttgaaaagaattctggagatggatggtggtaatggttgcacaaccatatgaatgttaatattactgaactgttcacttaagcaaggttaaactactatagtttatgttatgtgtattttaacacaattttaaaaattggaaaataaaacacctagagccatgatctctaaggccgtatgtgttctgcccctattactcctcactcactccattccagctccactggcctttttctggctcctcagacatgccaagcactccctgcctyggggcctttgcagtgtctgttgccctcacgtggaatgctcttcccacagatctctctatgactctctctctctcacttgctctgctctaatgtctc

SEQ ID NO: 10366 - DNA, 511 bp, Homo sapiens
catctstccctatattacgacccttggacatgtaactttgtgggatctgcctattccaaggagggaaggggtaaggggtaagggcaaattccccatcccatgactctaggcttgggtctatgacttactttaaccaatgagatgttagcaggcatgatgtgactgacctaagtcttacaaagctacctctctcaacgccatgagaaagacatgcccaagctaggccactgtcccccaggaggaaggcaagaaacatatggaacaagcccactctcagccaagcctggcctggatcacctcatcccagccaagtcacaaatccatgagaatgaatcattattgttttaagccactgagttttgagcttgtgtgttataccacaatggtatatggttaactgactcatatcatgggtcccatccttctcttgccttccctactgtctcccaagcgcccagcagcacgccccacccgcagtctctctagggagacactaatcctaaaaatattt

SEQ ID NO: 10367 - DNA, 511 bp, Homo sapiens
catctgtccctatattacgacccttggacatgtaactttgtgggatctgcctattccaaggagggaaggggtaaggggtaagggcaaattccccatcccatgactctaggcttgggtctatgacttactttaaccaatgagatgttagcaggcatgatgtgactgacctaagtcttacaaagctacctctctcaacgccatgagaaagacatgcccaagctaggccactgtcccccaggaggaaggcaagaaacatatggaacaagcccactctcagccaagcctggcctggatcacctcatcccagccaagtcacaaatccatgagaatgaatcattwttgttttaagccactgagttttgagcttgtgtgttataccacaatggtatatggttaactgactcatatcatgggtcccatccttctcttgccttccctactgtctcccaagcgcccagcagcacgccccacccgcagtctctctagggagacactaatcctaaaaatattt

SEQ ID NO: 10368 - DNA, 2126 bp, Homo sapiens
ttcaggcatgctgtgtggggatagaattatcccttattttaacaatgaaagagaccaaagtttcccagctggtcatcttgcccaaagtcacacagagatggtctcctacctaaacaaataatcctttttctgccacactgtggctgctccatttgcactcccatttcttttttctttgaattaactttgcattattgatataatccctatcatctagcatttgattcaaccccagccagaattattccctaatggtttggtaggtgcaagcatgttgagagtgaggattctgtcctctccatcacacatgtccatccctcaggccacccagctgggtgttggacactttagttgtagtggtcagcagctacgtcggtctgctcagcatggttttcctccttcttccaagaaatggatcctctctcacttgagtcatgtggctgaggttgggagatgtctttctgagtacctggaaactcttgtgcaggaggctacatgcatgactcaagacaagccaattagagtcttttccagattgattggacctctatatgttgcagccacacatggatcagagactgggagaactaccccccatctccaaattctcaccattttcagagctcacagacaaactatagtcctcagtttgccttcgcatcttgatggggccatgggtctatttttcattaatagaatgtgacagaagtgataagtgtggcaccatctggcccaggcagtaaagagtgtctgcatctttgccgttatctatttctgcgggtaaatggtgagagagtccatggacctagagaagagcagagctacaaagtgggaggagcctgggtgcctggatgactgtatggagcagagcaacccccatcccatgctgtactgtggcatgaaaaagaaacaagctttaattccaggctaagcccctgaaatgtctgggttgtttcaatcattagcctacacagaccagtaaaatgtaaacacacaacaatttctgtctttctgatacttatatagaaaagtaccaaacagataagttagggccagataatggaaggccttgtttgccagtgtttgtcagtgttcataaagccagtaaagaattttaaggaggtggagtgatttctagaaggaagaaaargaagatcgtttaaaatagttttctagaaggaagaaaaggaagatcatttaaaatagtaacaaccatatattgaatgcttcaaagtacaaaatactatatgccagcacttcattaacactctctcatttcatccgcccaaaaccacattccccatttaacatataaggaaactcagtcccgtggtgtgcaatagttaaacagcagaacccagagtcagacccagccctgcctatctccaaagcttgagctcttttcattaaaccatatcacctcttaagattattagtttggcccaatgtcttttcatatagttttttgtttgtttagtttttcagcagtggctacatattacttttataatagtaaaatgcacacttaaatacacaccaatacaaaaataagtaaataaaagttaatctggccacagaagagcatgcaaaatccaagagcccagtcaccatggggcttgtcctgaccaacacttacatgttcaggagagcttcttccaaggacgcaccttgtgtatccaaggcttatgtgcattcttggaagaagctctcccaaacatgtaagtgatgatccagttgaggaaaagtgacagcatcctgtattgcaattttcaatcattccaagaaaataaagatttcacacgagtcttctaattgccgatttgcaaacagtatctatgtaaactctgattcccatcacttgctaatcaggttgggtttggagaaccaagttaggtttgttgtttcgtttcctgcaagaagtcctctcttctgctacccacagcctctccccccgagcccctctctttcttctctgtgtctgtttatgtcttcctggttttcaatttcttaatgatgttttaacgagatgccagttacacatgcaaattggaaagaggcgacattgagagattgctacctggtggtaaatttattaaaatcaaggcagttttaataacttccttgca

SEQ ID NO: 10369 - DNA, 2126 bp, Homo sapiens
ttcaggcatgctgtgtggggatagaattatcccttattttaacaatgaaagagaccaaagtttcccagctggtcatcttgcccaaagtcacacagagatggtctcctacctaaacaaataatcctttttctgccacactgtggctgctccatttgcactcccatttcttttttctttgaattaactttgcattattgatataatccctatcatctagcatttgattcaaccccagccagaattattccctaatggtttggtaggtgcaagcatgttgagagtgaggattctgtcctctccatcacacatgtccatccctcaggccacccagctgggtgttggacactttagttgtagtggtcagcagctacgtcggtctgctcagcatggttttcctccttcttccaagaaatggatcctctctcacttgagtcatgtggctgaggttgggagatgtctttctgagtacctggaaactcttgtgcaggaggctacatgcatgactcaagacaagccaattagagtcttttccagattgattggacctctatatgttgcagccacacatggatcagagactgggagaactaccccccatctccaaattctcaccattttcagagctcacagacaaactatagtcctcagtttgccttcgcatcttgatggggccatgggtctatttttcattaatagaatgtgacagaagtgataagtgtggcaccatctggcccaggcagtaaagagtgtctgcatctttgccgttatctatttctgcgggtaaatggtgagagagtccatggacctagagaagagcagagctacaaagtgggaggagcctgggtgcctggatgactgtatggagcagagcaacccccatcccatgctgtactgtggcatgaaaaagaaacaagctttaattccaggctaagcccctgaaatgtctgggttgtttcaatcattagcctacacagaccagtaaaatgtaaacacacaacaatttctgtctttctgatacttatatagaaaagtaccaaacagataagttagggccagataatggaaggccttgtttgccagtgtttgtcagtgttcataaagccagtaaagaattttaaggaggtggagtgatttctagaaggaagaaaaggaagatcgtttaaaatagttttctagaaggaagaaaaggaagatcatttaaaatagtaacaaccatatattgaatgcttcaaagtacaaaatactatatgccagcacttcattaacactctctcatttcatccgcccaaaaccacattccccatttaacatataaggaaactcagtcccgtggtgtgcaatagttaaacagcagaacccagagtcagacccagccctgcctatctccaaagcttgagctcttttcattaaaccatatcacctsttaagattattagtttggcccaatgtcttttcatatagttttttgtttgtttagtttttcagcagtggctacatattacttttataatagtaaaatgcacacttaaatacacaccaatacaaaaataagtaaataaaagttaatctggccacagaagagcatgcaaaatccaagagcccagtcaccatggggcttgtcctgaccaacacttacatgttcaggagagcttcttccaaggacgcaccttgtgtatccaaggcttatgtgcattcttggaagaagctctcccaaacatgtaagtgatgatccagttgaggaaaagtgacagcatcctgtattgcaattttcaatcattccaagaaaataaagatttcacacgagtcttctaattgccgatttgcaaacagtatctatgtaaactctgattcccatcacttgctaatcaggttgggtttggagaaccaagttaggtttgttgtttcgtttcctgcaagaagtcctctcttctgctacccacagcctctccccccgagcccctctctttcttctctgtgtctgtttatgtcttcctggttttcaatttcttaatgatgttttaacgagatgccagttacacatgcaaattggaaagaggcgacattgagagattgctacctggtggtaaatttattaaaatcaaggcagttttaataacttccttgca

SEQ ID NO: 10370 - DNA, 565 bp, Homo sapiens
tattctagaaagatgagggaaagaccgggtccctggaggccaacaggctgctactctagcaagtgggcaggattgttactaccaataccctggcctgtattgacaggtggtcaaatattttgagtatcctccgtgggtggggttaatgataatggctggtaggactactgtaaggatttagtgagctaatgtgtgtaatgagtgatgaggcaacccattattattttatattattattattatttcttttttagaggagagtctcactgtcaccaaagctggagtgcagtggtgacatcatagctcactgcaaccttgaattcctgggctcaggcrattctcccacctcagcctccctagtagctgggactgtaggtgtgcaccaccacgcctggctaatttttatttttatttttattttttattttgagacacagtcccactctgtcgcccaggctggagtgcagtggtgtaatcttggctcactgcaacctctgcctcccaggttaaagagatccttgtgcctcagcctcctgagtagctgggattataggcatgtgccacc

SEQ ID NO: 10371 - DNA, 565 bp, Homo sapiens
tattctagaaagatgagggaaagaccgggtccctggaggccaacaggctgctactctagcaagtgggcaggattgttactaccaataccctggcctgtattgacaggtggtcaaatattttgagtatcctccgtgggtggggttaatgataatggctggtaggactactgtaaggatttagtgagctaatgtgtgtaatgagtgatgaggcaacccattattattttatattattattattatttcttttttagaggagagtctcactgtcaccaaagctggagtgcagtggtgacatcatagctcactgcaaccttgaattcctgggctcaggcgattctcccacctcagcctccctagtagctgggactgtaggtgtgcaccaccacgcctggctaatttttatttttatttttattttttattttgagacacagtcccactctgtcgcccaggctggagtgcagtggtgyaatcttggctcactgcaacctctgcctcccaggttaaagagatccttgtgcctcagcctcctgagtagctgggattataggcatgtgccacc

SEQ ID NO: 10372 - DNA, 999 bp, Homo sapiens
taaatgttagttgcgttatggtgcttaggatcagtaacagccactttcagtcttggttgaaagtcaatttagatcagacattcatttctcctacacctctccaagctttgaacaggatgactttttagtttaaattgcataaaaagctcactttcttgaccttatttgtaacacaaacatttactgagtgatttctgtgtatctaactctttcctggtagtacctcgttggtcctttaccatcgcggagagtctacagtaggaagaataagcatgctcaggttagagtttggggaggacaaaattttcctgctgtttgtagtttagaacattgcataatcttctgaaaagcacacctttctttttctttttaaacttcaaggatttgttttaaaacattttctcacaaaagtctgaagttttcgtaccttgattcatgaagggggacgggtagtagcttctggagcctgattcatggaggtgcctgtgctattctttgtctttgagacaaaaagttttcctataccagcagctcctgaaggtgactttaggaaacagcacktgttttgttattctgtgctcagttttgacccacatccaagtattaattttttggatgggaggggtggtggctgttgtttgtgtctaagtgggtctttccaaggactatatattagggtaagactccactcctggcaaccaaaacaaaaaacttctctgactccaattcaaatctcaacagaagcaaatgactcagttcaagcaaactttatagattattcaattctggaactatatgttctcggataaccatacccaacattgaaattaaactactctctaaagaaggaaattccttagtaacgtcactcagctccaaaacttgggactgtctttccttgcatctaacttacatgtctccaatcacaaattaagctgttcattctccagctgacatatctgggcaggagatccagcttcagatgctgggaggcgtgaa

SEQ ID NO: 10373 - DNA, 585 bp, Homo sapiens
aggttcaaatccagcaaagaataaaaattctgcttgctttataactaaactaaaagttgtgaaattgagactttgggttatctgactcaaaccatgtatgatacatatgtacattatatatatatatatatatgtatgtaatgatacatacatacaatacaaagattgaattatatatgtatcagtttatacttttgttcttatttcaactgtaatttttttcaagtgatgggagagaattgttaaaattatatctgagttagacaaagagtattcccaccaacatttttctccctcatccttctcctcttcctttcctaattacagacatatctcttttttattgtgcttcattttattgcacttcacaaatactgtgctttttacaaatcaaaggtttgtggcaaccctgagtccagcaagtctattggcaccattttcccaatagcaygtgctcactttgtgtctctgtgtcacgttttggtcattcttacaatattttaagctttttcatttcatatttaggaaaaatatgttaggcttcaatagtaaatatatattatatttactattatggtataagta

SEQ ID NO: 10374 - DNA, 2162 bp, Homo sapiens
gggaaggggacaacatagtaagtgactaagtggcttttttttttttttttttgccaagtgaagctgagtcatatggcctctgtcattccaaaactattctctacggctgcattcctttcgctcttgccttcctttagaaccctggagaaggcctcctgaagcctggccctattatgtatcctgacaaagataaacttttccaaaaagctgcatgttgtttctagcacagtttttcctcgcagtgactacgtgatgaaagtaccatgcagaggaggtgtctgactgaggcgttcgtggtgtgtgacagagtcccctgcacaggacagccgcactcccctcttgcgtcctttcctcccatgtttgcaaagcctctttccctgtcagcagggggtgttctggcagttgacatttctgaaaactacagcctacatttttaaaaaatccagtaagtgaaaactaaaaaattaataccgtggtcataatagtgtggcatttgataactaatgaggcactgtcgtgccagctattattttcagacatttacagtccttttttaaatacaaagaaatatttggtgtgaaatgttccccgggagctggtgcaagcagaggcgacagggcaagggagcttgggttgtagcctcgaattcctccggccagggctaccgtcagcctgcggcacacaagtaaatcaaatataaaaccaaaatttctgtaagcaaatcagtttctaactcactgtaacgaattatctttcgcacatcacagaggcatctcttttcactgtcgagtttggtttgcttggttacaaaaagggcagttcaaaagctttggttgctattgtgaaagtcagctgaattccttccaccgtgctggggtggggtggggttcacgcaggttctcttttgtcaccaggggtgctgtggattcacaagtaagcaagaggctcctcaggtcaagcctctggctgctccctgaggtcagctgcctagcttctcctcctctgagatagacgggaacaaagtctttgatgtgtgcatttctcaagcttgacaatgatacagctacataaaaacccatgatttcatatagatattccaaaacgtaaaagtaaaccatgcatccacagagacatggaattacagaactggatgctgagctggtcacttgggaggcaggcgtccttgccattggtttatgcctcagccccaccatgcagtggctggccaggtgacctaggccagtcctgcatcctcggctcctcacctgcctggtgggacagtgacatctctcctgcagcactgctgtcagggtgagggaggtagggcgcagtttcagaaaaccattgggctgcacctgcgtgagcacagctgcaggagcaaargtcagaaaggtcagcaaaggatttcaggagcaaaggtcagaagaaaccctcaaggtggttgtgtctgcaggaaagtgctgtcgtctcctgcaatgctttcaagactattcagaagcacagtgtgaagggagagccggagcccatggggaaatgactccagagtgttccacgtgttggaaggcatctgttggaaaacggacattcaagcaaatagttgcctgcatagacaacgcagaatgactgggaaagccccaacaagttacctactggtaaatgaggtgagaagcttaaagtgagaaccccattgctgcctctttttcactttaaaaacatttaagttttgaattatggtaaaatacacgtaagatttactactgtaaccatttttaagtgtacggttcagtagtgttaagtatattcacattgctaaggaaccaatctgctacttttgtttattaattttttcctgaggggaaatatttttaaattttaaaatatttaattgacaaataaaaattgtgtatattcaaggtgtagaacatgatttcatatgcacgtacattgtatactcattaccacaatcaaagaaattaacacatccaacccacccatagttgccattgtgtgtgcgcggatgtgcgtgtatgtgtgtgtatgtgtgcacgtgtgcgcctgtgtgtgtctgtgtgtctctgtgtatacgtgtgtgtacatgtgtgtacgtgtgtgttcctgtgtatgtgtgtctgcgcacgtgtgtatgcatgtatatgggtatg

SEQ ID NO: 10375 - DNA, 2162 bp, Homo sapiens
gggaaggggacaacatagtaagtgactaagtggcttttttttttttttttttgccaagtgaagctgagtcatatggcctctgtcattccaaaactattctctacggctgcattcctttcgctcttgccttcctttagaaccctggagaaggcctcctgaagcctggccctattatgtatcctgacaaagataaacttttccaaaaagctgcatgttgtttctagcacagtttttcctcgcagtgactacgtgatgaaagtaccatgcagaggaggtgtctgactgaggcgttcgtggtgtgtgacagagtcccctgcacaggacagccgcactcccctcttgcgtcctttcctcccatgtttgcaaagcctctttccctgtcagcagggggtgttctggcagttgacatttctgaaaactacagcctacatttttaaaaaatccagtaagtgaaaactaaaaaattaataccgtggtcataatagtgtggcatttgataactaatgaggcactgtcgtgccagctattattttcagacatttacagtccttttttaaatacaaagaaatatttggtgtgaaatgttccccgggagctggtgcaagcagaggcgacagggcaagggagcttgggttgtagcctcgaattcctccggccagggctaccgtcagcctgcggcacacaagtaaatcaaatataaaaccaaaatttctgtaagcaaatcagtttctaactcactgtaacgaattatctttcgcacatcacagaggcatctcttttcactgtcgagtttggtttgcttggttacaaaaagggcagttcaaaagctttggttgctattgtgaaagtcagctgaattccttccaccgtgctggggtggggtggggttcacgcaggttctcttttgtcaccaggggtgctgtggattcacaagtaagcaagaggctcctcaggtcaagcctctggctgctccctgaggtcagctgcctagcttctcctcctctgagatagacgggaacaaagtctttgatgtgtgcatttctcaagcttgacaatgatacagctacataaaaacccatgatttcatatagatattccaaaacgtaaaagtaaaccatgcatccacagagacatggaattacagaactggatgctgagctggtcacttgggaggcaggcgtccttgccattggtttatgcctcagccccaccatgcagtggctggccaggtgacctaggccagtcctgcatcctcggctcctcacctgcctggtgggacagtgacatctctcctgcagcactgctgtcagggtgagggaggtagggcgcagtttcagaaaaccattgggctgcacctgcgtgagcacagctgcaggagcaaaagtcagaaaggtcagcaaaggatttcaggagcaaaggtcagaagaaaccctcaaggtggttgtgtctgcaggaaagtgctgtcgtctcctgcaatgctttcaagactattcagaagcacagtgtgaagggagagccggagcccatggggaaatgactccagagtgttccacgtgttggaaggcatctgttggaaaacggacattcaagcaaatagttgcctgcatagacaacgcagaatgactgggaaagccccaacaagttacctactggtaaatgaggtgagaagcttaaagtgagaaccccattgctgcctctttttcactttaaaaacatttaagttttgaattatggtaaaatacacgtaagatttactactgtaaccatttttaagtgtacggttcagtagtgttaagtatattcacattgctaaggaaccaatctgctacttttgtttattaattttttcctgaggggaaatatttttaaattttaaaatatttaattgacaaataaaaattgtgtatattcaaggtgtagaacatgatttcatatgcacgtacattgtatactcattaccacaatcaaagaaattaacacatcyaacccacccatagttgccattgtgtgtgcgcggatgtgcgtgtatgtgtgtgtatgtgtgcacgtgtgcgcctgtgtgtgtctgtgtgtctctgtgtatacgtgtgtgtacatgtgtgtacgtgtgtgttcctgtgtatgtgtgtctgcgcacgtgtgtatgcatgtatatgggtatg

SEQ ID NO: 10376 - DNA, 551 bp, Homo sapiens
gaagagaaagtgaagattcgatttgaggtgagttcagcacaaaagcgtatcccaggccctctggctccaactgcagccctttctacctcattcccagaccccacctaagccttttctcttcaaaatcttctcaggcacactgatacacatacctcagatttttaattctccggttgtgttcaccaggtgcttggtcatgattaagaattccgtgatgtrtaccccatgtgtttaaatttgctgctgagttaactttgtggcggcctgtggactagacctctgcacatgcaatgcagaacggcagggccagatttgaaatcctgctatcttttcggctgccttgtaaaaataacatcaggcgatggggatacgatgccagaggtcacctgtgataagttctgtttatggccattttacttctaggaagacaggaagtgtcaggatctcagggatctaggaagccaaaatgtttttccactctgaaataaagtgactgaccaggagttcccggccacgcagccctgtgggaactgccgcacggccacttttat

SEQ ID NO: 10377 - DNA, 552 bp, Homo sapiens
tgtcaaaaaaaaaaaagaactgggctttattgatgtcacctaaatgcacctaaacttcttttttgccccatgctcttctgtactcttgatctttccccaaatttttaaaaacatgacactcattcccttatttttcctacttagaaaagtgtagatggttttatcataggaagttcaaaaaaattaaaatataatgaaaaatactcaaatagtgcctcacaacagtaactactgctaacataaataaaatccatatttcctctcatacagaccccagagttgctttgcctgacagtgtagttgatggagaaaataatctttatccttagcctccatctggttgcagaccataaagacagggaaaaaatgagggtgttggtagcttcgttagaaactgaaagctcactgattttttcaaaacctaaatagcctgtgtttctccaaataactaatttgcagccttcggcagccaggactggcagggatgggrctagggggactggggagaactgctctctcctgagggtggtctgacccgacagcacgcatgac

SEQ ID NO: 10378 - DNA, 647 bp, Homo sapiens
tatattgccaagttaatatctgttttatgtgcccccagcatgtgttgaacatcaaacagtaccagggactttaaatatacccacggacaaagaaataattcataatgatgtttgttgaatttagttgcaatcaataaaaagtgcagtttgtgaatgctctgaggttcttgatattgatgtaaggctttgaacgacaaatgaggacaaaacataaataggaaagtaaaactgaaggatagaggccaaggccatgttttagaagatttaaagaaaaagggaaatttggtgagcaccataggaattacagatggctgtaggaattcttcctgttttactctctgggcatggaccacagcttggatccagaaatatttaggagyaggataagaggaccaagttcaattctataggaatcctttagctgataggctcagaacaaatcacataattgatagtgctgcttcaacttcaagtaaggaatattgatgcaatccttacagctacaaatggacagtggtctcatgttttcagttttcaagtgtttcttaagaggcaaggtgatgaaaacgcccacgtggggagccccatgtccttccattagtgtagagaaacctggtgtccagcagcacctgctccctctgcaagcc

SEQ ID NO: 10379 - DNA, 532 bp, Homo sapiens
tcttgactaaaatcaacttggcaccaactcgtcagttaattaactgttaacagattcttctaggtacgactattacatggatattttatcttcctgttaattggtaattatgcactggcaagaaaaacagtgtttctttccaattatcgcagaactcagtgattatttaaacttggctaattagcattagagggctgtacatcttctgggcaaattgtgtttgataatccttattaaaatatacatggcggttgttgacttgtaacaggaaaaaaaaaagtggtagttcaaagggtattagataccacacgaggcaaatgggggcccattaaaatttccccaactgctctaatgagaatgccgagggtcatttctgcctagtttaccatctgtttggtttctggcatgtggctctggtgagaagggagtgtccggaagcccatttggcttatcacagtataatccaggggtctgaagcaatttcagtcatttataaagtggtacrttgaagtcagaaacgtatacatgcaga

SEQ ID NO: 10380 - DNA, 1069 bp, Homo sapiens
ttaaaaaaaaaaaaagaaaggaaaccaaaactattaaaatattcctacacattttcaaaaacacatgagaaacacaatattgaagcacttatcctgctgtstccttttttattataatacaagtaacagaaaggaaaacttgagtactttatgtttctactccatgacattcttcttacttttatattagaaacttcacccttctccacattttcgggagttggcaatgtggaaacctcaaagatactagctctttcagtttattaccatagatataattattgggcatagttatacttgtatctgtgaaaagagacccagagaattgctatcgtgaaacagccagctaaaatgaaaatatagttggaattctgtgctctgcaaagtgggtcataattttatttcactctatctccctaagaaaattcatgaaagtcagtttggatgtttcattcagttatttgacagtaaagatgaaaactacatccagaaatgaagaatgggacaccaaatctcagaaatctgttctacaggaaagttattcccaagtatattcctgtcaaaattcgacttcattacttctcaataagacagaggtcttcattctacactaattctaagtgtttccttaaattttaggtacacttcactagtttaaaatgaccaactattccggaaatttgtataaacaagttaaaggcctcaataatacctgaaagcaaataattttactccttcttacattacctgataattatatacaggcaactgatatccagtggtgacctgaaatggtgaacttggataagcaggaaatgcctgaaaagaaaggttggcagaaaaaaatgaatatggtaaaccactttttaaaattacaaagaaatataattcccaatataacaacaatattacagaagggaaaatatcgtttttctacatacaacaatgcagaattccaaatgaatgactgatttatgaagaaagaaagattccatgtcaagtgctacactttgggtgtgaagggggaagaaatgacaaaagaattgacgacttcaccaaagtttacctt

SEQ ID NO: 10381 - DNA, 1069 bp, Homo sapiens
ttaaaaaaaaaaaaagaaaggaaaccaaaactattaaaatattcctacacattttcaaaaacacatgagaaacacaatattgaagcacttatcctgctgtctccttttttattataatacaagtaacagaaaggaaaacttgagtactttatgtttstactccatgacattcttcttacttttatattagaaacttcacccttctccacattttcgggagttggcaatgtggaaacctcaaagatactagctctttcagtttattaccatagatataattattgggcatagttatacttgtatctgtgaaaagagacccagagaattgctatcgtgaaacagccagctaaaatgaaaatatagttggaattctgtgctctgcaaagtgggtcataattttatttcactctatctccctaagaaaattcatgaaagtcagtttggatgtttcattcagttatttgacagtaaagatgaaaactacatccagaaatgaagaatgggacaccaaatctcagaaatctgttctacaggaaagttattcccaagtatattcctgtcaaaattcgacttcattacttctcaataagacagaggtcttcattctacactaattctaagtgtttccttaaattttaggtacacttcactagtttaaaatgaccaactattccggaaatttgtataaacaagttaaaggcctcaataatacctgaaagcaaataattttactccttcttacattacctgataattatatacaggcaactgatatccagtggtgacctgaaatggtgaacttggataagcaggaaatgcctgaaaagaaaggttggcagaaaaaaatgaatatggtaaaccactttttaaaattacaaagaaatataattcccaatataacaacaatattacagaagggaaaatatcgtttttctacatacaacaatgcagaattccaaatgaatgactgatttatgaagaaagaaagattccatgtcaagtgctacactttgggtgtgaagggggaagaaatgacaaaagaattgacgacttcaccaaagtttacctt

SEQ ID NO: 10382 - DNA, 1069 bp, Homo sapiens
ttaaaaaaaaaaaaagaaaggaaaccaaaactattaaaatattcctacacattttcaaaaacacatgagaaacacaatattgaagcacttatcctgctgtctccttttttattataatacaagtaacagaaaggaaaacttgagtactttatgtttctactccatgacattcttsttacttttatattagaaacttcacccttctccacattttcgggagttggcaatgtggaaacctcaaagatactagctctttcagtttattaccatagatataattattgggcatagttatacttgtatctgtgaaaagagacccagagaattgctatcgtgaaacagccagctaaaatgaaaatatagttggaattctgtgctctgcaaagtgggtcataattttatttcactctatctccctaagaaaattcatgaaagtcagtttggatgtttcattcagttatttgacagtaaagatgaaaactacatccagaaatgaagaatgggacaccaaatctcagaaatctgttctacaggaaagttattcccaagtatattcctgtcaaaattcgacttcattacttctcaataagacagaggtcttcattctacactaattctaagtgtttccttaaattttaggtacacttcactagtttaaaatgaccaactattccggaaatttgtataaacaagttaaaggcctcaataatacctgaaagcaaataattttactccttcttacattacctgataattatatacaggcaactgatatccagtggtgacctgaaatggtgaacttggataagcaggaaatgcctgaaaagaaaggttggcagaaaaaaatgaatatggtaaaccactttttaaaattacaaagaaatataattcccaatataacaacaatattacagaagggaaaatatcgtttttctacatacaacaatgcagaattccaaatgaatgactgatttatgaagaaagaaagattccatgtcaagtgctacactttgggtgtgaagggggaagaaatgacaaaagaattgacgacttcaccaaagtttacctt

SEQ ID NO: 10383 - DNA, 1069 bp, Homo sapiens
ttaaaaaaaaaaaaagaaaggaaaccaaaactattaaaatattcctacacattttcaaaaacacatgagaaacacaatattgaagcacttatcctgctgtctccttttttattataatacaagtaacagaaaggaaaacttgagtactttatgtttctactccatgacattcttcttacttttatattagaaacttcacccttctccacattttcgggagttggcaatgtggaaacctcaaagatactagctctttcagtttattaccatagatataattattgggcatagttatacttgtatctgtgaaaagagacccagagaattgctatcgtgaaacagccagytaaaatgaaaatatagttggaattctgtgctctgcaaagtgggtcataattttatttcactctatctccctaagaaaattcatgaaagtcagtttggatgtttcattcagttatttgacagtaaagatgaaaactacatccagaaatgaagaatgggacaccaaatctcagaaatctgttctacaggaaagttattcccaagtatattcctgtcaaaattcgacttcattacttctcaataagacagaggtcttcattctacactaattctaagtgtttccttaaattttaggtacacttcactagtttaaaatgaccaactattccggaaatttgtataaacaagttaaaggcctcaataatacctgaaagcaaataattttactccttcttacattacctgataattatatacaggcaactgatatccagtggtgacctgaaatggtgaacttggataagcaggaaatgcctgaaaagaaaggttggcagaaaaaaatgaatatggtaaaccactttttaaaattacaaagaaatataattcccaatataacaacaatattacagaagggaaaatatcgtttttctacatacaacaatgcagaattccaaatgaatgactgatttatgaagaaagaaagattccatgtcaagtgctacactttgggtgtgaagggggaagaaatgacaaaagaattgacgacttcaccaaagtttacctt

SEQ ID NO: 10384 - DNA, 646 bp, Homo sapiens
aaaaaaaccaagaatgaacaggaagtctatgtttggctaattcacttaacatcaaggaaaacataatccctttgctccccaacaggcccctatggtggcatcttaaaaaaaaaaaaaraaaggaaaccaaaactattaaaatattcctacacattttcaaaaacacatgagaaacacaatattgaagcacttatcctgctgtctccttttttattataatacaagtaacagaaaggaaaacttgagtactttatgtttctactccatgacattcttgttacttttatattagaaacttcacccttctccacattttcgggagttggcaatgtggaaacctcaaagatactagctctttcagtttattaccatagatataattattgggcatagatgtacttgtatctgtgaaaagagacccagagaattgctatcgtgaaacagccagctaaaatgaaaatatagttggaattctgtgctctgcaaagtgggtcataattttatttcactctatctccctaagaaaattcatgaaagtcagtttggatgtttcattcagttatttgacagtaaagatgaaaactacatccagaaatgaagaatgggacaccaaatctcagaaatctgttctacaggaaagttattc

SEQ ID NO: 10385 - DNA, 646 bp, Homo sapiens
aaaaaaaccaagaatgaacaggaagtctatgtttggctaattcacttaacatcaaggaaaacataatccctttgctccccaacaggcccctatggtggcatcttaaaaaaaaaaaaaaaaaggaaaccaaaactattaaaatattcctacacattttcaaaaacacatgagaaacacaatattgaagcacttatcctgctgtctccttttttattataatacaagtaacagaaaggaaaacttgagtactttatgtttctactccatgacattcttsttacttttatattagaaacttcacccttctccacattttcgggagttggcaatgtggaaacctcaaagatactagctctttcagtttattaccatagatataattattgggcatagatgtacttgtatctgtgaaaagagacccagagaattgctatcgtgaaacagccagctaaaatgaaaatatagttggaattctgtgctctgcaaagtgggtcataattttatttcactctatctccctaagaaaattcatgaaagtcagtttggatgtttcattcagttatttgacagtaaagatgaaaactacatccagaaatgaagaatgggacaccaaatctcagaaatctgttctacaggaaagttattc

SEQ ID NO: 10386 - DNA, 646 bp, Homo sapiens
aaaaaaaccaagaatgaacaggaagtctatgtttggctaattcacttaacatcaaggaaaacataatccctttgctccccaacaggcccctatggtggcatcttaaaaaaaaaaaaaaaaaggaaaccaaaactattaaaatattcctacacattttcaaaaacacatgagaaacacaatattgaagcacttatcctgctgtctccttttttattataatacaagtaacagaaaggaaaacttgagtactttatgtttctactccatgacattcttgttacttttatattagaaacttcacccttctccacattttcgggagttggcaatgtggaaacctcaaagatactagctctttcagtttattaccatagatataattattgggcatagwtgtacttgtatctgtgaaaagagacccagagaattgctatcgtgaaacagccagctaaaatgaaaatatagttggaattctgtgctctgcaaagtgggtcataattttatttcactctatctccctaagaaaattcatgaaagtcagtttggatgtttcattcagttatttgacagtaaagatgaaaactacatccagaaatgaagaatgggacaccaaatctcagaaatctgttctacaggaaagttattc

SEQ ID NO: 10387 - DNA, 646 bp, Homo sapiens
aaaaaaaccaagaatgaacaggaagtctatgtttggctaattcacttaacatcaaggaaaacataatccctttgctccccaacaggcccctatggtggcatcttaaaaaaaaaaaaaaaaaggaaaccaaaactattaaaatattcctacacattttcaaaaacacatgagaaacacaatattgaagcacttatcctgctgtctccttttttattataatacaagtaacagaaaggaaaacttgagtactttatgtttctactccatgacattcttgttacttttatattagaaacttcacccttctccacattttcgggagttggcaatgtggaaacctcaaagatactagctctttcagtttattaccatagatataattattgggcatagatrtacttgtatctgtgaaaagagacccagagaattgctatcgtgaaacagccagctaaaatgaaaatatagttggaattctgtgctctgcaaagtgggtcataattttatttcactctatctccctaagaaaattcatgaaagtcagtttggatgtttcattcagttatttgacagtaaagatgaaaactacatccagaaatgaagaatgggacaccaaatctcagaaatctgttctacaggaaagttattc

SEQ ID NO: 10388 - DNA, 516 bp, Homo sapiens
tcaacaataatagtaaacatttagataggccttactatgtgccggacaccattctaaacactctcaatgtaattaactccttcagtctgcatatgaagtaggtattaccagtttgttaaaattactgataaggaaaccaagacagaggaagttaaatgacttgtccacggtcatacctccattaaatggaagaccctgttttcaaaatgaccattgtattctagaagctagggcttttaagcagtaaccaagattgtcagtcattgtgggtatataaatagaaagagatgatgaaaaattgattttgtgytcagggagctcacagtttggtgtgctctctgtaagctcagccagtaataagaatacttgcttccatttttaaatacagtagagacaatgtctatattatgttatatcatacattccacaatatttttgtgactgttggcaatttcttattgattgctttgtcaatataattttatatttatgccacccaaaaccacttctcatttt

SEQ ID NO: 10389 - DNA, 1111 bp, Homo sapiens
cctacctttttgggctctatgagactatagccagcactacaggagctatctatttcttcttcctgtgactctaagattccgcaagttcaaaacccaaagcttggcaagaaaaaaaatcctaaaggtaagtaacatatttcaatcattttacaaatctctttcctctttcctctaccaaatacaccgaggatatcccttgagaagttttacaatctaatttgtttagtagatcttgtggcccacactatttagagcaaaatattcgtttactcaacaatttwttttgttatgtgctatgttaagcactttacattttatgtgctatgctaagcactttacatttattatgtacaacttacacaaccacttgggtaagtttggttcctagggattaactggattgcaaggccatgaagccacagagtgcttgacaccatgcagagggaagtcaggttgactcagagcccttactccatctgcttggggcaaacagagaaaacttttggcctaggatatttttcatcaacagtgagtaattactaaagttattatagaagggatttcagtccttaaaatgtattatgtattcagattttatcctgtgaatggcgaaaccccatctctaatgaaaatagaaaaaaattagctgagcttggtagtgggtgcctgtagtcccgctactcaggaggctgaggttggagaatggtgtgaacccaggaggtggagcttgcagtgagccgagattgcaccactgcactccagcctgggtgacagagcaagactccgtctcaaaaaaaaaaaaaaaaaaaatgtattcagcttttatgtaaagggggatatccacttaatgatattctttcttatttcttgatgagaccatatgatggttaaaagaaccaactgaattcattaaattttactgtaatgggaaattctgtccacttttgtcctgtgactattagaaatgcattttttacacatattttttcacttcaaaaaaattccaagccctttttctttatcccagcgttctctatctgttgaaatagcttgctgtttatatcagtcagtgaattgagtttgaagtctctttgatatctctgataaaata

SEQ ID NO: 10390 - DNA, 543 bp, Homo sapiens
aatcacttgagcctgggaggcagaggttgcagtgagccgagatcgcaccactgtactccagtctgggtgacaaagtgagaccctgtctaaaaataaaacaaacaaamaaaaaaacaaaaactgaagcaagagagtgggtgagcaccttgaaggtcatgctcagggcctctgagttttatcttagatggagtgtgaagtctttggaaggtttcaaaaggagagtaatctgataagattttgtggcattgtggagtaaactctccctgcccagaagagcaccagggagtggtacagaatttccagtgtgattctacatgtctctctggaaataccttggtaagtagatgtcaccacagttttcatggctaacagctgtttttaaaccatgaacagcttggcttttagagaacctattaattatcaatttatgaaaacagacaataatgtatgaaaaaactccaagtcatagtagtagatccctttatagatctggcagcttttcaagtaagtgcttctggtatttataaagatctagatgcacca

SEQ ID NO: 10391 - DNA, 611 bp, Homo sapiens
tcctttctttctcttcaccataaccttcaaaactctgcttgtctttcaaaacccatcttttctatatatttcctaatacctctaaccttataaaccctgaaatatactgtctttactgacttctggctcacaaaaggtttggtttatttttgttgctataaatgtttataaaaagaacatgggctttggaatcagatttactgcctcagcctccctagtggatgggattacaggcaccgccaccacgctgggcaaatttttgtatttttcacgctgggctaatttttgtatttttagtagagatggggtttcgccatgttggccaggccagtctcgaactcttgacctcaagtgatccctctgcyttggcctcccaaagtactgggattacaggaataagccaccgtgccgggcaggaaaagtctttcaatgaaagctaatttgtcagaatccacattcctatttataactggaccctgataaaagagcttaaaattgtttcctaataaaacaaagcatctttattttaataaacatatttaaatagataacgtaatgataatcagaaacaatattaaatagtagtatcaataatttctttcctttgatat

SEQ ID NO: 10392 - DNA, 584 bp, Homo sapiens
tgttacctcatttgatcttcacaacacaacccagaaaacaggctgttctcattctatctaattcagattgccgtgcaggatcaatactaccaattggtcaatttgggattgaaccgtgatctaattccaaagtaatattcttaacaataaaaattwtcttcatagcacttgatcaaggtttaaaattatacatttgtgtgatcatttaggtggtgtcatttttttttcacaactagactttatatcacaaagatagaaattccatctggttttgttcattatcatatacctggtatccaatccaaatgcctggcacacagaagtcactcagtaggtactagttaattattcagtgaattgttttatagatatacagctatttatctcagtaacccctgagaatgttatcatggtggtgaacctgagttatcaaaaaaattaagttcagctctttcccatcttacaagatggcaggtgaaaaagttgagaagccggatactaaggagaagaagcctgaaggcaagaaggctgacactagtggcaaggtgaaaaggggtaacttcaaggctaaaaatccaaaggcc

SEQ ID NO: 10393 - DNA, 519 bp, Homo sapiens
ccgtccaggccccgcacgccgccctccacgccgcacaccgcgaccagcacgcggtcgccatccgggtaggtgagggggtccaggggcctcacggccaggtggcacgggagccgcgcccgcagccgaccgaacgggctcacctgcagtgtccactccttcagagttcggsgcgccgggccaggcggagggacctcagtctccgatccgggccagcgctcgcccctacctgagctgtacggcctggcttggcaagcccagcaagaccagcgcccagcgccagcccacagtcggacctgacggagacagagacggaagcagccaagctcccaacctgaacagggggcaagcatggcgcgcctctctcgccagtcctcagaacacttcagccacagggagggtcacttgccacggccaatcgacttggccactgtgccgcctcaagtcaaataggagacgtaagtcagggtttgctgaaacaagagcgagccggttggcttgactaggcgatgtaaacatcag

SEQ ID NO: 10394 - DNA, 518 bp, Homo sapiens
cctaaaatgtattccctaaattatttagccaagacacctgcaaacactaacatttcataaaatgcaagtgccttaaaaaattgaagcccttacccaagtacaatgaccagaattcttggggctatcgtgatagatagactgggctaaagttctcatgggtacaagtctcaggttctctgctagccactacctttttaaaatttttaaaaattcagygttctcttaagttatcattgcctcttttctgtccttctagtccttgctccctccttattcttctttcggtgaagactcactcattataggtgctagctcaggttcagcaagggcccactgcaatagttcttttcttgtctttgtgtttcattggttataattattcagaataatcttcaaactattttttatgaaaattgacaggtgtaactttgaaaagaaatttgaaaaaggcactggtttaaggaagttgagaatgtactcaaattttctgtagaaacactagacatttttagattaaa

SEQ ID NO: 10395 - DNA, 693 bp, Homo sapiens
ctcctggcctcaagtgatctgcctgccttggcttcccaaagtgctgggattacaagtgtgagccactgcacccagcctgaatttctccattcttcccacacaccctccccaggttctccttcctgacctctgacccttcttttgtttcttctttttttttttttttttttttgagatagcatstcactctgtcacccagactggagtgcagtagcacgatctcggctcactgcaacctcttcctcccaggctcaagtgattctcctgtcttagcctcccaagtagctgggattataggcacacaccactaccgcctggctaatttttgtacttttagtagagatggggtttcaccatgttggccaggctggtcttgaactcctgacctcaggtgatctgcccgcctcagcctcccaaagtgttggggttacaggggtgagccaccacgcctggcccccttccttcatcttagtcaatcctatgccacctcttcttcctccagtcccctcacctgatggtcccgacacttcatcatccaccacctcctggagggggtaccctgaggtgctccgctgggggctccgctcttcctggggctgcggttgatggctcatcatgatctttcccaaaatctgtcccatctcaccaaacctagtctctgttctgtccttggtcttcttctggacactgctg

SEQ ID NO: 10396 - DNA, 574 bp, Homo sapiens
gttctgcctatatttgacttgtgatcctgtcaagttcatcagttaaactgtagaattcatttattctaataaagtcatcacaaatatacccatttttaaaagtggacaaaatacacgaactagtagcttagtacgtacctactgtgatgttacccatctygctttgtaatgttatattacctgccaaaaagaaaaagatacttttatgtactagagacaatctagaaaggaactgtgatacatagcaatgctaaaacatggatgaatatctacaatgttatttttgttggcaatttttcccaatatcacaagtccagtcaaagattgagctgtagttctgaaataactggcttaggtatctctgcaaaccttctttctctactaccaaaccttaagcttttatagcataactacaaatcaccataactgctggcacagaggaaaaacaatacttctaaaacctgtaagtgaaaaaaattactgaaatgtagtcactgtacattttcaacctaaatatcaatgtatttatcagaccacacaaagcgaagttttcaaccaagtaacactaaaatat

SEQ ID NO: 10397 - DNA, 544 bp, Homo sapiens
atctgaggtcaggagttcgagaccagcctggacaacatggtgagaccctgtctctacaaaaaaatacaaaaattaaccaggcgtggtggcaggcccctataatcccagctactcggatggctgaggtatgagaatcgcttgaacctggaggcagaggtcgcaatgagccgagattgtgccactgcacttcagcttgggtgacagagtgaaacsccgtctcaaaaaaaaaaaaaaatcacattggaaactttttttttaatggggttaaccatagtgttatcctgaaggttggtggaaattgcgtgaggaaaagtaattgcacagggaccaccagaggacccgggtacatgtttgtaactgtgcgggcttagaaggaggggcatttcccacgggaatttagggtgaaggggagtgaggacttgacgttggacatttgagggggtggccaacacagtataggaaggtgataactctgccttttggagatacagaattcatttatttaaagtatgcaattcagctgggtctgatggctcacctctat

SEQ ID NO: 10398 - DNA, 544 bp, Homo sapiens
atctgaggtcaggagttcgagaccagcctggacaacatggtgagaccctgtctctacaaaaaaatacaaaaattaaccaggcgtggtggcaggcccctataatcccagctactcggatggctgaggtatgagaatcgcttgaacctggaggcagaggtcgcaatgagccgagattgtgccactgcacttcagcttgggtgacagagtgaaaccccgtctcaaaaaaaaaaaaaaatcacattggaaactttttttttaatggggttaaccatagtgttatcctgaaggttggtggaaattgcgtgaggaaaagtaattgcacagggaccaccagaggacccgggtacatgtttgtaactgtgcgggcttagaaggaggggcatttcccaygggaatttagggtgaaggggagtgaggacttgacgttggacatttgagggggtggccaacacagtataggaaggtgataactctgccttttggagatacagaattcatttatttaaagtatgcaattcagctgggtctgatggctcacctctat

SEQ ID NO: 10399 - DNA, 838 bp, Homo sapiens
cagctctgcaaagctggctttgttctttggctgtttcacacagccattaacatcagcttccagatacagtcacatctttgtttctgtttagtttctgggccagaatttatttggtccmtgaacgtttctcctatgattcactgactctgttgctttcatcttccaggaagtgtttcttgcatatcatctccgtgaaaggtagagacatgagagaaggagtctcttgcttctcccctaaccccttcctcctccctatacctcctcctcttcttccaccttaatcactggcatcaacccaatagttaccattttaggacatctactaagtgctagagcagtgtcagggtgctttacacacacttccttattcaatcccttcaacaatccaaagaagtaggtatcattatccacattttacagatgatgaaacagagacttaaagaggtgaaatgatttgcccaagggcaaagagtggagccaggattcacacccagttctaactccagagtgaaagagataacccaggaactgcctaagcagctgtacacacccactgtcatgtgaagggagcaggctaataggagctcaagaggtttggaagagagagtaacccttccagctggagtagctgagtctctgggggaggtggacactggccccaagggatgggtaaaactgcaaccaactaggcagacaaggaagatgcagggaggcattccctctgcaggactggcccaagcaaatgtgaaggatgggagaccataggcatgtttgaggaactggtgggtgagcaaggtagagataaggcaggaaatgtaagggccagagcatggcttct

SEQ ID NO: 10400 - DNA, 838 bp, Homo sapiens
cagctctgcaaagctggctttgttctttggctgtttcacacagccattaacatcagcttccagatacagtcacatctttgtttctgtttagtttctgggccagaatttatttggtccatgaacgtttctcctatgattcactgactctgttgctttcatcttccaggaagtgtttcttrcatatcatctccgtgaaaggtagagacatgagagaaggagtctcttgcttctcccctaaccccttcctcctccctatacctcctcctcttcttccaccttaatcactggcatcaacccaatagttaccattttaggacatctactaagtgctagagcagtgtcagggtgctttacacacacttccttattcaatcccttcaacaatccaaagaagtaggtatcattatccacattttacagatgatgaaacagagacttaaagaggtgaaatgatttgcccaagggcaaagagtggagccaggattcacacccagttctaactccagagtgaaagagataacccaggaactgcctaagcagctgtacacacccactgtcatgtgaagggagcaggctaataggagctcaagaggtttggaagagagagtaacccttccagctggagtagctgagtctctgggggaggtggacactggccccaagggatgggtaaaactgcaaccaactaggcagacaaggaagatgcagggaggcattccctctgcaggactggcccaagcaaatgtgaaggatgggagaccataggcatgtttgaggaactggtgggtgagcaaggtagagataaggcaggaaatgtaagggccagagcatggcttct

SEQ ID NO: 10401 - DNA, 541 bp, Homo sapiens
ggtgggaaggggctaaactattgacttagaaagctgtcagctgtggtgttaacactccctccatctcagccccaaagaaggctctaagctcctctggagagcactttggatatacytgaactggtccaatcagactatctcatagtctgaaaacaggagtaactttcccaatagcactcagctgctcattggtggagaggattagaagccctgtgttacggactccctgttttatgaactgaatgtgtgtgtccacctcccaccaccaaaattcatgtgttgaagccctaaccccagccagtaccttgatcttagaattcccagcctccagaactgtgggaaataaatgtctgttatttaagccaccagtttatagcagtatcttggtagggcatcctgagctgactaagacccccagtctcagcaagtccaacgttccttccagtatcccagttgacacccaaggacagatgggattttcagatcaattttcaattccacttctgctcaaaaacatctccaactaaaataaccactctct

SEQ ID NO: 10402 - DNA, 526 bp, Homo sapiens
tattgtttaatgggaagtatattaaataatacatatcagatttattgttttaatgggaagcataataaatactaataaaaaaatcagattttatgtagaaagccccagtttctatattccgattttatttactgtttttttattagtgatgttagtggccaaaatacataccaaccaaagttcctactaatgtgttatgccacaccactgttgcaagagaagtattcagagctaattagaatgacaggcaattttatttcataaaaatcctctgaataagtgtaattttaaagacgtgtcttgcatattagagatttagaaaagaaacagatggcacacttcaatcaattgcttcttatgacattcaactgcaaataccacgtacacaaaagtttttttgaggtaaatgcctcttctctggaaaggatagttttgtttgacaaatcttgattggacagaatggaaaaaaaatgaaagaaatggactagaaatttaaccttcctgagtttgaaacttrgtttttctg

SEQ ID NO: 10403 - DNA, 520 bp, Homo sapiens
cagtacagggcccagccgcccgaccacactcactgtatggacaatcatccctttcctgttttgctcatcccttcatcttcccaaaacctctagagctgttggcagaaacaaatagaaaacataacctacagcttagagaaactatagaacaatccaggtgaagcgttcacatgagggaaacaggaaaggaatatcaccatgaagaaaagttaactacacaacaaacaggaggattagcatacaaagagcataaagttatgtgaaggtcactataaaattagtatgcttamaattattaaacatatacagaatagtcaccataataaaagaggatgatgccatgaagagacaaaggcaacatagaaatagccaggtgctgtggctcacatctgtaatcccagctactcgggaggctgaggtaggaggattgcttaagggccaggagtttgaagttgcagtgagcagtgattgtgccactgcactgcagcctggatgacagaacgagactccatctcttaaa

SEQ ID NO: 10404 - DNA, 549 bp, Homo sapiens
gggtcagagtcattgctgggagtgatgggggtttcctgaggggcaactttgtcttgcaggagactcaatgataatctggactttctttgcacagcacagaaatgtaagaaagttccaaccaatcctgtctccctctctccttcactcagggacaggcttccatcatatgccatcagcttccccaggctcatttaccctccatgcattttccctcaaaagagtggatgccctccttcgaccaatgcatgcacacttaatcggctactggagatttctgctcagaagaccaatrataatactcatatttttgcaaaattatttataacaaagtctgattctattgtcaaatataaaatattaattaatattaaatcaatattgcattgattaatattagtgttaaaatattaatcaatgtaaaatgttaatcatggtaataattgattttgtgtgtcatcttgactgggacatagtctcagttattcaatcaaacactaatctaggtgttgctctgatgtataatacaggtattattaaagcctgtcatca

SEQ ID NO: 10405 - DNA, 616 bp, Homo sapiens
ggccatgatactaagtcattgtctaatactttgtgctccaactgccagctttcaaccactaatttcctctgaatagtatctaggcacatttcaaaaggaatttcattcttgtttttacccgccytcccccagtttctcctatagaatcgttgtcacaccttcttttcctagcagtgtcatcagaatctaccagaaattaatgcctgcacctcatcagagaggaccaaacactttgtccactatccaacaccaaataatcagccaagagaaatggctctgaattctgtactggttctagcacaaggtccctttcccttctcacttgttccgtgcacatcatctgtggaatagcattgcttatgcacccccaccgccaccattaataaaaaataaggtttttttcaaacaaaataatctccattatagaaagatgggtctagcaaatcactgctaaaagcaggcagagattgagtggtcaaggcgagtgttcctggtcttggtccctatgactaggttctctcacaatactagtgaagggcaaccccaggcccaggacattctgtagaggcttctagagccagaaaagcctctactgcagcggcttctacaggcaggt

SEQ ID NO: 10406 - DNA, 928 bp, Homo sapiens
acacagcttggcccatgtgtctgaatgtgtgtgttgggttgagagtgggggttctccaggaaaaactcttaatatagaatgatttgtttccggtgacttaggtacacatcatacagaaccctctgctaaagtgtgcattaagtccatcaaacaggatcttagcgtggacaaggggaaaatgttcttaagatagaaaagcacagtttatatatgtgcttctcaataaaagagaaagaaagggaaattttatcacctgaattcttagaaaagtagccttcttctcactactatttactgcccagattcgaatttttcacaagaattgaatgtttcttctctgttattttacatgaggaatgcacaactactttctgcttctagggtccctaaaaagccagtaatgagccctgcagggaagtaagcagttttaactcagccaacttggcttgggcctgaaatcccctttatataaacagccttccaaccgttaaaaaaatgtgtcctggtaaaaattctgaactagatgaggccagtcgtcatttacatgttttactcttagtgtgctagggaaaggccccagaattacttccctgtgcactcgtatttcgtcttcctacagagatgccatttcacttgaaattcatgctaaaggccgtatttgtgtttcaaaaggaacgtgattccagaggaccttctattcagatttgtaattgtttgttaagggtgataaaaatcccttcaaagaaaaatgtcatgggtaacaaaagattcacttggaaattttaaygtatctataaaggtaaaagtagagttaggttcagccacttccaaataacgttgcaatttcacaaaactcacagtttcctggttattgcctttttttaaatttagaaagtactaaatggaggaaaatgagaagacagaaatg

SEQ ID NO: 10407 - DNA, 605 bp, Homo sapiens
agaccccaacctcgaaagtctcttggacctgggatcccttgggcagactggttccatcctgtaagacagggaacctgtagagaaagagtggagttgagagagaaaaggagagtgctgacaatgtctctctttcacatgtttctgtgcctggctggctgcctctacccttggagtctgagccgcattcctggatccttatggtaaattctgcttctttgcttaagctagataaagtgaatttctgttacaaccaagartcctactaaaagccacgtgtaagctatagttatttgtttggtactaacaacatgcaagcaccaaagcactttccatacattgtctcatttaatgttccagatatccccatgaacaaggccagcttcagcacaggcacgtgacctgtgcagttgaacaaggcctggggggtgcctaaaaagattctacgattggtttaatgctctgatgtcaccatctagaaagtcttagtggtttttgacaaaagggcccctcattttcattttgaactgagctccacaaattacctatgaggtattatctctatgtgacaaaaggtttattttctgccagacttattagtgccttta

SEQ ID NO: 10408 - DNA, 629 bp, Homo sapiens
aaaatataaaaattagctaggcaccgtggcaggtgcctgtaatcccagctactcaagaggctgaggcaggagaatcacttgaacccgggaggcagggattgcagtgagctgagatcgcaccactgcactccagcytaagcgacagagtgagactctgtctcaaaaaaaaaaaaaaaaaaaaaaaaaaaagagagagagagacggggtgtcactatgttggcgaggctggtctcaaactcctggcctcaagcaatctttcccaccttggtctcccaaagtgctaggattacaggagtgagctctcatgcctggtcggttcagtttcagttttgcaagattctggagattggaaaggaagcaaattctgacacatgctgtaacacggattaatcttgaatccattatgctaactgaagcatgccagtcacacacaaagaagtactgtgtgctacagataacaacaacgtgaatgtatttaatactactggctgtacacttggaaatggttaagacagtaaattttatgttatgtatattttacaattacagtttttttcttaattaaaaaaacgaaaagcattaatgctttggtccaggaaacagcagaaccttccagttctgtcctgttg

SEQ ID NO: 10409 - DNA, 535 bp, Homo sapiens
actgaaattttatctctaagatgcctgtttccttatgatttgttaacttaaaaatgattcaatattaattttaataacaatgagaaaactaagcctcagaagtgagatatcatcaaagactgcataactagtgacaaaatgagaagyagaatctagaattactgatatttgttggctccagagctttatcttttaaacatttcaattgaataagcagtctctaaatgtaactttaagccagattttgatacaaacataaatgaaaactcaatgttcctaatattattttgtttttagaagcatctagtctaagaacatatcaatttgtaagatcatgttgagatctgaaagatagcatatgccctcaatgtactagttgcaaaatctgaatatattatatatataatattttggagaattagtaaggtaattttatttgagagtttctattaaagttaacagattattctagtcatttgttcaatcacttttgcttttggcactttccataaaaatataattttttttatcccaa

SEQ ID NO: 10410 - DNA, 535 bp, Homo sapiens
actgaaattttatctctaagatgcctgtttccttatgatttgttaacttaaaaatgattcaatattaattttaataacaatgagaaaactaagcctcagaagtgagatatcatcaaagactgcataactagtgacaaaatgagaagtagaatctagaattactgatatttgttgrctccagagctttatcttttaaacatttcaattgaataagcagtctctaaatgtaactttaagccagattttgatacaaacataaatgaaaactcaatgttcctaatattattttgtttttagaagcatctagtctaagaacatatcaatttgtaagatcatgttgagatctgaaagatagcatatgccctcaatgtactagttgcaaaatctgaatatattatatatataatattttggagaattagtaaggtaattttatttgagagtttctattaaagttaacagattattctagtcatttgttcaatcacttttgcttttggcactttccataaaaatataattttttttatcccaa

SEQ ID NO: 10411 - DNA, 552 bp, Homo sapiens
ctcagctcggtatgatcaaagatacctgatatctggaggtgtggatttttcagtcataatttgggacatattttctggagaaatgaaacatatcttctgtgttcatggtggtgagattactcaacttctagttccacctgaaaactgtagtgtaagttgatttatataaaagattatttcactatggtagagccaagttatattrctatcaggaatgtaaatggaatctagactaacttaaaggaagtgtgacaagataattaagaaaaccctttcaattttaaaactaaaataatagtaacatttaggcaaagttacggccactaactattggggcacatagaaacagaagagagacatagtgtttttttactagcttcaaaatggtctggcttctttctgaaacatagcagcagttgagaaaatgtttattgaatgatgtttcaattttacattttaaaataatttaagtatgcctgaagacattgtacaatctcattatttttgggtccatctgagcaaagacaatgaatatatatgttggtaaaggca

SEQ ID NO: 10412 - DNA, 552 bp, Homo sapiens
ctcagctcggtatgatcaaagatacctgatatctggaggtgtggatttttcagtcataatttgggacatattttctggagaaatgaaacatatcttctgtgttcatggtggtgagattactcaacttctagttccacctgaaaactgtagtgtaagttgatttatataaaagattatttcactatggtagagccaagttatattactatcaggaatgtaaatggaatctagactaacttaaaggaagtgtgacaagataattaagaaaaccctttcaattttaaaactaaaataatagtaacatttaggcaaagttacggccactaactattggggcacatagaaacagaagagrgacatagtgtttttttactagcttcaaaatggtctggcttctttctgaaacatagcagcagttgagaaaatgtttattgaatgatgtttcaattttacattttaaaataatttaagtatgcctgaagacattgtacaatctcattatttttgggtccatctgagcaaagacaatgaatatatatgttggtaaaggca

SEQ ID NO: 10413 - DNA, 621 bp, Homo sapiens
agcccaagtctgcctaataataatagcagtaagctaactctcatgtaaggtatactctgcagcagacccactttgggaactttacatatattaacatttattacatttattattcttagccaccctataaggtgggtactgttattattccgattttacatgcaagaaaaccaaggcacagacagagtaggtaacttgtcctaggtcacggggtaataatttttacctgctggctcttgtttttctgtccatagctgacccaaaatatttgatgaccggtattttgtcctctttgagtgctccctttgccggtctaccatctcctttcccttgctttcttctgcatgtgcctccttctgaagttttcccacagcaggccccactctccaagggtgtttcgacctattcagaaaagagttgcattgctgggtccccttggacctgctgctgccggtcggctgggaagagttataaagaagaaaggacattttcaagctaagctctcctggaaactggtaggatggcrtgagctggtccacaggccccagctgccagatgatgggaattgggatcagctgtgacctaattatgagtctcgtaaacctgcattgtgcccttcat

SEQ ID NO: 10414 - DNA, 528 bp, Homo sapiens
tcaaatctgactgtggaagccttaggactagtgggatattgcagaaagaatgtgacgtttgggaccaggaaggtgctgagattcggattccgcctctgctgcttaccatgtgggcaacgctgactctgggcaagttacttagctctcttagcctctgtttcctcatgagtcaaaactgggaataaataataataaccttttagggttgttttatctctatgattaaacaaaataatagatatgacatacattatrggtctatcacatgataaacgcttaagaacagagactccttttactttccagttatccaaggtatagagtatgagaggggcaggtggctgtgcagtggtacatcttagtgcataatctctagatttttggatttttttatattgagaagtggactgccaaaatttttgttaaatgaaaatattttaaaaataattaccgtcaattaacattatttcataaaaaagacattctaacattctaaagaaagccttcaaaggagtgtgtgaaaattaa

SEQ ID NO: 10415 - DNA, 607 bp, Homo sapiens
tttttttttttgagacagagtctcactctgtcacccaggctggagtgcagtggtgtcatctcggctcactcactgcaacctcctcctccagggttcaagccgagtagctgggattacaggcatcttccaccacacctggctaatttgtgtatttttagtagagatggggtttcaccacattggccaggctggtcttgaactcctgacctcaggtgatctgcccgccttggcctcccaaagtgctgggattacaggcatgagccaccgtgcccggcaagaattcttatatctaaaatttaagatttcaaccctgaagtaacacagaggtacaaatttaaagttttgcttaggcataaaactacaagtccttgttacttcctcattctcatatcccctaatcacctcygacaactagcagttaatttactgtcaataattactgaatgcatgaataaacaaatggatggatgaatgatctaaagtgaataaatgtaaggataggaggtagaatgtgaaaaggtatatttgtttctcagggtagaactgctctggttactattattgtgtctccaaaaaagcaccttccatatggactagaaaatgtagt

SEQ ID NO: 10416 - DNA, 607 bp, Homo sapiens
tttttttttttgagacagagtctcactctgtcacccaggctggagtgcagtggtgtcatctcggctcactcactgcaacctcctcctccagggttcaagccgagtagctgggattacaggcatcttccaccacacctggctaatttgtgtatttttagtagagatggggtttcaccacattggccaggctggtcttgaactcctgacctcaggtgatctgcccgccttggcctcccaaagtgctgggattacaggcatgagccaccgtgcccggcaagaattcttatatctaaaatttaagatttcaaccctgaagtaacacagaggtacaaatttaaagttttgcttaggcataaaactacaagtccttgttacttcctcattctcatatcccctaatcacctccgacaactagcagttaatttactgtcaataattactgaatgcatgaataaacaaatggatggatgaatgatctaaagtgartaaatgtaaggataggaggtagaatgtgaaaaggtatatttgtttctcagggtagaactgctctggttactattattgtgtctccaaaaaagcaccttccatatggactagaaaatgtagt

SEQ ID NO: 10417 - DNA, 542 bp, Homo sapiens
agaagggaatttcgaggagagaccactggatcaattcatgcagagcatctggagacttgggggaggggagagtattgcatttctttatgaagaggtcattagtgaccttttaaaaagcaatttagtacagtgatgaggtgatactctatgaaatattaggtacctcagctggtttggtgttaaatgggaataaggataggacacatttaaagcatttcacaaagaaaattgacaggctttatttgtatacctaacacatgcttatagggtacataccagacactgttctaagctctttaaaaaattaaatcatttattttccataacaaccctatgaaataaattactattgatagatgggaatattgaagcagagtggtttgagtttacacagaaagtagttgagcagggttttgatcctaggaaatayggctccagagtccatggttttacccactgctctatgcagtgactgaatataggagccaaaggagtgggaaacatttaagcaaagagaggctcattgataagaatggagaggc

SEQ ID NO: 10418 - DNA, 634 bp, Homo sapiens
tttccccgtatactttcttgtctctatgtttttgtactgttcctacctccttgtctctcttgcactgacctacctaaccaccaacttcgatctctacccattccaaatcctactcattcttcagayccaacttgaaatccatgatggtatgatacattctgtttgcccctcagccaaaaatgttctcttttttctgaacccttatgttattttgatcatactgccttaacattgttactttctctttctctatataagttttttgagagtataaatagtatatagtatattctcctgcttgaaatggttacagcacctagcacaaattatgtgctaaagaccagagatacaaaggtaaatcagctatagttcaactctaatgtgaaggaggcatccctacaaagttataatgtaaattgacaagtattgtttaaaaaaataacatatacacgtagacacacatgaagtactgaagtaacatagaggaaggattactttatttcatagggaaatggttggggggatagtcaggggaggtttggtggatttaaactgaatctggaagaatgagtagaaattaaataaggtgagagaagctcattccaagaaaaagaaatgacacactcagagccac

SEQ ID NO: 10419 - DNA, 296 bp, Homo sapiens
gcacatgaagcaaagaccagccatcccatgataggtctcttctagaccaaccagcctccagccaacctgctaactgaccagagacacacgagtgagctccagctcagaccagcaaaagaattatccagytgagcctggcccaagttgccagcccacagaattgtgaactaaaaaaagaattttcattttaaccactaaaccttagggtggtttattattagaagcgaaaactaactgatatacttactactaataacaaaagagttttagccctgtgctctgaaaaaaactttagg

SEQ ID NO: 10420 - DNA, 534 bp, Homo sapiens
ccataaaacgtggattccaaacacactaactcattcttacttcactttaattttctgtgcaacatatccatttaactttttatttgtttattggtttcctcctcctctctaccactactacatgcaaaatactagaatgtaagctgcatgagggctgatgtctctctcaagcattaacttctgtattctcaatatctggaatccacactgggattttcaatgtgttaagtgactgactaaatgaaggaataaattgtcagagaaccgaagtgaagttccccaaaatatattactgtattactcatttcaaatttcccaaagtgctgaattttaatgccatttttaacctatctttaacttacttaaatcttaaacactgaagttgagactaaataatctgtacttttctgtttttttcctttttacatgtctagaagatttgyagacaaatatgttttgtgaagcatttgtctacaggattaaatccaaatctgatagcctaatgtaaactgttttttatgacctaatccttgc

SEQ ID NO: 10421 - DNA, 527 bp, Homo sapiens
ctcactatattatggccagaaaacatggtgtatattatactatttctagtcttacagactttcttaaagtatgaagaatagtcatggtctcttttcacgtttcacggtttacattattaatcagtattctacaaagaaacaaaacaaatagggtataggtatagatatagatatagagaaagagacttattatatggaaatggctcttgsaattctggaggctgagaagtcccaagatctgcagttagcatgctggagacccaacagtgctgatggggtagtttcagttagaatctgaaggcctggcaaccaggggagtttgtgtaaatgccagtcttagggcaggaaaacactgaggtccagctcaagcaatcaggcaggagatgtttcctcttgctcagcctttttcttctctttggattgcaattaatttgatcaaatccatgcattagggagagcaatctgctttacagtgcttaccgattcaaatgttaatctaatcctaaattaacctcaaagctacatcc

SEQ ID NO: 10422 - DNA, 527 bp, Homo sapiens
ctcactatattatggccagaaaacatggtgtatattatactatttctagtcttacagactttcttaaagtatgaagaatagtcatggtctcttttcacgtttcacggtttacattattaatcagtattctacaaagaaacaaaacaaatagggtataggtatagatatagatatagagaaagagacttattatatggaaatggctcttggaattctggaggctgagaagtcccaagatctgcagttagcatgctggagacccaacagtgctgatggggtagtttcagttagaatctgaaggcctggcaaccaggggagtttgtgtaaatgccagtmttagggcaggaaaacactgaggtccagctcaagcaatcaggcaggagatgtttcctcttgctcagcctttttcttctctttggattgcaattaatttgatcaaatccatgcattagggagagcaatctgctttacagtgcttaccgattcaaatgttaatctaatcctaaattaacctcaaagctacatcc

SEQ ID NO: 10423 - DNA, 678 bp, Homo sapiens
ttgctttcatctcaaaataataaataacccccttaattggttaatagatttatttatgtaaatatgacactttatttgtgttggacataggccatgagtcataaactattatataatatataatacctgcacttattatttatgagaatcaaaatttctttcaagggaactattacatatgtatacatgtgtcatgttggtgtgctgcacccattaactcatcatttacactaggtatatctcctaatgctatccctcccccattcctgcaccccacaatgggccctggtgtgtgatgttccccaccctgagtccaagtgttctcattcccacctatgagtgakaacatgtggtgtttgattttctgtccttgtgatagtttgctcagagtgatgttttccagcttcatccatgtccctacaaaagacatgaactcatcaatttttatggctgcatagtattccatggtgtatatgtgccacattttcttaatctagtctatcattgatggacatttgggttggccccaagtctttgttattgtgaatagtgctgcaataaacacatgtgtgcatgtgtctttacagcagcatgatttataatcctttgggtatatacccagtaatgggatggctgagtcaaatggtatttctagttctagatccttgaggaatcacc

SEQ ID NO: 10424 - DNA, 678 bp, Homo sapiens
ttgctttcatctcaaaataataaataacccccttaattggttaatagatttatttatgtaaatatgacactttatttgtgttggacataggccatgagtcataaactattatataatatataatacctgcacttattatttatgagaatcaaaatttctttcaagggaactattacatatgtatacatgtgtcatgttggtgtgctgcacccattaactcatcatttacactaggtatatctcctaatgctatccctcccccattcctgcaccccacaatgggccctggtgtgtgatgttccccaccctgagtccaagtgttctcattcccacctatgagtgagaacatgtggtgtttgattttctgtccttgtgatagtttgctcagagtgatgttttccagcttcatccatgtccctacaaaagacatgaactcatcaatttttatggctgcatagtattccatggtgtatatgtgccacattttcttaatctagtctatcattgwtggacatttgggttggccccaagtctttgttattgtgaatagtgctgcaataaacacatgtgtgcatgtgtctttacagcagcatgatttataatcctttgggtatatacccagtaatgggatggctgagtcaaatggtatttctagttctagatccttgaggaatcacc

SEQ ID NO: 10425 - DNA, 553 bp, Homo sapiens
cggcccgcagcgccgcgcttccgcagctcccccacgtgctagcccaggcgggtggaacacagagacattaaatactgaagacgcgcggcgacgtgcccgcagcgcgacgcaggccccgcccctcgcccttgtgcccgcgcgctcccgagcccgccccgctcacctgcgcgtgcgcgccgccggccgctcccggcagtgcctccgccgcgcctctcccagctgcgccagagggggcgcggtctacagcgctgggctaacatcccgccgccgcccggagccgggtcttgctcgcgctctcgcgagagagccgtcatctctccggtgcccgggagaggggccgggcgggacggtacagcamccggaggaaccttgattccctgccccgcaagcccagcaccggttttgccgccttgtctcgaagggtcaaccaggccatctcctgcctcgggacggagagcgccctggaaaaggcggaggggccggtgaggagcagggcttccctcgcttcggggctttgagcttccctgtgaccgtcatttccttgtagcgtata

SEQ ID NO: 10426 - DNA, 989 bp, Homo sapiens
cgagtgaggcaatgcctcgccctgcttcggctcgcgcayggtgcgcacccactgacctgcgcccactgtctggcgctccctagtgagatgaacccggtacctcagatggaaatgcagaaatcacccgtcttctgcgtcgctcaggctgattgctgcagaccggagctgttcctattcggccatcttgcctcctcccccggaattttcttaattgtaagtatttggagtcaaagtaaatttgatagacttacagttgtattttaaaaatattactcccatgttcatgtatctagtctaggggggagatgaatttggacatgtgacagtgacacagaggatggcctgttgttgcttaccaaatgctagggtatgcatgtgccagcacctaatagtgcctgtcacatgacaggtgttcagtatataactgactgactgaatgaatgggatgatgccatccttctgtttaagatcctccaagagtgtcctgtatatatacaataaagtcccaattttgaccctgaccttcaagacttgcttaccttgctaatctcacttatgcagcctcatctatactgggcttcttaaactctagcctgtctaaggacttttgcacaggtttttttcctccgcctggaatactttttttttctgtccatcctcagttctcagttaaaatgtcagattcttaaagaggccttttccggtcaccccacttaagtaggtttccctctattctcctccctggcaccttttttgttgctttggcagtattttccccaattttcaattatttaaatgtagcatattttaaaaaatgtctctttgcctgtgttccccagacagctagcccaaagtctgcccatagcagatcctgctaggcaatataagggcagtgaagtaagcagtcatgaagcgaggttgcctctttcaaatgattggagataatatggggtaaaacaatctttttctcctcttcaccataaacctca

SEQ ID NO: 10427 - DNA, 989 bp, Homo sapiens
cgagtgaggcaatgcctcgccctgcttcggctcgcgcacggtgcgcacccactgacctgcgcccactgtctggcgctccctagtgagatgaacccggtacctcagatggaaatgcagaaatcacccgtcttctgcgtcgctcaggctgattgctgcagaccggagctgttcctattcggccatcttgcctcctcccccggaattttcttaattgtaagtatttggagtcaaagtaaatttgatagacttacagtygtattttaaaaatattactcccatgttcatgtatctagtctaggggggagatgaatttggacatgtgacagtgacacagaggatggcctgttgttgcttaccaaatgctagggtatgcatgtgccagcacctaatagtgcctgtcacatgacaggtgttcagtatataactgactgactgaatgaatgggatgatgccatccttctgtttaagatcctccaagagtgtcctgtatatatacaataaagtcccaattttgaccctgaccttcaagacttgcttaccttgctaatctcacttatgcagcctcatctatactgggcttcttaaactctagcctgtctaaggacttttgcacaggtttttttcctccgcctggaatactttttttttctgtccatcctcagttctcagttaaaatgtcagattcttaaagaggccttttccggtcaccccacttaagtaggtttccctctattctcctccctggcaccttttttgttgctttggcagtattttccccaattttcaattatttaaatgtagcatattttaaaaaatgtctctttgcctgtgttccccagacagctagcccaaagtctgcccatagcagatcctgctaggcaatataagggcagtgaagtaagcagtcatgaagcgaggttgcctctttcaaatgattggagataatatggggtaaaacaatctttttctcctcttcaccataaacctca

SEQ ID NO: 10428 - DNA, 989 bp, Homo sapiens
cgagtgaggcaatgcctcgccctgcttcggctcgcgcacggtgcgcacccactgacctgcgcccactgtctggcgctccctagtgagatgaacccggtacctcagatggaaatgcagaaatcacccgtcttctgcgtcgctcaggctgattgctgcagaccggagctgttcctattcggccatcttgcctcctcccccggaattttcttaattgtaagtatttggagtcaaagtaaatttgatagacttacagttgtattttaaaaatattactcccatgttcatgtatctagtctaggggggagatgaatttggacatgtgacagtgacacagaggatggcctgttgttgcttaccaaatgctagggtatgcatgtgccagcacctaatagtgcctgtcacatgacaggtgttcagtatataactgactgactgaatgaatgggatgaygccatccttctgtttaagatcctccaagagtgtcctgtatatatacaataaagtcccaattttgaccctgaccttcaagacttgcttaccttgctaatctcacttatgcagcctcatctatactgggcttcttaaactctagcctgtctaaggacttttgcacaggtttttttcctccgcctggaatactttttttttctgtccatcctcagttctcagttaaaatgtcagattcttaaagaggccttttccggtcaccccacttaagtaggtttccctctattctcctccctggcaccttttttgttgctttggcagtattttccccaattttcaattatttaaatgtagcatattttaaaaaatgtctctttgcctgtgttccccagacagctagcccaaagtctgcccatagcagatcctgctaggcaatataagggcagtgaagtaagcagtcatgaagcgaggttgcctctttcaaatgattggagataatatggggtaaaacaatctttttctcctcttcaccataaacctca

SEQ ID NO: 10429 - DNA, 551 bp, Homo sapiens
ctcacaagcttaaaatgaaccaaaagtatgttgcttattaacacttttgaggatctgatgaaagccataggactgcttgccagaaaaatccctacaattttttgagttcctaaggttcacattcccttcatttctgtctgtggactccaggttgagcgtctctgtggtcaccatggtccccagcaagctagcacagtcttaagacacatcagtaggaatgtactcagtgctcaaagcttacatagatattgaccagcagccatcacctctggggggctgtgctagggaggcacagcatgtagaagaggctggaatgggccagggagagtggtaagggagcaatgggtaggagatcccagaagtggtaggtaatggaccgtgatccatgtcaggtgattaaaggctaaaggaatatggttctgtcctcaaccacatggtggcctcagcctgggatacatgactgtgtcttcctccataggggkcagtttaactaagaaccccaagtattgaagacctcaagactttaatatggtacttcctgtaccttgaca

SEQ ID NO: 10430 - DNA, 553 bp, Homo sapiens
gaatgagccagcacatttaatctctctctgctctcagtcttctcatctctcatatgggtataattcatctgccctctgtggggagagggaggaagataggtgtgggaaggagttataattcacactcataagcacgtaagaaatcttaagcctttggccataaagagcccagagggagtcggtggtaatgactgaagagacccttagsacaggcttctgggttgtaagagaaagataggactgcatcctgttatgcagcattcctctgctgggttggaagtgaggtgtggaaatccccccagctcgttcttggcaactttgtgtggaataatctttaatcgaacaggctttgccttcaaaaaactgatcagaggacttgtgggaagtctgaggttcctggcgtcatgggccttacccctgcagggggttccatgtggaccaaaattcagttaataggttcttctccttggctctctggggtttcctgagccccaggagaaatgtgaaattgtcttgcaaccagacaaactgtcaattaagggaagagagatct

SEQ ID NO: 10431 - DNA, 574 bp, Homo sapiens
ctactgaaaatataaaaattagctgggtgtggtggtacacgcctgtaatcccaactacttgtgaggctgaggcaggagaatcacttgaacccgggaggtggaggttgcagggagctgagatcgcgccattgcactccagcatcctggtgacagagtgagacttcgcctcaaaaaaaaaaaaaaaaaaaaaaaaaaaaagccagtggaggctgctctccacctgtgaccctgacagccctcagagacacatttgagacctatgacttctgcaaaatacccccacaggacgtgagggttccctgccctgggcggccaccctccctgacccagagacagtcagctgtagtcctctttccccacagggtgggtmcctggtcacccatagaactagggaggcctcaggacacctggctgccagcccaccaggccccacctcacatgtggccacagcaccaagtcctgctccccagctccgtgccagcctgggcagacacttgcctgccgcctcagccaatatctgtttcgggcccaccctggttggctgtcccagccactggcggatccagcctccctg

SEQ ID NO: 10432 - DNA, 525 bp, Homo sapiens
tgagggccagcatcgcacgttgatgctgggaggttgctgctttgcaggagtaagggaaggaagaggccatctcagagcagccgcaacactggagtccacacaggggagctcttggcagagccatccacagcgatgattactgtggacacrgatggggaggccctgtgtgtgaggcagtgacagagccattggttgggaacacagccaactcttttggagttttgttaactatcccgaggtagaggctgagggggacacgcctacatgtcatgccacaaacttagcgtactagaacatgctagattttctctcaaagcacgcaggtctgagcctgtcatcattctgccagtataacagacaggtgaatgaagagacgggggaacttggaaatgaggggctgaaaagaagagaaagtggaccctggtactggctgtgtaagaaaagtaaatagtgacccagaagaatttgggtcacggtctgattcatacaataaattcattttgtctcatttgaaatattttagga

SEQ ID NO: 10433 - DNA, 1355 bp, Homo sapiens
agaagcattatttttaatgttaattcattcaatatttttctttcaaaattgacaacaaaacaaagatagcttttgccatctccattcaacattgtactgaagccacttgtcaatataataagacaagaaaaacaaattagaaggtatgaaagttagaaaacaagaaaaatatgatttataggttatatagttgtctgyttaagaaatccaagcaaatccaataaagtatctaataaagagagcttagcaacattgttgaatatgagatcaatatgcaaaaaagccacacccccttagaaaaaataatttttgaaaggcctctcacacatattgatacagaatggctgagctcctggctaaaccccaccctcaagcctagaacccctaacctaagtgaaaacagccgatcctgaagggctgggcttctggctaaacctcaccctcaagcctggaaccttggccctaagtgaaaacagctgaccccatttttcgtcccaaataattgccttttggcccaccctgccccctatcctgtgcccataaaaaccagaccagctggcagaaaaaaaaaaggaaaagagaagcacaagcagctgactggcggggatacaagcagccaagcagcaagcagagaggcaactaagcatcagaggctatggataaatgtggctaacttcagagggtgcagtttcagaagggtgcccagcaagagacagctgggcttcagggaaagatcacctttttcccacaccatcccctttccagctcccctttcaccaagagccacttccactgctcaataaagtcttctgcattcatcttttaaacagttcatttgacctgattctccctggacaccaaacaagaactcagggtcaaaaagggcaggtgcaggaggctgtcaccctgacccttcactgagctgttaacacttagccatccatggactgcaggctgagtgaaatgagccactccattcctgtccatgaagggggtcaaggtcaagggaacaaataccatctcaatattagcaacaaatttttttaatttttttatttttttttgagatggagtctagctatgttgcccagactggagtgcagtggcactatctcggctcactgcaacttctgccttccaggttcaagtcattctcctgcctcagcctcctgagtagctgggattacaggcatgcaccaccacgcccagctaattttgtatgtttagtagagacggggttttaccattttggccaggctggttttgaactcctgggctccagtgatctgcccaccttggcctcacagagtgctgggattacaggcatgagccactgtgcctggcccatattagca

SEQ ID NO: 10434 - DNA, 541 bp, Homo sapiens
aaaacacactgaccagctgcaaagaatgtagttagctaatagcccatggtatttagcgccttcagggtcctgtgtagctttggaagtgggttcatattcctctcggggcatcctttcagccaatgaatgagcaaagaggtgatagctgagattatgctcttctcatggtgtaccatgcccaatgactgagcaagggcctaataagtagcttctctaatgggccacctttttcccaagatccacgtcgggatagcaaagactttgtagggtctgcatcatgatctgttggcatcccctgccctatcctgcttctcaaccttttcctttcacagatgttactccccagtgaaccgtytgcactcctaaatctcccccatctacttcctgagaactcaccctacaacaagtcttttccatagctactattctatttatctttaaataatttttatgtaataatctttttgttgagatttcaaattgcctgaactgaaattgttaatggtatttgcttactgtattttacccatttgtttaccct

SEQ ID NO: 10435 - DNA, 1388 bp, Homo sapiens
tgcatagtgagggcatgggttgtctgttcttaccaccatattcccagcactagcatggaacaaatgaataagaacggagtaaaaatgcataatctaaacttgactatgtgtgtcttcaaaataatacctttaagttattttgaaggaaaaaactatgtatccaacaaattcaaacagatacttacaaaattaagacgattgtaaatgtgtgttgtcctccttctcattgtttttcacatccaaaaatgtcctcttggagcctcttatctgagtagcttctgtggatctgatgatgctaggattttattttttcttttattttaaagttcttctgattacatcatctctttgtatagacatcattcttgacagatggcatttattaaatatggacagtagcaggcagttaaaaagacctgcatgagataggcaggaacctttcttttttctttctgactctcagaagcaataccagcattagctttatttaacttctagattaatttaaaaagaaacctctttaaattatgactcaacaggtacagggtgaagtgggggaaatgtatgtgtgttttaaagcttcccaagtgattttgaccatcagttaagtttagaaaccactgattacaattaatttccttagaatttgctcatatatttaattccaaagaggaagaaaattgaaattttaaaaaacatatgagtatttttggagatgacataactttccttttattgtgttaaaaaaagctttaagaactgtttttttctgcatttttattaattatcaagatttagtgatggtttagagagctaaaaacacctttagggtgaattcagaagatctagcagatacaatgatgaaatatgatcagcaagctttaggagaggataacaaatgtgtgattttgaaatctcttctatttgaaaccaatccagagtcttgaatttgatccagtatatagtatgctacaaatggaaagattaaactggagcaatataattagggtaagccattgcatctgcacttgtatcgcagcaactgaatttgaaaccagctgcaaaatggtgactaatctctctggcaagcccacatgagagtgtagtacaataagccagcttcagcctcatgagcacatgtttcttcaacttgcctctgagcaggtgatggtgatgatgcaatctgattatacttttgaatgtattctaaccacagtcaacagtagagtctcacaagggatttcacaaaagacttcaaaccgactrtatatttttcagagagttgagctatagacagccatggaaagtagtagttttttttttcacgttagtgactactgtactttgcagtactttataatcttaagtttaggaggctttagttttca

SEQ ID NO: 10436 - DNA, 1388 bp, Homo sapiens
tgcatagtgagggcatgggttgtctgttcttaccaccatattcccagcactagcatggaacaaatgaataagaacggagtaaaaatgcataatctaaacttgactatgtgtgtcttcaaaataatacctttaagttattttgaaggaaaaaactatgtatccaacaaattcaaacagatacttacaaaattaagacgattgtaaatgtgtgttgtcctccttctcattgtttttcacatccaaaaatgtcctcttggagcctcttatctgagtagcttctgtggatctgatgatgctaggattttattttttcttttattttaaagttcttctgattacatcatctctttgtatagacatcattcttgacagatggcatttattaaatatggacagtagcaggcagttaaaaagacctgcatgagataggcaggaacctttcttttttctttctgactctcagaagcaataccagcattagctttatttaacttctagattaatttaaaaagaaacctctttaaattatgactcaacaggtacagggtgaagtgggggaaatgtatgtgtgttttaaagcttcccaagtgattttgaccatcagttaagtttagaaaccactgattacaattaatttccttagaatttgctcatatatttaattccaaagaggaagaaaattgaaattttaaaaaacatatgagtatttttggagatgacataactttccttttattgtgttaaaaaaagctttaagaactgtttttttctgcatttttattaattatcaagatttagtgatggtttagagagctaaaaacacctttagggtgaattcagaagatctagcagatacaatgatgaaatatgatcagcaagctttaggagaggataacaaatgtgtgattttgaaatctcttctatttgaaaccaatccagagtcttgaatttgatccagtatatagtatgctacaaatggaaagattaaactggagcaatataattagggtaagccattgcatctgcacttgtatcgcagcaactgaatttgaaaccagctgcaaaatggtgactaatctctctggcaagcccacatgagagtgtagtacaataagccagcttcagcctcatgagcacatgtttcttcaacttgcctctgagcaggtgatggtgatgatgcaatctgattatacttttgaatgtattctaaccacagtcaacagtagagtctcacaagggatttcacaaaagacttcaaaccgactgtatatttttcagagagttgagctatagacagccatggaaagtagtagttttttttttcacsttagtgactactgtactttgcagtactttataatcttaagtttaggaggctttagttttca

SEQ ID NO: 10437 - DNA, 1388 bp, Homo sapiens
tgcatagtgagggcatgggttgtctgttcttaccaccatattcccagcactagcatggaacaaatgaataagaacggagtaaaaatgcataatctaaacttgactatgtgtgtcttcaaaataatacctttaagttattttgaaggaaaaaactatgtatccaacaaattcaaacagatacttacaaaattaagacgattgtaaatgtgtgttgtcctccttctcattgtttttcacatccaaaaatgtcctcttggagcctcttatctgagtagcttctgtggatctgatgatgctaggattttattttttcttttattttaaagttcttctgattacatcatctctttgtatagacatcattcttgacagatggcatttattaaatatggacagtagcaggcagttaaaaagacctgcatgagataggcaggaacctttcttttttctttctgactctcagaagcaataccagcattagctttatttaacttctagattaatttaaaaagaaacctctttaaattatgactcaacaggtacagggtgaagtgggggaaatgtatgtgtgttttaaagcttcccaagtgattttgaccatcagttaagtttagaaaccactgattacaattaatttccttagaatttgctcatatatttaattccaaagaggaagaaaattgaaattttaaaaaacatatgagtatttttggagatgacataactttccttttattgtgttaaaaaaagctttaagaactgtttttttctgcatttttattaattatcaagatttagtgatggtttagagagctaaaaacacctttagggtgaattcagaagatctagcagatacaatgatgaaatatgatcagcaagctttaggagaggataacaaatgtgtgattttgaaatctcttctatttgaaaccaatccagagtcttgaatttgatccagtatatagtatgctacaaatggaaagattaaactggagcaatataattagggtaagccattgcatctgcacttgtatcgcagcaactgaatttgaaaccagctgcaaaatggtgactaatctctctggcaagcccacatgagagtgtagtacaataagccagcttcagcctcatgagcacatgtttcttcaacttgcctctgagcaggtgatggtgatgatgcaatctgattatacttttgaatgtattctaaccacagtcaacagtagagtctcacaagggatttcacaaaagacttcaaaccgactgtatatttttcagagagttgagctatagacagccatggaaagtagtagttttttttttcacgttagtgactaytgtactttgcagtactttataatcttaagtttaggaggctttagttttca

SEQ ID NO: 10438 - DNA, 1363 bp, Homo sapiens
ggcaaatgtcagcagttgccacagagactgtgtggcccaccagtctacaatatttactattttgcccctccccttaagaaaaagtttgctgactcctgcactagagtaagtcctactctaggaccctcttaacaacaaactgtgcgctagctaaggtctgtaagcaaatcctgatgaaatctgcggagaaagcagaacttggaggctgagttctgccaggttacaggacttgggaaacatcctgggctttccatagatctgtcctaacaaaagtattactggagttaaaattagaatgttttggggcagtattaccttctttggtgctttttgtaaccttcgttatagtgacagtgactttagccagcaccctcgaatactttgaatgtcttgtttactcccctagataattctatgttggaatatgtctcattccacttaaaaaaaaaaaaaaaacttacagtcttctttgatggagaactttcttgtaccttctactcaatatcaatatttagtttacattgaatacttattttgctagtaccggaaggctaaaaccaaagctaaagtagcttcttgctaaagaggatcaaagttccttttgtttctacgtatcttacgtgttcacataattttaaaaatattttgaaattagaaattgtttaaagcttatagacaaaaatagaatatgataaacaactgtgtgttcaccacaaatatctctctcatattctaatgttttaccaaacttgtttcagatttttttcctctaagaaatagtagctcagatatgtattatgtgtatatccctccctgatgtgttctttttttgaactttttattatactttaagttctgggatacatgtgcagaacgtgcaggtttgtgaataggtatacacatgccttggtggtttgctgcacccatcgaccygtcatgtacattaggtatttctccgaatgctatccctcccctagcccccgaccccgctttcctgatgtgttctaatcctacttttcccaaaggtaaccactctcctgaattttttgtcattactttgaatgttttttatactaaaaaagtatgtctgtatctctctccataaatgatatgtaacattatcttatgttttttcaagcttatattcagggcatcactttgttcatgctattctgcaactagctttttcctccaactttgtttttgactttagacatgatgaagtggatcactgtcattcataaactgtgcagtgtatatctttattctcttgttgatggacatttagattgccagtattttgtgataatgcacaaaatcagtgctacagtaaatgttggtgttgtctgtcttattgggtttc

SEQ ID NO: 10439 - DNA, 1363 bp, Homo sapiens
ggcaaatgtcagcagttgccacagagactgtgtggcccaccagtctacaatatttactattttgcccctccccttaagaaaaagtttgctgactcctgcactagagtaagtcctactctaggaccctcttaacaacaaactgtgcgctagctaaggtctgtaagcaaatcctgatgaaatctgcggagaaagcagaacttggaggctgagttctgccaggttacaggacttgggaaacatcctgggctttccatagatctgtcctaacaaaagtattactggagttaaaattagaatgttttggggcagtattaccttctttggtgctttttgtaaccttcgttatagtgacagtgactttagccagcaccctcgaatactttgaatgtcttgtttactcccctagataattctatgttggaatatgtctcattccacttaaaaaaaaaaaaaaaacttacagtcttctttgatggagaactttcttgtaccttctactcaatatcaatatttagtttacattgaatacttattttgctagtaccggaaggctaaaaccaaagctaaagtagcttcttgctaaagaggatcaaagttccttttgtttctacgtatcttacgtgttcacataattttaaaaatattttgaaattagaaattgtttaaagcttatagacaaaaatagaatatgataaacaactgtgtgttcaccacaaatatctctctcatattctaatgttttaccaaacttgtttcagatttttttcctctaagaaatagtagctcagatatgtattatgtgtatatccctccctgatgtgttctttttttgaactttttattatactttaagttctgggatacatgtgcagaacgtgcaggtttgtgaataggtatacacatgccttggtggtttgctgcacccatcgacccgtcatgtacattaggtatttctccgaatgctatccctcccctagcccccgaccccgctttcctgatgtgttctaatcctacttttcccaaaggtaaccactctcctgaattttttgtcattactttgaatgttttttatactaaaaaagtatgtctgtatctctctccataaatgatatgtaacattatcttatgttttttcaagcttatattcagggcatcactttgttcatgctattctgcaactagctttttcctccaacwttgtttttgactttagacatgatgaagtggatcactgtcattcataaactgtgcagtgtatatctttattctcttgttgatggacatttagattgccagtattttgtgataatgcacaaaatcagtgctacagtaaatgttggtgttgtctgtcttattgggtttc

SEQ ID NO: 10440 - DNA, 427 bp, Homo sapiens
gaaaacccctgatttgaaagaccgaggcttttgaggactacataataaaaatcygctatattgattcacttaccatcaggaatagatagtgatgaagttgttttttttttttttttttttttttaatgaggaaaagaggtaagtacaaatcttactctaagcaaacatcaaggaatagccccattttgacttaacatgtcatttgacgtttttaaatttacattttcctcaagaaaaaatgaagactgaaacagatcccaggctaaaatgatatacctctatgggttttatttgataaagatgttgcctagttctactttaaacagctgcccactgattctgcaatttagattttcattttaattcatttatttcttgatttatccgccaagcatggattgtgtttacatggataacacatataaca

SEQ ID NO: 10441 - DNA, 529 bp, Homo sapiens
tgttgggcatggttccggtgggatgctgtattatgcagctagagaatgtatttgtcctggaagagttcactttgttcactgccctcgagcctttatccaaggctaaacccacatgctgtacctacttttggaattggtccaggaattttatacctgtgtgaatttggagaaactctctcagacacccatttggaaatgcattagtgtttttctcagtgagtcctccatgcttgctgttccaatggccctccaggtttgggcccagcacctgccaggagaagcattccctctatagcttccacctgaccacagccagcccaagccctgctcagaaccccaggcctgccagcgagcctgtgactggaattatctattagggatcaagcattaacttgacacaggagcagccctggctcagctggaggcatccgcatgctgtggtgccccaggaacagaggcaccccygaaatgcaggctgtgtgtttgctgcagagacaccatggcccataactccccaagcataagtgag

SEQ ID NO: 10442 - DNA, 529 bp, Homo sapiens
tgttgggcatggttccggtgggatgctgtattatgcagctagagaatgtatttgtcctggaagagttcactttgttcactgccctcgagcctttatccaaggctaaacccacatgctgtacctacttttggaattggtccaggaattttatacctgtgtgaatttggagaaactctctcagacacccatttggaaatgcattagtgtttttctcagtgagtcctccatgcttgctgttccaatggccctccaggtttgggcccagcacctgccaggagaagcattccctctatagcttccacctgaccacagccagcccaagccctgctcagaaccccaggcctgccagcgagcctgtgactggaattatctattagggatcaagcattaacttgacacaggagcagccctggctcagctggaggcatccgcatgctgtggtgccccaggaacagaggcacccccgaaatgcargctgtgtgtttgctgcagagacaccatggcccataactccccaagcataagtgag

SEQ ID NO: 10443 - DNA, 531 bp, Homo sapiens
catgctggagacaggtttttagtgttgggtggatcctgatgcaatttacatgagctacaggggcacatggtatctctgccgagccctgggggtcagaggcaccttgcacgcatctcttgtgccagatgratccagcaaatgagcccacggggaacctcggcacctctcatggtctgggatcctcacgtacagctttgttctccctcatgcagagcaaacgtggcccagcacccatgagaccctcctgaccacgtggaagattgtggcgttcacggcaaccagtgtgctgctggtgctgctgctcgtcatcctggccaggatgttccagaccaagttcaaggcccactttccccccaggtcagtgtcatgtcttggcagctgtggctcaaggtctgactcaatgcagctacccttagcagcagagggagaaagtgatgagtgaaaagttgaagctctaaagggaaacaggggagagcaaaaacaatgttctgggatgttttgagcacaaagctggagacagacctcattttc

SEQ ID NO: 10444 - DNA, 531 bp, Homo sapiens
catgctggagacaggtttttagtgttgggtggatcctgatgcaatttacatgagctacaggggcacatggtatctctgccgagccctgggggtcagaggcaccttgcacgcatctcttgtgccagatggatccagcaaatgagcccacggggaacctcggcacctctcatggtctgggakcctcacgtacagctttgttctccctcatgcagagcaaacgtggcccagcacccatgagaccctcctgaccacgtggaagattgtggcgttcacggcaaccagtgtgctgctggtgctgctgctcgtcatcctggccaggatgttccagaccaagttcaaggcccactttccccccaggtcagtgtcatgtcttggcagctgtggctcaaggtctgactcaatgcagctacccttagcagcagagggagaaagtgatgagtgaaaagttgaagctctaaagggaaacaggggagagcaaaaacaatgttctgggatgttttgagcacaaagctggagacagacctcattttc

SEQ ID NO: 10445 - DNA, 622 bp, Homo sapiens
cccaagtagctggtactgcaggcacccacaaccacatccagctaagttttgtattttttgtagagatggggttttgccatgtttcccacgctgttctcatacttctgagctcaaacgatctgcctgcctcagcttcccaaagtgctgggcttacaggtgtgagctgccrtgctccacttaattaaattttgatatagccatacaatggaatagtatgcttggtctattaaaaactgtatagcagctttttgtcctgattcagaaaaattgctaagataaataaaaaagacaaggtacagaacaatgtatataatatgctaccacttgtataaaatatattgtgtataaatgcatgggggggtgtgtgtgtgtattaagcagctggtaactgtggttgcctctgaagaaagtagccaggtagatggggaagagggatggaagggggactttcttttcacgaaatatctaatttttgtacgatagacatgtagaacatattttttaaagtaatagaaaatatcaaaacagtgaggaagaaaaacacataatctcgccaccaaagataacattttggtgtgattattttccagtaattattatttatttttaattatttttatta

SEQ ID NO: 10446 - DNA, 622 bp, Homo sapiens
cccaagtagctggtactgcaggcacccacaaccacatccagctaagttttgtattttttgtagagatggggttttgccatgtttcccacgctgttctcatacttctgagctcaaacgatctgcctgcctcagcttcccaaagtgctgggcttacaggtgtgagctgccgtgctccacttaattaaattttgatatagccatacaatggaatagtatgcwtggtctattaaaaactgtatagcagctttttgtcctgattcagaaaaattgctaagataaataaaaaagacaaggtacagaacaatgtatataatatgctaccacttgtataaaatatattgtgtataaatgcatgggggggtgtgtgtgtgtattaagcagctggtaactgtggttgcctctgaagaaagtagccaggtagatggggaagagggatggaagggggactttcttttcacgaaatatctaatttttgtacgatagacatgtagaacatattttttaaagtaatagaaaatatcaaaacagtgaggaagaaaaacacataatctcgccaccaaagataacattttggtgtgattattttccagtaattattatttatttttaattatttttatta

SEQ ID NO: 10447 - DNA, 622 bp, Homo sapiens
cccaagtagctggtactgcaggcacccacaaccacatccagctaagttttgtattttttgtagagatggggttttgccatgtttcccacgctgttctcatacttctgagctcaaacgatctgcctgcctcagcttcccaaagtgctgggcttacaggtgtgagctgccgtgctccacttaattaaattttgatatagccatacaatggaatagtatgcttggtctattaaaaactgtatagcagctttttgtcctgattcagaaaaattgctaagataaataaaaaagacaaggtacagaacaatgtatataatatgctaccacttgtataaaatatattgtgtataaatgcatgggggggtgtgtgtgtgtattaagcagctggtaactgtggttgcctctgaagaaagtagccaggtagatggggaagagggatggaagggggactttcttttcacgaaatatctaatttttgtacgatagacatgtagaacmtattttttaaagtaatagaaaatatcaaaacagtgaggaagaaaaacacataatctcgccaccaaagataacattttggtgtgattattttccagtaattattatttatttttaattatttttatta

SEQ ID NO: 10448 - DNA, 1454 bp, Homo sapiens
cgtgcttttcctccttgagtgccaatcagatggagtggaagccagtggattgtttacctatagcacatgtgcagtgggaagtcagaaggccaagaggagaaactttggctccattcaaaagccagctgtgcaaggctccctggtggatgagggaccgaggagccagaataaatatttaactttcattttgaaacactgtccttgtgtggctgtcaccattgtgttggacaagatgtggagctaaatatttacactttctaattgttccccaaactgctggatgcccccaatctactgtaagctgtctgtctgtctgtctgtctgtctgtttattcattcactcatttgttcacttactttcctaattttaaaatgtatatgttagtttgggaaggaggttgagggggaggagaggaggtgcagaggttgactcaagattctcttccatttcagagaaaggaaataaaaccacgagatggaaagtagaggctgagaaaatgctgactggcttctrgatctgttacacacatttggttttttttttttttttttactttttattttggaataattttagatttaccaaaatgttacaaagatagtaaagaaagttcccgtatatctttcacccagcttcccctcatgtcagcatcttacgtaacgatggtacctttgtcaaaacgtagaaattaacattggtacaatacgattaactaagctccacagttactgagtgtcaccagtgttctcactactgtcccttttctgttccaggatccaatcctggataccacgtttcatttagtcatcatgtctctttggtctcatgggatctgttagcttctcagttttttataaccttaatagttttaaaaggtagtgactggttattttgtagaatgtctgtcaatttgggtttttctgatgtttttctcaggattagactaggtgttatgagttttaggagagaataccacagaggtgaagtcctcttaataatcctatcgggatgcatgctatcagcatgacttaagcactggtaaggttgaccttgtttctctgctgtaaagttaccattttcctctttctatattctattctttggatgtaagttactaagtccagcccacactcaaagggagaggaatcaagctccgtgttctggaggagagattatctacagatatttgaaattattctctaagggagattcgtcccttttccccttctcctccttttatttattcaatgatttgtgtatatcttcgtatcagtttcctagggccgttgtaacaaattgccacaaactgggtggcttaaaacaacagaatgttactctttcataatttaggatcaaggaagtctgaaatcaaggtgttgccagggtgaattccttctgggggctctgagggagaatctgtcccatgcctctctcctggcttctgatggttgct

SEQ ID NO: 10449 - DNA, 586 bp, Homo sapiens
agagaagtcatttgcaaagtcatcaggcatgaagcccatcttcaaattcaaggcttagcgggcatggtggttcaggcctataacctcagcattttggggggctgcagcaagaggattgcttgagcccatgagttcgagaccagtctgggcaacataataagaccctatctcttagaaaaaaattaattaggctaggcgtggtggctcatgcctgtaatcccagcaccttgggaggctgaggtgggcagatcacctgaggtcaggagttcaagacaagyccagccaacaggacgaaaccccatcactactactaaaaatataaaaattagccaggggtggtggcaggtgtctgtaatcccacctactcagtaggctgaggcaggagaatcccttgaacccgggaggtggctacaatgagccaagatcatgccactgcactgcagcctgggtgacagagcgagactccatctcggaaaaaataaaacataaaaaataataattaaaaaacaaattcaaggcttatgtggttgcagagaacactcttctttgaggacaaatgagaaccagatattcctgttaagtcggg

SEQ ID NO: 10450 - DNA, 586 bp, Homo sapiens
agagaagtcatttgcaaagtcatcaggcatgaagcccatcttcaaattcaaggcttagcgggcatggtggttcaggcctataacctcagcattttggggggctgcagcaagaggattgcttgagcccatgagttcgagaccagtctgggcaacataataagaccctatctcttagaaaaaaattaattaggctaggcgtggtggctcatgcctgtaatcccagcaccttgggaggctgaggtgggcagatcacctgaggtcaggagttcaagacaagcccagccaacaggacgaaaccccatcactactactaaaaatataaaaattagccagrggtggtggcaggtgtctgtaatcccacctactcagtaggctgaggcaggagaatcccttgaacccgggaggtggctacaatgagccaagatcatgccactgcactgcagcctgggtgacagagcgagactccatctcggaaaaaataaaacataaaaaataataattaaaaaacaaattcaaggcttatgtggttgcagagaacactcttctttgaggacaaatgagaaccagatattcctgttaagtcggg

SEQ ID NO: 10451 - DNA, 1145 bp, Homo sapiens
tgaagggtttaattcctttgcaaccaaacttgggcatctcctgtacccaccattcactgcgttgcttagcataagaaagacaaaactgattactttctctaagggctggacaagtttgtttccaggggtaaagcagtaggcaggaggtgctgtagctggagaaaaccaagaggcttgcggattttgagataataaaaatcctgaaaatgctcctgaagtcctcaaagtgatggaagatacaccattactcctggactcgttaattcttaagcttttttaaaaaatttttttctttgtttttggttgtggtgatgggggcggaaggggtggaatcttttacaataggataaacactatgggccttctctccagaaaatatgtacaatcacacacaaacatgcacacatacatgcacagttgtgtgtgtaattttagggattaatggaatctcttgaatccaactacaagatatgcagaccccaggtttcgaaccctttgagatttcacgtgtctattttagcttaccaccatattcacaggatgcatcagagagcttaacatataatattaggacttcacacatttctgttgaattgagttgaatttttgttgaactagtttcaattgaaattgcccaacttgagaaataggggcatggacccgctgactttctcaaaatctcatgtatcttgggaatgttcaactatacacaaggtggctccagatattgattctataaggataaaatgatttttccagcactttccatcttcagccctcaccaggacgtgtgagtctttccttccataaaggatcatggtggaaaatatgagagtgtgaagtatggttcacatctggataagcaaacagagctctgtgttgaaacagcttaattaatggtgatgccaagcccttggccttgtttcctcagtgccatatgcggtgcaaataacgcccaggtctccgctctgagtgggacacgtgaaactccggtctagaaagggcagcctagattggtgaaaaaaattaacagctgaagtggaacagaattaaaatttatcttgaacctggcgtttaatgaagggtgtttaatttcattaatagagcttagagaatctytcctgttgagaaggacttatataagg

SEQ ID NO: 10452 - DNA, 1610 bp, Homo sapiens
gcatacatttagataaattaaggttttgttttgtttctctttactgttatcctctcatcacacaaacatggagacatgcttttttaccacgtagttttggagggtatgtttggaacggattttacttaaagtataggtgatgtggcatgtagggaattttctgtgtaggatatgatatgggggacatctsaaagagagagttagtcaaccatcagataaacagagactgacacatagccagaggacaacatgtctgctgattaggggagatcatcatatgtactaaaatgccaggaccaaggtcacaactgtggtttccaatatgaacatccaattgtaagtatgtcagaagggcaggcatctacaattgcaggggctaatttgtgattcagctgcttctcattagggcaactctacacagcaaatttcaagacgtggagcagtaggtatttttttttttcataatcatttgccgtaggcattgtagctaattatgaatgtgtcatagccaaaaatatattaacttatttattcaacaaatatttgactgtctaatatgggccagttcctgtgttgaatgtgaaggatgcagagataaaaagatactgtccatatcccccaggagaacacagtctagtagataatgaaagcatttatcacctataaaaagtggatgccaggctggaaaaaaatgccttttccacaatgggaaaaagggatttcatagacaagtgtggttccctgggtctgtgaattggtgccaggttagatccagtagaatcaacctgagactttactaaacacaaacagtagagattccttgacattacctcctagaaattctcattcagtagtactgagatgaggtccagcaatccatatctttgacaacctctttacacgtagctaggtttgggaatcacaattgagccttgctcctatagactattatgttgaaagaccaatggatttatggtcagattgaccagagttcaaatctcactctactcatgtgtgcagttagaaaacagtccacaagactgccctcactgtgatgccaactacagcgtttggaaatccctaagaccaaccttccttctgataccaattgcaatttccgagatctgcaatactactctcaggataattttccagaaagactcaaaggactctgaacgttgttatactcacaattatgatttgtcatcgtgaaaggatacggattaaaactagacaagggaagagatgcacagcccagagcgcaagcaagttccaaatgtggagtttccagttgtcctctctctgtaagatcatggacagaatgacttttcccagcaacaatgcttgaccatacacatggagtattaccagccaggtaagctcactcaggctgccatgtccacagtttttactgaggctcgatagcatgggcctggttgactgcccgtgtgaccaatctcagtccctagccacatctggaggttgagctgatactgtgtgactcaaagcccctacactaaattacattattagaataatggctagtctccaccctaaaccgcattgtgtgactgaggcccccaggcaaagaaagacactcctatcatgca

SEQ ID NO: 10453 - DNA, 1610 bp, Homo sapiens
gcatacatttagataaattaaggttttgttttgtttctctttactgttatcctctcatcacacaaacatggagacatgcttttttaccacgtagttttggagggtatgtttggaacggattttacttaaagtataggtgatgtggcatgtagggaattttctgtgtaggatatgatatgggggacatctcaaagagagagttagtcaaccatcagataaacagagactgacacatagccagaggacaacatgtctgctgattaggggagatcatcatatgtactaaaatgccaggaccaaggtcacaactgtggtttccaatatgaacatccaattgtaagtatgtcagaagggcaggcatctacaattgcaggggctaatttgtgattcagctgcttctcattagggcaactctacacagcaaatttcaagacgtggagcagtaggtatttttttttttcataatcatttgccgtaggcattgtagctaattatgaatgtgtcatagccaaaaatatattaacttatttattcaacaaatatttgactgtctaatatgggccagttcctgtgttgaatgtgaaggatgcagagataaaaagatactgtccatatcccccaggagaacacagtctagtagataatgaaagcatttatcacctataaaaagtggatgccaggctggaaaaaaatgccttttccacaatgggaaaaagggatttcatagacaagtgtggttccctgggtctgtgaattggtgccaggttagatccagtagaatcaacctgagactttactaaacacaaacagtagagattccttgacattacctcctagaaattctcattcagtagtactgagatgaggtccagcaatccatatctttgacaacctctttacacgtagctaggtttgggaatcacaattgagccttgctcctatagactattatgttgaaagaccaatggatttatggtcagattgaccagagttcaaatctcactctactcatgtgtgcagttagaaaacagtccacaagactgccctcactgtgatgccaactacagcgtttrgaaatccctaagaccaaccttccttctgataccaattgcaatttccgagatctgcaatactactctcaggataattttccagaaagactcaaaggactctgaacgttgttatactcacaattatgatttgtcatcgtgaaaggatacggattaaaactagacaagggaagagatgcacagcccagagcgcaagcaagttccaaatgtggagtttccagttgtcctctctctgtaagatcatggacagaatgacttttcccagcaacaatgcttgaccatacacatggagtattaccagccaggtaagctcactcaggctgccatgtccacagtttttactgaggctcgatagcatgggcctggttgactgcccgtgtgaccaatctcagtccctagccacatctggaggttgagctgatactgtgtgactcaaagcccctacactaaattacattattagaataatggctagtctccaccctaaaccgcattgtgtgactgaggcccccaggcaaagaaagacactcctatcatgca

SEQ ID NO: 10454 - DNA, 543 bp, Homo sapiens
gtgaaaatttctgcttgtgagaatccgtgttatttcaattatccaatcaagagcctaattcgtataaaagaaacacagcagcttgttgctcatctttttatctaaggacggtttgtcttgacagagggtgtctggctgttttggggaaactattcctgaccttattttgactaaaaagttgcctgctgtaccaggtgagagaagctatcatttcttttataaaacttttagcttgctttttgttaagtgtgtttgaaagtcacttaaaagactgacttaaatatgaatattgttagtcgggctgtatatyttttttatattaagttatgatttatatttcttcagagatctagtctcttgttgatctcccttgactatttttctgttaggctgttggatttctctttttttctttctttttattttctttttctttttttttttttttttgagacagggtctctgttgctcaggctgaagtgcagtggcataatctcagctgactgcctcctgagtagctgggattacaggcatgtgccacca

SEQ ID NO: 10455 - DNA, 701 bp, Homo sapiens
tcccaggcagctcttaaagggaccaaggagaattagccaggggcagcttaagggggtgagtgtagaggaaagtaggtggtggggagaggactggacttgccaggggcaggaaagccagagctaggaccacctgacacctcccctactcccctggaagcccccagggtcctctgcctcacttttccctcatcccatgagacccccatgctggccacgcagcttccgactccacctcctcagaccctgccccctgttccccttgggctcctgcccacttcctcccctcccccatatgcgtgccacctcagtctccagtgagagctgccagctggcaccaactggtactaggcacggagaatcagcccaagaagtggaagggcctgaggcctggccccagaaggcagggggaggccagcaccccagagtcagtcagggggcgtaggaggcaccttcctttccagttgcctctccaattcttgttttctctgcccctctgggcacagcgcaaagggggcaccgaggctctgaggaggaccttggctcacccgctccctctgcttcctgatgggctgtcaggattgtgacgtagaaaaggaamatcttagttactccaggaggggctggggcagctgagagaaacccatggcagaagagaaggacaaagaaaatggagacagaagatagcagacagacaaatagca

SEQ ID NO: 10456 - DNA, 637 bp, Homo sapiens
tccatctcttcttcttcctccccagctctcctccccaagtccctctccatcctctctcttctccccgctcctccccatccctcctccccttccatccttcttcccacctctcctacttcttttctccctcctccccccttccctcctgtccctcctcctcgcccctcctttccctccrtctttctttccacccttcctccctccgtctcttctctctccttccctttccctgcctcctccccctcaatcctccctctcgccccagcctccttggccgcggagtcctctgtgagatggaggagctcagttggctccgctcggctccactcggctgggctcggctgaaaaaagccggggggaggtggcgcgcgcgggtttctgggaagcgtagtccggcgcagtccgcgcaggcgcactgccgtcgggcgggcctagcgggcgcggtcattgtcctggcagagcggcgagccggtgagtgtggctgcggggtcgcgcccaccctctacctgtgccgggggccggaacctggccccggggagggcgcggcctcggggagacggcgtgcaggcccaggtacggggagtgcagggctgggtgctggtccagggcgtgcgggcgcaggagagggcgtgcaggc

SEQ ID NO: 10457 - DNA, 675 bp, Homo sapiens
tattactaattatacctattggtatatgatatgactataaattatacaacaatattctatttctataagtgtatgaaatacatcagattaaattttatatgtaaaaatatgaatcattagttaagacattaagattatctttattggcaataatagcaatataaaggaagsacataaataatccatactcttactacacttgacaaatgtaattcatagagaataaggtaccctaagccaacgtttttatctcattgcataagaaccaggaaaccagaaatacctagaccaatggttgaagaattagccaagcagtcaggcagctaactcattgaactgactccctgaatataagtgtatacaaataaatgtatcaaggataaaatgtgccttttaggtaacgtaccagtatgttttcagaaaaaaataaatatcaaaactgttttaaaatacaatttggaaaaattgttccctaaggatgaagtgcctatatgcatagtgcctggatatagaaaatctaaaattaaaacagacgaaaaaacaaaacctccacaaacccacaacaatatggtgtaatgcttaacagcataaatgctagtgagataaacctgactttgaatcctgtgtcccctaatctcaatacctctttatatccttaaatcaattcagttaaag

SEQ ID NO: 10458 - DNA, 675 bp, Homo sapiens
tattactaattatacctattggtatatgatatgactataaattatacaacaatattctatttctataagtgtatgaaatacatcagattaaattttatatgtaaaaatatgaatcattagttaagacattaagattatctttattggcaataatagcaatataaaggaagcacataaataatccatactcttactacacttgacaaatgtaattcatagagaataaggtaccctaagccaacgtttttatctcattgcataagaaccaggaaaccagaaatacctagaccaatggttgaagaattagccaagcagtcaggcagctaactcattgaactgactccctgaatataagtgtatacaaataaatgtatcaaggataaartgtgccttttaggtaacgtaccagtatgttttcagaaaaaaataaatatcaaaactgttttaaaatacaatttggaaaaattgttccctaaggatgaagtgcctatatgcatagtgcctggatatagaaaatctaaaattaaaacagacgaaaaaacaaaacctccacaaacccacaacaatatggtgtaatgcttaacagcataaatgctagtgagataaacctgactttgaatcctgtgtcccctaatctcaatacctctttatatccttaaatcaattcagttaaag

SEQ ID NO: 10459 - DNA, 675 bp, Homo sapiens
tattactaattatacctattggtatatgatatgactataaattatacaacaatattctatttctataagtgtatgaaatacatcagattaaattttatatgtaaaaatatgaatcattagttaagacattaagattatctttattggcaataatagcaatataaaggaagcacataaataatccatactcttactacacttgacaaatgtaattcatagagaataaggtaccctaagccaacgtttttatctcattgcataagaaccaggaaaccagaaatacctagaccaatggttgaagaattagccaagcagtcaggcagctaactcattgaactgactccctgaatataagtgtatacaaataaatgtatcaaggataaaatgtgccttttaggtaacgtaccagtatgttttcagaaaaaaataaatatcaaaactgttttaaaatacaatttggaaaaattgttccctaaggatgaagtgcctatatgcatagtgcctggatatagaaaatctaaaattaaaacagacgaawaaacaaaacctccacaaacccacaacaatatggtgtaatgcttaacagcataaatgctagtgagataaacctgactttgaatcctgtgtcccctaatctcaatacctctttatatccttaaatcaattcagttaaag

SEQ ID NO: 10460 - DNA, 631 bp, Homo sapiens
cgtggctcacgcctgtaatcccaggactttgggaggctgaggcgggcagatcatgaggtcaagagatagagaccatcctggccaacatggtgaaactccatctctactaaaaatacaaaaattaggtgggcatggtggcatgtgcctgtagtcccagctactaaggaggctgagacaggagaatcgcttgaacctgggaggcagagggtgcggtcagccgagatcacgccactgcactccagcatggtgacagggcaagastccatctcaaaaaaaaaaaaaaaaaaaaaaaaaaaagaaaaagaaaaaaagaaagaaaacttttccaaaaatgtgaataaaaagaatagcccattgtcaataatttattttgtaataaaaacatttaataaatgcccatttacacaggacagtcacacaatttattgcaaagggagagagactaattatgagctaaacctgccaggcaaagtccttgcaaaacctaatcccttacccatttttaggcagacctgtccctaggtcatctgaaagcagtgagaatagctttctaaataacttttcatgtactgtacttgaaaccattgtggaattattcttctgctttctctgtagtcaattgacctttgca

SEQ ID NO: 10461 - DNA, 585 bp, Homo sapiens
tgtgctaccaggagggacagatgcttcctcatgcagcgtgacatggttcactcttcagggcaaaaaatggattcttgccttagccaggtgagcttgctctgtggccacctgtgccacagctggtcaagctccccattagagaagtcacactggagtctgggtgcaccccccagcacccacacacgggccagaacccacatttccttctttgaagccagcccagctagggcagagcacttctagccaaagcctgaaactgccagttcacccagaaacgaaatcatccccctaagagactgacagagctccccaagggaggggcagagagtgccaaattgggggtggggtgggggtcagaaaacgagtgttgggaggggcggcttgctgaagagagggcacattcgggccaactctttcttcatctggccccggtgtgtgaggcctccttcccacaggccttggagggggcgagaacagtcatgggcagggtcggtgcccacatcccctgctctcgctgctggagtggttctgccggcwaagtaggaacctgggcagagggagcccagcctgcaggcccgcagacac

SEQ ID NO: 10462 - DNA, 585 bp, Homo sapiens
tgtgctaccaggagggacagatgcttcctcatgcagcgtgacatggttcactcttcagggcaaaaaatggattcttgccttagccaggtgagcttgctctgtggccacctgtgccacagctggtcaagctccccattagagaagtcacactggagtctgggtgcaccccccagcacccacacacgggccagaacccacatttccttctttgaagccagcccagctagggcagagcacttctagccaaagcctgaaactgccagttcacccagaaacgaaatcatccccctaagagactgacagagctccccaagggaggggcagagagtgccaaattgggggtggggtgggggtcagaaaacgagtgttgggaggggcggcttgctgaagagagggcacattcgggccaactctttcttcatctggccccggtgtgtgaggcctccttcccacaggccttggagggggcgagaacagtcatgggcagggtcggtgcccacatcccctgctctcgctgctggagtggttctgccggctaagtaggaacctgggcagagggagcccrgcctgcaggcccgcagacac

SEQ ID NO: 10463 - DNA, 792 bp, Homo sapiens
gtggacagagaaaaatgatcattttttttttttttcctgagacagtcttgcttcgttgcccaggctggagtgcagtagcatgatcttggctcactgcaatctctgcctctttggctcaaggcatacttctgccgcagcctcctgagtagctgggaccacaggtgtgcgccgccatgtctggctaattttttaatttctgtagagatggggtttcactatgttacccaggctggtctcaaactgctgagctcaagtgatctgcctgcctcggcctcccaaaggtgagccactgcacctggccggaaaaaaaatttaacagttttattgagatacgatgtacataccatacaattcacccatttagaatgcacatttcaatggtcttccatagattcacagagttgtgcacccatcgccacaataaamtttaggatattttcatcaaccgtaaaagaagccacatacattttagagttattctccatttctctccaaaccccacctgcccttcctcctccagccctaggaatgacaaatctactaggaaaatgagataacttttgcactggaagttggatctttgcagatcctagatctgtcttggcagcgttgacacaagtgtgtgccaacacgatgaccctgcacctcactgggaaagtcttcacacacccacacggtcagttcctagtgcttctcctcacacgtgctctattttatttcaactactttttcacggaaattttctaagatatggtgagaatggccccattttcctcctattccttaataata

SEQ ID NO: 10464 - DNA, 549 bp, Homo sapiens
gcccaggggaagggccctgcacccagcatggggtgaggggtggcaacaaacctctctagagggagacccagagcttcctcctttcagccatggctcccataatcaaaagccccagcccatggccacagccagcattacccagagcccagacgcagagattaatcggcaggagcaaacaccgccagcccygtggcacacggcaaacagaaggggtgaggcccggcctgggggccgtgggcagaggccaccggggtatggcttcagtcagcaggccccagcaggctggccacggccactaaaggtgccgcaaaacaagactgggaggagtagcgtggagctttggtgcttggagtgattcatcctcacacccaccgggggcagggctcacagaggggctgggggtggggagcctggactgtccacttcatgaaacgggtgctctcaaaactccccctcccttggccaaacttccgcccccagcccctgcctcgccgcatcctttcaagcagcctcttctttttggcccagggatttttgtaaaccaggtca

SEQ ID NO: 10465 - DNA, 529 bp, Homo sapiens
cctccttccgaggagcccagagggcmgggctgtgcttggggcggtggggcctgcatgtcctagagattgccgcctcaggtcacatactttccctgtttatttccctggggctgtccccttccttggaggctctcaaattcgaatgttcatggcagtcactatgaacaggcagcccaggcccagcccaagaattccagtcagggcggaaggtcgggcaggactcagggctctcaagatgattctggggcaagaggccctcaagccgggtcttccttgtctacagagggctagggaagaggctgtgggtgcttgggccccaggattaaagaagtgagccctgaggcgagtgtggtggctgctccctggaaatgtgggtctcggggagcgaggccagctttggcagctcctccgtccatgaagagcccctgtccccctgactgcctggagaccagggcgggcgctgggagagaacagggtgttgggaaaccctctcaaaggccttgcctccaacacagcctcccaggttctg

SEQ ID NO: 10466 - DNA, 529 bp, Homo sapiens
cctccttccgaggagcccagagggcarggctgtgcttggggcggtggggcctgcatgtcctagagattgccgcctcaggtcacatactttccctgtttatttccctggggctgtccccttccttggaggctctcaaattcgaatgttcatggcagtcactatgaacaggcagcccaggcccagcccaagaattccagtcagggcggaaggtcgggcaggactcagggctctcaagatgattctggggcaagaggccctcaagccgggtcttccttgtctacagagggctagggaagaggctgtgggtgcttgggccccaggattaaagaagtgagccctgaggcgagtgtggtggctgctccctggaaatgtgggtctcggggagcgaggccagctttggcagctcctccgtccatgaagagcccctgtccccctgactgcctggagaccagggcgggcgctgggagagaacagggtgttgggaaaccctctcaaaggccttgcctccaacacagcctcccaggttctg

SEQ ID NO: 10467 - DNA, 529 bp, Homo sapiens
cctccttccgaggagcccagagggcagggctgtgcttggggcggtggggcctgcatgtcctagagattgccgcctcaggtcacatactttccctgtttatttccctggggctgtccccttccttggaggctctcaaattcgaatgttcatggcagtcactatgaacaggcagcccaggcccagcccaagaattccagtcagggcggaaggtcgggcaggactcagggctctcragatgattctggggcaagaggccctcaagccgggtcttccttgtctacagagggctagggaagaggctgtgggtgcttgggccccaggattaaagaagtgagccctgaggcgagtgtggtggctgctccctggaaatgtgggtctcggggagcgaggccagctttggcagctcctccgtccatgaagagcccctgtccccctgactgcctggagaccagggcgggcgctgggagagaacagggtgttgggaaaccctctcaaaggccttgcctccaacacagcctcccaggttctg

SEQ ID NO: 10468 - DNA, 532 bp, Homo sapiens
gatggtttaacctggcagtgccagaaacaaatttgagcactgaacatccttcttagaagttctcagccaacaccccacagcgagtctcttacggccagctcatcctcactggtctcagctttgcacgatgctgttccacaggttccccattatctgatctttcccccccgttagggtatttcctacctccttttgacttcttacgmagaacagtttaattatctctgtatttctctgtttatgacttcagagcctcactaaactccatcaaaaaattttcgtaaacagactattttgtacctaagatgaattccaggaccagcttttaaaattatttttcttaacctggctacatttcgatttcgaagtttatgagacagaagttccatatcatctaaactgatcagagagacagagcaccaaagccatacatagtgattgaaggtgcaaatattgttacctgtctgtgatctgaaagctcaactggcatcaaataatttcaggcattatgtcttatttcaaagatgtttta

SEQ ID NO: 10469 - DNA, 442 bp, Homo sapiens
tgtcaagaggaatgaatagaaacccccaacattccctaagttgggaccttgcgctctattctctcagaaagctcacagtcactgcctttgcttctcaaacaaagcttgtctaagcaaagtaaaattcggctctgagaacaaaagctttgggaaccaaaggacagttggcrcctcatcgcatgcaataattgtatacttttcaacactgtgtgctgatgcaatctttgcttatttaaagcctggatttcctagggttacttgtacctactaggcactgagacgtatttgttggaggaatggtgaaattaacagactcctctctaaaatgaaaactgtttgtcaagagaaaaaccactcggttatttagctcattttataactgcatctctgtttatctagttgatttaaggaggcactctgctgtaactggaacagctctctt

SEQ ID NO: 10470 - DNA, 660 bp, Homo sapiens
cagcctggccaacatggtgaaaccccgtctctactgaaaatacaaaaattagctgggcatggtggcacacacctatagtcccagctactcaggaggctgaggtgggaggattgcttgaacctgggaggcagaggttgcagtgagctgagattgtgccactgcactccagcctgggtgaagagtgagacttcstctcaaaaaataaaataagatacaaataaaaataaaacaaaataattaaaataaaataaaatttgccatagccgagtccttgctgtgagccaggtaaaactgctcaattattgttatgctgatactatagatgaagctactgagactcagagaagtcacggcggcagcaagttgcagagctggaaacaaacacaaatctctttgactcccaagctccttcctttccagcaggccacaccagttctcactgaagggaagagaaattcccacagcaagttctgcacagaacttcctggaaaattagttctgctgcttgagctacagtgcaaatgaatctcctcgtttctcattcctggtcaccttcttgaattacagagtggaaactccttccctggctcccaaaaaacaaaacccctattatgagaatcttgatgaaagaaaactatcagataaacatggtggcttgac

SEQ ID NO: 10471 - DNA, 575 bp, Homo sapiens
ccctcactgagaaaatgacatttgaataaggacctgaagaagctaaaaaaggaatccaggctaatatctggaggagaaaaaaaaattatatatatatatrtatgtgtatatatatatatatatatatgcttatttttggaatgagataagaagctattaaggattttgagccacacacacacacaagcaagacctgacttacattttttttttttttttttttgagacagagtctcactctgttgcccaggctacagtgcagtggtgtgatctcgactctctgcaacctgcacctccggattcaagcagttctcctgcctcagcctccctagaagctgggattacaagcatgtgccaccatacctggattatttttgtatttttagtatagatgggttttcaccatgttggtcaggctgatctcgaactcctgacctcaggggatctggccgcctcggcctcccaaaatgctgggattacaagtgtaagccaccccgcccggccctgacctgacttacattttagtaggatcaccctagctactatgtttcttaatcgggtgagagatgatactg

SEQ ID NO: 10472 - DNA, 575 bp, Homo sapiens
ccctcactgagaaaatgacatttgaataaggacctgaagaagctaaaaaaggaatccaggctaatatctggaggagaaaaaaaaattatatatatatatgtrtgtgtatatatatatatatatatatgcttatttttggaatgagataagaagctattaaggattttgagccacacacacacacaagcaagacctgacttacattttttttttttttttttttgagacagagtctcactctgttgcccaggctacagtgcagtggtgtgatctcgactctctgcaacctgcacctccggattcaagcagttctcctgcctcagcctccctagaagctgggattacaagcatgtgccaccatacctggattatttttgtatttttagtatagatgggttttcaccatgttggtcaggctgatctcgaactcctgacctcaggggatctggccgcctcggcctcccaaaatgctgggattacaagtgtaagccaccccgcccggccctgacctgacttacattttagtaggatcaccctagctactatgtttcttaatcgggtgagagatgatactg

SEQ ID NO: 10473 - DNA, 575 bp, Homo sapiens
ccctcactgagaaaatgacatttgaataaggacctgaagaagctaaaaaaggaatccaggctaatatctggaggagaaaaaaaaattatatatatatatgtatrtgtatatatatatatatatatatgcttatttttggaatgagataagaagctattaaggattttgagccacacacacacacaagcaagacctgacttacattttttttttttttttttttgagacagagtctcactctgttgcccaggctacagtgcagtggtgtgatctcgactctctgcaacctgcacctccggattcaagcagttctcctgcctcagcctccctagaagctgggattacaagcatgtgccaccatacctggattatttttgtatttttagtatagatgggttttcaccatgttggtcaggctgatctcgaactcctgacctcaggggatctggccgcctcggcctcccaaaatgctgggattacaagtgtaagccaccccgcccggccctgacctgacttacattttagtaggatcaccctagctactatgtttcttaatcgggtgagagatgatactg

SEQ ID NO: 10474 - DNA, 575 bp, Homo sapiens
ccctcactgagaaaatgacatttgaataaggacctgaagaagctaaaaaaggaatccaggctaatatctggaggagaaaaaaaaattatatatatatatgtatgtgtrtatatatatatatatatatgcttatttttggaatgagataagaagctattaaggattttgagccacacacacacacaagcaagacctgacttacattttttttttttttttttttgagacagagtctcactctgttgcccaggctacagtgcagtggtgtgatctcgactctctgcaacctgcacctccggattcaagcagttctcctgcctcagcctccctagaagctgggattacaagcatgtgccaccatacctggattatttttgtatttttagtatagatgggttttcaccatgttggtcaggctgatctcgaactcctgacctcaggggatctggccgcctcggcctcccaaaatgctgggattacaagtgtaagccaccccgcccggccctgacctgacttacattttagtaggatcaccctagctactatgtttcttaatcgggtgagagatgatactg

SEQ ID NO: 10475 - DNA, 513 bp, Homo sapiens
aaattctacttcctgatgtaaaaaaccttataaactaagctctagagaaatgtcagatccatgtaattgcttagtttgtratggcagataattgatagccttgaatctcttatagtgacaaattatagttctttatatccatttgtgagctgttggtgacatttgaatcatatgtgccaaccactcatttgacattgttagagtaaaagtagtctgaaaagttaatgtttctaaatagttaagaaattttggagttcttcacttattttaaagattttttttaatggaaatcatcttataatatacatctcccttctgagatgtgaataatttagcctaagatttggtctagtatctgggaaataaaagggaatgggattataatgataaaaaattataaaatagcaatacaaaatggtgaccaaagttattattcatttttatatgaaatatagagtgaaaaatgtttgcatttttcaatttgtttttatttgggaaatgcaattaatagta

SEQ ID NO: 10476 - DNA, 513 bp, Homo sapiens
aaattctacttcctgatgtaaaaaaccttataaactaagctctagagaaatgtcagatccatgtaattgcttagtttgtgatggcagataattgatagccttgaatctcttatagtgacaaattatagttctttatatccatttgtgagctgttggtgacatttgaatcatatrtgccaaccactcatttgacattgttagagtaaaagtagtctgaaaagttaatgtttctaaatagttaagaaattttggagttcttcacttattttaaagattttttttaatggaaatcatcttataatatacatctcccttctgagatgtgaataatttagcctaagatttggtctagtatctgggaaataaaagggaatgggattataatgataaaaaattataaaatagcaatacaaaatggtgaccaaagttattattcatttttatatgaaatatagagtgaaaaatgtttgcatttttcaatttgtttttatttgggaaatgcaattaatagta

SEQ ID NO: 10477 - DNA, 513 bp, Homo sapiens
aaattctacttcctgatgtaaaaaaccttataaactaagctctagagaaatgtcagatccatgtaattgcttagtttgtgatggcagataattgatagccttgaatctcttatagtgacaaattatagttctttatatccatttgtgagctgttggtgacatttgaatcatatgtgccaaccactcatttgacattgttagagtaaaagtagtctgaaaagttaatgtttctaaatagttaagaaattttggagttcttcacttattttaaagattttttttaatggaaatcatcttataatatayatctcccttctgagatgtgaataatttagcctaagatttggtctagtatctgggaaataaaagggaatgggattataatgataaaaaattataaaatagcaatacaaaatggtgaccaaagttattattcatttttatatgaaatatagagtgaaaaatgtttgcatttttcaatttgtttttatttgggaaatgcaattaatagta

SEQ ID NO: 10478 - DNA, 536 bp, Homo sapiens
atctttatccagaggtgagtcataatttgagacaaataatatttgtagagtgatcctttttatcagatataaatagtaagcacaatcttgttaaaaagaaagggaggggacctttcaggtttattaattgtgtgtatccttataggtgagcagaatatcataagttcttctcttaaaatttaaagaccccagaaactgttctcgcatgaactcaaagaatgaaccttagtgtgtaaataatggccagggtaatagacaagccaaatggaaaagagagtcatgggagccaaaacggttctaaatagggatgggcttttggctttsgagaacttgtaggtgggcacgatgaccacgtgaagggacggtgagaatgatgggcttgaatagtgatcttggagttacgttagtaaagtaagacttctttttcagccagaaatctattactatcttccaacacttagcctaaaagagtatggttgttatagtagtctgtaaacgctagaaatttgaaaaacagagacaaaattagtgaactc

SEQ ID NO: 10479 - DNA, 572 bp, Homo sapiens
aagttctttgtgaaggcctgtagggcctcccagagtgtttggtcatggatcccaggtcaatccaggagggaaaaaatcccaaggatcagcctgagggggtttgcaaccatttgactggccctgcagtactacaaataaggccagactttgggccaaatatattaatctagaagcartggaaggtggtgaccactacatatacacacactggctaagcagcaaataattcagagctagtgtttaagtaataaaactaaactctggggtcaaagctagtctcttaaaattaagaggcttaactgtcttattggcaatatctcccttgggtgactggaagatgttgtatcaggcctttgggaggaaaacttgggtaaaatggctaaaaccgtgtccttgtcttcctcagagaattgttgccattggcaccagaggctaagacgttgctgctgctatcagggcttgggtccctgtcaagggtcatgtataactcccagggaacaggcagtattaggtccaaggaaaaagcaaggaagggcctgcttgccttgcagaaaaatcagtcctggggtcac

SEQ ID NO: 10480 - DNA, 572 bp, Homo sapiens
aagttctttgtgaaggcctgtagggcctcccagagtgtttggtcatggatcccaggtcaatccaggagggaaaaaatcccaaggatcagcctgagggggtttgcaaccatttgactggccctgcagtactacaaataaggccagactttgggccaaatatattaatctagaagcagtggaaggtggtgaccacyacatatacacacactggctaagcagcaaataattcagagctagtgtttaagtaataaaactaaactctggggtcaaagctagtctcttaaaattaagaggcttaactgtcttattggcaatatctcccttgggtgactggaagatgttgtatcaggcctttgggaggaaaacttgggtaaaatggctaaaaccgtgtccttgtcttcctcagagaattgttgccattggcaccagaggctaagacgttgctgctgctatcagggcttgggtccctgtcaagggtcatgtataactcccagggaacaggcagtattaggtccaaggaaaaagcaaggaagggcctgcttgccttgcagaaaaatcagtcctggggtcac

SEQ ID NO: 10481 - DNA, 572 bp, Homo sapiens
aagttctttgtgaaggcctgtagggcctcccagagtgtttggtcatggatcccaggtcaatccaggagggaaaaaatcccaaggatcagcctgagggggtttgcaaccatttgactggccctgcagtactacaaataaggccagactttgggccaaatatattaatctagaagcagtggaaggtggtgaccactacatatacacacactggctaascagcaaataattcagagctagtgtttaagtaataaaactaaactctggggtcaaagctagtctcttaaaattaagaggcttaactgtcttattggcaatatctcccttgggtgactggaagatgttgtatcaggcctttgggaggaaaacttgggtaaaatggctaaaaccgtgtccttgtcttcctcagagaattgttgccattggcaccagaggctaagacgttgctgctgctatcagggcttgggtccctgtcaagggtcatgtataactcccagggaacaggcagtattaggtccaaggaaaaagcaaggaagggcctgcttgccttgcagaaaaatcagtcctggggtcac

SEQ ID NO: 10482 - DNA, 572 bp, Homo sapiens
aagttctttgtgaaggcctgtagggcctcccagagtgtttggtcatggatcccaggtcaatccaggagggaaaaaatcccaaggatcagcctgagggggtttgcaaccatttgactggccctgcagtactacaaataaggccagactttgggccaaatatattaatctagaagcagtggaaggtggtgaccactacatatacacacactggctaagcagcaaataattcagagctagtgtttaagtaataaaactaaactctggggtcaaagctagtctcttaaaattaagaggcttaactgtcttattggcaatatctcccttgggtgactggaagatgttgtatcaggcctttgggaggaaaacttgggtaaaatggctaaaaccgtgtccttgtcttcctcagagaattgttgccattggcaccagaggctaagaygttgctgctgctatcagggcttgggtccctgtcaagggtcatgtataactcccagggaacaggcagtattaggtccaaggaaaaagcaaggaagggcctgcttgccttgcagaaaaatcagtcctggggtcac

SEQ ID NO: 10483 - DNA, 539 bp, Homo sapiens
gttaacctatcttccccrttagaccaagtcccttgaggtcagggaccatggtcatttccacatatttcatgggttctcagaaaatgtaccttgatggaatgaggaataaaagaatgaatcataataatgattattaattttattctgattcatgttttataacataatctttaaaaactcatatgcatttcttaagtgctgaaattataaatcatcatcatcattattattttggccctagtaaacaagcccttatacataaaactaccagcccagtaattggcacatagtatatattcaataaatatggcctttttatctcctcactcctcatgtccatatggaatataaaaataatctaaattcttgaagactagtaaatatgaaattgtactcgaataagcgtgttctgatatcctactctttttttctaaagtatgttaaattacatcatgaaaatcaagaacatttaaaccaacagttctatgaataatcgtattttcacagtgttcttcgctcctagacagaatgaatctggg

SEQ ID NO: 10484 - DNA, 539 bp, Homo sapiens
gttaacctatcttccccgttagaccaartcccttgaggtcagggaccatggtcatttccacatatttcatgggttctcagaaaatgtaccttgatggaatgaggaataaaagaatgaatcataataatgattattaattttattctgattcatgttttataacataatctttaaaaactcatatgcatttcttaagtgctgaaattataaatcatcatcatcattattattttggccctagtaaacaagcccttatacataaaactaccagcccagtaattggcacatagtatatattcaataaatatggcctttttatctcctcactcctcatgtccatatggaatataaaaataatctaaattcttgaagactagtaaatatgaaattgtactcgaataagcgtgttctgatatcctactctttttttctaaagtatgttaaattacatcatgaaaatcaagaacatttaaaccaacagttctatgaataatcgtattttcacagtgttcttcgctcctagacagaatgaatctggg

SEQ ID NO: 10485 - DNA, 539 bp, Homo sapiens
gttaacctatcttccccgttagaccaagtcccttgaggtcagggaccatggtcatttccacatatttcatgggttctcagaaaatgtacsttgatggaatgaggaataaaagaatgaatcataataatgattattaattttattctgattcatgttttataacataatctttaaaaactcatatgcatttcttaagtgctgaaattataaatcatcatcatcattattattttggccctagtaaacaagcccttatacataaaactaccagcccagtaattggcacatagtatatattcaataaatatggcctttttatctcctcactcctcatgtccatatggaatataaaaataatctaaattcttgaagactagtaaatatgaaattgtactcgaataagcgtgttctgatatcctactctttttttctaaagtatgttaaattacatcatgaaaatcaagaacatttaaaccaacagttctatgaataatcgtattttcacagtgttcttcgctcctagacagaatgaatctggg

SEQ ID NO: 10486 - DNA, 539 bp, Homo sapiens
gttaacctatcttccccgttagaccaagtcccttgaggtcagggaccatggtcatttccacatatttcatgggttctcagaaaatgtaccttgatggaatgaggaataaaagaatgaatcataataatgattattaattttattctgattcatgttttataacataatctttaaaaactcatatgcatttcttaagtgctgaaattataaatcatcatcatcattattattttggccctagtaaacaagcccttatacataaaactaccagcccagtaattggcacatagtatatattcaataaatatggcctttttatctcctcactcctcatgtccatatggaatataaaaataatctaaattcttgaagactagtaaatatgaaattgtactcgaataagcgtgttctgatatcctactctttttttctaaagtatgttaaattacatcatgaaaatcaagaacatttaaaccaacagttctatgaataatcgtattttcacagtgytcttcgctcctagacagaatgaatctggg

SEQ ID NO: 10487 - DNA, 577 bp, Homo sapiens
gatttttcttggaatttggaagaatcactctaaagtttattgaaaaaacagcagatagaaagtgcaaaaacacttgtgaaaaatgagaaagaatagacctactcttccagttagtaaaatttataaaattacaataatgaagataaaatagtatgtgactgtcacaggaatacacaattacctaaatagaaaggatagctcccatataaacacatcataataaaaacttcacatgaaagtggaaacaccaaaccaaaatggaaaagaggaattatttaacaaatggtaaaacaaagtattggatagcttattagcagttttggagggagggtagaatagcaaattatatagatgctttggggtttaaatatagagaaaggaagagagaaggaaagacaggtaaattaaaataagaaaaataaytagaattcaatgtcaggtttctggcctaggttaactatttaaacttttcaactaaaataccattaatgcttcttttttttgagacagagtctcactctgtcgcccaggctggagtgcagtggtgcaatctcgactcactgcaacctccacttcc

SEQ ID NO: 10488 - DNA, 581 bp, Homo sapiens
tgtttatatgtaaagaaaagttggcgtctggattcagataactacaggttttattgtttttcagtgacatgatagttcagtgggacatttgaaagytatacagggcatgaggcgattcttcactgtgtagggcaacttgtggaaaactttgcttaaagagcagtaggcatattttctttgcccgtgttttcttaatcccttcctcccctaccctgttggccgaaatgtaggcgtgatgactggagctgcagctgccatcttggagcaggtagacagaaccatgctacaccctagggtgacagagcagtagccggaaggaacctattccctgaggacttcgtggagcaaggctgccctattagccctggattctctctgtctctgaactttcacacgaacaagatataaactactctgctaagccaaaattattctgggtttctacttcttgaaactaaatctacctaaagcaataccaaaaataaacattaaaataagcatttcaaactagttttcaaagactggtattaaatctgatagggttaagaaaactgtctaggccaggtgcgatggctcacacc

SEQ ID NO: 10489 - DNA, 581 bp, Homo sapiens
tgtttatatgtaaagaaaagttggcgtctggattcagataactacaggttttattgtttttcagtgacatgatagttcagtgggacatttgaaagctatacagggcatgaggcgattcttcactgtgtagggcaacttgtggaaaactttgcttaaagagcagtaggcatattttctttgccygtgttttcttaatcccttcctcccctaccctgttggccgaaatgtaggcgtgatgactggagctgcagctgccatcttggagcaggtagacagaaccatgctacaccctagggtgacagagcagtagccggaaggaacctattccctgaggacttcgtggagcaaggctgccctattagccctggattctctctgtctctgaactttcacacgaacaagatataaactactctgctaagccaaaattattctgggtttctacttcttgaaactaaatctacctaaagcaataccaaaaataaacattaaaataagcatttcaaactagttttcaaagactggtattaaatctgatagggttaagaaaactgtctaggccaggtgcgatggctcacacc

SEQ ID NO: 10490 - DNA, 581 bp, Homo sapiens
tgtttatatgtaaagaaaagttggcgtctggattcagataactacaggttttattgtttttcagtgacatgatagttcagtgggacatttgaaagctatacagggcatgaggcgattcttcactgtgtagggcaacttgtggaaaactttgcttaaagagcagtaggcatattttctttgcccgtgttttcttaatcccttcctcccctaccctgttggccgaaatgtagrcgtgatgactggagctgcagctgccatcttggagcaggtagacagaaccatgctacaccctagggtgacagagcagtagccggaaggaacctattccctgaggacttcgtggagcaaggctgccctattagccctggattctctctgtctctgaactttcacacgaacaagatataaactactctgctaagccaaaattattctgggtttctacttcttgaaactaaatctacctaaagcaataccaaaaataaacattaaaataagcatttcaaactagttttcaaagactggtattaaatctgatagggttaagaaaactgtctaggccaggtgcgatggctcacacc

SEQ ID NO: 10491 - DNA, 581 bp, Homo sapiens
tgtttatatgtaaagaaaagttggcgtctggattcagataactacaggttttattgtttttcagtgacatgatagttcagtgggacatttgaaagctatacagggcatgaggcgattcttcactgtgtagggcaacttgtggaaaactttgcttaaagagcagtaggcatattttctttgcccgtgttttcttaatcccttcctcccctaccctgttggccgaaatgtaggcgtgatgactggagctgcagctgccatcttggagcaggtagacagaaccatgctacaccctagggtgacagagcagtagccggaaggaacctattccctgaggacttcrtggagcaaggctgccctattagccctggattctctctgtctctgaactttcacacgaacaagatataaactactctgctaagccaaaattattctgggtttctacttcttgaaactaaatctacctaaagcaataccaaaaataaacattaaaataagcatttcaaactagttttcaaagactggtattaaatctgatagggttaagaaaactgtctaggccaggtgcgatggctcacacc

SEQ ID NO: 10492 - DNA, 588 bp, Homo sapiens
ccatcaaaggcaggatcccagaaattcaccgcttgactttgggctgggacctagcgagcactgccttctgggtcaaagtaaattggcaggaagtcctcacagtgattacatcccaactttgcgtcactgagcagccaaggaaacctcacactttgaaactggattaaagttgtattggacagctagcactccctcatgcctggctgargaaaattaaaatcctctccagaaggtgacttgactttatgcctcaaattatttctacaaataatttttcaaatatacaagtggaacattggtaaaaaaagacaacatgagtgagcaccaataaaacatatcaaataacaaaacccccagggaccacaatactggaattatcagaaacagaatatgaaacatgcttagaatattcagggagataaagaatgggcataaaatgtgtgggaacaaaaactataacattcagtaaaacaaaaatagaaattccaactaaaatttacaataaaaatttgaaacttaatagatgggtttagaagcaaattaaacacagctgaagagaagatagattaggagaaattatccagaaag

SEQ ID NO: 10493 - DNA, 540 bp, Homo sapiens
gaaccttataaaccactggctttcaaccttcactgcccattagaatcacctggggggctttttaaaaatgtcaatgccctggtcccacccccagagattctgctttaattaggctggaaaagcacttgggcatcaatatacttttaagctctccagatgattctaatgggaagccaaagttgagaaccactgctctaaaccctacagaagaatgtcaaatccaaataaaatgttgaattctgaacaagacttaggccattgatttgattcttgaattgctcttcatgaggaattgtgagcaagtgccctcttttgcaaaggcctactgaaagagaacactttgaagcaaaaaaaaaaaaaaaaaagatatactactttggtgctatatactaaaggaggtggcctttcaaagcaaacactacayagacccatctactcttcacaagttctttgggaaaatcattggctacagcacatgcagttccccataagccagagcagaaaatgtatgctacgtcataaaggcaattagtatgactt

SEQ ID NO: 10494 - DNA, 549 bp, Homo sapiens
ccaaaccattatactgcattagagaatcttgttcacaaaataaaacatggaaagggtattcatgtacccgaagtttaacaacagacataccrtcttacctgatgccacgtcagatgagctctgccccacctttctgcgaaccctcgttcggcaaattttgctttatgaacgcctgacaaggtcccagtgatggagcagagggagcaagaacggacggtgcagagaaaagcaacctttagcttcactattccctctcgtcctccagctgaaagttgttccacgtcccgggcaaagagagagccccaccaggcagcaccaccagctccacagagttggagtgattcccccaagaagctcccctgcgccccccgtcacccccagagaccagcagaggaaacggcatctatcccttggaagacactaggcaggcgagaacaaatgcaagtcctgctgctcacaccgaggaggaaaggatggaggaggcggtgaatgggatgtagcagaaacccgacggccgcagcggaagggacacctcccctctccagccta

SEQ ID NO: 10495 - DNA, 540 bp, Homo sapiens
actatgactagcctctctcccaaggcggcatctggaaggccttgccgccatgtggcggattcaggaggataggatctatgggccattagcgcttctcctgggtgcttctgcctcctcttcccgactacttcaccacagcctccagcactcctgtcacagagggaggaggaggacaggtgcaaacaggcacatttgtatcagcaacagtctcaggcttgatgaggaactgtactaaatggcattttaaaattagatttgtgactgaatcccagttttgccactatacaattttaaacgacattaaagcatggattttctctcttcaattttattgaaattttaggaggtacatatgcaaacataggaaaaactcaagattctacctgagcatatctaacmtgcagtataaaaagagacttctatgaacaactgcccgaataagtaaagtttactgtaaactagaactcaagtaaaactgagatttaataattaaaatgtctgtcaagtaaggaaacacacacatcaaacattaattgacac

SEQ ID NO: 10496 - DNA, 1476 bp, Homo sapiens
aacaaaataggcaaacgtgtaaatactttttgaaagcataacacggatactggaaaaattaatagaactggagcggaacatgaaaatctgaacgaaatagttggttttctagcaaaaaattatcaaaattaatccaagaggtgaaaaaacttgaatatgacaatttccttaaaaaatttggaaaggtgatcaagttctaaacataggaaaagagatgagaaccaggtatattcacaactgaactttattaaaaacttttaaataacaggtcatcccaaggttattaaagctcttccagttaaaagcaaataaaagctccccaatttattttataaagtcaacctatactcagaaccaaaaccttttggaagtgtttaaacaaatgcagataagattgcagctatacacttatctctcttacgaatataaaagcagaattttttttaatgtaaataaaattctgcaaagtttccatagatcactacaatatagtcagggagagttaattccaagaaggtgactgactaaaccagtaaattgatttggtgggtatggtggttcatgctcagcactttgggaaaccaaaataggatgatggcttaagcccaggagtttgagaccagtttgggtaacatagtgagaccccatctctatagaaaaatgttttaaaaattagttgggtgaggcagtgtgcacctgtggtcccagctatttggaaggctgagatgggaggatcacttaagcccagggggtcaaggttgcagtgagctgtgatcatgtcactccactccagcatgggtaatacagcgagactttatctccaaaaaaaataattgattaatacaatttattaaatacatcattcaaaataagagggaaatatgattatccaaataaatgctaaaaataatttgcctaaatctagcagtaatgcttaataaattaagaaaactatataaatatgacaaactacttattaaaatatagtaagtactacacttaaatgataaaccctacagtactttcatttaaaattcagaattaaacaggaataatttctgcttatacccattattatttaacattgctttagatattctagcaacagtaaatgaatcaaggaaaataaaataactgtaataacccatagaaaagaaaaaaaagcacaactgtttttcttaaaacatgtrcatatagacacatacacatttttaaacagaaaacctataactcactagtatgaatacaaaccaatgtacaaaaatgctagaattaataaaagaatatttgacattttggggataaatgagactcttttaactcctttcccatatctggttcatttagaagttcagcctttaaagatgccagatatataatgctagttctcaatttaaattatccactaaattaaattacaggcataaactcatcaaatgttagagttgaaagatttttggaagattttatattcca

SEQ ID NO: 10497 - DNA, 530 bp, Homo sapiens
ccaagatagggaatcaacctaagtgtccatcaatggatgaatggataaagaaaatgcagtacacatacacaatcgagtactattcagccataaagaagaatgagatcctgtcatgtgcaacaacatagatggagctggaggacattatgctaagtgaaatgatccagggacagaaagacaaatattacatattctcacttacatatgggaggtaaaatagtagataccatggagatagagaatagaatggtcgttatcagagtctgggaagggaaactggggagggcgaagacaaagagaaattagttaattgtcaaaaaaatacagttagatagaagttctagtatttgaaaatacaatagggaaattatagttgacaatattttatcatatatttcaaaatagctagaaaagaataattgtattgttctcaggctgggcatggtggctcatacctgtawtcccagatccaagtgagatgatagaatccctcccaaaaagtccttcctaggccaggtgcagtggcttac

SEQ ID NO: 10498 - DNA, 785 bp, Homo sapiens
tttctagaactggcatgcctgataggagcctgcttggtgggtacaatgtgtgttgctccagtgctggatgcactaagggctctgacttcaccaggatgttgtgtatcaatgtagcaaatggcacttgtactccatgaatatacacaaaataaatacaaagataaaaaaataaataaaattcgcatgccatccacttgttgctgtcactcaaataaacagaatttaaaaaactatacaaatggtatgcaaacaaatgtaaaatgagatwttcactctttcaaaaaaaaaaaactatgtatttataaaaatcactgcccacatcaaaaatacaaatgatttatgacttctaaaaaatcattgtcttaatcaacacctgtcagccacaggtaggatagggaagacttaacatcactgtccccacacactgtaaccttggggtctatgcggaacactagatgaattgggatcattgggccttatcagcaaggccttaagggcactctttctgggatctcagtcaacacagccaggctgtaagctgcatcttaactggagcgcgttgagaaaaaagacacagaaaggcagactcaagtggctctccgtttgagcctgttttctgtcctaatctaatagctgccatgatcgattctgctttagggtaggtgtttggacaagtgccagactctgtgagaaactgggaatcccttgccttctctactagattttccttagagaactgacaagtgtaaccacttttattcttgggagactcaatggtttaaaaa

SEQ ID NO: 10499 - DNA, 1292 bp, Homo sapiens
tggaattacccaactacagctgatatagtacctcccagacttctagtttctaaaattctgggtgaagtgggacaatttgaactataacagtctacatggtagtaatattaccttttggccactggctcaatactaatccttttttgttttttaatatataaaatatgctgaaattgtatctcttaaaacacatttcaattaatgtaattaaaaacagaagggtaacagcttccttttagaagacttaagacttagttatgaaaaatctgccatatttgttaaattaatscaacatttttagggtcaaatatagatcatactacatttttcaatttagagtctgtgataaatacttgtacaaataactataaacacaaccaaattacttttaaaaatggaaattaccatttttatctctttagtaactttaatcacttgattttatccaatttaaggacaaacttcaaaaatccactgtgaaatttgtattccgactaagcacaaaaatacacaaatgttagttctagtcagaaatttaagctgacaagtgaaaatctcactttgaaagtagatctgggacacagaagttaaatttttgatctgaacacatcataaatatattgttgtaatgtaaaaataattttttaaaagaaatgtttaacagtctttttactccaccatctcaaacatgtaaaatttttccctaaaatagtctaagataaacatctcatctgaaacccgattttataaaaaagagagaataaaactaattactcttatatgtacttgagccaagtagttgctgcttccagatgtgagctaaaaatcgtgacctaatgacattatggtaagcaaccttttgcttataaccctagtaacttgtaattcaattcctattgcttatcaaagacccatatgtatttgtaaatttaaaaatttacatcttttaaaaagtacctaacaaactattttcttaaataaaatataattattatataaagaactgtttattctaagaactttaaaagacaaacaaaatggggtgcgggagagttgggcacatgccctccaagaaaatatctagaattatatcacaataataaggctaagaaccatgaaggatttattaggctgaagtttcaagtctcctaatatgttactttaattgtgtttttgatggtctcctacctatttgaacattgcggtgtcctttccaaactgtaaatcagacaatctgaagtgtgttatattttattgtcattttcttagagaaaataattgcttcactggcc

SEQ ID NO: 10500 - DNA, 1292 bp, Homo sapiens
tggaattacccaactacagctgatatagtacctcccagacttctagtttctaaaattctgggtgaagtgggacaatttgaactataacagtctacatggtagtaatattaccttttggccactggctcaatactaatccttttttgttttttaatatataaaatatgctgaaattgtatctcttaaaacacatttcaattaatgtaattaaaaacagaagggtaacagcttccttttagaagacttaagacttagttatgaaaaatctgccatatttgttaaattaatccaacatttttagggtcaaatatagatcatactayatttttcaatttagagtctgtgataaatacttgtacaaataactataaacacaaccaaattacttttaaaaatggaaattaccatttttatctctttagtaactttaatcacttgattttatccaatttaaggacaaacttcaaaaatccactgtgaaatttgtattccgactaagcacaaaaatacacaaatgttagttctagtcagaaatttaagctgacaagtgaaaatctcactttgaaagtagatctgggacacagaagttaaatttttgatctgaacacatcataaatatattgttgtaatgtaaaaataattttttaaaagaaatgtttaacagtctttttactccaccatctcaaacatgtaaaatttttccctaaaatagtctaagataaacatctcatctgaaacccgattttataaaaaagagagaataaaactaattactcttatatgtacttgagccaagtagttgctgcttccagatgtgagctaaaaatcgtgacctaatgacattatggtaagcaaccttttgcttataaccctagtaacttgtaattcaattcctattgcttatcaaagacccatatgtatttgtaaatttaaaaatttacatcttttaaaaagtacctaacaaactattttcttaaataaaatataattattatataaagaactgtttattctaagaactttaaaagacaaacaaaatggggtgcgggagagttgggcacatgccctccaagaaaatatctagaattatatcacaataataaggctaagaaccatgaaggatttattaggctgaagtttcaagtctcctaatatgttactttaattgtgtttttgatggtctcctacctatttgaacattgcggtgtcctttccaaactgtaaatcagacaatctgaagtgtgttatattttattgtcattttcttagagaaaataattgcttcactggcc

SEQ ID NO: 10501 - DNA, 1292 bp, Homo sapiens
tggaattacccaactacagctgatatagtacctcccagacttctagtttctaaaattctgggtgaagtgggacaatttgaactataacagtctacatggtagtaatattaccttttggccactggctcaatactaatccttttttgttttttaatatataaaatatgctgaaattgtatctcttaaaacacatttcaattaatgtaattaaaaacagaagggtaacagcttccttttagaagacttaagacttagttatgaaaaatctgccatatttgttaaattaatccaacatttttagggtcaaatatagatcatactacatttttcaatttagagtctgtgataaatacttgtacaaataactataaacacaaccaaattacttttaaaaatggaaattaccatttttatctctttagtaactttaatcacttgattttatccaatttaaggacaaacttcaaaaatccactgtgaaatttgtattccgactaagcacaaaaatacacaaaygttagttctagtcagaaatttaagctgacaagtgaaaatctcactttgaaagtagatctgggacacagaagttaaatttttgatctgaacacatcataaatatattgttgtaatgtaaaaataattttttaaaagaaatgtttaacagtctttttactccaccatctcaaacatgtaaaatttttccctaaaatagtctaagataaacatctcatctgaaacccgattttataaaaaagagagaataaaactaattactcttatatgtacttgagccaagtagttgctgcttccagatgtgagctaaaaatcgtgacctaatgacattatggtaagcaaccttttgcttataaccctagtaacttgtaattcaattcctattgcttatcaaagacccatatgtatttgtaaatttaaaaatttacatcttttaaaaagtacctaacaaactattttcttaaataaaatataattattatataaagaactgtttattctaagaactttaaaagacaaacaaaatggggtgcgggagagttgggcacatgccctccaagaaaatatctagaattatatcacaataataaggctaagaaccatgaaggatttattaggctgaagtttcaagtctcctaatatgttactttaattgtgtttttgatggtctcctacctatttgaacattgcggtgtcctttccaaactgtaaatcagacaatctgaagtgtgttatattttattgtcattttcttagagaaaataattgcttcactggcc

SEQ ID NO: 10502 - DNA, 1292 bp, Homo sapiens
tggaattacccaactacagctgatatagtacctcccagacttctagtttctaaaattctgggtgaagtgggacaatttgaactataacagtctacatggtagtaatattaccttttggccactggctcaatactaatccttttttgttttttaatatataaaatatgctgaaattgtatctcttaaaacacatttcaattaatgtaattaaaaacagaagggtaacagcttccttttagaagacttaagacttagttatgaaaaatctgccatatttgttaaattaatccaacatttttagggtcaaatatagatcatactacatttttcaatttagagtctgtgataaatacttgtacaaataactataaacacaaccaaattacttttaaaaatggaaattaccatttttatctctttagtaactttaatcacttgattttatccaatttaaggacaaacttcaaaaatccactgtgaaatttgtattccgactaagcacaaaaatacacaaatgttagttctagtcagaaatttaagctgacaagtgaaaatctcactttgaaagtagatctgggacacagaagttaaatttttgatctgaacacatcataaatatattgttgtaatgtaaaaataattttttaaaagaaatgttkaacagtctttttactccaccatctcaaacatgtaaaatttttccctaaaatagtctaagataaacatctcatctgaaacccgattttataaaaaagagagaataaaactaattactcttatatgtacttgagccaagtagttgctgcttccagatgtgagctaaaaatcgtgacctaatgacattatggtaagcaaccttttgcttataaccctagtaacttgtaattcaattcctattgcttatcaaagacccatatgtatttgtaaatttaaaaatttacatcttttaaaaagtacctaacaaactattttcttaaataaaatataattattatataaagaactgtttattctaagaactttaaaagacaaacaaaatggggtgcgggagagttgggcacatgccctccaagaaaatatctagaattatatcacaataataaggctaagaaccatgaaggatttattaggctgaagtttcaagtctcctaatatgttactttaattgtgtttttgatggtctcctacctatttgaacattgcggtgtcctttccaaactgtaaatcagacaatctgaagtgtgttatattttattgtcattttcttagagaaaataattgcttcactggcc

SEQ ID NO: 10503 - DNA, 1292 bp, Homo sapiens
tggaattacccaactacagctgatatagtacctcccagacttctagtttctaaaattctgggtgaagtgggacaatttgaactataacagtctacatggtagtaatattaccttttggccactggctcaatactaatccttttttgttttttaatatataaaatatgctgaaattgtatctcttaaaacacatttcaattaatgtaattaaaaacagaagggtaacagcttccttttagaagacttaagacttagttatgaaaaatctgccatatttgttaaattaatccaacatttttagggtcaaatatagatcatactacatttttcaatttagagtctgtgataaatacttgtacaaataactataaacacaaccaaattacttttaaaaatggaaattaccatttttatctctttagtaactttaatcacttgattttatccaatttaaggacaaacttcaaaaatccactgtgaaatttgtattccgactaagcacaaaaatacacaaatgttagttctagtcagaaatttaagctgacaagtgaaaatctcactttgaaagtagatctgggacacagaagttaaatttttgatctgaacacatcataaatatattgttgtaatgtaaaaataattttttaaaagaaatgtttaacagtctttttactccaccatctcaaacatgtaaaatttttccctaaaatagtctaagataaacatctcatctgaaacccgattttataaaaaagagagaataaaactaattactcttatatgtacttgagccaagtagttgctgcttccagatgtgagctaaaartcgtgacctaatgacattatggtaagcaaccttttgcttataaccctagtaacttgtaattcaattcctattgcttatcaaagacccatatgtatttgtaaatttaaaaatttacatcttttaaaaagtacctaacaaactattttcttaaataaaatataattattatataaagaactgtttattctaagaactttaaaagacaaacaaaatggggtgcgggagagttgggcacatgccctccaagaaaatatctagaattatatcacaataataaggctaagaaccatgaaggatttattaggctgaagtttcaagtctcctaatatgttactttaattgtgtttttgatggtctcctacctatttgaacattgcggtgtcctttccaaactgtaaatcagacaatctgaagtgtgttatattttattgtcattttcttagagaaaataattgcttcactggcc

SEQ ID NO: 10504 - DNA, 531 bp, Homo sapiens
tgaaaacaaagataaaagagtttccttgtttccatcctctgagaactagggaaggatggattcaaatgatcttgttcatagtttgaatcttaagacatcaaggcagactcagggacagttgataaatcattcatgagttggtttgcaagaataataaagtttcctgatttctccaatttattttcaacactacgtgtttgttgtaagtacttttataaatattacctctcttaatcctcatagctttatgcattgagtactcttatgttatctactttacatatgaggaaactagtgagattttaagcaatttgttcaaatttattagtaaaacttgytcctggatgaaaccccaggcatcttggctttattgccatgctttgcaccttgggcttccccatcaaaagtccagaacaatcatacagaccaaactgttcctattgtgtaaactaagtcatgcctccttatggtcagcctttcttgattgctgcccaaagttatagctgaaccctctagtctcccactgattaa

SEQ ID NO: 10505 - DNA, 611 bp, Homo sapiens
ccggtatcatactcagtgttccacaggtaaatgcctcatgtttgggagcctcttttttgttcccttgatctgtttcattcattcctatgccagttccacagtgttgaccactttagctaagatctcacctaccttaagcaaggggctctgctctggcttagcgcttgtcagcatttttgtttgtttgtttgtttgttttgagatgaagtctccctctgttgcccaggctggagtacagtggtgcgatctcggctcactgcaacctgcatctcccaggttcagatgattcttgtgtctcagcctcctgagtagctggrattacaggcgccctccaccatgcccagctatttttttttttttttggtgtttttagtaaagacagtttttcgccatgtcggccaggctggtctcgcactcctgacctcaagtaatccgcccgtcttggcctcccaaagtgctgggattacatgcttgagccactgtgcctggctcttgtcagtttttcaactgtttacaaggatacaggatgctccccaggctccctaaaactctcccatctctccttttctcaagggagtttagcattcaggggtctcagtctgagtgggtga

SEQ ID NO: 10506 - DNA, 697 bp, Homo sapiens
taatgagtagaaagaaagccagagtaacttctttcagggatttaaaaaactgaattgctagcacttttaaaggattaaggccagtgtttaatcatccaaactagatttttttttctggaattaatatcaagctcatctctctgttgtttctgtaccatgttttgttcctttctttgaagttcaggcctgcatgtctgtctgcggcctgagacattcctcccattgtctatgatcttgtaactcttacctgaagtggctttgrtatgacattgacaggtttcttctgcactctggttatttgagcctgagatcaactcatttggcctattacctcttccttgcctgttgaaggccatgggttccattttgaaaacgattccacttgctgaagaacgtgggacaacaaagtagcctgagaggcctggcttctcccagtcatcaaagagttctgggtggagtcacactgagttctttaaatttttgtttctccccctttcatcctcttccctttctttcctctacttctgtcctttagccattttggaattacaggggatcttatggtcaggtttcagttgttaggtgcaggcattactttgaagccacgtgctctttgagaatatctaagcatgaaatcttccccctgttttctcaaatttatttgaaactctgttaggcttgctatttagtttttttt

SEQ ID NO: 10507 - DNA, 697 bp, Homo sapiens
taatgagtagaaagaaagccagagtaacttctttcagggatttaaaaaactgaattgctagcacttttaaaggattaaggccagtgtttaatcatccaaactagatttttttttctggaattaatatcaagctcatctctctgttgtttctgtaccatgttttgttcctttctttgaagttcaggcctgcatgtctgtctgcggcctgagacattcctcccattgtctatgatcttgtaactcttacctgaagtggctttgatatgacattgacaggtttcttctgcactctggttatttgagcctgagatcaactcatttggcctattacctcttccttgcctgttgaaggccatgsgttccattttgaaaacgattccacttgctgaagaacgtgggacaacaaagtagcctgagaggcctggcttctcccagtcatcaaagagttctgggtggagtcacactgagttctttaaatttttgtttctccccctttcatcctcttccctttctttcctctacttctgtcctttagccattttggaattacaggggatcttatggtcaggtttcagttgttaggtgcaggcattactttgaagccacgtgctctttgagaatatctaagcatgaaatcttccccctgttttctcaaatttatttgaaactctgttaggcttgctatttagtttttttt

SEQ ID NO: 10508 - DNA, 697 bp, Homo sapiens
taatgagtagaaagaaagccagagtaacttctttcagggatttaaaaaactgaattgctagcacttttaaaggattaaggccagtgtttaatcatccaaactagatttttttttctggaattaatatcaagctcatctctctgttgtttctgtaccatgttttgttcctttctttgaagttcaggcctgcatgtctgtctgcggcctgagacattcctcccattgtctatgatcttgtaactcttacctgaagtggctttgatatgacattgacaggtttcttctgcactctggttatttgagcctgagatcaactcatttggcctattacctcttccttgcctgttgaaggccatgggttccattttgaaaacgattccacttgctgaagaacrtgggacaacaaagtagcctgagaggcctggcttctcccagtcatcaaagagttctgggtggagtcacactgagttctttaaatttttgtttctccccctttcatcctcttccctttctttcctctacttctgtcctttagccattttggaattacaggggatcttatggtcaggtttcagttgttaggtgcaggcattactttgaagccacgtgctctttgagaatatctaagcatgaaatcttccccctgttttctcaaatttatttgaaactctgttaggcttgctatttagtttttttt

SEQ ID NO: 10509 - DNA, 621 bp, Homo sapiens
taggcctttcagcctgtctgtccgtgcaaacgaagttacatggacaataactactcagtgatgttggcttgtcttcactggcatactgcaggaccaagtatttagggggttctctgagggatgcccctaatctgctcatgaacaagcctgcaggcccctctgggacagtcttggctgctgtccgtgtgggcaaatccctgctgaggctgacacaactccactagtattttgcttccagagatcttcactgactgtccaggattagaaagtctccaggatgaaaggttgattttccaccttaggagaatgccccctgtctgaaggtagaacaggcatgtgggtgttccaggccttgcatttaggccatagagctggaaaggtsccctgcagtttccacactgcagttgtcatccagttcaatgagggtgttttcttagaagaaaacaaattacactgactctttgccctttaggaagctccgtctgctcctttgttttgcttggtgtgtgtcttagacagtcattactaagtttgcaaccttttgatttgtccctgttccctctttggctttaaaacactgcacaaccctcctattggggttggaaagaaactcccttttac

SEQ ID NO: 10510 - DNA, 651 bp, Homo sapiens
tgaaacggagtctctttctgtcacccagggtggagtgcagtggtgcgatctcggctcactggaacctctgcctcccaggttcaagcractctccagcttcagcctcccaagtagctgggactataggcacgtgccaccacacctggctaatatttgcatttttagtacagatggggtttcaccatgctggccaggctggtcttgaactccaggcctcaagtgatctgcttgcctcggcctcccaaagtgctgggattacaggcgtgagccaccgctcccagcctgatttgcattttttaaataagaagatggataggtaggtagctggcctctgctatgggagcggagagggggaagggtcatgctatgtggcagtagtgactgcaagctggaggcgagcctgaaaagaacaagtccagagcacttcctcctggaaggaaaaagtggcaccaggtgggaaatattcagaaaacattgctaagacaatagtggaactccagctgcagaagttttcgcccccttgctagaaaagttctggaagtgagatagatgcttattaacttaggatggtgtagatataagtctgtgcagaaatgagatcagatgatcagatgggctccttaggccctatttgatgtagtacgagatgaa

SEQ ID NO: 10511 - DNA, 581 bp, Homo sapiens
cactagctatgagcacagagctgtgctagccacggtgaagggtgaaacccaggtaacagccacattcttgcctgaaagaatgtatgctctcagagcaatcactcaatcaaccaaagattcaatagcaataaaataaatgacaggtcaaaactatagcaacatagaacatagacaaggcagaacatgattaattgctgaattaatttgcctgkcaccactagcaatggtttatgtacatttttttttgtttttgttttttgctgatttgattagcattggccttggaatagaagacagaaggtgcatttggggctttcattatgacctagtcttagagaatacgttttagatgcgctggtttaggttggttcatgactagtcaactcttctgggccccagtttcctaatctgtaaaatggggtaatagaactacctggatggcaaggatgatccagattctacattttttttcttttttgagacaggatcttgctctgtcacccaggctgcagtgcagtggcacaattatagctcactgcagcctcgaacttctggggtacagtgatcctcccacctaacct

SEQ ID NO: 10512 - DNA, 581 bp, Homo sapiens
cactagctatgagcacagagctgtgctagccacggtgaagggtgaaacccaggtaacagccacattcttgcctgaaagaatgtatgctctcagagcaatcactcaatcaaccaaagattcaatagcaataaaataaatgacaggtcaaaactatagcaacatagaacatagacaaggcagaacatgattaattgctgaattaatttgcctggcaccactagcaatggtttatgtacatttttttttgtttttgttttttgctgatttgattagcattggccttggaatagaagacagaaggtgcatttggggctttcattatgacctagtcttagagaatrcgttttagatgcgctggtttaggttggttcatgactagtcaactcttctgggccccagtttcctaatctgtaaaatggggtaatagaactacctggatggcaaggatgatccagattctacattttttttcttttttgagacaggatcttgctctgtcacccaggctgcagtgcagtggcacaattatagctcactgcagcctcgaacttctggggtacagtgatcctcccacctaacct

SEQ ID NO: 10513 - DNA, 655 bp, Homo sapiens
aatcaaatcagtaggtacttactgcatatttgtgtacctagaacttttataagcatgcctcattctagcccataaacttcctgttagatctttttggagaacctcagtttgctaacatagatagtatccacaatgccttcttgaaaaccaatttataaagcagatcctttaaacatagttcaggtttccctgatgctttaatttaggattatatactcaatgaaacatttagcatcaaataaatcagaacttcatagcaaagccatgacagcttattctctacaatcacataaatcataaaattatgcttcaaatcataggatatttaaagctaggaggagctttggaggtcatcctttattttatagaaaggaaaccagagccggttttaaccccttggctwatgctgcagtcgtttgggggaagaagttggaaccagaatgcgagtttgctggctacagtgtcggcctctttactccacttgctccctgtcagtacacacgtggattataaacaatactccaatgacaatgagcagtataaaactctgctctatcatgcattgaaacatatctaaagcaagcatgctacctcttaaatatattaattaaacacattaaacacttaattgacattaatttagagagcttttgag

SEQ ID NO: 10514 - DNA, 625 bp, Homo sapiens
tcacatctaggtatacattacctagagaaactcacacatgtgcataaggaaacagctccaagggtatctagggcagcaatgcttgaaatgcaaaaaagaggtcttggctggactctgtggctcacgcctgtaatcccagcactttggaggcccaggtgggaggattgcttgagcccaggagtttaagaccagcctgggcaacatagcaagaccctgtatctactaagaaaaaaaaatagccaagtggggtggtgtgtacctgtagacccagctacttgggaggctgaggtgggagaattgcttgagcccaggagtttgaggtttcagtgagctatgattgtgccactgcactatagcctgggcaaccaaacagaaaaaaaaagacagacctcaacctcaatatctgcaakaatagaataatgaataaaactatgatactgtgcagcagttaaactatgtgtaactggggagttttattttttataaattataccttagcaaagttgatatatgtgtacatacacatatggatacatcctgtattaacatgaataaatttcaaaaacaatgttgcaaaaaaaggaaattgcaaaataataccattaagtgaaactttaattttctt

SEQ ID NO: 10515 - DNA, 890 bp, Homo sapiens
ataaaaatgaatggtaaattagtgctaatttgatttatttttatttacttagaatgacatttaaaagtatatattcaaaatcccacaacaagatgagagggaccacaggaaaaagggaaaatgtttgtattttagtacctttartggcactttttcctgctttttgaacaattttcatttaacactggatctgcaaattatgtagctggtcctatctgcagcctagttccaccttgacttggagataatcatctttgcctctatacaatgttagaggtgaaattctaatcctgtagggggaaaacagttcccaatttctgactgtaggtaatttcaatctgattatctgtttacccaccagagaaaaaaaggaagaaacttaaaagtaaaaagcaaagaggtgcttgcatttagacaagcatcacaggggaggaaaaacaattctccttttacccttttgagttcttagctaggatgaacccctgtaataaaagacaggttaacaagataaaaacaaacagaagtttaagaacataacttcacgtatacataggagatacccagagacatgagcaaatttcaaagaggtggctttaagttcaggcttaaataccatcttcagctgaaacaaagaaaggagggtattgcaagggccagttagagggaggtgaccaggaaaagcatggtaaacaagtggaaggtttgttatccatatttgagtgcattcttcattgataagtctgacttagagtcatccttctttactcaatacagaagttcaccctcatgaatggagatttcctttctggatgtgaatttcccttacaaaagggaactcctaccctgtcttcagagcttctcctgtgtctgcagtttctcaaaataatcag

SEQ ID NO: 10516 - DNA, 599 bp, Homo sapiens
tgttaactccttccccttgccttgttctgagtgttctgtggaggagtggtgcagagtgcaatctaggggctggggacctggtccatgcacatggtctgtgcagccctagggggcgccactcacatctctgtgtatgttcccaacaggaacagggtaattgtaaggaaaaggcaggtatcttgtttctactttgggaaaacttacagtgataaaagaagaaaaagtgtgtgattcaaaagtgtttttctttatttcccataaattccctactattttcttgyattttattactttttttttttacaacccgtaggttttgacattttctattttctctggaaccttaaaagatgttcacaatgaacatgggctattcttcatatggtctaagatatctcccatctcatgaactcacattacttatgaaaacagatgatgtaagcattccaacctctccttgacttgccaatgttagtcatgtggggtcaagtgaaattaaaaaggccttggaaaccagagagtcctgggtttgaattctgattctgattctgtgacttcaaggatacatttttttcttttattaaaggagcatcatatga

SEQ ID NO: 10517 - DNA, 545 bp, Homo sapiens
aattcagggtgtttttagggcactgggaaggtgctaagtaaatgctatggaagtttaaaagaagaagagcaaaggaagatggcatgggttttggcagggggacttggaggcgtcttggaggcagaaggaggagtatatcaaacggggtcacaagagtgggacatgaatgttaggcaggtacttttggaatcatcatagagacgggcattgaattggcaggaatggaggagacggcacagagagaatccatgtggagcaaaaggcgggaagcagagtctggtggaagtatcagtggtgtgggcagaagcctggggcaagaggctayagtgtgagtgggttgagtggaaatagaaccaacaggtatagcccactttttcttaggaaatgtgggaaaaggagggttgagccaagggtctttgtttttctctgacatacaagagtcaatttaatggggtagacctgccacacgagtcctgctcaggtataagtctggtagttgcatgttcagcactgcccggtcctgagataataggagtatcttagca

SEQ ID NO: 10518 - DNA, 746 bp, Homo sapiens
gataaataaataactttgttctactgctgatcaaccaggcgtctcctcttgtgaatatgttctgaatgctttttgggcacttgggcacaagtgaatgaatgatatgctgaccacattcccctggcccattaggagctgccaatggataacaggagggagagcaaatgccaacaggaggtgtgttagggtcacagaggacacagaatgtgaccatttgkacttttatagggcgaaggtcagtgatagggcaatggataggaataagcgggggtgctgggaataagctatcagttcacagatggggtgagcgtcagggagggatgaaggcaccggggctagtgaagtctcaagggtagcatgaggttccaagctggggttagtgaagacgtggggacagaaagaagatcaaatatgggaagagagtcagagtcaggagaagatgcaggggtcgggggagggattagggatggagtgtgggcccaggaatggggatgaaaatgaggctgtgtgttgcactcattacttagtaataatagcagggttttaaggcagcatcaaaatatccccacccccatgtcaaaaatgccacatcaaaaccaacacatcaaactgtcatagtcacactggagtcacggtaatactttgaagccaccaaggaaattcttcaccctcacccctcttttattccatttcccaaagccccatgttcttcagacttataaaggcctgaaagaaggggtttgctc

SEQ ID NO: 10519 - DNA, 631 bp, Homo sapiens
attaaaaatgatcatgacagagctggagccagaagccagagaaacctgtatctttagactcaggcattaaaaagacacctgttttaaggtgaaagagagagtagagagagagaatgtggtaggtagaggagggtgggaaggcatctctattaagggcactgccagctggattatcagagtagcggacctgttctagaaaagcayggagccctgtgtacacagttggcaggcttctaaatatgctgatcaaactctgctggagattagattttggttcaaaaacatatgtttttgaggacaaagaaaacttttggccctccaaccttattgtctccatctttcgaagaagaataatatttaaaaactaacttgtcttaattagggcatttagaatgacaggactagcactgactcacttgggaattcataaccctacatataatcacttttggaatggagtgcatttatgccttcaaaaagttggcctcattttctgaagctgaaatccttttgatcataattacttctgacctaaaattacccacagtcaccatacaatgccacgctgggacaaaaaagaaatacatattgtaagtatctgataacagatataaactatcggccaacttaa

SEQ ID NO: 10520 - DNA, 777 bp, Homo sapiens
aaattagtgtgatttggaggagagggcaggggatacagagggtgagtgagtggggaaagagttacatttaactgaggacagtgagtggggtggagaatgcacatctgtgcaggggaagaagatacagacggaatatggtctatgggaaggaataggatggtcttgaaggcagaagcaaacccgagaaggttaatggctctcagtggagaaagcagacaagcctcattctgaaaacagattctgcctcagaaaggacgtgggttggtgacaatggcatgggttaaaaagcgggtcataggtatatatttaaatcagccccagttgtcagccaggctgcgaaagttatgaactccatcgttagttgcctttttgagtacttactgcatccccagcgctgtgcagttacctaatttgatccctgcaaaaatcctgatgcaaatgtcctcgagagacattccctgatcactctgtttaaaagggcaacttgtattccccaccctcccaagcactctctgtccctttctcctgctttattttttgacatagmacatatctgatatactgtataaattatatttaaaaaattttttttgtctccctcctcccagcagaattcatgctcaatgagagcaaggtgttttttttaacctttgtattctcagcacagtgcctgataagtaggcaattgataaatatttgtcagattaaaaagcaggaatgaaaagacaggaatcattattctcattttatatgtttttaaggaacccgaggcccagg

SEQ ID NO: 10521 - DNA, 556 bp, Homo sapiens
acttacaaaactcttactgtgtgtgcaaggaactgtaaagcattgggctttaatattaaaacagataaatgcctgctcccttatagcttttagccgttgtggtagagattatacaactaatttcataatttattacttaacaacaatagtacaacataaaatgtaggaattgaagttgttaggaaaaaaatgtaagggtttatgaaataatggagtatctaacccaatctggttcatcatttaaggcttctttgaacatagaacaattaaactaagcactgatgtatgaaagggaggcagttaggcaaattaagtggaggggagagtttgttcagggaatggaaaagatccagtgtcagggagttcagagaatgagagaaaggatggcttgagatgaaatggtaagatcagggattttacctttactctaaatgaaaagtcctttaaacaggagcttgaggtcaatctgtatttgtaacaaccgctcagactgcacttggggraatagtaaggtggagaagtaggaaggggaaaaaggtgactgaagaaaaactag

SEQ ID NO: 10522 - DNA, 552 bp, Homo sapiens
gtgttctcgaggaacctgtacctacactggctggctagcagcagcctaactgtaattggtaattgttacgaaccgttaagatgtatttcactaatcctaaatttactgtgtccacattatcaacttctcttagttggacctccaaaatgactttagccactttaatgccagcagagataaggggaagaactgtgacaaaagggccgtcagagtagaaagatgagaggtcttcaaaaacaaaaaaaaattgggctgagggaagaagccaaaacgtacaaataaaagctttaattcaagcaaactgtaaaaagacagtattcaggttattaggcaaagttaaatgaaaacttggcctatgtggcaaatatgtatgacatcacccacttttgattttttgttgttgttgagacaraatctttctttgttgcccaagtttagtgcagtggttcagtctccacctccattcactgcaacttctgcctccccagctcaagagatcctcctgactcagcctgctgagtagcaccatcatgcccagctaatttttgcgtg

SEQ ID NO: 10523 - DNA, 486 bp, Homo sapiens
ttttaaaatagtatgaaatatctactgtgaaggatcattgaaagattcagttggccatgtatgtagaacactgagtaagtgctttgtaaatagtaaatatatcattttatataaagaaaaatattgcattgcttatttcagttaacataatcactgagatgttaatgtacaaaartgtaatcataattattagaatagtataaaataaaatagtaaattttatgttacacaagtttcatgtcaataaaaagttttagccaaacaaatcagcataaagtatgaacttcagttaataataataataataataatgggccatactaacataagatgttaataatagggaaatcaagtgtggggtatatgggaattcattcacagaattttttggaaaagtaaaactatactaaattaaatttttttaaaagacaaaaaatttttaaaaacaaaattgaaaaacaaatgacaaagttggaaaaatctgca

SEQ ID NO: 10524 - DNA, 486 bp, Homo sapiens
ttttaaaatagtatgaaatatctactgtgaaggatcattgaaagattcagttggccatgtatgtagaacactgagtaagtgctttgtaaatagtaaatatatcattttatataaagaaaaatattgcattgcttatttcagttaacataatcactgagatgttaatgtacaaaagtgtaatcataattattaraatagtataaaataaaatagtaaattttatgttacacaagtttcatgtcaataaaaagttttagccaaacaaatcagcataaagtatgaacttcagttaataataataataataataatgggccatactaacataagatgttaataatagggaaatcaagtgtggggtatatgggaattcattcacagaattttttggaaaagtaaaactatactaaattaaatttttttaaaagacaaaaaatttttaaaaacaaaattgaaaaacaaatgacaaagttggaaaaatctgca

SEQ ID NO: 10525 - DNA, 486 bp, Homo sapiens
ttttaaaatagtatgaaatatctactgtgaaggatcattgaaagattcagttggccatgtatgtagaacactgagtaagtgctttgtaaatagtaaatatatcattttatataaagaaaaatattgcattgcttatttcagttaacataatcactgagatgttaatgtacaaaagtgtaatcataattattagaatagwataaaataaaatagtaaattttatgttacacaagtttcatgtcaataaaaagttttagccaaacaaatcagcataaagtatgaacttcagttaataataataataataataatgggccatactaacataagatgttaataatagggaaatcaagtgtggggtatatgggaattcattcacagaattttttggaaaagtaaaactatactaaattaaatttttttaaaagacaaaaaatttttaaaaacaaaattgaaaaacaaatgacaaagttggaaaaatctgca

SEQ ID NO: 10526 - DNA, 486 bp, Homo sapiens
ttttaaaatagtatgaaatatctactgtgaaggatcattgaaagattcagttggccatgtatgtagaacactgagtaagtgctttgtaaatagtaaatatatcattttatataaagaaaaatattgcattgcttatttcagttaacataatcactgagatgttaatgtacaaaagtgtaatcataattattagaatagtataraataaaatagtaaattttatgttacacaagtttcatgtcaataaaaagttttagccaaacaaatcagcataaagtatgaacttcagttaataataataataataataatgggccatactaacataagatgttaataatagggaaatcaagtgtggggtatatgggaattcattcacagaattttttggaaaagtaaaactatactaaattaaatttttttaaaagacaaaaaatttttaaaaacaaaattgaaaaacaaatgacaaagttggaaaaatctgca

SEQ ID NO: 10527 - DNA, 486 bp, Homo sapiens
ttttaaaatagtatgaaatatctactgtgaaggatcattgaaagattcagttggccatgtatgtagaacactgagtaagtgctttgtaaatagtaaatatatcattttatataaagaaaaatattgcattgcttatttcagttaacataatcactgagatgttaatgtacaaaagtgtaatcataattattagaatagtataawataaaatagtaaattttatgttacacaagtttcatgtcaataaaaagttttagccaaacaaatcagcataaagtatgaacttcagttaataataataataataataatgggccatactaacataagatgttaataatagggaaatcaagtgtggggtatatgggaattcattcacagaattttttggaaaagtaaaactatactaaattaaatttttttaaaagacaaaaaatttttaaaaacaaaattgaaaaacaaatgacaaagttggaaaaatctgca

SEQ ID NO: 10528 - DNA, 703 bp, Homo sapiens
gggggaaaattatctgaacacacaaatcatgtggttttagagtccaaaagtaaagcagatggcattaattgtctatattgaaagtaagtgtgtgtttaatatgctagaataggatttttaaaaacagttatatctttgtctgcagctcrtttttttttggcatatatctctaaaagtttctaatagaagctttgggatatatttttcaaaaaattattttcagcttaaaaaatgtattttctggcagatgcagaactcacattaaattctaaaaagttgaggggagggtgattgtgttttctcaagatctgtgacttgttacttaacaaagaacccattgtaaaatttccaaaaacatcgtagcaatctaagacagaaagaaagtatggcacatagcaatgatcccaatttttaggagcatcgagaattagaagacaaattatataataaagtgtattgattacctagggctgctataacaaattaccataaatttggtggcttgaaacaacaatttattctttcacagttctgaagtccagaagtaaaaaaaaaaaaaaaaaaaatcgaagtgttggacaggtgggtacctttatggaggctctgagggagaatctgtgccatgcccgtctaccagcttctagtggctatcagcagtccttagtgctctttgacttgtagacataacaatagtctctggctc

SEQ ID NO: 10529 - DNA, 525 bp, Homo sapiens
ctaaaataggaagtgcaaaaaatgcccctggtgaagctcttctgctatcaagtgaagaagattcatcttagtatttccaaagctctgacctgaacatactatgatgtgaaaaatttcctccttgggtttttagggtcttctctaacaatcaataaccacctaatttttatactcttcaaccaaytgctgttcattcagataatatgtaagttttattgctaaaacagggtgtcctgtgcaaatttctgactgattgtctgcactaatggagaatagcagtaaaaatttttcaggccgggtgtggtggctcacgcctgtaatcccaacactttgggaggctggggaggggggatcacgaggtcaggagttcgagaccagtctgaccaacatggtgaaaacccgtctctactaaaaatacaaaaattagccaggcatggtggtgcacacctgtaatcccagctactcaggaggctgaggcaggagaattgcttgaacccaggaggcggaggttgcagtgagctgaga

SEQ ID NO: 10530 - DNA, 525 bp, Homo sapiens
ctaaaataggaagtgcaaaaaatgcccctggtgaagctcttctgctatcaagtgaagaagattcatcttagtatttccaaagctctgacctgaacatactatgatgtgaaaaatttcctccttgggtttttagggtcttctctaacaatcaataaccacctaatttttatactcttcaaccaactgctgttcattcagataatatgtaagttttattgctaaaacagggtgtcctgtgcaaatttctgactgattgtctgcactaatggagaatagcagtaaaaatttttcaggccgggtgyggtggctcacgcctgtaatcccaacactttgggaggctggggaggggggatcacgaggtcaggagttcgagaccagtctgaccaacatggtgaaaacccgtctctactaaaaatacaaaaattagccaggcatggtggtgcacacctgtaatcccagctactcaggaggctgaggcaggagaattgcttgaacccaggaggcggaggttgcagtgagctgaga

SEQ ID NO: 10531 - DNA, 2308 bp, Homo sapiens
gttttgattaaaaagcaaacaaacctgcaagaaaaatattaacttcaactgtgttgggagataataaattcctgaaattggtgtctttgtgggtatgttgattgcctgaatgcataagttctgcatgctctgtttatgtgtaactcttcggaaggtaacgacaacccgaagaataaaattgaaataacatcctctatgcactcaatgcccatggaattcatgttcaatgttgaagacagtgctaaaaatttccatatttactattatttgaaaagggaggaattttcctgttttgaagtatggtctatgcgttgcttaacaatggcaatacattatgagaaatgtgttgttaggtgattttgtcgtggtgcagacaccatagggtatacttacatgaacctagatggtatagcctattatgcacctaggctatatgatatagcctactgctcccaggctgcaaacttgtacaggatgttagtctactgaataccataggcaattgtaacacagtggtgagtatttgtgtgtctaaacatatgtaaacatagaaatggtacagtaaaaatacagtactataatattctgggaccaccattgtmtatgtggtccgttaactgaaatgtcattacgcagcacatgcctgtaattggcttttgtcttaccaacgacaaggaaaaataatacagcaggtaattaaatggtgatgggagtgttggatttgaaactccacacagctttatataagctaatatccctgtaactgcctgagtgatggatatgctgtgctggtccccagctgccataacaggggatcctgagctgggctatgtggaactcagttgctttctaagagaagctgtaggccaaagcacagcacatctgtttttccttttcttcttcaaatgtcagcattctaaagcaatctcatccagatcaagttataattaacaaattgatgacattagaaagatgatctccaaagttacaatattgagactcagtagatcattaactaagatgtgaatacatacttttcttttctccatccaaaataaatgatgcattaagttttaaaaatttggggtgagtagagggagaaaacaaggatctatttataagctagagaaaacaattgtcagaaaacattgcaatagtttggtttggcaaagagaacataatgagcaataattccacctttctggcacatggaacttaatgtgtttgtgtgtgttttcctttactatttctctctgtagttcatccaactcccttccctcattccgtcccctttttcttctttccttcttccctttcatctctctgtctttgtctgtctgtcttctatctatccatatctgtctgtctcttatctatccatctacctcttctgtcggtctatcatctatctatcttccatatttatctttatttgtttatttatctttatctatttgtctatgtgtaactcaggacttgttaggacttcttctatatctatctgtctgtctatgttcatctatctatctctattatctatctgtctgtctatctatctatctatccatctatctatctatctatctatctatctatctatctatctatctatctactctatctggagagtagttgagcagttacagataatgctttttgtaacacaatatcaatcttgctgtattttatcagtaattgctgttcatttaatgcctcttccacagggatgtagaagaactcatagaagcaactatgaatccaggtaggattagtgttactgttggatggtatctatcttccatgaagataactttgttgcctcatggtggaaagttctatctgtgtctccaaaaacattatcagcagtttaagctaaatattcaggaccattctctcgtcctcaaaaataatgagcagtaatttgatattgtagaaaaattactggacttggaacaagaagaccagagttctggtctagctatattggttaactgttgctgtataacatattaacatatcataccaaaacttagtggcttaaaacaataataaacatctattatcttacacagtctctgtggtcaggaattcgggaatggtttgtctggatggctctgccttgaattagtttgctagggctgctataagaaagcatagcaaatggggtggctaaaacaacaaaaatgtattgtctcatagttcttgaagctagatgttcaaatttaaggtgttagtagggccgagatcactctaaaacctataggggagagctttcttgcctctttgaacttctagtggttgctgaaaa

SEQ ID NO: 10532 - DNA, 566 bp, Homo sapiens
gacaagttgtaagctattattcatttctactatgacattcagactgtgaattacatctttgcccaaggcccaaggatagcaaatggacctgtgctgcctccacctccacccattcccaagaagccactattcctttattgtagggctctttttcactgagcccacgggccaattgacacccttggaggataagaatccctgtctcccaacctcatgtcctactcttctggtctcaagaaatttccacrctccctgtccagctagtctatcaaaagggtctctcctctctcttgcggtaaggcactgtgtgctcctggcatttttccacggaatttttttcatacaaatattctacatggtggtaaggtcttaggtcactgttaatgcttagtggcactgcacttacctttgggttaagtgaggttttgtggacttctctggtgactcaagaacctttgtgtaattttggttttttggaagatatgttctgcatttcaaactctctacaaatcaacgtatcctgcaggtcttatgggcagggaaaagggaggtggtgagctccctga

SEQ ID NO: 10533 - DNA, 566 bp, Homo sapiens
gacaagttgtaagctattattcatttctactatgacattcagactgtgaattacatctttgcccaaggcccaaggatagcaaatggacctgtgctgcctccacctccacccattcccaagaagccactattcctttattgtagggctctttttcactgagcccacgggccaattgacacccttggaggataagaatccctgtctcccaacctcatgtcctactcttctggtctcaagaaatttccacactccctgtccagctagtctatcaaaagggtctctcctctctcttgcggtaaggcactgtgtgctcctggcatttttccacggaatttttttcatayaaatattctacatggtggtaaggtcttaggtcactgttaatgcttagtggcactgcacttacctttgggttaagtgaggttttgtggacttctctggtgactcaagaacctttgtgtaattttggttttttggaagatatgttctgcatttcaaactctctacaaatcaacgtatcctgcaggtcttatgggcagggaaaagggaggtggtgagctccctga

SEQ ID NO: 10534 - DNA, 566 bp, Homo sapiens
gacaagttgtaagctattattcatttctactatgacattcagactgtgaattacatctttgcccaaggcccaaggatagcaaatggacctgtgctgcctccacctccacccattcccaagaagccactattcctttattgtagggctctttttcactgagcccacgggccaattgacacccttggaggataagaatccctgtctcccaacctcatgtcctactcttctggtctcaagaaatttccacactccctgtccagctagtctatcaaaagggtctctcctctctcttgcggtaaggcactgtgtgctcctggcatttttccacggaatttttttcatacaaatattctacatggtggtaaggtcttaggtcactgttaatgcttagtggcactgcacttacctttgggttaagtgaggttttstggacttctctggtgactcaagaacctttgtgtaattttggttttttggaagatatgttctgcatttcaaactctctacaaatcaacgtatcctgcaggtcttatgggcagggaaaagggaggtggtgagctccctga

SEQ ID NO: 10535 - DNA, 1395 bp, Homo sapiens
atgagttagaatgatcacacttctcctgagcaatataggttaagttctacaagatagtatttaatgtcacttaaaattgtaaccacaagttactgcatgcataatcttgtcaacagtccaaaagttactaaccttttctaagggaatacatatgttttcatayatatgttcatcctgtataatttgtaatatcagtggatggataagaaataaaaaatacttatgtttatttcatgtctggagaatctgtgttaacatctgaattttactggtacgttggtttaataaaaatttcaatgtatgacattttttctgtgctaaggcaaactttttcaaacaatattgacaacataggcatatgtagacaaaacaaaaagagtcttctgctaagcaataccaaaatctacccttgcaatgcaactggtaaacatacagcaaaaatgacttcctttcagccctctcgaagatattcttaattacacgtttaagctctctgcaacttcaccatttcatttcttgcctagacctcaaaaatcatcaaagagtaagtgatgttttgcaaatcgaacatagaaaatgaaagcatgttacataaaatcaaactgccttgcagcgaactgttttggaaaggtaaacttcctatctttcatattaaaatacttaaccagtctctgacttgctgtgaaaatgcatgcttggcaaaaatgtctgagacaggcttctgagatttatgagatgactcataccttctacatatatataaaaacattgatcttgttattacactttgatgcactttgcacacagctgagagacagtgttgtttaatttgttagaatacagaatctgtagctaacttgatgaagctcaactcccccactacctacttgtgtgaacttgaacaaatttcttgccatctctaaatcttaatttctcttagcatttttttgtttaatggagaaaaattataatatgatttatctcctaaggctattataaagaatacaagattatttattgaatcttaacaaagtgtccaactgtaagtgctcagtaaatgtttgttgaaaggaataaaaggagagaattggagagaaggaagggagaaaaaggaaattggggcttcagctttctaagtttaagcataaccagagtttataagaggttggagaaaggattgtttataaggggtggaatcctaagaaacagtaggcaaacacaaaatgactatctaaatatttcatactctcataaaaattacacagctcctgtaaagtattttacttctccttcacttatgaagcttagtttggctggatatgaaattctgtgttgaaaattctttcctttaagaatgttgaatattagcccccactctcttctggcttgtagagt

SEQ ID NO: 10536 - DNA, 567 bp, Homo sapiens
cataaaaaaggatgagttcatgtcctttgtagggacatggatgaagctggaaaccatcattctcagcaaactatcacaaggacaaaaaaccaaacaccgcatgttctcactcataggtgggaattgaacaatgagaacacatggacacagaaaggggaacatcacacaccggggcctgttgtggggtggggggagcggggagggatagcattaggagatatacctaacgttaaatgacgagttaatgggtgcagcaccaacatggcacatgtatacatatgtaacaaacctgcaygttgtgcacatgtaccctgaaacttaaagtataataaaaaaaaattacacagctccaccatgaagttttagctgctggatgattaaagcttttaaaactttgttttgttgatggagtttttttcatttaataagcaggtctaggagatcctaattaattttgaacttgtagaaagtaagcaggaaagggtggggctacatttaaaaagaacacagctaacaccatgctaaatttttcctttggcggacaaaattataacaatatgtttggca

SEQ ID NO: 10537 - DNA, 567 bp, Homo sapiens
cataaaaaaggatgagttcatgtcctttgtagggacatggatgaagctggaaaccatcattctcagcaaactatcacaaggacaaaaaaccaaacaccgcatgttctcactcataggtgggaattgaacaatgagaacacatggacacagaaaggggaacatcacacaccggggcctgttgtggggtggggggagcggggagggatagcattaggagatatacctaacgttaaatgacgagttaatgggtgcagcaccaacatggcacatgtatacatatgtaacaaacctgcacgttgtgcacatgtaccctgaaacttaaagtataataaaaaaaaattacacagctccaccatgaagttttagctgctggatgattaaagcttttaaaactttgttttgttgatggagtttttttcatttaataagcaggtctaggagatcctaattaattttgaacttgtagaaagtragcaggaaagggtggggctacatttaaaaagaacacagctaacaccatgctaaatttttcctttggcggacaaaattataacaatatgtttggca

SEQ ID NO: 10538 - DNA, 567 bp, Homo sapiens
cataaaaaaggatgagttcatgtcctttgtagggacatggatgaagctggaaaccatcattctcagcaaactatcacaaggacaaaaaaccaaacaccgcatgttctcactcataggtgggaattgaacaatgagaacacatggacacagaaaggggaacatcacacaccggggcctgttgtggggtggggggagcggggagggatagcattaggagatatacctaacgttaaatgacgagttaatgggtgcagcaccaacatggcacatgtatacatatgtaacaaacctgcacgttgtgcacatgtaccctgaaacttaaagtataataaaaaaaaattacacagctccaccatgaagttttagctgctggatgattaaagcttttaaaactttgttttgttgatggagtttttttcatttaataagcaggtctaggagatcctaattaattttgaacttgtagaaagtaagcaggaaagggtggggctacatttaaaaagaacacasctaacaccatgctaaatttttcctttggcggacaaaattataacaatatgtttggca

SEQ ID NO: 10539 - DNA, 519 bp, Homo sapiens
agatcaggagtcaggagcctcactctgaacaaattagtacagggacataaaactatagctgctgcaagcagaggtcaggaaggcattgctgttgctgccacaactgcttctagacacttacaaggccaagtctgacagccacaggcacctgaaaatactcatttctgcagccatcttcaccaacaagaatagcagcaagaagatggcctttgccttaactttattcaaatctcattcaagtgcatctaattgtcagaacatcatttacatctagaaccctagctgcaaaggagtcaggaaagttgatttttaaccctcaagcccctgtggcacagtacgacacattgaaaaaggtgaaaatggatgctgagcgataactgaygatatccgacacattactcctggctgccatctctaccaccaatggaatgtggctttagtaccattgccacagccatggggatggtctggcacagagtttgtggcaattttaatccccataaggtaagtaacgtgggt

SEQ ID NO: 10540 - DNA, 542 bp, Homo sapiens
tagttcttactgtgtctgtctgcttacacttacctgatcagcaaaastaactataccctgtatctcaaatgattctcatactgaaataaacaaataaaaattcagaagtgagaaagtggaaaagccagatcttttttttaatgttttttgtattttactaagcagatttatgactgaaagaaaaacattttaagcattttatcctcctctgttttaaataactattgtgggttttttttttttcagaaaattatttaaatacactggcggtagttaaaataacttggttttgattcatatattaatagttaaagtaaatattttgaactttcccatgaataagtacaatttagttagtcaagactttattattttatgaattatataaaaatattgttctctttcattcatgaagggaaggagaatctggtcatctagttggccagtgcatataatccactcagctgatgtagatatctgagtgtttatgtcaggcaaatgtgctccaggaggctgggataaagccacggatgtggcctcca

SEQ ID NO: 10541 - DNA, 346 bp, Homo sapiens
tttacttatcactactcaagtcataattacacaactcaagtacattatcatctctatctagagctttgtccagggaaaaagagattctcagaaaacaggactcacctgtgcttcaccayatcttgacaacattattattttacccacacaggggttaatatgtgttctggaaactgaccatattctttataagtaatccacaaaaaactgagacaaggaaggttcagaaatatatttctgaatattgcccttcccatatggccctgcttcggttcatataactccatgttatatgtttccagcagaatcttttgttttaagaccttccactgcaacaaggcaattt

SEQ ID NO: 10542 - DNA, 346 bp, Homo sapiens
tttacttatcactactcaagtcataattacacaactcaagtacattatcatctctatctagagctttgtccagggaaaaagagattctcagaaaacaggactcacctgtgcttcaccacatcttgacaacattattattttacccacacaggggttaatatgtgttctggaaactgaccatattctttataagtaatccacaaaaaactgagacaaggaaggttcagaaatatatttctgaatattgcccttcccatatggccctgcttcggttcatataactccatgttatatgtttccagcagaatcttytgttttaagaccttccactgcaacaaggcaattt

SEQ ID NO: 10543 - DNA, 593 bp, Homo sapiens
tggagcaaatagtcttattgaaaaacaaataagcagtgatttagagcagtggtgtaagtgtgtctttgtgttttatttacaagagagcagaactcctgtttggtgttaaggtgcacacttgttccattctttttttttcttttttttgagatggagttttgcttttgtcgcccaggctggagtgcaatggcgccatctcagctcgctgcaacctccgcctctctggttcaagagattctcgtgcctcagcctcctgaatagctgggattacaggcgtctgccaccacacccggctaatttttgtattttatagagatggggtttcaycatgttggccaggctggtattgaaccgctgacctcaggtgatctgcttgccttggcctcccaaactgccgcttgagccactgcacccggccccttgttccctttttgtttcccagttgtcttgtacaggtagctctttgtgtcagggttttccagttttctgactaaaaattcttcctcttaataaaaagtttggctaaggagcatgacgctaaggatgatgaggtgctgtcttgaagttgcctcttgaaggctgatcgtattaac

SEQ ID NO: 10544 - DNA, 514 bp, Homo sapiens
ctctctctctctctctctctctctctctctttctcagttcccttatgaaataagggcacacaggtaataaacaaagcactataaaagatcagattgaggtattctgtgggctcattcaatgtctggagcaagctttctgcactccactgccggtgctttctggcttcaaaagcagcttcgagactgaggaatagtagacaggattagaataaggcccgggagttctacaactctgctgaattcaaaaggaccatgatcttggtcagctaaaccacacccgatggccaaggggcagaggaaaagatggcagagtagagactcttggacttactcatttggattttggagttttacctgacttggtcaagcctcatgccagatccaggtgagtagctgcctgggctaaaaagctgtcagtcgaatctcgtttctgccaaccttgacagatgattcactgtgatccttatttcttctctttttgcctcgatgtaggcacyaggggtgacttgcaatc

SEQ ID NO: 10545 - DNA, 553 bp, Homo sapiens
ggtgctagaaagatattgtgttattgtctgtcctcacatcaacctgggtatagcaatcaaagatacctgcaagtaagagtggtctgctcttagaagaccagaggctagtttctctgaggtgttttggttctgttgagcataggacaaccaaagaattgagtgctggtgatctagatgaagagaaatggcataactgcctaagacatttaccaagtggaaattatggaggattctcagacacatatgtaatatgaacaaaatgtgaggtaaaattgagtcagctatcaagagccacgagactttgagaaagctgaaaaacattttcattcaagtgttttattgctgtgtaagaaaccacgccaaaacttaccagcttattttctcacaattttgtgtgttaggaattcaggaagggtaaaatggagcatctcatctctattccaagctgcttgggacctctcctgaggtagcttacactgacagctgctagctgggattgctaaatttaggtcmtatgtctgagttctcattctagctctcaactatgtttctc

SEQ ID NO: 10546 - DNA, 538 bp, Homo sapiens
atagtgttgtgggacaatcaaagaatggagagaccaaaaaacgttcaggagggtttattaaattaaggtgatcactgactcagccagacatatgtccagaaagtctgagcctcaaacaaagtgcttttcctacttttaaacatcttaaggtgggaactacatgaggcaagaagcaagttacagaagcaagaaacataggcagcattacaacatttcttacatcttgagagaaayatgtcttgcaacctaaacttatcggtcttgtgaccctgcaacagtgcaggaactcactgggcctgtaataaacattgaggaatgtggagctggggagtataaataaggtccactgtccacagagagaagacaggctgttagtattctcttttaacttgagtgtaagttgggggtcacatttgcagcaacttcaagaggattttaaaatttctattactactactattatgttatagttgatttcattaattccttcttcattactcctttttggtgctcaacacaaatgtaaattagtaaagag

SEQ ID NO: 10547 - DNA, 547 bp, Homo sapiens
agttgagctgggtgggttggctgaacctctctaccttggtatggtctgtttctgagtgggggtttgggctcatctgtctttaggctgcaccaagggctgtgactacacgctagcattgatgattgaaaacattttaataatttgccataaatatccaagacaataggtagttttctgattctaatagattatgttctgagcataggccatctgtcacctaatgaaatctgaggtcaattatagagaatttttcctccatttgatgggacccataaaatttaggtcactctcaagcaccagcaccaaccttaacagagagcacatatcaaaagatacagatgtcttttgtttgccacatatcatatgagaaaatatacttgaaattgtaggatgatgtaaatgggtatgttcagtataggtctacatttgatccagcaatcccactacggggtatctacccagaggaaaaaaagtcattatacgaaaaagatacytgcacacacatgtttatagcagcacatttcgtaattgcaaaaatgtggaacca

SEQ ID NO: 10548 - DNA, 573 bp, Homo sapiens
gctattataactacattaggagtggggtatagaagaattgtgtgtggatgaggtgtgaattgtaagatggctaaatctttatcatctattgtagtaaataatatttaaagtcaaaaaacaaaaacatggcagtataatcatatcctttaggaaaatgaaagtgaatactataataaatggygaagatttgaaagtggttccctctgggaacaggaatgtataggtgaatgggagagaagaaatggagaatgggtgctttcattgtgatactcaggtgatggtctgaggatcatgcagaagaagtattaatgtagcattctcctgacttccatatcaaatacaggcactccttgacttaaggtgggattaagtctgaacaaactgatattttcaacttataattggtttatcctgatgtagccccattgtaaattgagaagcatactgaatgcttataacttttgcaccatcctaacgtcaaaacctctgaagttgaaccatagtaaatcggggaccatctgcgtctccactcacgcacactacagctcctttgtaggccaattcccctacacc

SEQ ID NO: 10549 - DNA, 553 bp, Homo sapiens
atagcactgtaggatgactttagttaacaataatatagtacatagttagaatatacaaatagctataaggaggatattgaaggttctcaacacatagaagtcgtaactgttggagataatgtatatgctgagttccctgatctgatcattacattatatgtattgcaacatcactgtgctatacatgatcatagccaaaaggctgagaatagatgcaacagcactatgtrccccaggggatatgttcaattattatgggtcaattttaaaaattaataaaaaataaatttagttgttctgctgtatgatcttggataagagcagagtgggattttgaagtcagatacacttgtttttgaatcccaacactgtgactttaagaatttactcacttctgcatctctcatttctgatagaaaatagagacaatgagaatccctaccttaacagatattaagatggttaactgggcagcaaaatggcatatccggtatagtgcctggcaccaacaataatagcttccttcccactttgggacagcacagagtacatg

SEQ ID NO: 10550 - DNA, 553 bp, Homo sapiens
atagcactgtaggatgactttagttaacaataatatagtacatagttagaatatacaaatagctataaggaggatattgaaggttctcaacacatagaagtcgtaactgttggagataatgtatatgctgagttccctgatctgatcattacattatatgtattgcaacatcactgtgctatacatgatcatagccaaaaggctgagaatagatgcaacagcactatgtaccccaggggatatgttcaattattatgggtcaattttaaaaattaataaaaaataaatttagttgttctgctgtatgatcttggataagagcagagtgggattttgaagtcagatacacttgtttttgaatcccaacactgtgactttaagaatttactcacttctgcatctctcatttctgatagaaaatagagacaatgagaatccctaccttaacagatattargatggttaactgggcagcaaaatggcatatccggtatagtgcctggcaccaacaataatagcttccttcccactttgggacagcacagagtacatg

SEQ ID NO: 10551 - DNA, 838 bp, Homo sapiens
tctgtctcctgggttcaagtgattctcttgcctcagccttctgaacagctgagattacaggcacccgccaccacgccaggctaaattttttttgtatttttagtacagacggggtttcaccatgttggccaggctggtcttgaactcctgacctcaggtgatctgcctgcctcggcctcccaaagtgctgggattacaggtgtgagccccygtgcccggcctgagatccaatggttttataaggggcttttcccccttttgctcgacacttctccttgctgccaccatgtgaagaaggatgtgtttgcttctccttctgccatgactgtcagtttcctgaggcctcctcagccctgtggaactgtgagtcaattaaacctctttcctttataaattacccagtctcaggcatatcagcagcataagagctaatacaatacccctatcaaaagagagtgatcctcatactctcaggtaattgtttactcactagtctcccttactaggctccaagttccttaaggatagaaactgccttttatttctgcatcctcagaatcctgcatagtgctaggaatatccaagattaaaatataatgtttcttgaatgatgaatgctccagtgttactcagtgggtcttccttacacctaacagaagaatagaggccagccaccaaatttcttaaatatgatgttgtcaggacttccatatagtttatccagtcaccacctttcctcttaggatgctgtctccacttttatttttccttctaaaagtaactgaatcagttaggatgtgtcctgtttcaagcagcaaaaaaccaaccgtcaaaagat

SEQ ID NO: 10552 - DNA, 838 bp, Homo sapiens
tctgtctcctgggttcaagtgattctcttgcctcagccttctgaacagctgagattacaggcacccgccaccacgccaggctaaattttttttgtatttttagtacagacggggtttcaccatgttggccaggctggtcttgaactcctgacctcaggtgatctgcctgcctcggcctcccaaagtgctgggattacaggtgtgagcccccgtgcccggcctgagatccaatggttttataaggggcttttcccccttttgctcgacacttctccttgctgccaccatgtgaagaaggatgtgtttgcttctccttctgccatgactgtcagtttcctgaggcctcctcagccctgtggaactgtgagtcaattaaacctctttcctttataaattacccagtctcaggcatatcagcagcataagagctaatrcaatacccctatcaaaagagagtgatcctcatactctcaggtaattgtttactcactagtctcccttactaggctccaagttccttaaggatagaaactgccttttatttctgcatcctcagaatcctgcatagtgctaggaatatccaagattaaaatataatgtttcttgaatgatgaatgctccagtgttactcagtgggtcttccttacacctaacagaagaatagaggccagccaccaaatttcttaaatatgatgttgtcaggacttccatatagtttatccagtcaccacctttcctcttaggatgctgtctccacttttatttttccttctaaaagtaactgaatcagttaggatgtgtcctgtttcaagcagcaaaaaaccaaccgtcaaaagat

SEQ ID NO: 10553 - DNA, 562 bp, Homo sapiens
ctggtgggaaataaaggatcaaagctacttccttgctttgactgtatcactacattgcaacactgaattaaagagaagccttgagaaagacattatcaggatcactcagaataacatgcttaaggttaagtaccttaacagaaataaggcttccataaacattaacagaataacatcctgaaggttaagtcttagctgaaatgtggcttccataaacaaccctagaaaaacatgtggccaggcgtggtggctcacgcctgtagtccgggcattttgggaggcctaggtgggcagatcacttgagcccaggagttcgagaccagcctgggcaacatgatgaaaccctgtctctataaaaaataccaaaaaaattagccgggcrtggtgatgcacgcctgtagtcccagatacctgggaggctgaggtgggagaattgcttgagcctaggaagtcgaggctgcagtgagccaagactgcactccaacttgggtgacagagcaaaactctgtctcagaaaaaaaaaaaatccaatggccaactttttttcacgccttcactcaat

SEQ ID NO: 10554 - DNA, 1391 bp, Homo sapiens
gatacaatcatggctcattgcaacctctgcctctctggcttaagcaatcctcctacctcagcctcccaagtagctgggactacaggtgtgcaccaccacacttggtgttgctaatttttaaattttggtatatataaggtctcactgatattgcccagactggtcttgaacgtctaggctcatgtgatccccctgcytcagcctcccaaagtgccggggttagaggtgtgagccactgtgtctagccatttaaaaaaaaatacttatttttcctttttattttttaagagatggggtctcactgtgttgcccaggtcaatctcaaactcttggcctcaagagatcctcctgcctcagcctcccaaagtgctaggattatagacatgagccactgcatgcaacctcagctcttcttacgtcttgatcccgctcactttcatattagaactagacattggctctctgagtctctagcttgctggctgctgatcttgggacttctcgggctccataattacatgagccaatttttaataataaatttctttgtgtgtgtgtgtgtgtgtgtgtgtgtgtgtgtgtatctcctgtgggttctatttccctggtgaactctgactaatactgttccccaaaaatgggaggaaaaaatgatgatttacccaaaatcttgacttctgaagaaggtgaaaaagatattcaagaaatattcagcattcttacctgaaacatgaatcctgaagggatcctgaagggatccatgtttcttcatggatttcttgtttcgcttgttttgtttaatatagagcaactttagccaataaaattgctatgccatttcttcaactacatctatagatatggtttatagcagaggttgcaaatgatagctttgggttggtgttgccctaaagatgtgttctgtttggcccacattataggctttctttccctccctacacacactgtatttttgcagttgcttttaacatgctgggtctaaagcattgttaaatttacatttaaaaagccaagagattgtgcataaaaatcctatgtttttgctttaaaaacaaagatctggtaacacttggctcctaaatggacacaatcagtgaaggctaagtagcagctgtcttttccattcctatatctgttgttagctcactttagtccccacccttcccaaatgtctccctgatgctggagctgagggtcagtgccatttgttatcagggttttgctgcccagatcaattatcgaataattcagaatatctttggaatgaagacattgcttcaatctattatcatttcttagctactaactataatcctggaacaacgttaggaggtggcaatgcaaagacaaatttgatgtggcttttaccc

SEQ ID NO: 10555 - DNA, 531 bp, Homo sapiens
ttgcctatgaccttgtcacaagtacctgtacagatgaccctgagcttagagattgtaatactggcttcccataccctctaatgtggaagggattcagaagggcaatgtgtcatgccaaagagaaggtcactraggactcagtgggccagcagttgcctgacattgagctgcagacagagcagaggcaggaagctttatgagaagcaaagctcacgacaggaggtccatgtatggctgtgcaggttgggccctgtgccaaagaccccactgaaagggtttgcggacacaacattctgcatccagaatcactcgctttggtggatagcagtgtctacctgcaggggaaatctcttcccagttctgacaaatgtccaaatgccccacataggctattggtggtcctgattccaggtcagtggcaggtactgacgtcttcacaaactcagtgggaacagcctccatcacgatcaaaatcaggactgagagaggctgattctctgagagaagtggaataagatgatgacatgaaaa

SEQ ID NO: 10556 - DNA, 531 bp, Homo sapiens
ttgcctatgaccttgtcacaagtacctgtacagatgaccctgagcttagagattgtaatactggcttcccataccctctaatgtggaagggattcagaagggcaatgtgtcatgccaaagagaaggtcactaaggactcagtgggccagcagttgcctgacattgagctgcmgacagagcagaggcaggaagctttatgagaagcaaagctcacgacaggaggtccatgtatggctgtgcaggttgggccctgtgccaaagaccccactgaaagggtttgcggacacaacattctgcatccagaatcactcgctttggtggatagcagtgtctacctgcaggggaaatctcttcccagttctgacaaatgtccaaatgccccacataggctattggtggtcctgattccaggtcagtggcaggtactgacgtcttcacaaactcagtgggaacagcctccatcacgatcaaaatcaggactgagagaggctgattctctgagagaagtggaataagatgatgacatgaaaa

SEQ ID NO: 10557 - DNA, 527 bp, Homo sapiens
cactcaaaaacagcttctatttctctgtactctatgtctttgagtttggagagaaagaagtagtagaaaaaagcagctttgagctggctcctacaactctatccagcctttcaggaatttatggcactttcttgatgagattaccacatgtaccgctcatagattttgaaacttaaatttcactgtgggggtattttaagcctacttggactaaatagtcattctgctatactgtgggctcacagggggaaaactgtactgcaagatacccagccctaggtgtagggagaataaacatctgtgtraaagagagatgaaaaatcaccctcgatggattgttatggaacctacaatttcattaacatcctttttaaaggcctccttgagaatacaagtgtttgcatctcaattaaataggcataaccattttttaaattgtgaatcacaaaaatttatgtatctcataattcagtgctcgtgatagcattaaattagtggaaattaatagggaagtggtcacaagcagg

SEQ ID NO: 10558 - DNA, 681 bp, Homo sapiens
tttctgcaattatccatgccaatcatcatgagagttgcatggtacaatggagagtgcactggacttgggaaacctggggtccacttctcactgtgtggccttggaaaagtcacttcccctagtttcctcatctgtaacatgatgataatgctgcctgcctacctacctgtcaaggctgtggtgagactcaaaaaraccaatgtatagaagcgatttctcttcctgagtcacctgcccttttctatctctcccctcccacatccccaagtctagcattttctgtacttttatatatgcctgtgtctctttttcacttcaattcaggtgtggctttcctaatctgctgtgaagatactctttcaaaatgagtcttctgcaagagtatccccttctctaaagaggatttcatgcttccaccccagactcaaaggcttctccactgaagctggcaccacatgcacaggtagcactttccaggatgagtaatcagacctacatccttaaggctctgcgagaccaaatgcagtgggcacaagtagcctcccacttgggacaaacccaagtttgtcggggccatatatggctttccaagactttgcccaaggaagcactggcatgtatattcctgagggcaggactgctggtctcttttgcaagctgctagatctttaactcctagaa

SEQ ID NO: 10559 - DNA, 1380 bp, Homo sapiens
ggggttctgtattgacatccttaagaaaatttctaaatctgtgaagttcacctatgacctttacctggttaccaatggcaagcatgggaagaaaatcaatggaacctggaatggtatgattggagaggtgagtgtccacaagggctgtttccatttccattttcatttattttccttcttctaaatataagtttaaaacrtgctcactttatgcatttcagaaaatataaaatggcaaataagatgtattgttcccactatacaaagaaaaccactgataggctgtattttccttgtggtggtcccttgccctcctgaatgttttaattggagcatcgcgcctttcttttaggtggtcatgaagagggcctacatggcagtgggctcactcaccatcaatgaggaacgatcggaggtggtcgacttctctgtgcccttcatagagacaggcatcagtgtcatggtgtcacgcagcaatgggactgtctcaccttctgccttcttaggtaaatgatgggtttgctggtggaaggaaatggacgtatggatggggaagtgaaataaggaaaaaaggagcacatggccaggctgttccagctagaaggtggtttgctaggagctcaactcagccagggacttcacttaggggacttcaaaatcaattactctcaaacatgaaagctgatgaacacccagaaaaataggaaagcataatgccatctaagaaagtagtactgggctggtcctcagagggcttactgtagtcccattcctgccatttagtcagcatgtgaccttgagcaaatttgctgtatctggggacttggtttcctcatccataggagaagtcatttcaaccaggctgatctctgagactgcttcttgccataataatttctaattctggatatcattgaaatatctatttatttttaattatctgcaagaattgcgctcagagctaccaaaaaagattttttgtttccacgcaaattttctgaggctttgccagatagagctgatctgattcttcctcccaccccactgcacccctccccataccattctctccagcatcacttaaatgtcaaaaatctcagacgtgatataagactgggtgagatgaggccaagatttcaattagatgaggtcttttgtgagctcataccccatattttttgcaggggccatggaatgaggggttggaaaataaaacgtcaccttgaaaacagaacactgggctagcagaaaggagactgggtttggcataaacaagctgtaagcccctggacgagtcaccgtctctctaaggcacatcaacattttttaaatggggctattacagtagacagtgactaacatttctttaagctctaacca

SEQ ID NO: 10560 - DNA, 894 bp, Homo sapiens
tgggcaaactactccccatctctgtgcctcagtttcctcatatgtgaaacaggggaattgtaaggccacacctcagcattgttgtgaagattaagggagagaatgtcagtaaggtgcttagcacatagtaaatgctcaacaaacttagctactattgagggtttgttatatgtgaagcaagctctgagcatttttctgatgttagctcatttgataatgacaagagccctgaagtaagtgctattattagataataaaatagaggtacagagaggttatctaacttacctaaggacacacagttataaacagcagtgccaggatatactgcaggcagctgggctcagagccaggcctattagccattcactatatcatttccaggcagaggctaacagcatgtgtacagaggcccagaggaagcctggggcctggtgctttggacctcagcttgttgtgactggggctgagacagagcaacggaaggagagggactggtaggaggcaatgctggagagagaggcagggggaggagcagacaggkagggcctgcaacttctggaataaaactgtaagttcctaatatttttattcttcctcagataggactacagttgaaaaatacaaaatcagaaatgtatttggaaaaaaacatcaagaatggattgacatccaatcccactggaaacaagaaaaaaaaaaagaatggactgacaaaaacccttctaagaaggtaaaactataggttagccataaccctttgtatagaaagttaaaaagaagggttgggcatggtggctcatccctgtaatcccagcaccttgggaggctgaggtgggttggtcacctgaggttaggagttcgagaccagcctggccaacatggagaaacacc

SEQ ID NO: 10561 - DNA, 512 bp, Homo sapiens
aataaagcagccatatatggttaagtacactaatttcttgccagttttcaggatttgaagtatactcttaaaatatatcattaataaaacttactttttaataggtttaagggtcacagaaaaattgagcctaaagtttagagcattcacatgacctatcagccctcccaccccttaatttcccctattatcaacatcttgcatttgtatagtacacttgttacagttgatgagccagtattcataacttattattaactaaagcttacagtttgtattagggttcactctttgttttgtacattctgtggaatttgacacatgtaaaattacatgyatccagcattaaagcatcatacaaaatagtttcactgccctaaagttctcctgtgttctacctattcatctctcttctcctccctctctctcccaaaaccctggcaaccactgatcattttactgtctccaaagtttggccttgttcagaatatcatataagtggattcacacag

SEQ ID NO: 10562 - DNA, 512 bp, Homo sapiens
aataaagcagccatatatggttaagtacactaatttcttgccagttttcaggatttgaagtatactcttaaaatatatcattaataaaacttactttttaataggtttaagggtcacagaaaaattgagcctaaagtttagagcattcacatgacctatcagccctcccaccccttaatttcccctattatcaacatcttgcatttgtatagtacacttgttacagttgatgagccagtattcataacttattattaactaaagcttacagtttgtattagggttcactctttgttttgtacattctgtggaatttgacacatgtaaaattacatgtatccagcattaaagcatcatacaaaatagtttcactgccctaaagttctcctgtgttctacctattcatctctcttctcctccctctctctcccaaaaccctggcaaccactgatcattttactgtctscaaagtttggccttgttcagaatatcatataagtggattcacacag

SEQ ID NO: 10563 - DNA, 602 bp, Homo sapiens
aacattcaaacaaagctatctagtaatttataagatatagcattctggggcccagaaaaagaagtttgagctaaagataagatttggggccattagctcattgataggatttactatgtgttgagaaaaaggggacctaagatgaaaccctgaaraataccaaccagtatttatggataaggcagagtaagcagcttaagtaggaaaataaacatcagggagagtgatatgtaagccaataaagaagaaagttttaagtggaggaaataatcagtgtggctctgtaaaacacgcttctagtgaatttagtaactagaaggttgctgaaagcctcagcaggggaatttacaatagactgaggtgtgaaatgcattcattgctgaatccccacctagcataattattggccccttcctacatgttccgtaaatatctattggattattgcatgataaatctttttctaggtcacgtcacagaaaatgagcagaggaagtgctgttctttctcctcaatgtgattcttagtgattctcattctccgatctgtgaggttgcgtggaagactaacagtctactaattacaatcacactcactcagct

SEQ ID NO: 10564 - DNA, 602 bp, Homo sapiens
aacattcaaacaaagctatctagtaatttataagatatagcattctggggcccagaaaaagaagtttgagctaaagataagatttggggccattagctcattgataggatttactatgtgttgagaaaaaggggacctaagatgaaaccctgaaaaataccaaccagtatttatggataaggcagagtaagcagcttaagtaggaaaataaacatcagggagagtgatatgtaagccaataaagaagaaagttttaagtggaggaaataatcartgtggctctgtaaaacacgcttctagtgaatttagtaactagaaggttgctgaaagcctcagcaggggaatttacaatagactgaggtgtgaaatgcattcattgctgaatccccacctagcataattattggccccttcctacatgttccgtaaatatctattggattattgcatgataaatctttttctaggtcacgtcacagaaaatgagcagaggaagtgctgttctttctcctcaatgtgattcttagtgattctcattctccgatctgtgaggttgcgtggaagactaacagtctactaattacaatcacactcactcagct

SEQ ID NO: 10565 - DNA, 602 bp, Homo sapiens
aacattcaaacaaagctatctagtaatttataagatatagcattctggggcccagaaaaagaagtttgagctaaagataagatttggggccattagctcattgataggatttactatgtgttgagaaaaaggggacctaagatgaaaccctgaaaaataccaaccagtatttatggataaggcagagtaagcagcttaagtaggaaaataaacatcagggagagtgatatgtaagccaataaagaagaaagttttaagtggaggaaataatcagtgtggctctgtaaaacacgcttctagtgaatttagtaactagaasgttgctgaaagcctcagcaggggaatttacaatagactgaggtgtgaaatgcattcattgctgaatccccacctagcataattattggccccttcctacatgttccgtaaatatctattggattattgcatgataaatctttttctaggtcacgtcacagaaaatgagcagaggaagtgctgttctttctcctcaatgtgattcttagtgattctcattctccgatctgtgaggttgcgtggaagactaacagtctactaattacaatcacactcactcagct

SEQ ID NO: 10566 - DNA, 2023 bp, Homo sapiens
gcaaatatataacgtctgtttagagcccttattttcctcaaaatcttctgatgttctccaggtcacctttgtctttctggcaactagctattttattccttgtatcatttaaccatggttacttattaatcatcccccatgagatgcctgaagtaacaatgttttgcaaataggttcagctctctggttttagggaatgaagagagggagaactgtaaaaggggagtgttagacttcatccccaaaggccaggaacaatgtcaaaaaactctggtatctctgcagttgatagttccctctcacttgactagattttaaaataattaagttctcaatttccaacttagtacaattgcaatctccaacagcatttcagaaataggaaacctgaagcatatctctgcacacttttatttgtagtttagtaaacagaaagtctgcaaatgagaaagaataatgcctaacttcttaaataagcagaagatgggaataatccagtcattgtgcttatacctgcacttctcagttctgccgcaagtattccagtaaaaactgggttgatctgagctgaagtgtttcttccttttggccaggtgcaaaagtctggagtctacttcagaggacgaatgtgtttagtcatttttataagagttgaaaaaaataagcactaaatctttctttcaaacttgaactgatcctcaaaacagttttaggaatttccaaaggatctttttgctttagtttccaaactggtattttcacttgtttccatcttgtttgctagataacctgagtcttaaatttaaaagaaaaatgctttgaggatgattttatcagctctccatatggaatatgagaaaaaaaatmcataattattctgtatccagtttacctaaaatatttttctaagtttttggtaggcaggtattctcctttccaccgtagaactcaagcagtacagactataccatggcctattgctaagatttactgagatctccacttttggaaaccccacaagtgtaaattgagattaataaaaattccttggtatgaaaaatgctaacagttgaatttcactctcccatctactcagatattactttatactcctggatacccctcataactgctcctgatgcccaggcatccagggttaggtgaggaagcatgacctgggttttcaacaaactgcatgaggccactctggccacgagcagactctctatcctcaggcccccagtaattttgagttacttcctctcagccatctgacttatatgtgaggcacaactgcacaaaaatagcaattcttgacgcttttataaacacatctacagagaatgttcccattattgccttaatatagcaatctgagataatcaggtctggaaacatagccacgttttataggtaaggaaaccaagcataagtgatctaaaaactaacaggagagtgaaattgaaaccagaaccttggttttctgactgcccgttatggattccccctctggttttctaggaaagccctatagtgaaggccatattgctctcaatatttcttcttcttttcagttgcctttctttatgcccctcatccctgtctgtcttttcctcatccaatctccttgtgactctctgaaagtccctgccctgtgacagtcagttcagacctaccctttctagccattttctgatgctctctgagctgcagattttcctgagcttcagacacctctcgttctctcaatgccttgctagactgctgcaagttcaatttataaggagctgatgggagataatagtttactgcagtggttctcaatcagggcagtttttctccctgggggacatttggcagtgtctggagacattttatgctactggcacatattgggtggaagccagagatgctggctgccatcctgcaatgcacaggacagccccccaaatactaagtagaaatacttcgtgcctaatgtcgatagtgcctccaatgtcaaggttgagaaaccttggcttag

SEQ ID NO: 10567 - DNA, 2023 bp, Homo sapiens
gcaaatatataacgtctgtttagagcccttattttcctcaaaatcttctgatgttctccaggtcacctttgtctttctggcaactagctattttattccttgtatcatttaaccatggttacttattaatcatcccccatgagatgcctgaagtaacaatgttttgcaaataggttcagctctctggttttagggaatgaagagagggagaactgtaaaaggggagtgttagacttcatccccaaaggccaggaacaatgtcaaaaaactctggtatctctgcagttgatagttccctctcacttgactagattttaaaataattaagttctcaatttccaacttagtacaattgcaatctccaacagcatttcagaaataggaaacctgaagcatatctctgcacacttttatttgtagtttagtaaacagaaagtctgcaaatgagaaagaataatgcctaacttcttaaataagcagaagatgggaataatccagtcattgtgcttatacctgcacttctcagttctgccgcaagtattccagtaaaaactgggttgatctgagctgaagtgtttcttccttttggccaggtgcaaaagtctggagtctacttcagaggacgaatgtgtttagtcatttttataagagttgaaaaaaataagcactaaatctttctttcaaacttgaactgatcctcaaaacagttttaggaatttccaaaggatctttttgctttagtttccaaactggtattttcacttgtttccatcttgtttgctagataacctgagtcttaaatttaaaagaaaaatgctttgaggatgattttatcagctctccatatggaatatgagaaaaaaaatccataattattctgtatccagtttacctaaaatatttttctaagtttttggtaggcaggtattctcctttccaccgtagaactcaagcagtacagactrtaccatggcctattgctaagatttactgagatctccacttttggaaaccccacaagtgtaaattgagattaataaaaattccttggtatgaaaaatgctaacagttgaatttcactctcccatctactcagatattactttatactcctggatacccctcataactgctcctgatgcccaggcatccagggttaggtgaggaagcatgacctgggttttcaacaaactgcatgaggccactctggccacgagcagactctctatcctcaggcccccagtaattttgagttacttcctctcagccatctgacttatatgtgaggcacaactgcacaaaaatagcaattcttgacgcttttataaacacatctacagagaatgttcccattattgccttaatatagcaatctgagataatcaggtctggaaacatagccacgttttataggtaaggaaaccaagcataagtgatctaaaaactaacaggagagtgaaattgaaaccagaaccttggttttctgactgcccgttatggattccccctctggttttctaggaaagccctatagtgaaggccatattgctctcaatatttcttcttcttttcagttgcctttctttatgcccctcatccctgtctgtcttttcctcatccaatctccttgtgactctctgaaagtccctgccctgtgacagtcagttcagacctaccctttctagccattttctgatgctctctgagctgcagattttcctgagcttcagacacctctcgttctctcaatgccttgctagactgctgcaagttcaatttataaggagctgatgggagataatagtttactgcagtggttctcaatcagggcagtttttctccctgggggacatttggcagtgtctggagacattttatgctactggcacatattgggtggaagccagagatgctggctgccatcctgcaatgcacaggacagccccccaaatactaagtagaaatacttcgtgcctaatgtcgatagtgcctccaatgtcaaggttgagaaaccttggcttag

SEQ ID NO: 10568 - DNA, 838 bp, Homo sapiens
tctactaaaactacaraaaaatatgagccgggcgtggtggcaggcgcctgtaatcccagttacttgggaggctgaggcaggagaatcgcttgaacctgggagacggagattgcagtgagctgagatcgcaccactgcactccagcctgggcaacaagagcgcaactccatctcaaaaaaagaaaagaataaaacctcattgtttgtaatccagggaaattcttgatgagggcttcttgattgttgatgttactttacaatttatgagatcctgcagataccgttataaaaacttttgttctgtctttctgtccatcttcttgctgtttgaagaagcaaagagcttattgcaaaaagcaagattgtgcattgaagcaatgcacaggatattgattgcttctattccctgaggttctgagtcaatctatatacacaccagtagtgtctaacttacaatttatgctcccaacatttgcttgtaaattggctttttggaatgctgaatgcaatttccctggaaaacaaagttataaatcatatttgggctccccagcgagtccacagcaacctatttaacccataacacagcacttttcctgatagggaatgcactaaccataacatttcagaaagggcaggtgtctttttagcatcccctcgcctatacttctatatatctctcacacattgcagtacctctccttgaactcttgattttataccttctttgaagagtagggcaagttaggaattttttcaagagggttgttgataacacaaatacatccaactgatgatatttcaagtagcttagaaaagtgaaggaaaacattttacat

SEQ ID NO: 10569 - DNA, 638 bp, Homo sapiens
cctgtaatcctagcactttggaaagccaaggtaggacgactgcttgagctgaggagttcaagaccagcctgggcaacatagtaaaacctcatctctacaaaaagaaattttyaataaatttttaaaagaatatagcattaagctcagtatcacgctaagtatccaatagagaagaactatgtccaaatttcaattttttgtttctataatggttggtaaatgagatattttgattaattaaattatacagtatcctttttgttatagttccaaagtaagaacagggaattgaactcaaagataagcaagagctatcactaaagtacaagaggatcagtgggatgggggtcaagtacagaagaaaaaaaaaagaaaaggtaagaaatttaccacagtgtaaggagaattgatagaatttctgtttatggctttgataataagtcttcatttctcatatggctatagaataaagatgagaaactttattcactacagaattgttattctcaaatagaaaataatgttttaactttccaaaataaacctctcaatgtgggcagttacagcagtatctccctgttagtgtcaaagaattggctcggtggaagtaggacttctaacacacacatgatgttata

SEQ ID NO: 10570 - DNA, 638 bp, Homo sapiens
cctgtaatcctagcactttggaaagccaaggtaggacgactgcttgagctgaggagttcaagaccagcctgggcaacatagtaaaacctcatctctacaaaaagaaatttttaataaatttttaaaagaatatagcattaagctcagtatcacgctaagtatccaatagagaagaactatgtccaaatttcaattttttgtttctataatggttggtaaatgagatattttgattaattaaattatacagtatcctttttgttatagttccaaagtaagaacagggaattgaactsaaagataagcaagagctatcactaaagtacaagaggatcagtgggatgggggtcaagtacagaagaaaaaaaaaagaaaaggtaagaaatttaccacagtgtaaggagaattgatagaatttctgtttatggctttgataataagtcttcatttctcatatggctatagaataaagatgagaaactttattcactacagaattgttattctcaaatagaaaataatgttttaactttccaaaataaacctctcaatgtgggcagttacagcagtatctccctgttagtgtcaaagaattggctcggtggaagtaggacttctaacacacacatgatgttata

SEQ ID NO: 10571 - DNA, 638 bp, Homo sapiens
cctgtaatcctagcactttggaaagccaaggtaggacgactgcttgagctgaggagttcaagaccagcctgggcaacatagtaaaacctcatctctacaaaaagaaatttttaataaatttttaaaagaatatagcattaagctcagtatcacgctaagtatccaatagagaagaactatgtccaaatttcaattttttgtttctataatggttggtaaatgagatattttgattaattaaattatacagtatcctttttgttatagttccaaagtaagaacagggaattgaactcaaagataagcaagagctatcactaaagtacaagaggatcagtgggatrggggtcaagtacagaagaaaaaaaaaagaaaaggtaagaaatttaccacagtgtaaggagaattgatagaatttctgtttatggctttgataataagtcttcatttctcatatggctatagaataaagatgagaaactttattcactacagaattgttattctcaaatagaaaataatgttttaactttccaaaataaacctctcaatgtgggcagttacagcagtatctccctgttagtgtcaaagaattggctcggtggaagtaggacttctaacacacacatgatgttata

SEQ ID NO: 10572 - DNA, 680 bp, Homo sapiens
tcatatgcttagcaaagagccaaaacaaggttcaaatccagctccaagttgtgtgtgtgtgtgtaaaactgtctcctagaattcaaagaagctcctctttgtctcaagatatgccattctgttatttaaatgctttccctacctttttaaccacaaggtaaggatacgtcaataaacaaaactcaccatttctctgtttacacttcagagaaataatcacagtctttctttcttttctaagctatcattttaacctacataaggaagtaatctttcagctgccttaaagggcaaaaacaagagtgttagctgacttttctatgaataatacagagtttctttataactgttgaaatatcagcccaactaaccacgctttggcaycctagggagtgaactgtgtctgttccttatgttgtgtttgatttaggagaaaacaggaagtgtttccagcacacagacaagtttattatagctgagacatattgctactgtctccaaacacactttccttagtatgtaaacacaaccacctggacagaagagccaatctaagaggcagaagaaaatttaacagatttttcatctatccttgacaagtgtaacaatcacctgctccaacctttctggagcacagagaacacggtatttaaaaggtttgggaaggagggagaggaaga

SEQ ID NO: 10573 - DNA, 680 bp, Homo sapiens
tcatatgcttagcaaagagccaaaacaaggttcaaatccagctccaagttgtgtgtgtgtgtgtaaaactgtctcctagaattcaaagaagctcctctttgtctcaagatatgccattctgttatttaaatgctttccctacctttttaaccacaaggtaaggatacgtcaataaacaaaactcaccatttctctgtttacacttcagagaaataatcacagtctttctttcttttctaagctatcattttaacctacataaggaagtaatctttcagctgccttaaagggcaaaaacaagagtgttagctgacttttctatgaataatacagagtttctttataactgttgaaatatcagcccaactaaccacgctttggcatcctagggagtgaactgtgtctgttccttatgttgtgtttgatttaggagaaaacaggaagtgtttccagcacacagacaagtttattatagctgagacatattgctactgtctccaaacacactttccttagtatgtaaacacaaccacctggacagaagagccaatcyaagaggcagaagaaaatttaacagatttttcatctatccttgacaagtgtaacaatcacctgctccaacctttctggagcacagagaacacggtatttaaaaggtttgggaaggagggagaggaaga

SEQ ID NO: 10574 - DNA, 536 bp, Homo sapiens
agggaatgcgtagttttgtagatttctgctaggagaataattggtataactttcctggagatcattaagcaatgtacagcatatgccttcaaactgttatataccttgtttaagtaatcatgctctgtgaatttaaccagatagagatatgagcatttgtttttatacaatctgaatatctacatttagcaagaaacwctattgtgatatatgtcttgtgggaaagtcaagttagtggactattatttggtaaattataaaaataactaacttttgagaaccagttgtgttcctgacatttaacataaattattttattgaagtttcagactctgcaagagaggtattagtgtttctattttgtaggtgtgggaatcaaattcagagaaattaagtaacatactcaagatcacacagttaatatatcagctactatatggtggtgctgaaatctgaatctcttctcactataaatgtcacattctttctactattctacagggtctcataaggtccatttttatattgataatact

SEQ ID NO: 10575 - DNA, 536 bp, Homo sapiens
agggaatgcgtagttttgtagatttctgctaggagaataattggtataactttcctggagatcattaagcaatgtacagcatatgccttcaaactgttatataccttgtttaagtaatcatgctctgtgaatttaaccagatagagatatgagcatttgtttttatacaatctgaatatctacatttagcaagaaactctattgtgatatatgtcttgtgggaaagtcaagttagtggactattatttggtaaattataaaaataactaacttttgagaaccagttgtgttcctgacatttaacataaattattttattgaagtttcagactctgcaagagaggtattagtgtttctattttgtaggtgtgggaatcaaattcagagarattaagtaacatactcaagatcacacagttaatatatcagctactatatggtggtgctgaaatctgaatctcttctcactataaatgtcacattctttctactattctacagggtctcataaggtccatttttatattgataatact

SEQ ID NO: 10576 - DNA, 704 bp, Homo sapiens
tctggcctcttcttattccctactgaagacagtgaatgtgttctgagttcagagagctctgccccttggtgaggcacctctctcagccactttcccctcctccagcctgtccccaagcccctttggcctgtttgaacagcagcaataacaacagtagagaagacagggtgtgcatgtgaactgggtaaaaggtccccacttcccagccgaggtcagcatctggagagacttagatttcagagagggattcagactgagtcatcracaggtataaggactgtcagcaacttttccatgttccctcttcataagccccaagtctcagcctgctgggaagatccggccctatgaaggcatccactggactccccgggaaaattaatggagtgagtttgaattggagaagtgacatggaatctaactagagatctgacttccaaaacagtgacaccctaaggctacccctcctagcctaggaaagggaccagtgagagcactggcctccaagccctttcctgcactgtaaccctagctacccgtctaggagatacagacaccatcctgtccatttacctttctccaggcaagaactcactgagccccaagaaaagaaaaggctgatagtgtctcttctcaaaaggccaggaatttagctctctctctttctgtgccaaaaatgttcagaacatagtcgtttcctttca

SEQ ID NO: 10577 - DNA, 704 bp, Homo sapiens
tctggcctcttcttattccctactgaagacagtgaatgtgttctgagttcagagagctctgccccttggtgaggcacctctctcagccactttcccctcctccagcctgtccccaagcccctttggcctgtttgaacagcagcaataacaacagtagagaagacagggtgtgcatgtgaactgggtaaaaggtccccacttcccagccgaggtcagcatctggagagacttagatttcagagagggattcagactgagtcatcgacaggtataaggactgtcagcaacttttccatgttccctcttcataagccccaagtctcagcctgctgggaagatccggccctrtgaaggcatccactggactccccgggaaaattaatggagtgagtttgaattggagaagtgacatggaatctaactagagatctgacttccaaaacagtgacaccctaaggctacccctcctagcctaggaaagggaccagtgagagcactggcctccaagccctttcctgcactgtaaccctagctacccgtctaggagatacagacaccatcctgtccatttacctttctccaggcaagaactcactgagccccaagaaaagaaaaggctgatagtgtctcttctcaaaaggccaggaatttagctctctctctttctgtgccaaaaatgttcagaacatagtcgtttcctttca

SEQ ID NO: 10578 - DNA, 3076 bp, Homo sapiens
tggaggacttcccagaggaggtggcatgaacctcttaccacacaataacagagtgggggagagggtcttctggtaaaggtatggtatgtacaagagccctgaaaatttaaaaggaatttttagagatcaaaggacagcacctgtcccatagtgacctctcagctaatattagctcctaggaagataactgggacaaaggaggggagcaggagaccagcccagagaggtggacggggccaaaccataacatttgatggatttcagattttgaaaaactaaacaaagcctcctgttggaagggcacaagactgttaaaggcatctaaattcagggagagggaaggatttgtgtgggactatggcagagttgtgaactcagggagttagtgagagcagcaggagtagggaagtatctttacgtcccaaattggaacatgggctgttctggagaggtccacttaagatgctgtcacagcatcattggatctagcaccttgtactcaaaagaagcatggtcagttgtttacattgacagcatctggggcttgttagaaatgcagaatctcayctcatctaagatctactgactagaaatctgcctttttgatagatcctcaagtagcttccatcagcccattgcagattaagaagcacttccccagtacaggggcaagagagcagactttatcaagggccctgttttattcccattcaagaagtgaggcccaatggaaggcttttacattgagggaaagtggcaactgagagcacaagtctgcagttgcttgaataagcagaaagggagcctaagatgccaagattggatgccacatgttctggtgcaatgaacagaagaaatagtatgtaggcagagactgctgttaggccaccacaatgaggatatggcttctccagggacttcctgagcaatcatctgtggtgcacacatccctggcagcctcagaagatgctgaagaacctataccatagagcaaggaagaggcacttagcagacgactcccagacaaaaagggtgatggtagaaatcattgttcctcactgcttccccctacttagcgagcagtcccttcaggtgagagttagctagttaaatggctttaagacttaatgaatgaggaatattagggaaatatttcagactaagctaacatggacaatgcatgagcaaaattaaattattccattcagattactgcattccttgatgacagcattgttttttattacacctgagtacttctagagttgataatatttagaaagctttttcggcctgaagaagtaaacactttaacactgtaagcttctggatacccttggcttttgtcaaaaaaaacacagttggatgggtagacaatacacagtacatgaagaatgctgtcctaggcactgtggggagatgcaaaagaagtcaatgacaggagaaggaaacaggccattaaagcaaaatggacaaccgcttatggtgactcaaaatttctatggggcatcactaagaaacttgtaagatgaatgattcatgttgtcaaagagagtttggttaaaaaaaatcagactcaacagtgacttgcttcagttagagtctatctgcatctcaaaggacttttaagaatctaactaaccatcttcttatgacagcagggtcacctcggagtacagcagcggggtaagagagcagccaccgtaagaataaatcagactgcataatgctgcatggggtatggaacgagggtggatttgagccaaaccactgagggaagtttatcagatctttgagtaagtagaaaacaggctgcagtttaatgaaccacactgagaagcactttccctggtgatgcagtttctcttccatgacctaaaatcatccaaacctcctcaagctctaaaactggcagaaatttgaacaaaggcttgattgtctggactgcttattgctactattctaaaataaagattttaaaccttaggatagctggccggaatgcatcgtaagctgtgtgaacccaaggtgctcgaaggattaacgatccctgaggaaatatgtttgtgcgcagccctggatcctggggccttggcacctgctccatggtgcctctgtgcctggcagtggatcaaatgcttgccctggcacatgccctcagcatttcagtttgtgaaggaaagggaggcagggtgcctgtctctgtttttcatgcaggcaggactaagttggatacaagagatccagcatcataattgtttataaaagcatacaatagaagtagaagtgacttgagccaggtattctcacttctgtctccaagcctgcattatagtgatacatttctagtggcacttctatgcctccagcttataccacttctttgatcttgcccatgaagcacatcagagcgtgtgccctggagtcagcttctgcctgtcattagcagtgagaccttgagaaaactagtaatctgtctgagcctcagtttcctgacttgtaaaatggtgataatttcaggctcacaggctattgtgaggattaaatgacatcacatatgtggggtgcctagcatggttttctgacccataatatatgctcgataaatgttagtaaccttatctacgtcccccatatgatccacaggcttttgtgataagatggagaccaggaggaggagagaggcatctgagtttgcaagcttggcaactaggtgaatggagatgcttttaactgagaagggaagtacaaaaggaggaggaggcttggggacaagatggtgtttggtttggcacagactgagactgagaagatgggatgtccacagacactcaaaaagctgacttgacaacctggggcagtgggcagtgttaattgaagccatgaatgagggtgtgtagagtatggagaaagggccaaggaaaagccccaggggacaccagcattgaagggccagtgggggaaaagtgaagcaaattagttggagaagtaggagcagaactagctgatggcagcaccatggacacttgggaatttcttttttattttattttgttttattgatatataatagttg

SEQ ID NO: 10579 - DNA, 3076 bp, Homo sapiens
tggaggacttcccagaggaggtggcatgaacctcttaccacacaataacagagtgggggagagggtcttctggtaaaggtatggtatgtacaagagccctgaaaatttaaaaggaatttttagagatcaaaggacagcacctgtcccatagtgacctctcagctaatattagctcctaggaagataactgggacaaaggaggggagcaggagaccagcccagagaggtggacggggccaaaccataacatttgatggatttcagattttgaaaaactaaacaaagcctcctgttggaagggcacaagactgttaaaggcatctaaattcagggagagggaaggatttgtgtgggactatggcagagttgtgaactcagggagttagtgagagcagcaggagtagggaagtatctttacgtcccaaattggaacatgggctgttctggagaggtccacttaagatgctgtcacagcatcattggatctagcaccttgtactcaaaagaagcatggtcagttgtttacattgacagcatctggggcttgttagaaatgcagaatctcatctcatctaagatctactgactagaaatctgcctttttgatagatcctcaagtagcttccatcagcccattgcagattaagaagcactkccccagtacaggggcaagagagcagactttatcaagggccctgttttattcccattcaagaagtgaggcccaatggaaggcttttacattgagggaaagtggcaactgagagcacaagtctgcagttgcttgaataagcagaaagggagcctaagatgccaagattggatgccacatgttctggtgcaatgaacagaagaaatagtatgtaggcagagactgctgttaggccaccacaatgaggatatggcttctccagggacttcctgagcaatcatctgtggtgcacacatccctggcagcctcagaagatgctgaagaacctataccatagagcaaggaagaggcacttagcagacgactcccagacaaaaagggtgatggtagaaatcattgttcctcactgcttccccctacttagcgagcagtcccttcaggtgagagttagctagttaaatggctttaagacttaatgaatgaggaatattagggaaatatttcagactaagctaacatggacaatgcatgagcaaaattaaattattccattcagattactgcattccttgatgacagcattgttttttattacacctgagtacttctagagttgataatatttagaaagctttttcggcctgaagaagtaaacactttaacactgtaagcttctggatacccttggcttttgtcaaaaaaaacacagttggatgggtagacaatacacagtacatgaagaatgctgtcctaggcactgtggggagatgcaaaagaagtcaatgacaggagaaggaaacaggccattaaagcaaaatggacaaccgcttatggtgactcaaaatttctatggggcatcactaagaaacttgtaagatgaatgattcatgttgtcaaagagagtttggttaaaaaaaatcagactcaacagtgacttgcttcagttagagtctatctgcatctcaaaggacttttaagaatctaactaaccatcttcttatgacagcagggtcacctcggagtacagcagcggggtaagagagcagccaccgtaagaataaatcagactgcataatgctgcatggggtatggaacgagggtggatttgagccaaaccactgagggaagtttatcagatctttgagtaagtagaaaacaggctgcagtttaatgaaccacactgagaagcactttccctggtgatgcagtttctcttccatgacctaaaatcatccaaacctcctcaagctctaaaactggcagaaatttgaacaaaggcttgattgtctggactgcttattgctactattctaaaataaagattttaaaccttaggatagctggccggaatgcatcgtaagctgtgtgaacccaaggtgctcgaaggattaacgatccctgaggaaatatgtttgtgcgcagccctggatcctggggccttggcacctgctccatggtgcctctgtgcctggcagtggatcaaatgcttgccctggcacatgccctcagcatttcagtttgtgaaggaaagggaggcagggtgcctgtctctgtttttcatgcaggcaggactaagttggatacaagagatccagcatcataattgtttataaaagcatacaatagaagtagaagtgacttgagccaggtattctcacttctgtctccaagcctgcattatagtgatacatttctagtggcacttctatgcctccagcttataccacttctttgatcttgcccatgaagcacatcagagcgtgtgccctggagtcagcttctgcctgtcattagcagtgagaccttgagaaaactagtaatctgtctgagcctcagtttcctgacttgtaaaatggtgataatttcaggctcacaggctattgtgaggattaaatgacatcacatatgtggggtgcctagcatggttttctgacccataatatatgctcgataaatgttagtaaccttatctacgtcccccatatgatccacaggcttttgtgataagatggagaccaggaggaggagagaggcatctgagtttgcaagcttggcaactaggtgaatggagatgcttttaactgagaagggaagtacaaaaggaggaggaggcttggggacaagatggtgtttggtttggcacagactgagactgagaagatgggatgtccacagacactcaaaaagctgacttgacaacctggggcagtgggcagtgttaattgaagccatgaatgagggtgtgtagagtatggagaaagggccaaggaaaagccccaggggacaccagcattgaagggccagtgggggaaaagtgaagcaaattagttggagaagtaggagcagaactagctgatggcagcaccatggacacttgggaatttcttttttattttattttgttttattgatatataatagttg

SEQ ID NO: 10580 - DNA, 3076 bp, Homo sapiens
tggaggacttcccagaggaggtggcatgaacctcttaccacacaataacagagtgggggagagggtcttctggtaaaggtatggtatgtacaagagccctgaaaatttaaaaggaatttttagagatcaaaggacagcacctgtcccatagtgacctctcagctaatattagctcctaggaagataactgggacaaaggaggggagcaggagaccagcccagagaggtggacggggccaaaccataacatttgatggatttcagattttgaaaaactaaacaaagcctcctgttggaagggcacaagactgttaaaggcatctaaattcagggagagggaaggatttgtgtgggactatggcagagttgtgaactcagggagttagtgagagcagcaggagtagggaagtatctttacgtcccaaattggaacatgggctgttctggagaggtccacttaagatgctgtcacagcatcattggatctagcaccttgtactcaaaagaagcatggtcagttgtttacattgacagcatctggggcttgttagaaatgcagaatctcatctcatctaagatctactgactagaaatctgcctttttgatagatcctcaagtagcttccatcagcccattgcagattaagaagcacttccccagtacaggggcaagagagcagactttatcaagggccctgttttattcccattcaagaagtgaggcccaatggaaggcttttacattgagggaaagtggcaactgagagcacaagtctgcagttgcttgaataagcagaaagggagcctaagatgccaagattggatgccacatgttctggtgcaatgaacagaagaaatagtatgtaggcagagactgctgttaggccaccacaatgaggatatggcttctccagggacttcctgagcaatcatctgtggtgcacacatccctggcagcctcagaagatgctgaagaacctataccatagagcaaggaagaggcacttagcagacgactcccagacaaaaagggtgatggtagaaatcattgttcctcactgcttccccctacttagcgagcagtcccttcaggtgagagttagctagttaaatggctttaagacttaatgaatgaggaatattagggaaatatttcagactaagctaacatggacaatgcatgagcaaaattaaattattccattcagattactgcattccttgatgacagcattgttttttattacacctgagtacttctagagttgataatatttagaaagctttttcggcctgaagaagtaaacactttaacactgtaagcttctggawacccttggcttttgtcaaaaaaaacacagttggatgggtagacaatacacagtacatgaagaatgctgtcctaggcactgtggggagatgcaaaagaagtcaatgacaggagaaggaaacaggccattaaagcaaaatggacaaccgcttatggtgactcaaaatttctatggggcatcactaagaaacttgtaagatgaatgattcatgttgtcaaagagagtttggttaaaaaaaatcagactcaacagtgacttgcttcagttagagtctatctgcatctcaaaggacttttaagaatctaactaaccatcttcttatgacagcagggtcacctcggagtacagcagcggggtaagagagcagccaccgtaagaataaatcagactgcataatgctgcatggggtatggaacgagggtggatttgagccaaaccactgagggaagtttatcagatctttgagtaagtagaaaacaggctgcagtttaatgaaccacactgagaagcactttccctggtgatgcagtttctcttccatgacctaaaatcatccaaacctcctcaagctctaaaactggcagaaatttgaacaaaggcttgattgtctggactgcttattgctactattctaaaataaagattttaaaccttaggatagctggccggaatgcatcgtaagctgtgtgaacccaaggtgctcgaaggattaacgatccctgaggaaatatgtttgtgcgcagccctggatcctggggccttggcacctgctccatggtgcctctgtgcctggcagtggatcaaatgcttgccctggcacatgccctcagcatttcagtttgtgaaggaaagggaggcagggtgcctgtctctgtttttcatgcaggcaggactaagttggatacaagagatccagcatcataattgtttataaaagcatacaatagaagtagaagtgacttgagccaggtattctcacttctgtctccaagcctgcattatagtgatacatttctagtggcacttctatgcctccagcttataccacttctttgatcttgcccatgaagcacatcagagcgtgtgccctggagtcagcttctgcctgtcattagcagtgagaccttgagaaaactagtaatctgtctgagcctcagtttcctgacttgtaaaatggtgataatttcaggctcacaggctattgtgaggattaaatgacatcacatatgtggggtgcctagcatggttttctgacccataatatatgctcgataaatgttagtaaccttatctacgtcccccatatgatccacaggcttttgtgataagatggagaccaggaggaggagagaggcatctgagtttgcaagcttggcaactaggtgaatggagatgcttttaactgagaagggaagtacaaaaggaggaggaggcttggggacaagatggtgtttggtttggcacagactgagactgagaagatgggatgtccacagacactcaaaaagctgacttgacaacctggggcagtgggcagtgttaattgaagccatgaatgagggtgtgtagagtatggagaaagggccaaggaaaagccccaggggacaccagcattgaagggccagtgggggaaaagtgaagcaaattagttggagaagtaggagcagaactagctgatggcagcaccatggacacttgggaatttcttttttattttattttgttttattgatatataatagttg

SEQ ID NO: 10581 - DNA, 3076 bp, Homo sapiens
tggaggacttcccagaggaggtggcatgaacctcttaccacacaataacagagtgggggagagggtcttctggtaaaggtatggtatgtacaagagccctgaaaatttaaaaggaatttttagagatcaaaggacagcacctgtcccatagtgacctctcagctaatattagctcctaggaagataactgggacaaaggaggggagcaggagaccagcccagagaggtggacggggccaaaccataacatttgatggatttcagattttgaaaaactaaacaaagcctcctgttggaagggcacaagactgttaaaggcatctaaattcagggagagggaaggatttgtgtgggactatggcagagttgtgaactcagggagttagtgagagcagcaggagtagggaagtatctttacgtcccaaattggaacatgggctgttctggagaggtccacttaagatgctgtcacagcatcattggatctagcaccttgtactcaaaagaagcatggtcagttgtttacattgacagcatctggggcttgttagaaatgcagaatctcatctcatctaagatctactgactagaaatctgcctttttgatagatcctcaagtagcttccatcagcccattgcagattaagaagcacttccccagtacaggggcaagagagcagactttatcaagggccctgttttattcccattcaagaagtgaggcccaatggaaggcttttacattgagggaaagtggcaactgagagcacaagtctgcagttgcttgaataagcagaaagggagcctaagatgccaagattggatgccacatgttctggtgcaatgaacagaagaaatagtatgtaggcagagactgctgttaggccaccacaatgaggatatggcttctccagggacttcctgagcaatcatctgtggtgcacacatccctggcagcctcagaagatgctgaagaacctataccatagagcaaggaagaggcacttagcagacgactcccagacaaaaagggtgatggtagaaatcattgttcctcactgcttccccctacttagcgagcagtcccttcaggtgagagttagctagttaaatggctttaagacttaatgaatgaggaatattagggaaatatttcagactaagctaacatggacaatgcatgagcaaaattaaattattccattcagattactgcattccttgatgacagcattgttttttattacacctgagtacttctagagttgataatatttagaaagctttttcggcctgaagaagtaaacactttaacactgtaagcttctggatacccttggcttttgtcaaaaaaaacacagttggatgggtagacaatacacagtacatgaagaatgctgtcctaggcactgtggggagatgcaaaagaagtcaatgacaggagaaggaaacaggccattaaagcaaaatggacaaccgcttatggtgactcaaaatttctatggggcatcactaagaaacttgtaagatgaatgattcatgttgtcaaagagagtttggttaaaaaaaatcagactcaacagtgacttgcttcagttagagtctatctgcatctcaaaggacttttaagaatctaactaaccatcttcwtatgacagcagggtcacctcggagtacagcagcggggtaagagagcagccaccgtaagaataaatcagactgcataatgctgcatggggtatggaacgagggtggatttgagccaaaccactgagggaagtttatcagatctttgagtaagtagaaaacaggctgcagtttaatgaaccacactgagaagcactttccctggtgatgcagtttctcttccatgacctaaaatcatccaaacctcctcaagctctaaaactggcagaaatttgaacaaaggcttgattgtctggactgcttattgctactattctaaaataaagattttaaaccttaggatagctggccggaatgcatcgtaagctgtgtgaacccaaggtgctcgaaggattaacgatccctgaggaaatatgtttgtgcgcagccctggatcctggggccttggcacctgctccatggtgcctctgtgcctggcagtggatcaaatgcttgccctggcacatgccctcagcatttcagtttgtgaaggaaagggaggcagggtgcctgtctctgtttttcatgcaggcaggactaagttggatacaagagatccagcatcataattgtttataaaagcatacaatagaagtagaagtgacttgagccaggtattctcacttctgtctccaagcctgcattatagtgatacatttctagtggcacttctatgcctccagcttataccacttctttgatcttgcccatgaagcacatcagagcgtgtgccctggagtcagcttctgcctgtcattagcagtgagaccttgagaaaactagtaatctgtctgagcctcagtttcctgacttgtaaaatggtgataatttcaggctcacaggctattgtgaggattaaatgacatcacatatgtggggtgcctagcatggttttctgacccataatatatgctcgataaatgttagtaaccttatctacgtcccccatatgatccacaggcttttgtgataagatggagaccaggaggaggagagaggcatctgagtttgcaagcttggcaactaggtgaatggagatgcttttaactgagaagggaagtacaaaaggaggaggaggcttggggacaagatggtgtttggtttggcacagactgagactgagaagatgggatgtccacagacactcaaaaagctgacttgacaacctggggcagtgggcagtgttaattgaagccatgaatgagggtgtgtagagtatggagaaagggccaaggaaaagccccaggggacaccagcattgaagggccagtgggggaaaagtgaagcaaattagttggagaagtaggagcagaactagctgatggcagcaccatggacacttgggaatttcttttttattttattttgttttattgatatataatagttg

SEQ ID NO: 10582 - DNA, 653 bp, Homo sapiens
cactaaaattacctactgtgagatcccaggcaagttactcaccagagagcatactcacctgctccaaaagtcagttgtgaagattcaacgtttctgaaaatacatctggcaagtgctaaatcatagttgaataaggttaaatgagcattaagaaataatcgcctggttatagatgctgaatggcccgatcctaagacttttcttagatttaggttcacctgctgctgtggttttggggtgctatttgctctagtaaaggactgttcttgcaggtcttcccatccatccctgttttctgccacttcaacaaggtcctcctctctgagcagcacaattagatgggagatctttttgcacagtacctacagacatgtctcccaaggagaactctggaaatggctaggggcaggaaacagggctgggtttttattttgtattttattttattttgcagaagtcacggtaagggtggacttgaaattctcatgtagacctgcttccctctccatttcatgaactcatagagctgtcacccagtrtagggtttggataccatgctcacagtaatatacagcctgcagatacatctgttctttgattctggtgggtggataggaacgagtctcacttccctgttctggaacatgatttcc

SEQ ID NO: 10583 - DNA, 477 bp, Homo sapiens
aggggacacaccttggaattgtatttgttttgtatgttctccaaatttttaccaccaccacccttcatgaacttactaaatggtttytacattgtttgttaggctatcccatagacattgcttctgatcatgaaactcactttatggtgaaaagagggcaggtatgtcagctcagtgatttcatcaaagaactgagaaacaaagtgcaatgcagggtgacgtgtctcagtttaatactagtgatccactaagtctttgtttctatcccctgggattctgagctttgctggtttagaaccttgaacctcctgggagcaagtgatcctcctacctcagcctcccaagtagctgggactagaggcataccatcatgcatggctaattttttttttaagagatggggtctcactatgttgcccaggcttacttgtatattttaattaatgttctcctttttgctgttcccttaccccatta

SEQ ID NO: 10584 - DNA, 477 bp, Homo sapiens
aggggacacaccttggaattgtatttgttttgtatgttctccaaatttttaccaccaccacccttcatgaacttactaaatggtttttacattgtttgttaggctatcccatagacattgcttctgatcatgaaactcactttatggtgaaaagagggcaggtatgtcagctcagtgatttcatcaaagaactgagaaacaaagtgcaatgcagggtgacgtgtctcagtttaatactagtgatccactaagtctttgtttytatcccctgggattctgagctttgctggtttagaaccttgaacctcctgggagcaagtgatcctcctacctcagcctcccaagtagctgggactagaggcataccatcatgcatggctaattttttttttaagagatggggtctcactatgttgcccaggcttacttgtatattttaattaatgttctcctttttgctgttcccttaccccatta

SEQ ID NO: 10585 - DNA, 1127 bp, Homo sapiens
tcacagaaaggaagactagagcttaccccacacccagagcccagacaagctttgtcccaggctgttgtctgttgttcaggtccatttatcttccgtaaacatcatttactcctccttgagaattgcctacatcccccacttttctctcctttatgaagaggtcatttaagcttcaaccatctggcccttctttgagcctcatattttgtaggacacccttgtgcttgcacctaataaatgtgtattccttttctctgttaatccgcctattgtcaggttgttttataggctggaattattgaaacttcagggggtgaaagttcattttcttctacagtcacatgtttctgttgttaattccctagtaggacacttgagtttttttyctaattgcatttttccataaggtattgtggtacaggtggcatttggttacataagtaagttctttagtggagatttgtgagaacctggcacacccatcactcgagcagcatacactgcaccatattttttgtcttcttttttttttgagacggagtcttgctgtgtcacccaggctggagtgcaatggcaccatcgcggctcactgcaagctctgcctcccacgttcaagtgattgtcctgcctcagtttcccaagtagctgggattacaggcacgcaccaccacgcccagctaatttttttatttttagtagaatcggggtttcaccatgttggtcaggctggtcttgaactcctgacctcgtgatctgcccgccttggcctcccaaagtgctgggattacaggtgtgagcaacagcacctggcatttgttgtcttttatcctttgcccccctcccacttttaccccccaagtccccaaagtccacggcaaaactgttttcagtatcttcttttcaggatcttctacaaaagacagtctcatttaggtaaaagttgatattttacaaaagataaactctttttattgaactatttagtggctgtgtttcaaaggacctcacagagtttagtaataattactttttaaaactgtcatatgaattatggctttacaataatgagactgagcccttctaccaaacacaactgtaactttctggtcacgtcttacacatattga

SEQ ID NO: 10586 - DNA, 861 bp, Homo sapiens
tcaaataattctcactaaaggctctgtctaggagttgtcacctggcagagaaagaatcaggaacctgggcacagtgacctctgctcctaggctttcccaggggaggtcttttgtctacttgctcactgcctgtcctgctgtctttgcaagccagctggatcttggcttgcacagtaatccttttttggctcactcacctggggatgttctctgagttgctaggcctcccctgtcccacttctgttggcagcataaccccctccaagatctctccatgactctcagctgtttgcaacctgggttgtccactatgacacttctgggaagcccttcacccagacttttagcaacttcttgttcccatctataccacagggaagccaagaaagctaaccaccaggcacagccagccacagcccatagagcacttagaagtgaattggaaaatgatgtgcccggcaagacgaggatttaggaaaaggcagcactctcgcaagatggatgccacagtggtcggctagtacctgttcatactgcctcatgacaatcatcggtcaaattttcatgaactttgagagcatagctgctaaacacaaacattaataaaaaaaaaattatataaacttacaattaaataaattacawcaaaaacaaagataatactcaaaatgtatcatttcctacttattttgctaccttttgctgttatttatacttctgaggttacttacatctattatatctctatggtagaaacagtatatgatgatgccgtgctgcgcatctcttcccagctctgcattcagtggagttatgttggtatcacatcacgaaatcggccatgatgggtgtgtttacacc

SEQ ID NO: 10587 - DNA, 509 bp, Homo sapiens
tttataattggagaaacaaatcatatagggtcagggttaagagggcagatcaaatcccagtatctccaattatttaccaggtttgtgacctcgggcagctgtatgaccttgggccgcagagcctcagtttcctcacctataaagcggaactaatataactattagctggagctgctgtgagaacagcatgagaccaccatacagggcatgaaactcccagtgacttcccaaggcagtccatgatgaaggcctggaagcacaaagggatcaacaggagctgttctcccaggrgacacttgggacacccagactacagggaagagcgctgcacagtgaagaaattattgataaagtctgagcacggtggctcacgcctgtaatcccagcactttggtaggccagggtgggcagatcatctgaagtcaggagttccagaccagcctggccaacatggcgaaaccccatctctactaaaaaaaaaaagtacaaaaaaaattagccaggcatgg

SEQ ID NO: 10588 - DNA, 841 bp, Homo sapiens
atgacagttctactttctactctgtcctttttagttccctagtatcttttcagaaacasacacaccaagaattccctgctcattatacctgcttggcaaccttacagtacgtgctttagggacacctgtgtgagctgggaatccaatttcatttattcataagtaattatggagcactaaaaattggctaagcatgtgcttcaaaatgtgtcctttcttgctcacccagtgcccaatacacagcaggctgtaaatatttatagaagcctgagcaacataggctgggcacggtggctcacgcctgtaatcccagcactttgggaggccgaggcgggcagattacctgaggttgggagttcgagaccagcctggccaacatggtgaaaccctgactctactaaaaatataaaaaacattagtcgggcatggtggcaggtgcctgtaatcccagctactcgggaggagaattgcttgaacctgggaggcagagggattgcagtgagttgagatcatactacttcactccagcctggtcaacagagagagactccatctcaaaaaaaaaaaaaaaaaaaaagcctgggcaacatagcaagactctgtctctaccaataaattcaataaattaaaaatttagccaggtgtggtggtgcacatctggaatcccagttacttgggaggctgagagaagaggatcacttgagcctaggagttcaaggcttcagtgagccatgatcacgtcactgcactccagcctgggcaacagagtgagaccctgtctctaaaacatgaataaataactaaatatttacagaatgcatggaaaggcttcagttcctcg

SEQ ID NO: 10589 - DNA, 551 bp, Homo sapiens
aaagaggcggacatggtgactcgcacctatagtcccagcaactcaggaggctaaggaaggaggatarcttgagcccaggagtttgaggtggcagtgagctatgataacatcaatgtactccagcctgggtagcagagcaagatccaaactttaagaaaataaataattaaaattaaattagtacaaaaatctcacattgcttttatcattttaaaagcaatgttttacaagcctaacacaatccatgacacaaagccctcgataaacagcagctgcaatctcacagcacaatgtaccctgagtatgaaggagaaccggcatcagcctctcccagccgggtgtcctgcagctcccacctcctcatcaggaacagaggctggggcagcgggaggggcccacaaagactgactctcacggtgaacccaagtcctgcaaaggcctgcgctccctctcagttcacccactcacttatccactcatcacttatgaatccatttactcatcgagtcatttactcactagtcactcattcattcattcacttgttcacc

SEQ ID NO: 10590 - DNA, 551 bp, Homo sapiens
aaagaggcggacatggtgactcgcacctatagtcccagcaactcaggaggctaaggaaggaggataacttgagcccaggagtttgaggtggcagtgagctatgataacatcaatgtactccagcctgggtagcagagcaagatccaaactttaagaaaataaataattaaaattaaattagtacaaaaatctcacattgcttttatcattttaaaagcaatgttttacaagcctaacacaatccatgacacaaagccctcgataaacagcagctgcaatctcacagcacaatgtaccctgagtatgaaggagaaccggcatcagcctctcccagccgggtgtcctgcagctcccacctcctcatcaggaacagaggctggggcagcgggaggggcccacaaagactgactctcacggtgaacccaagtcctgcaaaggcctgygctccctctcagttcacccactcacttatccactcatcacttatgaatccatttactcatcgagtcatttactcactagtcactcattcattcattcacttgttcacc

SEQ ID NO: 10591 - DNA, 584 bp, Homo sapiens
tttgagayggagtctcgctctgtcgcccaggctggagtacagtggtgtgatctcggctcactgcaaactccgcctcccgggttcacgccattctcctgcctcagcttcccaagtagctgggactacaggcgcccaccaccgcgcccggctaatttttgtatttttagtagagacgaggcttcaccatgttagccaggatggtctccatctcctgacctcgtgatccgcccacctcggcctcccaaagtgctgggattacaggcgtgagccaccgcgcccggccagagaatagagtatcttaagcaccctacaaacgaacaagaagacaacctgaatcaaacaagcaaaaacatgaacatgcaatttaatggaagataaaatttaagttctcaacccactaatcattttataaccaaattaaaacagcagtgacatattatctcacacaaattatatgagcaacatttaaaacaattcactaatgaactgatgagtttgtacagtagtgttatttctcctacactggtaataggagtctaagttggacaaatccttggaggtcatggaatatctagtaaaaataa

SEQ ID NO: 10592 - DNA, 584 bp, Homo sapiens
tttgagacggagtctcgctctgtcgcccaggctggagtacagtggtgtgatctcggctcactgcaaactccgcctcccgggttcacgccattctcctgcctcagcttcccaagtagctgggactacaggcgcccaccaccgcgcccggctaatttttgtatttttagtagagacgrggcttcaccatgttagccaggatggtctccatctcctgacctcgtgatccgcccacctcggcctcccaaagtgctgggattacaggcgtgagccaccgcgcccggccagagaatagagtatcttaagcaccctacaaacgaacaagaagacaacctgaatcaaacaagcaaaaacatgaacatgcaatttaatggaagataaaatttaagttctcaacccactaatcattttataaccaaattaaaacagcagtgacatattatctcacacaaattatatgagcaacatttaaaacaattcactaatgaactgatgagtttgtacagtagtgttatttctcctacactggtaataggagtctaagttggacaaatccttggaggtcatggaatatctagtaaaaataa

SEQ ID NO: 10593 - DNA, 584 bp, Homo sapiens
tttgagacggagtctcgctctgtcgcccaggctggagtacagtggtgtgatctcggctcactgcaaactccgcctcccgggttcacgccattctcctgcctcagcttcccaagtagctgggactacaggcgcccaccaccgcgcccggctaatttttgtatttttagtagagacgaggctycaccatgttagccaggatggtctccatctcctgacctcgtgatccgcccacctcggcctcccaaagtgctgggattacaggcgtgagccaccgcgcccggccagagaatagagtatcttaagcaccctacaaacgaacaagaagacaacctgaatcaaacaagcaaaaacatgaacatgcaatttaatggaagataaaatttaagttctcaacccactaatcattttataaccaaattaaaacagcagtgacatattatctcacacaaattatatgagcaacatttaaaacaattcactaatgaactgatgagtttgtacagtagtgttatttctcctacactggtaataggagtctaagttggacaaatccttggaggtcatggaatatctagtaaaaataa

SEQ ID NO: 10594 - DNA, 1109 bp, Homo sapiens
atatgagtgggccctacccctcaggcgcatgcgtcctgggctgctggcagagaccgtggctctctgatgccctgtccctcctctccctcctcttctaggggtcgtatcaaacacctggatgtggtgaccctcctccggcggattcagccgccactaggttttgggaagctgtgccctcaccgcgtggcttgcaaagtaagagataacggggttcatgggagggagagggaaaataggggaagtgaagtgcccatttcttgtgatcctttaagggaatgaacatactagtttatgtgcctaaagattacattttaagggtccttccagctctaaattctcagactctatgagggaataacagagtgaatgcctcctgtcctactgagccagggacccagtcctggataaaggacttgttcagtccatcccactgcaccatccgggcatcctggggtgggagacttcccagcctaggctagaggggttcggcgttcttttcctggagttggaaggccattagaaagcccaggcattgacttcaggggtctttgagtcctaaaatttttcataaaatcactaaaatacaaagtttaccagggagaggatttctcactttaatcagattccttagtgagaccatgacccaaaaaaaaagtgtcgtttccwtttctccctcccctccaccatggccactccacgctccttttctccctcctctccaccgtggccattccgtgctccttgttggggcaataatgagctgacagagagctgggggaagggagaccagagggctggagagaggaggaaactcagatggcaggaggattcggctctgtgagaatccactcatggaaaacgcagattgagggaacatagaaccttctacttgtgctctgtttactgagtttcttctcatttgtgcctccactttgctccaaaaacaaacaaacaacaacaacaacaaaaacagattttaagagatttccaagggcatagaaaatatcagaaaagagcataaaataaatgcaaggtacaaacaccatgcaaggcaagggtggggaggggtgcagcctggagggggctaaagtgcgtccgttgtggcctcc

SEQ ID NO: 10595 - DNA, 1109 bp, Homo sapiens
atatgagtgggccctacccctcaggcgcatgcgtcctgggctgctggcagagaccgtggctctctgatgccctgtccctcctctccctcctcttctaggggtcgtatcaaacacctggatgtggtgaccctcctccggcggattcagccgccactaggttttgggaagctgtgccctcaccgcgtggcttgcaaagtaagagataacggggttcatgggagggagagggaaaataggggaagtgaagtgcccatttcttgtgatcctttaagggaatgaacatactagtttatgtgcctaaagattacattttaagggtccttccagctctaaattctcagactctatgagggaataacagagtgaatgcctcctgtcctactgagccagggacccagtcctggataaaggacttgttcagtccatcccactgcaccatccgggcatcctggggtgggagacttcccagcctaggctagaggggttcggcgttcttttcctggagttggaaggccattagaaagcccaggcattgacttcaggggtctttgagtcctaaaatttttcataaaatcactaaaatacaaagtttaccagggagaggatttctcactttaatcagattccttagtgagaccatgacccaaaaaaaaagtgtcgtttccttttctccctccyctccaccatggccactccacgctccttttctccctcctctccaccgtggccattccgtgctccttgttggggcaataatgagctgacagagagctgggggaagggagaccagagggctggagagaggaggaaactcagatggcaggaggattcggctctgtgagaatccactcatggaaaacgcagattgagggaacatagaaccttctacttgtgctctgtttactgagtttcttctcatttgtgcctccactttgctccaaaaacaaacaaacaacaacaacaacaaaaacagattttaagagatttccaagggcatagaaaatatcagaaaagagcataaaataaatgcaaggtacaaacaccatgcaaggcaagggtggggaggggtgcagcctggagggggctaaagtgcgtccgttgtggcctcc

SEQ ID NO: 10596 - DNA, 1109 bp, Homo sapiens
atatgagtgggccctacccctcaggcgcatgcgtcctgggctgctggcagagaccgtggctctctgatgccctgtccctcctctccctcctcttctaggggtcgtatcaaacacctggatgtggtgaccctcctccggcggattcagccgccactaggttttgggaagctgtgccctcaccgcgtggcttgcaaagtaagagataacggggttcatgggagggagagggaaaataggggaagtgaagtgcccatttcttgtgatcctttaagggaatgaacatactagtttatgtgcctaaagattacattttaagggtccttccagctctaaattctcagactctatgagggaataacagagtgaatgcctcctgtcctactgagccagggacccagtcctggataaaggacttgttcagtccatcccactgcaccatccgggcatcctggggtgggagacttcccagcctaggctagaggggttcggcgttcttttcctggagttggaaggccattagaaagcccaggcattgacttcaggggtctttgagtcctaaaatttttcataaaatcactaaaatacaaagtttaccagggagaggatttctcactttaatcagattccttagtgagaccatgacccaaaaaaaaagtgtcgtttccttttctccctcccctccaccrtggccactccacgctccttttctccctcctctccaccgtggccattccgtgctccttgttggggcaataatgagctgacagagagctgggggaagggagaccagagggctggagagaggaggaaactcagatggcaggaggattcggctctgtgagaatccactcatggaaaacgcagattgagggaacatagaaccttctacttgtgctctgtttactgagtttcttctcatttgtgcctccactttgctccaaaaacaaacaaacaacaacaacaacaaaaacagattttaagagatttccaagggcatagaaaatatcagaaaagagcataaaataaatgcaaggtacaaacaccatgcaaggcaagggtggggaggggtgcagcctggagggggctaaagtgcgtccgttgtggcctcc

SEQ ID NO: 10597 - DNA, 1109 bp, Homo sapiens
atatgagtgggccctacccctcaggcgcatgcgtcctgggctgctggcagagaccgtggctctctgatgccctgtccctcctctccctcctcttctaggggtcgtatcaaacacctggatgtggtgaccctcctccggcggattcagccgccactaggttttgggaagctgtgccctcaccgcgtggcttgcaaagtaagagataacggggttcatgggagggagagggaaaataggggaagtgaagtgcccatttcttgtgatcctttaagggaatgaacatactagtttatgtgcctaaagattacattttaagggtccttccagctctaaattctcagactctatgagggaataacagagtgaatgcctcctgtcctactgagccagggacccagtcctggataaaggacttgttcagtccatcccactgcaccatccgggcatcctggggtgggagacttcccagcctaggctagaggggttcggcgttcttttcctggagttggaaggccattagaaagcccaggcattgacttcaggggtctttgagtcctaaaatttttcataaaatcactaaaatacaaagtttaccagggagaggatttctcactttaatcagattccttagtgagaccatgacccaaaaaaaaagtgtcgtttccttttctccctcccctccaccatggccactccacgctccttttctccctcctctccaccgtggccattccrtgctccttgttggggcaataatgagctgacagagagctgggggaagggagaccagagggctggagagaggaggaaactcagatggcaggaggattcggctctgtgagaatccactcatggaaaacgcagattgagggaacatagaaccttctacttgtgctctgtttactgagtttcttctcatttgtgcctccactttgctccaaaaacaaacaaacaacaacaacaacaaaaacagattttaagagatttccaagggcatagaaaatatcagaaaagagcataaaataaatgcaaggtacaaacaccatgcaaggcaagggtggggaggggtgcagcctggagggggctaaagtgcgtccgttgtggcctcc

SEQ ID NO: 10598 - DNA, 639 bp, Homo sapiens
atttaacaatgataccttaattcattcagcatagctgaggtgctgttaagaaaattctgatgtctgggtctcactccgaaccrattagatcaaaatctttgaagggtgatagggttagggcggtgggatgttgggtattggtatttatgaaggtgctctaggtgattctagtatgtaaccaggggagaaccagtgttttggagcattcatttaaaaataaactgactttggcgggcgacatggctcatgcctgtaatcccagcactttcggaggccaaggcaggtggattgtttgagcccaggagttcaagaccagcctgggcaacatggtgaaaccccatctctacaaaaaagaccaagaaaaaaaacaaacaggcatggtggtgcgtgcctgtagtcccagctacttgggaggtgagaagatggtttgagctcaggaggcagaggttgcggtgagccgagatctccactccagtctgggctacagagcaagaccctgtctcaaaaaataaaataaacagtttaaaattctgtttgaagaactttgggattcactttgaatagtcagtaattacccaggattattgcaaaacagagaccagcactcacagtactgagcaatacctcagcagcgtgctc

SEQ ID NO: 10599 - DNA, 540 bp, Homo sapiens
ccaacagttttctttattttaaaatgtgacactgttattcactaatatcttggtgccattcccagaaagcatgctttatataactgacaagtttttgcaaagacttttctctatttgcagcctccatgttaatgtgtttgactgatttcctcaactctcttgatcctttcctgactcagtttagctgacaaaaatctgtctcttctacaggattcctagaaaatatatatatttatttattcatttataaaatgaaatttcacattcagcacaacactgttggttttgggggggttttgtttgttttaggaggaagascgaggatagcaggcgcaaccattccattcaagtagctgtggcattcctcatttaactggttgaccaaggataaatatgggtctcagtatctcagctttggctggattaggctctgggtgaggggacaaagtgattgctgaacttccccatagacaggaagtgttgtactagtcaggactcttttggttgcaaatgacagaaatgaagccaaaatagaataag

SEQ ID NO: 10600 - DNA, 544 bp, Homo sapiens
atcctaaacaaacaaacaaaacacccttaaacttgacacaggtcctcaacatcaccaagattagtacggttgcttagcatggtaactgtggaatcagactgaggggctccagcattaggagcagccacataggaatcacctctactcactgtaacataagacaactgtttactgtaactctggttgttcatttctctaacaatttcatacacacatcttcccgttgcttagtctgaactgtatactgctagtcattatyataaggaaaaaaaaatctcagactaatataatagaggccaaatttagagagaggaataaaaatcttccttcagtctaggctaaatggactgattacacaaagaactccatacatccgaaagcacacagatgtctgcactagttcccagggctcaaacaataccagtcattcaatagctttccctttacgtaagttgctatgagagagctcaatcagctcttgtgaacctcataatccaggatcctggaactctgaaaagtctacatttttcctcagcactgtttt

SEQ ID NO: 10601 - DNA, 607 bp, Homo sapiens
tagagacagggtctcactttgttgcccaggcyggagtgcagtactattcacaggtgtgatcgcagcatactatagcctgaaactcccgggctcaagcaaccctcttcctcagcctccagaatagctgggactattcacaggtgggatcacagaacactatagcctgaaactcctgggctcaagcaacctcctgcctctgcctccagaatagctgggactacaggcacacactaccgcatgtgctaagcttatctgcaaaatacaaaaatgactacttcacatttcatttcttcaggaggatgctctaagaaccaactaaatgtatgtatatcatttggcttacttgaagaaaaggcaccacattaatataaaggacaataccaaggcaaagaaaagttccaaggtctagttgctttctatactcccttaatgccaaactttacgacttaacttgttagggatggtggccctttttacaaatatttccaaaaaagaaaggctaaacacactcacaaattgtaaacaaggttgccatgttctccttgtttgaattggagtcttccatttgcagtgaaggtgatacaaaagaaagactgtctgaagatac

SEQ ID NO: 10602 - DNA, 607 bp, Homo sapiens
tagagacagggtctcactttgttgcccaggccggagtgcagtactattcacaggtgtgatcrcagcatactatagcctgaaactcccgggctcaagcaaccctcttcctcagcctccagaatagctgggactattcacaggtgggatcacagaacactatagcctgaaactcctgggctcaagcaacctcctgcctctgcctccagaatagctgggactacaggcacacactaccgcatgtgctaagcttatctgcaaaatacaaaaatgactacttcacatttcatttcttcaggaggatgctctaagaaccaactaaatgtatgtatatcatttggcttacttgaagaaaaggcaccacattaatataaaggacaataccaaggcaaagaaaagttccaaggtctagttgctttctatactcccttaatgccaaactttacgacttaacttgttagggatggtggccctttttacaaatatttccaaaaaagaaaggctaaacacactcacaaattgtaaacaaggttgccatgttctccttgtttgaattggagtcttccatttgcagtgaaggtgatacaaaagaaagactgtctgaagatac

SEQ ID NO: 10603 - DNA, 607 bp, Homo sapiens
tagagacagggtctcactttgttgcccaggccggagtgcagtactattcacaggtgtgatcgcagcatactatagcctgaaactcccgggctcaagcaaccctcttcctcagcctccagaatagctgggactattcacaggtgggatcacagaacactatagcctgaaactcctgggctcaagcaacctcctgcctctgcctccagaatagctgggactacaggcacacactaccgcatgtgctaagcttatctgcaaaatacaaaaatgactacttcacatttcatttcttcaggaggatgctctaagaaccaactaaatgtatgtatatcatttggcttacytgaagaaaaggcaccacattaatataaaggacaataccaaggcaaagaaaagttccaaggtctagttgctttctatactcccttaatgccaaactttacgacttaacttgttagggatggtggccctttttacaaatatttccaaaaaagaaaggctaaacacactcacaaattgtaaacaaggttgccatgttctccttgtttgaattggagtcttccatttgcagtgaaggtgatacaaaagaaagactgtctgaagatac

SEQ ID NO: 10604 - DNA, 629 bp, Homo sapiens
tcaatggggtaatttaatttaacattgagttatagagagatgatggagtaaagtatggataaattgaaatcaattatctaagaaaattaaaaataaaaagttagaaaagttttccattctggaaatattcctagaaccataacattcaagtttgcttggaaagaaataaacatttagcagtggaaytggtcataattggttagagttaaaattagagaaacgtgttttagggcagaaagagagcatcacgtggcacctgacacatatttggagtttaacaaatgataaataaaatgtaagactgaatatagatggggaaatgcccgtcaaaactccatctgcttttgaaaggtgtttattgaatgtcagatttaaaatagctactcaaatataagatattttaatcaattaattgacatctaatttggtatttgtatcttgctaagtacaaattaaccactgtatatactcctgaaggttaatacattcatataaacgcagtcataattttagtatttatgaagttccaagttaattaaatggcataaagactgattcattgcatacatgtaaatggggctttcagtgtatttttttactccttttacttcctcattattaaaaaaatg

SEQ ID NO: 10605 - DNA, 629 bp, Homo sapiens
tcaatggggtaatttaatttaacattgagttatagagagatgatggagtaaagtatggataaattgaaatcaattatctaagaaaattaaaaataaaaagttagaaaagttttccattctggaaatattcctagaaccataacattcaagtttgcttggaaagaaataaacatttagcagtggaactggtcataattggttagagttaaaattagagaaacgtgttttagggcagaaagagagcatcacrtggcacctgacacatatttggagtttaacaaatgataaataaaatgtaagactgaatatagatggggaaatgcccgtcaaaactccatctgcttttgaaaggtgtttattgaatgtcagatttaaaatagctactcaaatataagatattttaatcaattaattgacatctaatttggtatttgtatcttgctaagtacaaattaaccactgtatatactcctgaaggttaatacattcatataaacgcagtcataattttagtatttatgaagttccaagttaattaaatggcataaagactgattcattgcatacatgtaaatggggctttcagtgtatttttttactccttttacttcctcattattaaaaaaatg

SEQ ID NO: 10606 - DNA, 512 bp, Homo sapiens
tgatgaaaccaaattcacttctcataccctggctgcaaggaaatctgggaaatgtcccttttagctttccaggttttagagtacggcaagacagacttcgaggaggcagacatagaactgagggccaaccccacatgtccaagactctggcaattctgtcctattcattagtctttactagtagggcagaaacaacagatgaggtgggaaccctgctcttttacttgagggtgggttccccaaatgttattaaagattgtctattctctgggactttctccaagaagaaaccttcagtcttcagcctggggttataaactggttaaagcatttggagacctggaaaggtcaactcctggttacagcccagcctcgccctgccctccctctacatgaagtctttgaaataaaartctcggtctttcacctaaaaattcatgtaaattttgtaatcgactccataataaagatttgttttaatataaaaaaaatctctgccaaatttggaggtg

SEQ ID NO: 10607 - DNA, 553 bp, Homo sapiens
cagataacagaataaaaagcccaaaaatacttacagtttagccaaagctatcagccatctgtactcattttaatcatagcaaaagtaacacatgtttgttttagaaaacttggaacatactgaaaataatttttaaaagcacatgtattttggtgtatttcctgccagtgcaaatatgcacacattttcaaggaaattggaatcataccatatagttttctatgcttcttttccctatactgtttatggggacacttttcatgttgttaaatatctttcagagrtgtcatttttcatggctgcaaaacatgccaccatatggatgtgccttgccatattgtcctgttgccctatcgttggatcttccaggcatttcctgttcccaagggatccctggaatactcagtccctacccacctaccccctcttcgccttcaggcctctgctccaccatttagctgcatggtgtgtctattaaggccctatctatttaggccctgccttagcttgaccagcccttccaccaagctcccaacctctcagccttccagag

SEQ ID NO: 10608 - DNA, 525 bp, Homo sapiens
agggacagaagtcagcataatgggtttaacatcaggttggtcttgaaatgatataggtgctacaggtatgaagatcagaagtgagtctggcactgaaatttcagcattggagtattctaggttgggttcccctaaaggagaatctgagacacagacatgagtgcagctagtttagttgggaagtgatgccaggaagcagagtgaagaagaggggacaatgagaccaggaatgaagaaaagccagtgaagagtgagttactgcattgcttatctcagtgctcaggcttactggagactgagaaactaagtagacagcacttcagagctctctctctaaagtatgaaagctggagtatttatccacttacttgcatcccccattggctgaggtttgcctgcagacagtactaactcctycatacttcctgcactcaagcttggccttctacagctttaagaaaagccctgagacaggaaggtgaagagacacccagaacagttttctggttgcatggagctgctcag

SEQ ID NO: 10609 - DNA, 529 bp, Homo sapiens
ctgagactttcataatctctcagggcacctcggaatctgcagcctttcaagccatgtgtacttgcagctgcttccgtgaatgagtgaacacgtgaatggctcggccctaaataaataagggctcttgcaaaactgtccccaactcaggaggggctgatcctctcaagcccatcatgcttctgtgccactcctggctggaccctgttatcctttaaacaagcaaagacagatggaatgattaaatggaacaaacattaggcatctcctcctgtacacaattccgaggataagacattaccgcaaaggatgtataggtgagagacagaggacttctcagagaagagcttactatctaacaactattttttttttgagatagtcttactccagcccaggctggagtgcaktggtgtgatctcagctcactgcaacctccacctcctgggttctagctattctcatgcctcagcctcccaagtagctgagattacaggtgcatgccaccacaaccggttagtttttgtatttt

SEQ ID NO: 10610 - DNA, 587 bp, Homo sapiens
caaatatttggttcatgacagcagtgattgtaatccaaattgttgcctaactgaagatatagaaatcagaattcttgattggcaaaataacaggtaaagaaagctacccagttggtattttcttaatgggcaaacatttctattctaggaaaaacaaatgtgtttttaaaaggcattctcaaactggaagtttgtatttgtaggtatggcagtgtccaccctgtcaaggtaaaatggaaactcaagaacttattcagttagagagccaaactaaatacagcattttacttcagttaaaatagaacccctttgtggtttattacagcccatggaacaatggtcactcaggaacatacaggtcagctggccatccaggaggccctgttctgacttctccgaatgtaccccagacccagcccatctctccagtagctgcmatttctcacacacctgtttgctttggagttaccttcacttttagatttatgccccaaaagtccactgtaatcctagttctgctataatgaaattttgaggatggcagagctacctttcaaatggattttgttatttaatcactgagatta

SEQ ID NO: 10611 - DNA, 525 bp, Homo sapiens
atgtgaccttgagccagtctcttaatctctcagagcagtagcatcctaatctgaaaagggaatgaaaatcttcttgcctcgcctacctatagggatgtgatgaggatcaagcccgagagccagtgtaaaatggggtgaggttgaaagtagctctccttcctcttccaatgtcgactcggggcactagagcctacgtgcagaccaagcctccagggctgtccaccatctcagtgttccttcagataaataagctcaccgctctgattggatgctggcttacttaggaccaccagtgcctttgggtcaattagaaaaagacatcatttcctctgagtggrtatggcttttgccaggtgctcagcttggtggatggaaatggatttctcttggggcaggtgttctcattcagtgaataaccacacagctaaacatcatggttttgatgccatcagcttctgtttatccctctctctattccctgaataatcaaatggatatgctgatcacatttaaaggacactaaat

SEQ ID NO: 10612 - DNA, 547 bp, Homo sapiens
tttcaggccctgtggctgacagccacatgagatggctgccggggagatatttgggcaaggagattgttttctgatttccttaattctatcttgagggtaactcttttccctgcctgtggttaaagccttcattgctcctaagtgacacaactataagaaaatgtctgtcacatcacatcctgagtggttctgcaaaccttaataaagtctcccaggagtgaagatatctctggccaaaatcagttctagttttgagtttcaatgtcactattattggcaagaggaagaaaaataatttggaagtaaagccaaatgagagcaattttaatggaaccaaaaaaaaaaaaaaaaagagaaacaaagaaataatatcccttggctcatcaattctcttccatctaaataagcagccaaacattatgagctagccttgaccaactcwgaaaacagcattgcaatgcccaggttcacttcctgtacaggaagaaaacatgtaggcctgttcctatggcaactcttgctttagcagaagaaacagcaccactca

SEQ ID NO: 10613 - DNA, 516 bp, Homo sapiens
taaataaataaataaataaataagaaataagaaagactgttaattacataggagaattgttaaagcacataggagaattgacaaaagaaaatgaatcatgaggctgacattttaaatacaggcatagtagacattctaataaattttctctcagtaataaaatatttggcctacacgagttctgaaaaggttcaacagcctaagaaaatgcaataagctgcaaatgtaattatgtaggtgtccactctgagactagtgtttagattacatttcaacttttcagggaaaaagagttggataacaatgtttaaagtagaaagttctatrtcttttaataaattcagatttcaaggtgaaactgagcatattctttgctaaacaaagacgctagtttggctgtggctctcgagcagctccggaggcacaggaagaggagaaaaggtgattcataagaggagatagactaacagcaggtgctgttaattcattttgagtctcataaacgtgttttttttg

SEQ ID NO: 10614 - DNA, 516 bp, Homo sapiens
taaataaataaataaataaataagaaataagaaagactgttaattacataggagaattgttaaagcacataggagaattgacaaaagaaaatgaatcatgaggctgacattttaaatacaggcatagtagacattctaataaattttctctcagtaataaaatatttggcctacacgagttctgaaaaggttcaacagcctaagaaaatgcaataagctgcaaatgtaattatgtaggtgtccactctgagactagtgtttagattacatttcaacttttcagggaaaaagagttggataacaatgtttaaagtagaaagttctatatcttttaataaattcagatttcaaggtgaaactgagcatattctttgctaaacaaagamgctagtttggctgtggctctcgagcagctccggaggcacaggaagaggagaaaaggtgattcataagaggagatagactaacagcaggtgctgttaattcattttgagtctcataaacgtgttttttttg

SEQ ID NO: 10615 - DNA, 525 bp, Homo sapiens
ccccagggtcaagtgcatgctcagttcactcttcttatgaagtgccttgcactagtttgggggtcaaaatattgtctatctttgggtaaagttattacacttggatttttagggagtgtaggtagcatctatttgtttcctgttctatacatactgttactgtaaaatgctgcttctcaggttgccgtctcatgaaatatttgtcctatatgcaatacatatttaacatatattggggrggagggtcccacacactggaagccttaaattgtagcatctctaataacaaaaggctttaaggcattttcctttagaacaacatgtgcatattttctatgaaccaaatgctttccttcatgattttcttttctggtaatatctgtctcctccacaaccatctcccaagtccttaatcctaagtactaaataccatatttaatagtgttccatgaaggttgagcatccttggttttatatttattctactgagaactatcatttaggtcttattggtgaacataagga

SEQ ID NO: 10616 - DNA, 1429 bp, Homo sapiens
aatcctccatattatttgttgtttttgtttgtttgtttgctttttaaagagtcagggtcttgttctgtctcccaggctggaatgcagtgacacaatcgtggttcactgcagtcttgaactcctggacacaagagatcctcccaccccagcctcccagatagctgggactacaggcatgtgccaccgtgtccgcgtacctcctaattttttatagcccatctctaacacttcctctgaccactctgaaagccatggttcctcttttgaccaggcactgtggraaaatgaaacaaaagaaaaggaccttgccactgaaaagctaaccaaggagacaagaccaatacaagatacagcagagaaaactccacagtactgttaaactcttaggtaaaaaaatcataattgcttttcaaatgaactcaaggcatagtcaaatgaccaattataatccttaatcaacacatgaatggacttgacaaaatcctttcaccctcaaagcagaattctgttatgagttttgatcctgtttagattcctgtgtataaatttgttcaggagcttcccatttgcagcaaagctgatgtatacaaaacaggatttactaaacattttaggtcgtgattagttccaccaaaagactcaccataaaatttcttctaagaagcaaagcttatttgctaaatagattaaaaggtgatttggttcacagaatcattttgtttacacagaatttcaggacagatagccattgcataaaactgaggcaaacttataattactttaccaaatagcctggagtgccatgagttaatacaactccctaataagcttaattcatacccaggaagtagcctgaatttaagttttggtagaaggtattaacagagcatgtccaaaagataattaactgcccatagtcatcaatttggttacctccggaggagtctcactgccatctctactcatctgcggatttatttatgaataatgagtcactacaaacagaatgattaatccataaaaaggagaaatcttggaatttagactggctctctttccagagtaagttttcttaaatgagatttttcaaacatgaatgagctttagggaattctcaaacactggaaattataagctaaactttgtatgtgtgtattttttgtgtgtggagaagatccataactctgatcagatttttcagagggatccatgacaactcgcccctggctccccaaaaaagtcactgcttattttcccatgaatgagcttcaggaagttccatgagcctctttgatttgtatcacaatcttctttgtcacatataccaagaacaaagccaactaaggtgcccaaactctcagtcaccttcattgcccctccttcactctcctctactttgtcattaacatttacccattttggttctgag

SEQ ID NO: 10617 - DNA, 532 bp, Homo sapiens
ccactgttcctgcagctgagagccctttgccctcacacagggtcagctctgggcaacaaagagggagtggctcagacagggtcagagaagtctcatcccaaactctggcttccagcatcatctgttcctggaggccaggccctgcgcagacctggccacccagggtgctggacacccccaaccctgactccacaaggacccagcagggcccatgggcccaggccagcacggaggggactcatgcagatgcagaagccaagctccccaggtggccctggcatgcctccccgcagggctcctcctcaggccattcctgccaccctgagtcctctatcccagtgacctscatcaggctcctcctagtggttcccacaggacactgaccaggctgcggcaggcgcatacttgcactccgggccttctcccatgctctccagcccccagccccacaaagcaggctggatgtggtcctcatgccctggggcttggatgggggcccctgtacagatggcagtgacagcatcctgggacc

SEQ ID NO: 10618 - DNA, 579 bp, Homo sapiens
gtgatgtgcagctggtttctggctcttctgcaggcgctttcttstgtgtataaatgttcgctttggtgttcctgtgagggttgtaggatgaccgctggagggttctgttcggccatgttgctccgccttcatctctaggtctcgctattttgcccaggctggtcttgaactcctggcgccaagaaatccttctgcctcagcctcctgagtcgctgggaccacaggctcacaccactgcctggctttcaccttcctttctctaccacccccatctcctctctaccacagctgtgccagccctgttgcctcttgcctagcctatggcaccagccttccatctggtcccccagcctcttgcctctgcccccacccagcccagtctatcctggacacctgccacttgctgaaatgctaatccagcctcatcacttcctaaggccctccctgactccttgccacttgtatgtgctgcctaagccccttggcttggcacacaaggcccctcagcatctctcaagtgcccattactccttcctcacctcactggcttccccctccccaggcccagctccaagcctg

SEQ ID NO: 10619 - DNA, 559 bp, Homo sapiens
aattactccagcacctggacccatttagattaagtaaatttactgaggctccagaggaaggtctcccggactcagaccttagttatagattaaaagaagatagtcactattgtatttagataaatgcacacttacacatagacatatagcttagaaggtatataagctctggaaaactttgtaattttgacttggtctggtgataatttccaggccttctccctgtaaccggttgcrgaaatacaaattctcttcctccccagttcatttgcatctcattgtagggccatgagaaatagcagcctgaccctcagtttggtgacatagagcttaataatttaattatgttggatatttgaaaatttaaacatagagagaattgactttttcttactgaatatttgcatttttattattcagaataagggagattaattctttagattaatgtgtagcttactgatatggtttggatctgtgtccctaccaagtttcatgccaaattgtaatccctagtgttggaggtgggacctggtgggaggtgactggatcataggca

SEQ ID NO: 10620 - DNA, 1070 bp, Homo sapiens
cttcttatgaacagaatgtgagaccaatcatgctgttttccaagataagagagtttaagtgagaatcacaaccacttccttctcctatgctagacgctattgacaggaataaggatattgtgacatgtgagatgtgtagcataggcacagaagctaggccagatttactgccaccctgggtattcttgattgccaagatggctgtggcttccagttgatgtcacaaatctactcattccctgagaattgggaaagaaaacaaaagaaatggtaactggaagccattgcctgggaagttgaatcacggtttttttataatgtgctggacctgatctgaaagtcaatacatggttgtgtaggcttagcaaactccctgacaacccattcagggttttcctgccttctctcctttccagtatctgggtatatgtcctggcagaattttccctttaaaacgtattcactaaactatacttaaggaaactgagtaaatattacatcttttaggctttgcttaaacaataaaaaggccagaattttttwaaaaaaattaaacttacctaaaaagagcctttgactaaatgattagtgaagaaaggcttgaaatgtcctgtgtcaacttattgagaaagtctgtgcatatttcatggctaagtcattttgaaagtccatttcacagtaaaagatattcggatatttgtaaagcactttactgttttaaaaaaactgcttttaccatctgtgatttcactgaagtgtgcagtttgaagtaactctgtaaatcaggaaggggttatgggtctcaatttagagataagaaaataagactcaaagaggttaaatgaagagtttgtatttgaacctagaacttgggtcctaaatctgatgtttgctgcctcatgaggaaatgacagaaggtgtctaatttaagtttgcaatatgcctaaactgtgttgaaaatcatacttgcacttgacatttaaaagtgagagtacatgtgataattctggaaaaaaataaagcaaatatttattctgcactatgaactttgattatagtaattgagaaaa

SEQ ID NO: 10621 - DNA, 533 bp, Homo sapiens
gaatatattattatccaaatacaggtttcatatgtcttacctctacattcttttttctgtcttccaacacaaaataatgtttttttatttgaacttggtaagatgttgcaaatgactactgttaggaaaaaaaacaatatgatgagtgactttttgtaacttttacataggtttttagatcaaatagtctctgtaatataactaacatatcacaaggactggttatgttaaaattaccttctkcatccttcctatttcatttttgaaattaaagttaaatacaataaagcaatctgttactaggactttttcaagtgaacaacctatcccagtgcattctacatttactaaggttttgcttttacctttgagcagtggattattttgataaatttgagataaattgctatacttttttaaaaccaaattctgtaattattttaattgatccatcaattcattcaaaatgctgggtttcatagctcttgttagtcacagcttaacatgaggtaaattccttactgaaggaaaat

SEQ ID NO: 10622 - DNA, 480 bp, Homo sapiens
tcttaaacttcagcatatatcagaatcacctggagagcttggtgaaatgctaattggtgggttccatggcacttttgattctgtagatctggggtagagcccaaagattcacatttctagtgtggacccaggtaatggttatgctgttaatgagagaactacattgaaaaacactaatgttaaaatttaacacatttttggatattgtaagtaaacctaactggcaaatgtgtgaagcacacagcttgttttttctgtaccactcctttgttccaatcagaaatgtttctctgtagccygaataaatatagcttgtttacatgctcaagaatgtggtagggtaaaggagggaggaacacaaggctggatacttgatatggttttgctgtgtccccacccaaatctcatcttgaattgtagcttccacaattcccatgtgttgtgggagggatccagtgggaggtaattgaatcatggggg

SEQ ID NO: 10623 - DNA, 2373 bp, Homo sapiens
ttcctcttagtggcttttcttttcttctgttattttctgagagattctgaaaaaaaatctaaatgctaaaagtaatgcaaccaattaattccccttgggcatatactatgtgtccatttatatagattatttccttcaattatctcagtacagtatgcaggaactatcattattattattcagttttatagatgtgcaaactgaggctaaagaggttaaattgcccaagggtcacacaactaggaaatagtggaatttggaatcaagtggagacactaggactccatagcctcatttcctttttgctctcttctaatttctatttggtaagaaaaaaaattgccatcagactccccattttttccaatactttgtttgctattatgtctgatgttcagaaaaaatattcggatggtttctaccttttttactcctagacattttggggttatggaaaccatgcctcatgctgtagggaacacttgtcttatttgaactgtaaatgaagtgctagctcaagtcagatttcacccactgtgtgaaccctgagccagaccctatgtttttcctcagtgctaaaatttactgtcagcatactgtatgctgcttatcttccttttggcctacctctgaagaactatatcgattcttcatttaggtcagcaggttgattttctcacctcaactgcaagcctctgaatagtgctagataattcaaatcttcctatcctagagttgtactacattcccgtatatacagatttcttgtctatgttttttttttctcttagggaagaattagaaacatgtttaattgtcagaattaaaggatgcttatataggaagaaagaattatgactgtagaattatacatcttgaagagacctaaaatatcatcgaattcaaagaatgtcacccgcaggaatgaaaggcatgtgccaattaggggtattgacatcacttgataattctgtgtaaaaatatactttcacattccacctcccaaaatacacagtctgctataatacctaggagcatattatctcctgcagcctcacactgaaatttacctgaaattcactgactaaatgaggcatcattaagaagaatgtgacataaaccgttattgcaaggtaggagtactgtatcagagttaagtaagaaaaatagagcccatgcatgccagatagaacaatagagaagagttaatagtgggcattcatttacaagatgttgggaaaactgaaatccaagcatgaggaaagtgaggtcacctaggaattagcagtggcaggaagccagtttctttccttgggttggagagaaacagtgagaatcagagcccagaactgraatcacctggagggaactagaaccatgaagggaagaaccagtgaaaaagaaatttccttttccactccctctaattccctgtgtctcctagtggttgaatctatccagaagccagttgacaaggaagcctgaaaatgtaaccttgcagcgcccagttccctacaatatagagcaagaagcagagaatgaagataaaagaaaatcataagtgaccagcagacttagaatcactgttttaatcccttcatcaattgtatacatgattgcttcaattatctccagatgaagaagacttctcaaatttccttaccaacaaatgtcatagtcacactctcatagccaggaagttatctttctgttattaaaaaattattttagaagttatttatttttgtatacaatgggtaattactgtcttgtgtagttttgtcatcattatatttttaaaactgtaggaatacatttgccatacttattttagtgttgatctttgatgttcaaaaaaaaatttattttaatgtttagatttttatgtatttccctgtttcaaaattatctgataagaatatatcatctgtttcctactttttcttaaaattcatggaagagcatttttcctcctccagctatatacaccagaacttaagaatcttcattcaatgtttttaacaaagtcttatgaaggtagaagaaaatacaatgttaaggctttgaaaaggattaaatttctttaataagttactcaataatgtaaaagtagaataatagtatttagtctactttcaaatggtataccaagtgccttttatgttctgactcatgttctcttaggtcatttttatctatcagccacttttgtagcagccagcttcatgaatgtggaactgagaaacaccttatctcagtatcagcctcttccttcctggtacttctttgatcctcaatatgggagtttgaagtaatcttggtcactcatgcatgtacaacctaagtgtggtaaggaggtaatatagatccttg

SEQ ID NO: 10624 - DNA, 2373 bp, Homo sapiens
ttcctcttagtggcttttcttttcttctgttattttctgagagattctgaaaaaaaatctaaatgctaaaagtaatgcaaccaattaattccccttgggcatatactatgtgtccatttatatagattatttccttcaattatctcagtacagtatgcaggaactatcattattattattcagttttatagatgtgcaaactgaggctaaagaggttaaattgcccaagggtcacacaactaggaaatagtggaatttggaatcaagtggagacactaggactccatagcctcatttcctttttgctctcttctaatttctatttggtaagaaaaaaaattgccatcagactccccattttttccaatactttgtttgctattatgtctgatgttcagaaaaaatattcggatggtttctaccttttttactcctagacattttggggttatggaaaccatgcctcatgctgtagggaacacttgtcttatttgaactgtaaatgaagtgctagctcaagtcagatttcacccactgtgtgaaccctgagccagaccctatgtttttcctcagtgctaaaatttactgtcagcatactgtatgctgcttatcttccttttggcctacctctgaagaactatatcgattcttcatttaggtcagcaggttgattttctcacctcaactgcaagcctctgaatagtgctagataattcaaatcttcctatcctagagttgtactacattcccgtatatacagatttcttgtctatgttttttttttctcttagggaagaattagaaacatgtttaattgtcagaattaaaggatgcttatataggaagaaagaattatgactgtagaattatacatcttgaagagacctaaaatatcatcgaattcaaagaatgtcacccgcaggaatgaaaggcatgtgccaattaggggtattgacatcacttgataattctgtgtaaaaatatactttcacattccacctcccaaaatacacagtctgctataatacctaggagcatattatctcctgcagcctcacactgaaatttacctgaaattcactgactaaatgaggcatcattaagaagaatgtgacataaaccgttattgcaaggtaggagtactgtatcagagttaagtaagaaaaatagagcccatgcatgccagatagaacaatagagaagagttaatagtgggcattcatttacaagatgttgggaaaactgaaatccaagcatgaggaaagtgaggtcacctaggaattagcagtggcaggaagccagtttctttccttgggttggagagaaacagtgagaatcagagcccagaactggaatcacctggagggaactagaaccatgaagggaagaaccagtgaaaaagaaatttccttttccactccctctaattccctgtgtctcctagtggttgaatctatccagaagccagttgacaaggaagcctgaaaatgtaaccttgcagcgcccagttccctacaatatagagcaagaagcagagaatgaagataaaagaaaatcataagtgaccagcagacttagaatcactgttttaatcccttcatcaattgtatacatgattgcttcaattatctccagatgaagaagacttctcaaatttccttaccaacaaatgtcatagtcacactctcatagccaggaagttatctttctgttattaaaaaattattttagaagttatttatttttgtatacaatgggtaattactgtcttgtgtagttttgtcatcattatatttttaaaactgtaggaatacatttgccatacttattttagtgttgatctttgakgttcaaaaaaaaatttattttaatgtttagatttttatgtatttccctgtttcaaaattatctgataagaatatatcatctgtttcctactttttcttaaaattcatggaagagcatttttcctcctccagctatatacaccagaacttaagaatcttcattcaatgtttttaacaaagtcttatgaaggtagaagaaaatacaatgttaaggctttgaaaaggattaaatttctttaataagttactcaataatgtaaaagtagaataatagtatttagtctactttcaaatggtataccaagtgccttttatgttctgactcatgttctcttaggtcatttttatctatcagccacttttgtagcagccagcttcatgaatgtggaactgagaaacaccttatctcagtatcagcctcttccttcctggtacttctttgatcctcaatatgggagtttgaagtaatcttggtcactcatgcatgtacaacctaagtgtggtaaggaggtaatatagatccttg

SEQ ID NO: 10625 - DNA, 2373 bp, Homo sapiens
ttcctcttagtggcttttcttttcttctgttattttctgagagattctgaaaaaaaatctaaatgctaaaagtaatgcaaccaattaattccccttgggcatatactatgtgtccatttatatagattatttccttcaattatctcagtacagtatgcaggaactatcattattattattcagttttatagatgtgcaaactgaggctaaagaggttaaattgcccaagggtcacacaactaggaaatagtggaatttggaatcaagtggagacactaggactccatagcctcatttcctttttgctctcttctaatttctatttggtaagaaaaaaaattgccatcagactccccattttttccaatactttgtttgctattatgtctgatgttcagaaaaaatattcggatggtttctaccttttttactcctagacattttggggttatggaaaccatgcctcatgctgtagggaacacttgtcttatttgaactgtaaatgaagtgctagctcaagtcagatttcacccactgtgtgaaccctgagccagaccctatgtttttcctcagtgctaaaatttactgtcagcatactgtatgctgcttatcttccttttggcctacctctgaagaactatatcgattcttcatttaggtcagcaggttgattttctcacctcaactgcaagcctctgaatagtgctagataattcaaatcttcctatcctagagttgtactacattcccgtatatacagatttcttgtctatgttttttttttctcttagggaagaattagaaacatgtttaattgtcagaattaaaggatgcttatataggaagaaagaattatgactgtagaattatacatcttgaagagacctaaaatatcatcgaattcaaagaatgtcacccgcaggaatgaaaggcatgtgccaattaggggtattgacatcacttgataattctgtgtaaaaatatactttcacattccacctcccaaaatacacagtctgctataatacctaggagcatattatctcctgcagcctcacactgaaatttacctgaaattcactgactaaatgaggcatcattaagaagaatgtgacataaaccgttattgcaaggtaggagtactgtatcagagttaagtaagaaaaatagagcccatgcatgccagatagaacaatagagaagagttaatagtgggcattcatttacaagatgttgggaaaactgaaatccaagcatgaggaaagtgaggtcacctaggaattagcagtggcaggaagccagtttctttccttgggttggagagaaacagtgagaatcagagcccagaactggaatcacctggagggaactagaaccatgaagggaagaaccagtgaaaaagaaatttccttttccactccctctaattccctgtgtctcctagtggttgaatctatccagaagccagttgacaaggaagcctgaaaatgtaaccttgcagcgcccagttccctacaatatagagcaagaagcagagaatgaagataaaagaaaatcataagtgaccagcagacttagaatcactgttttaatcccttcatcaattgtatacatgattgcttcaattatctccagatgaagaagacttctcaaatttccttaccaacaaatgtcatagtcacactctcatagccaggaagttatctttctgttattaaaaaattattttagaagttatttatttttgtatacaatgggtaattactgtcttgtgtagttttgtcatcattatatttttaaaactgtaggaatacatttgccatacttattttagtgttgatctttgatgttcaaaaaaaaatttattttaatgtttagatttttatgtatttcmctgtttcaaaattatctgataagaatatatcatctgtttcctactttttcttaaaattcatggaagagcatttttcctcctccagctatatacaccagaacttaagaatcttcattcaatgtttttaacaaagtcttatgaaggtagaagaaaatacaatgttaaggctttgaaaaggattaaatttctttaataagttactcaataatgtaaaagtagaataatagtatttagtctactttcaaatggtataccaagtgccttttatgttctgactcatgttctcttaggtcatttttatctatcagccacttttgtagcagccagcttcatgaatgtggaactgagaaacaccttatctcagtatcagcctcttccttcctggtacttctttgatcctcaatatgggagtttgaagtaatcttggtcactcatgcatgtacaacctaagtgtggtaaggaggtaatatagatccttg

SEQ ID NO: 10626 - DNA, 2373 bp, Homo sapiens
ttcctcttagtggcttttcttttcttctgttattttctgagagattctgaaaaaaaatctaaatgctaaaagtaatgcaaccaattaattccccttgggcatatactatgtgtccatttatatagattatttccttcaattatctcagtacagtatgcaggaactatcattattattattcagttttatagatgtgcaaactgaggctaaagaggttaaattgcccaagggtcacacaactaggaaatagtggaatttggaatcaagtggagacactaggactccatagcctcatttcctttttgctctcttctaatttctatttggtaagaaaaaaaattgccatcagactccccattttttccaatactttgtttgctattatgtctgatgttcagaaaaaatattcggatggtttctaccttttttactcctagacattttggggttatggaaaccatgcctcatgctgtagggaacacttgtcttatttgaactgtaaatgaagtgctagctcaagtcagatttcacccactgtgtgaaccctgagccagaccctatgtttttcctcagtgctaaaatttactgtcagcatactgtatgctgcttatcttccttttggcctacctctgaagaactatatcgattcttcatttaggtcagcaggttgattttctcacctcaactgcaagcctctgaatagtgctagataattcaaatcttcctatcctagagttgtactacattcccgtatatacagatttcttgtctatgttttttttttctcttagggaagaattagaaacatgtttaattgtcagaattaaaggatgcttatataggaagaaagaattatgactgtagaattatacatcttgaagagacctaaaatatcatcgaattcaaagaatgtcacccgcaggaatgaaaggcatgtgccaattaggggtattgacatcacttgataattctgtgtaaaaatatactttcacattccacctcccaaaatacacagtctgctataatacctaggagcatattatctcctgcagcctcacactgaaatttacctgaaattcactgactaaatgaggcatcattaagaagaatgtgacataaaccgttattgcaaggtaggagtactgtatcagagttaagtaagaaaaatagagcccatgcatgccagatagaacaatagagaagagttaatagtgggcattcatttacaagatgttgggaaaactgaaatccaagcatgaggaaagtgaggtcacctaggaattagcagtggcaggaagccagtttctttccttgggttggagagaaacagtgagaatcagagcccagaactggaatcacctggagggaactagaaccatgaagggaagaaccagtgaaaaagaaatttccttttccactccctctaattccctgtgtctcctagtggttgaatctatccagaagccagttgacaaggaagcctgaaaatgtaaccttgcagcgcccagttccctacaatatagagcaagaagcagagaatgaagataaaagaaaatcataagtgaccagcagacttagaatcactgttttaatcccttcatcaattgtatacatgattgcttcaattatctccagatgaagaagacttctcaaatttccttaccaacaaatgtcatagtcacactctcatagccaggaagttatctttctgttattaaaaaattattttagaagttatttatttttgtatacaatgggtaattactgtcttgtgtagttttgtcatcattatatttttaaaactgtaggaatacatttgccatacttattttagtgttgatctttgatgttcaaaaaaaaatttattttaatgtttagatttttatgtatttccctgtttcaaaattatctgataagaatatatcatctgtttcctactttttcttaaaattcatggaagagcatttttcctcctccagctatatacaccagaacttaagaatcttcattcaatgtttttaacaaagtcttatgaaggtagaagaaaatacaatgttaaggctttgaaaaggattaaatttctttaataagttactcaataatgtaaaagtagaataatagtatttagtctactttcaaatggtataccaagtgccttttatgttctgactcatgttctcttaggtcatttttatctatcagccacttttgtagcagcyagcttcatgaatgtggaactgagaaacaccttatctcagtatcagcctcttccttcctggtacttctttgatcctcaatatgggagtttgaagtaatcttggtcactcatgcatgtacaacctaagtgtggtaaggaggtaatatagatccttg

SEQ ID NO: 10627 - DNA, 564 bp, Homo sapiens
tgacctagttrtattttagaaagagataacattattaaaagaaaagaaaaaaatgatcaaaggtcagggttttgggtgtgggtgaatgtggtagattaattctcaagcaattaccctaattcatttcacacttattatactgaaaatatattgaataagtacttttagaacatccatgacatacttcagtatccctgaaactacaaatggtgaaaaactttcagatcactcatggttttgttatttaagctttgtgaaactcaaagatttataaaaatgtcgttaatggatttcttttcatcagaattacatgtctaatattgtattctaaattacagttctccattacaatgaggttttagctctaagtgctatttcataattatgagttgtttttcatgaactcctatgtaaattttttaaaatgactgagacaaattcattttccaggaatttgtatttatttttgttaatttcaatatacaggaaacgttttatagaaaatttttatgtcagtagaaaaactaagagaattatgattcaggaacattagcaatcactaaa

SEQ ID NO: 10628 - DNA, 548 bp, Homo sapiens
ttgacaattgtgattaagagggaatccttgtgcactgttgatgagaatataaatagtacagtgcttatgaaaaacagtacggaggtttctcaaaaaattaaaaagtagaactaccatatgatccagcatttccgtctctggatatttatccaaataaatgaaatcagtatgttgaagagatagctgtatttccatgtttattgcagcattatgcataattaagatatggttattattttctttattgggtcatcagggctcacgtctggtggttggtgtaccctaaacagtgggcattaagggattccccaggtcattaaaaaattggggggattagtgttagggttagttccttcccatcctttcacttacttgaatcaagaagctggcaggttatcagagctctgctgggatacctccagaaagcctccctgcctttcattttgctgcctcagggccagagagacctagctcattcttccttctccctctaggccttktggatagtaaggaatcagtggtccaccatggggcagatggccactccg

SEQ ID NO: 10629 - DNA, 528 bp, Homo sapiens
cgaagagctgctacacaaaggctttgtttattagagggccagagaggcatcagcatgcctttagggagtaaatgacctagggattgtctgcgttagttttagagaagaaagttgtcaccarcaggcttaaacaaattattttcttttagctgaactgattgagagttgccatttaagtgacaattggaagaaaagaagctgttattaggatgggggcgggggtggagcacaagagcgagcagatgctctaggtccattgacatccgtattgggttgcgggtactgtgagtttctgagatggaaactgatatcagcatgagtggaggataacagcattttagtgtatctatctgataaagaagagtatatatgaaaagttgaggaagatgcagagcaagcataagaatctgaatgtttctttgcaaagtggaagagaaaggaggaataaaataaaaaaaataggcatgcctcttaaagactaagattctagctaatgaatacacggtaggtgaaacattaataaatata

SEQ ID NO: 10630 - DNA, 616 bp, Homo sapiens
tgtgaggaatctcgccttcccccacaccccaacaagcttaattttctcttgaatatttatctcactctctcataactttcatataatttcaaactctccaaaacacacccaaaaagggagctgaaggacaggaagggattatatattttttccatggtatattctcttctaatgsagaaaggcaattaggcaaaacaagttaaaagcaagctaagctttttcttcttgagcagtgtagaacaaaaggctttatctgatttatgctaaaactagttcattgcaagcaggatcttaataccctaatcaaagaaatttaaaaataaattaaagaaaacatctcacctttgttacttagaggcaaaaattacgacaaaattatttcctggtcagcattcttagactagcctcagctattttttttttcttgaattaagaataatgaaaatcaccataaaatgaaacaaaaaaaatgtatcacaaaaatattttgcaattctctttctgcccccttccattttacttcctttctcaacatttgggatttaatgagctttaaaaatatgtatacaaaggataactgtctttgacttttttgatctttcctccatgtagtttg

SEQ ID NO: 10631 - DNA, 570 bp, Homo sapiens
catgaacttgcggtaaaaagaagtaagggaacttcaggaatgccatagttctctcttacattcctgaaaattaaagttttgtatactgctcctaatggtaaaatcctcgacctggtctgatacaggcttagtctcccaaaagtgtaaatgtgtttgcccgtgcaccactggagaacaaatccttcaggtaagtgagtgtcttccgtgaaagcaaagtgctactacattcatgtattcacatcacatgcatgcatgcttctgcagagagatccaacatggtgagtttcattttgtaggattgcctgagagcatgatgttattttgaagtgtgtcaccttccttattttaagaaaaagaaagtatatataatttcaggtgtcaggtataaaattccaggtaaaatttgaatcctggaractcctggctatgaccctgcaattattgttttgtcagtactgttgtgacattccatggtgagttgtcttctgtttgaattggtatttttcaataaatattaggatttattttgttcatttaaaatacatatataaagacattggcaacaggaaa

SEQ ID NO: 10632 - DNA, 771 bp, Homo sapiens
tattaaatatcttatagtttttataaaatgttcaaccctaaaagaaataagtaacagaattttaaaaattccgtggtgcaaataaacagcagactgatgaaacatcttgttctcgcttttctgccttaaaaattgcatgaattcatttttgtttctttccactgtggccatttaagcctccatcctcagcttcctggctctacgggaagaaccccctgttcctctcattataaacttcctccaaactattctccatttataacccatcaaagcctttgaaatcataaattactctctataatctcttctttttacacttagaataagagaaaaataataataataacaaagtaccaacacttttccaagtctcacaaagccctaaataatcctgtccttgtccaaccctctggctcacgctgtgccactcctcttttgttcccagagaaaaggtaattttcttgaacagtaaataacagacaagatgaatgggaaaatatcccattacacccttatgctcaagagaaaatatgacaagttttgatgagatccttctggctaaaaagttgctaatgataatsaaaacaaaaggggatattacttcaacaaatgcaatttgctaaagagaaaaataaaacaaaaaaaatttttgcaagagtgttcttttctccaaattgatgccatatagatgtaatttggcgtgtccaatgcagtgacctctgtgggccaggacaccgagatgaagaccttgggaaaaagagctccagggct

SEQ ID NO: 10633 - DNA, 647 bp, Homo sapiens
tgagatcacgccactgcattccagcctgagcaatcgagcaaaaaccctacctaaaaaaaaaaaaaggaggctggtgattcaggaatgatagaaaaaaaaggatatgtactcaaaggtaaagacttaataaaaattaataatatttattgcttcataaaggatatttaaaaaacttttttttccctgtgagttgatggtggtgaagcacgcaagactactagtggactttagtgcctcattgtactaagacactaacagttttacccattatttcttttgcactattagtgcaaatgtcaacacagtgaaaaacccaaatatgatcttactgtaattgtgaaaatagttgtgacctcatggaccccctgaaagtgtctgtagaccatattttgataaccacggtcctaaagaactctccaccaactctacctctgccttaggactcatgagttcttaggaagactgttacagtaatcatcaccataaccagttctstctctctccaaagctgtccccttctatcagtcttccacacagccagagtgagcgttcagaaaagtatcagtgggacattcttctgcttaatacccttcagtgagttcccactggctttaaggtctaaactccttagcataggacatatgatg

SEQ ID NO: 10634 - DNA, 647 bp, Homo sapiens
tgagatcacgccactgcattccagcctgagcaatcgagcaaaaaccctacctaaaaaaaaaaaaaggaggctggtgattcaggaatgatagaaaaaaaaggatatgtactcaaaggtaaagacttaataaaaattaataatatttattgcttcataaaggatatttaaaaaacttttttttccctgtgagttgatggtggtgaagcacgcaagactactagtggactttagtgcctcattgtactaagacactaacagttttacccattatttcttttgcactattagtgcaaatgtcaacacagtgaaaaacccaaatatgatcttactgtaattgtgaaaatagttgtgacctcatggaccccctgaaagtgtctgtagaccatattttgataaccacggtcctaaagaactctccaccaactctacctctgccttaggactcatgagttcttaggaagactgttacagtaatcatcaccataaccagttctctctctctccaragctgtccccttctatcagtcttccacacagccagagtgagcgttcagaaaagtatcagtgggacattcttctgcttaatacccttcagtgagttcccactggctttaaggtctaaactccttagcataggacatatgatg

SEQ ID NO: 10635 - DNA, 553 bp, Homo sapiens
agtcttcggagaggttaagcgacttcctcagggtctcgcagtcagccggtagcagagaccgggtgtacagcacccgcatgttaggaccaaaagccggacactgctggattgacccctcgcggccaagcgggraagaggcatttaggggtccttgcgcagccgcgtggcccctcccactcggccctcgatccaccctccttgagagcaggcaggattctagcatcacccagtgccttcatcaagagtctttaaccccaagcccgctcgctagcgacctccaggccggtttggggcgcggtgtggccggtggcgagaggtggagtgggggcggagaccgacccagtcttcgcaactctatttgcatacggaggcgactcgcttccttcccgcccctccgccgcgctcttcttccttccttctccagtcccttccactgtgcgtcttctgtcccccgttcttccccagcggacccctctttcgagactccctagtggggtccccagctcccgggcgatcctgcccttgccgagcgcgttttctggagtcacctggg

SEQ ID NO: 10636 - DNA, 553 bp, Homo sapiens
agtcttcggagaggttaagcgacttcctcagggtctcgcagtcagccggtagcagagaccgggtgtacagcacccgcatgttaggaccaaaagccggacactgctggattgacccctcgcggccaagcggggaagaggcatttaggggtccttgcgcagccgcgtggcccctcccactcggccctcgatccaccctccttgagrgcaggcaggattctagcatcacccagtgccttcatcaagagtctttaaccccaagcccgctcgctagcgacctccaggccggtttggggcgcggtgtggccggtggcgagaggtggagtgggggcggagaccgacccagtcttcgcaactctatttgcatacggaggcgactcgcttccttcccgcccctccgccgcgctcttcttccttccttctccagtcccttccactgtgcgtcttctgtcccccgttcttccccagcggacccctctttcgagactccctagtggggtccccagctcccgggcgatcctgcccttgccgagcgcgttttctggagtcacctggg

SEQ ID NO: 10637 - DNA, 553 bp, Homo sapiens
agtcttcggagaggttaagcgacttcctcagggtctcgcagtcagccggtagcagagaccgggtgtacagcacccgcatgttaggaccaaaagccggacactgctggattgacccctcgcggccaagcggggaagaggcatttaggggtccttgcgcagccgcgtggcccctcccactcggccctcgatccaccctccttgagagcaggcaggattctagcatcacccagtgccttcatcargagtctttaaccccaagcccgctcgctagcgacctccaggccggtttggggcgcggtgtggccggtggcgagaggtggagtgggggcggagaccgacccagtcttcgcaactctatttgcatacggaggcgactcgcttccttcccgcccctccgccgcgctcttcttccttccttctccagtcccttccactgtgcgtcttctgtcccccgttcttccccagcggacccctctttcgagactccctagtggggtccccagctcccgggcgatcctgcccttgccgagcgcgttttctggagtcacctggg

SEQ ID NO: 10638 - DNA, 651 bp, Homo sapiens
agcttagttttttagaagctcatagttcaaaggaggaggcaggggtaacaagagattagtgcaggatgccgtgcgaccttgaggagggagtcaccaatgactggagcagtgggaatggcctcctgcatgaggccacactggacagccaaccacatctaactttctcttattgtaattgacactgtgattaaaatatctgtgaagagccaggagtggtggctcactcctgtaatcccagcactttgggaggctgatgcaggcagatcacctgagatcaggagttcgagaccagcctggccaacatggtgaaaccctgtctctaccaaaaatacaaaaaaacagccaggcgtggtggcgggtgcctataatcccagttactcaggaggctgaggtgggagaattgctggaacccagtaggcggaggttgcagtgagctgagatcgcaccactgcactgcagactgggtgacagagcaagactgtctcaaaatgaaatgaaatgaaataaaataaaatattcatgaagaaatctctgttcattttccagatgattcccatagggtagtcctaaagttgaaattactgggttatactttaaagggtatgaccatttttaaaacttcatggatttagttcaattacctrtaaagtc

SEQ ID NO: 10639 - DNA, 524 bp, Homo sapiens
acatcaggagactgcaaatttctcacctgttttactgaaaagtccccaaagcatctttccaaagtgtgattaaaatggagcatttccaactcaatctccccttagcaagaccccaaaatgccctgagccaggacactgtcacctgatggaagagaaatttgataaaggaaagttagaatgaaaagaaacagtgatcttaatagatggccactaaaatgtcttaatttttcaaactgtgcaaaaatatatgatcatgtgaaccttttgccagggtctctcccagggccttaaaaggtcycacaagcttaatcattgagttaggcactgaactgtggcctgagaattcttagaaattcatttgtactctgtatgaagctattaacttctattgctgttatgaaaattaatcagacctggtttttcccttcaagtgcctttcagggaacacgaggtatacatagaaagtattaaaaaatagcttattggcaactattttctgttatatatgtatatttataaaaaac

SEQ ID NO: 10640 - DNA, 524 bp, Homo sapiens
acatcaggagactgcaaatttctcacctgttttactgaaaagtccccaaagcatctttccaaagtgtgattaaaatggagcatttccaactcaatctccccttagcaagaccccaaaatgccctgagccaggacactgtcacctgatggaagagaaatttgataaaggaaagttagaatgaaaagaaacagtgatcttaatagatggccactaaaatgtcttaatttttcaaactgtgcaaaaatatatgatcatgtgaaccttttgccagggtctctcccagggccttaaaaggtctcacaagcttaatcattgagttaggcactgaactgtggcctgagaattcttagaaattcatttgtactctgtatgaagctattaacttctattgctgttatgaaaattaatcagacctggtttttcccttcaagtgcctttcagrgaacacgaggtatacatagaaagtattaaaaaatagcttattggcaactattttctgttatatatgtatatttataaaaaac

SEQ ID NO: 10641 - DNA, 2599 bp, Homo sapiens
ggagcgtgtggtggtgcacatccataakcccaggtacttgggaggctgaggcaggagaatctctcgaacccaggaggcagaagttgcagtgagcagagatggctccattgaacttttccaatctgtgatgatgtgctacaatgaatcttattatcaatgtgaattaaatttttataaaccacccaaaggccaggtgcagtggcttactcctgtaatcctagcactttgggaggctgaggtgggtggatcacgaggtcaggagatcgagaccatcttggctaacgtgctgaaaccctgtctgtactaaaaatacaaaaaaaaaaaaaaaaacccaaaaaataaaaagcaaacaaacaaagaaacctcagctatcttgatacttaaatttaaaagaagtttgtcaattggctggttcatttgcaacattctaaaatcactgacaaatatatacatattaattatatgtatatatgttacatattaatataatacatatattataatatacatataatacgattaatataatacatattaattgctagacacgtccttcagcttaaaattataaactattactttaaatgccttaactttatgataatatttgttgtctaattaatcagtcaactgtcttccttgctgttatttataaaataacacaagtgcagttataattatagaactatgcaacatagaccaaacttagtcactgcgtctggaatttattccttccggtgggttcttggtctcactgacttcaagaatgaagtcgcggaccctcatggtgactgttacatctcttaaagatggtgtgtctggagtttgttccttcagatgttcagatgtgtccagagtttcttccttccagtgggtttgtggtctcactgacttcaggagtgaagccacagaccttcgcagtgagtgttacagctcataaaggtggcacacccagagttgtttgttcctcccagtgggttcgtggtctcgctgacttcaggaatgaagctgcagaccctcacggtgagtgttacagctcataaaggtagtgcagacccaaagagtgagctgcagcaagatttattgtgaagagcaaaagaacaaagtttccacagtttcgaaggggaccccagcaggttgccactgctggctcaggtggccagcttttagtcccttatttggccccacccatgtcctgccgattggtccattttacagagtgctgattggtgtgtttacaaacctttagctagacacagagcactgattggtgcatttacaaacccttagctagacacagagtgctgattggtgtgattttacagagtgctgattgctgtgtttacaatccttcagctagacacaaaagttctccaagtccccacctgacccagaagcccagctggcttcacctctcaactcagatatgagaaaaataagatctagataaatggagaaatctctaaatttcatgttactttcagggatgggagttgcattctagttttatagagaaaaagttgagagctgtacgttacatttatattctaaaatatgcctaaaccaatgctaagataataccttatatcttagcatttggtttaaatgctaagctattgaaagatgtctcatcttgtaaatgatgaaggatagatgaagtgatacttattttgattatcatacgtgttcattgggggccaaagggaatttagattaaaacagaacaaagaaaaatgactgcaattggctaacatgaatataatgttagaaaattttcactttgtaacattatattttaatagtcttcagaatgagacttggtacttgtttcactttctcatatctttgcaatttatttaattccaaattctaaaaaatggtgtttatcgaatagttagaagtatacatgcatgattttcacagaagaggctttatgcctattcttttgtatcactagtttctgaatcacagttttgcctaagtatgtctgattggcagagctaggtcccttgcctgaaatctaactttaagagagtccaaaaaattgtgtttctcatttctgtcttgaagatttttaaatcattgtaagggctaagtcattgaagcaaaggtatacttaagggcaatcgcttgcagaaaacagtaggacattttttttctcatatatctgtcccaagctgaatgtccaggctgcggggtgcctatgctctgcatgggcattctgggcctagatctttccattctcttgctctgtaacctgcagggttactgtttacatctgtatagtcagctagattgcagacacatcactctttcaattgagagggagaggaaaagagaacattagtatagaagtggtctacctttgaaataagagatgattcaaaagttgtagtaatcattctcctcacaactcaaatactttcgcaaaggaggcttgtgtctcttgtccatttgccctgctataacaaaatatctgaggtgtgataatttataaacaacaatttgtttctcacagttctggaagctgggacatccaaggtcaagggacccgcagatgtgatgtctagtgagagctgctttgtgcttgcatcctcca

SEQ ID NO: 10642 - DNA, 2599 bp, Homo sapiens
ggagcgtgtggtggtgcacatccataagcccaggtacttgggaggctgaggcaggagaatctctcgaacccaggaggcagaagttgcagtgagcagagatggctccattgaacttttccaatctgtgatgatgtgctacaatgaatcttattatcaatgtgaattaaatttttataaaccacccaaaggccaggtgcagtggcttactcctgtaatcctagcactttgsgaggctgaggtgggtggatcacgaggtcaggagatcgagaccatcttggctaacgtgctgaaaccctgtctgtactaaaaatacaaaaaaaaaaaaaaaaacccaaaaaataaaaagcaaacaaacaaagaaacctcagctatcttgatacttaaatttaaaagaagtttgtcaattggctggttcatttgcaacattctaaaatcactgacaaatatatacatattaattatatgtatatatgttacatattaatataatacatatattataatatacatataatacgattaatataatacatattaattgctagacacgtccttcagcttaaaattataaactattactttaaatgccttaactttatgataatatttgttgtctaattaatcagtcaactgtcttccttgctgttatttataaaataacacaagtgcagttataattatagaactatgcaacatagaccaaacttagtcactgcgtctggaatttattccttccggtgggttcttggtctcactgacttcaagaatgaagtcgcggaccctcatggtgactgttacatctcttaaagatggtgtgtctggagtttgttccttcagatgttcagatgtgtccagagtttcttccttccagtgggtttgtggtctcactgacttcaggagtgaagccacagaccttcgcagtgagtgttacagctcataaaggtggcacacccagagttgtttgttcctcccagtgggttcgtggtctcgctgacttcaggaatgaagctgcagaccctcacggtgagtgttacagctcataaaggtagtgcagacccaaagagtgagctgcagcaagatttattgtgaagagcaaaagaacaaagtttccacagtttcgaaggggaccccagcaggttgccactgctggctcaggtggccagcttttagtcccttatttggccccacccatgtcctgccgattggtccattttacagagtgctgattggtgtgtttacaaacctttagctagacacagagcactgattggtgcatttacaaacccttagctagacacagagtgctgattggtgtgattttacagagtgctgattgctgtgtttacaatccttcagctagacacaaaagttctccaagtccccacctgacccagaagcccagctggcttcacctctcaactcagatatgagaaaaataagatctagataaatggagaaatctctaaatttcatgttactttcagggatgggagttgcattctagttttatagagaaaaagttgagagctgtacgttacatttatattctaaaatatgcctaaaccaatgctaagataataccttatatcttagcatttggtttaaatgctaagctattgaaagatgtctcatcttgtaaatgatgaaggatagatgaagtgatacttattttgattatcatacgtgttcattgggggccaaagggaatttagattaaaacagaacaaagaaaaatgactgcaattggctaacatgaatataatgttagaaaattttcactttgtaacattatattttaatagtcttcagaatgagacttggtacttgtttcactttctcatatctttgcaatttatttaattccaaattctaaaaaatggtgtttatcgaatagttagaagtatacatgcatgattttcacagaagaggctttatgcctattcttttgtatcactagtttctgaatcacagttttgcctaagtatgtctgattggcagagctaggtcccttgcctgaaatctaactttaagagagtccaaaaaattgtgtttctcatttctgtcttgaagatttttaaatcattgtaagggctaagtcattgaagcaaaggtatacttaagggcaatcgcttgcagaaaacagtaggacattttttttctcatatatctgtcccaagctgaatgtccaggctgcggggtgcctatgctctgcatgggcattctgggcctagatctttccattctcttgctctgtaacctgcagggttactgtttacatctgtatagtcagctagattgcagacacatcactctttcaattgagagggagaggaaaagagaacattagtatagaagtggtctacctttgaaataagagatgattcaaaagttgtagtaatcattctcctcacaactcaaatactttcgcaaaggaggcttgtgtctcttgtccatttgccctgctataacaaaatatctgaggtgtgataatttataaacaacaatttgtttctcacagttctggaagctgggacatccaaggtcaagggacccgcagatgtgatgtctagtgagagctgctttgtgcttgcatcctcca

SEQ ID NO: 10643 - DNA, 516 bp, Homo sapiens
aatggacatttaattgttttgttattttctttgatgagtaatgtagctttgagcattcatatacagtcatgtaatgcataatgacattttggtcaaaaaaaattttttttttctgagacccaggctggagtgcagtggcacaatctcggctcactggaacctccacctcccaggtttaagcaattctcgtgcctcaacctcccgagtagctgggacaactggcacacgccaccatgcctggataatttttgtattttcagtaragacaggattttgctgtgttggtcaggctagtctcaaactcctagcctcaggtgatccacccatctctgcctcccaaagtgctgggattataggcatgaaccaccacacccagcctaatttttttaagaaacaagggaactattttctaaattacttttgccaatttatatttctaccatgatgcatagcactaatttcaccgtacaatgtatggtaggccccaatatgtaagaaatgatgaaagtaacacat

SEQ ID NO: 10644 - DNA, 1134 bp, Homo sapiens
aaaattaaaagaacgttggactctaattttcacagcctttgttgccacaagaatttgttttcaaagaccttatctgcttagttgacctcttgcctagagcctatgacagggctagtgaatgctaaataattatgtgttaaatacattgataactagttgaattaatttgttaatgagtgattacttttagtatttggataagatgaagacaccttccaggatcattcartcttgtgatgtggaccacaggggaccgcaggaacagtggggcaccagctcccagcagcagggcaccagctctcgccaacatcgcagtcagtgccatcatggaactcgcgaagcctcattgctcctttcagtgctggtagtaagaagcagcaaaccactaacggaatcaggaggggaagcaaagtggctgatgcaatgcagcagtgaagagggagttccagaaatgtctcagaattttcagaattagggaatgtggtgatagaactagaggtcttgcgagagaaagcccagttttatgttatgattaccctgcttttaataccaaaatgcagttttagcatttagaacgcatgcggtagtcacactagttgtcttttggatagtattttttagttactctaaacacttgtaagttgaatactgatactctccccctaatgtctctaaatgtctcgctctcattctgtccatgggttattttttgtccacttactcaatgttttacaagtgtatcttccgcttcaagttttctttaagtttgtcttcagcactacagatttaactttctgctgcataactgatattatagactgctttcattttgttgaaatgggaaaataataaataggtaaaacctaatctacacatatttttagaattgttattgttgtactaatattttttccttttgattcagatcattctatgtgaatgaaaactaaataataatacaattaaataatttgtggtgagttttctccctgttttcttaaaaatagtgaactgcacagagagcgtttttgtgtattaactaacttcatataataattacttttattgagaataatgcttcaaaattccagattactctattttctcccaatctcttactcttcagttaccaca

SEQ ID NO: 10645 - DNA, 530 bp, Homo sapiens
gtaagggaaaaaaatatggccaaaagattccattaaaacaccatgagaattaataaccaagtttaacgtaggagcgatatgcagttgacccctgaataccacagggttatgggcgccagcccccaagcaggctaaatccacgtataacttttgactgccccaaaatttarctactaataggctaatgttgacccaagccttattgataacaaaaacagtctattaacacgttttatatttattacatactatattcttacagtaaagtaagctaaagaaatgaaaatattaagaaaaatcataagactaaatacatttacagtactgtactgtatttatcaatactgtatgtttacatagtctgtttacaagatcgatcatctatctgaaacggtgcgcaccacagctgcagattcaacctatggcacatatcgagcaattcaactttttcttgtcatgtcatgacttttccctgcttcctgggagcacttccagcatcactagtgacacttcgtatgggtcccatggca

SEQ ID NO: 10646 - DNA, 523 bp, Homo sapiens
atgtgccctatacacttattatacaggcaattgccgtggcagtacaggacttaatggcaggtttctgcatacaaaaatttctacctgagtatcttttgtgtttaatttaactgtgctagagtgaaagctgcctcacatcaatcatttcagttgcaaggatattgttttgtatagggacaattcagtgagtcatgctgagtaatggtgcgcattgtattcrttgaggttataagcagaatctgactatagttaactgggtatatcaatattgtacatttacaaaaaatccattaagtatcatgtaaaggtgcatcctgttgtggggtcatgcactcctttatcccatttttattttttctctatgaatttttaagcagctatggatccaaaggaggcatctattttcccagatgatagactgcccaccattaattacttttaaactccatcatcaatattccattttatagcatgttgttttgaactaaactcaacctgtgaagatattcagaatttacccagt

SEQ ID NO: 10647 - DNA, 1437 bp, Homo sapiens
gtccactcagatgggcacaaaaccaatcacacctgtcctttgtcccaaatctacattgtgaggaaacattttatttaagctagcacacaatctcagcaactggcatccccattcttgcatgttttcaagcagaaacttagaaatcatccytgacacttcttcctgttggtctctatggctaatccatcaataagtcctatcaatctttgctccgaaacatctcttgaatccactctcttctatgcattgctaccatcagccttgactaggccacctcctctccagcttagaatattgcaataacttttttaactagtcttctcttattcaccctgacccctattcaatccattctcctctctgagtgatctctttcaaattcaaatttaattctcccctccctaactcagctgcttttaggatgagatgaaacctgtactatggctcaggagaccctaccacatactgtactaggagcccttctctttccaacccgctctggtcttcttgttctttacatgcttcctgctccctcccatgagatctcttgcctggaaactcttcccttgatcttcaccctagctcctgtcctactcattcttcagctctcagctcaggcaatactttcctcaagaatcttttctagtctcttgctctagacaaaaatctctaaagcagcttatggtgttagaagtttcaatcacagtttatccttgatgggcgtagggacttgaagaaaacaagagggggcttctgggtgctggtaaaattctgtttcttaatgtgagtgaaagctacacaggagtgttgagtttgtgcaagtttgctgagctatacacctataataagaacagtcttcttctgtctgtatattttactttttttgttatttatttatttatttatttattttgagatggagtcttgctttgtcacccagactggagtgcagtggcgcgatcttggcttactgcaacctccgcctccccagttcaagtgattctcctgcctcagcctcccgagtagtataaaaggcttttaaaaataccgagggatgaattcatgtcctttgcagggacatggatgaagctggaaaccatcattctcagcaaactaacacaagaacagaaaaccaaacaccacatgttctcactcataggtgggagttgagcaacgagaacacatggacacagggaggggaacatcacacactggggcctgtcggttgggcgggggggcccgaggagggataacattaggagaaatacctaatgtagatgacgggttgatgggtgcagcaaaccaccatggcacgtgtatacctatgtaacaaacctgcacattctgcacacgtatcccagaacttaaagtataataaacctaaaaaaaaaatacccagagcagcctgatcatagtgcaattctccttttacgtact

SEQ ID NO: 10648 - DNA, 545 bp, Homo sapiens
ccatagataattgacctttatgacctccaaaatgtatcaattttacagttagttcagaattaaaattaattatagacattaacattcttaacaaatttatgccagattgctccctaggtttttggctacagcagtatcaggtgtcagttgtcacaagttattcattagtatcacaatatggttgttaagtcatgagatggtaacaaggccctgccattgtcaaatttcaaagaaaaataaaggatctcttcttttacaaattcaytgttaatctctataaattataaccagaattatgcatgaatcatacttaactattcagtgtagagtgaaatgtcttaatttattaatctctcatccattagctcactgattataatattaagttaaagtgtaattttacatgtcacacgtacattggttatttcaacctcataatgctatatgtaagtttttcaaagtgaaagagccatttggatgttaatactttctgtgattttcctaattttttttcaaataatttgcttacaacacaagtaaagagg

SEQ ID NO: 10649 - DNA, 551 bp, Homo sapiens
tatccaaatctgtgcaataataagtgatgtgataacaggattccatcgcagttccccttggtggtgtggagaaactgtcctgctttctctagcggagcatcacagagagttcaggattacttgagacaagatagataacatgcaagagagagtaccttgatcagtgcgtccatcatgaagggtggaaatggggatgcctgggcctgtgggcaggatgaaaacaaaatcatggcttagtgttaaaataacaattccttttcaagacgggctgctggtagtatttgtgattagtgtcaagtgccagtacatcttttaattctgcagctatttttttccccatagagaagaaaacatcacttytaagtcacatttaaacaatacatgagatcaaagcccactcaaagaacagctgtgaaagaagccttgcctgtgcacttttccaagactaatcctgaatcattaatatcgaattacacaaatgcaccccagaagctgcagtgacaaatggccttctgggaagatgtcatgctgtattgggccagttttggctg

SEQ ID NO: 10650 - DNA, 543 bp, Homo sapiens
tcccttatttctaaataacactatcagggattcagcgacaatgagaacagcaggaaactccaagtagcatggtaatagcttcctaagcagctatgtaacttcccrtttctctgagggatgaggcaagccagaggactggtggacagagaactttcgtcttctgaatattgtcttatttcccccttaagagccagtgattgagaagggtgtcagtacaaaagaacttgagccggcgatacaaatttatttcatatcttggcagaaactcgcacaccatcccagtccaatgtgataatgggattctttcaggactctgccccaccacaggaaaaccaggagggtcatataatggccagaaattaactcttgacatacttgcagctcttccagcaagcactgggacttaatattacagacctagaagagttgatctcccctggtgatagcaatctgcctttcaattttgctgtcttgaatagccagctgtgagtctttatataacatttcacagtcccttaattaccgcatgacaacctcagggtt

SEQ ID NO: 10651 - DNA, 968 bp, Homo sapiens
tcaggcagctcatccttaacagccatggtctcaggggcatccagccatgggattgcagcttccatagctgttactcattgggtaaattcactgcaccttttttccctcctgtcacttttctgacacctttgtaaccaactccttagattaaatgccctgttttgaaagacctggggggtgtctgactgatgggatttgaactgatacagttaactcattcttggagcaagtgtctaggggagtcagggcagcccttctcccacggccattctagcgatggtcccaccttttcatctctgcacaggagaggctgttatgaagaagcctcacagtcttccaggccccacctgagacatgccaattcacatggttaggctggttgttcattgcacagaagtgccctgctaagggtacatgcgtagctgagacctgttctccaagcctgtgcccagactgtggcactcaccttgtgggtgagggaggcctttctctaagatatacataggtagatgataaccctgctgagacaggtggggccagctcttttccaaaaagctcaaagcccctagcgccctcccaaacacccgcagggtcgctttctgggctgactcggacatttcagaggaaaagcatttcggtcaggattaaagaataattccacttaggcagaggccaggccagacttaagcaaattccagacacagcagagcttctgrtgcggcctcaaacctggctctccattgctcaaaacatctccaggcctccctcctattgtgtatgagtttccactgggaaattgacctatttctgccctcacaaagctcctcagcagttggacctgcagcagccagaaatctgtctccatgtctcctcttactaaatgaagaacccagaagactgtaccaagccccccctccacctcaaatcactagctccccaggctgggccttggtagcacccactgtttt

SEQ ID NO: 10652 - DNA, 570 bp, Homo sapiens
ggaggaaaaaatatatattttgttttgaagagatgaactgaaagagtttgtttttctcagtggcataaagatctctcaggttcatcacaaaatttgaagtggctgttttgtgggggccttagttatttctttaaaagcatagaaaatgaattgaaggtcataagataagctctattgcaaaatttctattgaaatcgttgtttatgtgttcaaaccagactcaggtcaccccaaatcttgtaggacatccatctgcttttttccatctaagccctcaaggcagttgacctggaaactaaccttggtcccaggccaggaaagtkgggggttttaaaccaacatccttatctccttggggttctgagaccgaagtaactgacttagtaacagttggagagtctgtagaaaaattcagtctcaggctttttagccaagttataagaagccttgggtttctacattggctttctttgggttgccaaagtagcttctttgcattgggaagaaatcattttttatacagatacaggttgggtgttattggttaacatagaaattgtgctgctttgg

SEQ ID NO: 10653 - DNA, 578 bp, Homo sapiens
cgcgttccctccccacgtggtgggagtctctgagggtctctgcggggcgcccggatgcctgaggagccaggcagccgcacaggagcccccagggcggcaggaagggcagggtgacccccgactgcacatgccagcccccaccccacactgctgtctgctctcagggaagaacctgcgttagctscgacattttggaatcagtctcattctctgagttaggccactcctggagatgggctggccccgagaccagggccaaatcccagccccaccgagggctgtggcgcctccttgagcagcacccttccccgctccaggccttggtacggcacaggaggagggcacccacctgggcagggtcaggtgggggcgtggaggtccccaggggagcccccaaagccactgtgcggcaacagacattcaggacggcaggagggagagcctcgggtggctgctggaaaggggtgagcatggagtgtgagtgtgtgagaagtgtgtgtgagaagtgcatgagtgtatgaggagtgtgtgtgtgaggagtacgtgtgagaagtgcgtgtgtgaggagtgtgtgtgtg

SEQ ID NO: 10654 - DNA, 554 bp, Homo sapiens
cagcttctttttctgatttccaccattttgaaaagaaacatgtttatggctcagcaggtcagaccagcacttcttacactttatctctccctggacagtggcaccagatgctttatgatcaagctgaattcaccatcacctatggcattagcctcacacttaaggaaggacccccgaaacaccccgcacttccctaacagccttaaaactaaccaagcccaatagtcaccttactycacctttcattcctggctattaaaattcaagcatttcaaagctattgaagctattaatagtgcaattttgatgagctagttcaaagtcagcactaatgacctgttgatgattttaatggtttttacaataagtactgcgaatgacctattgttaaaatacagagtgacgggcttttacattaatccattaactcttcttttctcgtcattctttccagactaaactattttcctccgttcaatttgaagagttcatagataaagaaaactaaagtacacagaaagaatacgttttagcaactgacaatcagaggaggc

SEQ ID NO: 10655 - DNA, 602 bp, Homo sapiens
gttgagggaagagrgtaatgtcctcaggtacaggtggttactgtctaccagaaaccctctccacccatccccttagttcatatctaaatgctgtggcacccctagaagagctatttcattgaaactctgctcacttgttgggttaaagacagatacagctttggtacagggagcacattaggcaaatcaagggaaatacatttcctcacactttgccaaacacagctacggcacctctcaacccatattcaaggctctgtccagattcctcaaacatctactccctccctctgagcagaggacctcccaaagttgacttaagtaatcagatggaaacacctcagctctcctctacccaatacataagtacatctggcttcctctcacaaaccacttaaaagagcagaactcctctctctatacaaggtcaaatcctgcagggctgccctggaatgcagacagctgctccctgcttagagatcacatcatgtcaaataccctctccactggcttcatcctgttggcattaaagcatgctgaattctcttcgagaattactttggaaagaattactaccctgtaagctttcctattcagccatg

SEQ ID NO: 10656 - DNA, 587 bp, Homo sapiens
tcctttgacttatgctcatggaagagctccaggtgaacacattttactgatggctcaggatgagctattattaaccttcaaatttgttgcttcatttttgtttcttcccttgttatcttgtccttccactcctcttttaatttattgtaaggagataattgagaaaggtactttttttctcttgttttgttttctaaaccaagagactacctcaaaataaatagtagattattgtagaattcattgttatttaggagctagaatgtactcagttgttgaactacaaaaaaaaatatgatttttatttstttatgagaattattttatggtcattagccaaaaatctaggagagagtcttacttgaagcaaaactccgattagttatttccattctagcagtctactgacatggacgtttccaacacacgtaagatactgcacatacacgtgacatgctgttctttttacttcaaaacatatgagagatgtccttctcacaataatccatcattaggtactcctaaatttagattctctgtcttgacattttgcctatacctgtgagtgactctagggaggaccaaaa

SEQ ID NO: 10657 - DNA, 561 bp, Homo sapiens
acattcatttcacgggtgtatgtgaaatgaatgtctaaacatgaagtacactatattaatatttccctgtaattygttttggttacagaggagacccttggtaattatttttactcttctattttttaattacaacattatttaacaacttattttgaaacagcaaataaggttaagtcaacatagttcatcaagttcagcaagaggaaatagcaataattcagttgtgcatttcagaaatgaaaatgggatacagtagtttgctttgatgacaacacaactgcctttatatctagttaattgtgtgacgtatgggacactaaaacttgtttgcttgcatgtttgtcatttgatcttttgccataaagtaattcattttaattgtctgttcacaaaaaaattggttcatgtctagcgagaagaacacctttctttcctctgtagtctgtctggtccttcttccctgaacccccatcttatccaaactcctgtatctcactctcctcatgctccctctcaaatacccctgagtgcagttaagtgataatggaagtgagtaac

SEQ ID NO: 10658 - DNA, 561 bp, Homo sapiens
acattcatttcacgggtgtatgtgaaatgaatgtctaaacatgaagtacactatattaatatttccctgtaattcgttttggttacagaggagacccttggtaattatttttactcttctattttttaattacaacattatttaacaacttattttgaaacagcaaataaggttaagtcaacatagttcatcaagttcagcaagaggaaatagcaataattcagttgtgcatttcagaartgaaaatgggatacagtagtttgctttgatgacaacacaactgcctttatatctagttaattgtgtgacgtatgggacactaaaacttgtttgcttgcatgtttgtcatttgatcttttgccataaagtaattcattttaattgtctgttcacaaaaaaattggttcatgtctagcgagaagaacacctttctttcctctgtagtctgtctggtccttcttccctgaacccccatcttatccaaactcctgtatctcactctcctcatgctccctctcaaatacccctgagtgcagttaagtgataatggaagtgagtaac

SEQ ID NO: 10659 - DNA, 561 bp, Homo sapiens
acattcatttcacgggtgtatgtgaaatgaatgtctaaacatgaagtacactatattaatatttccctgtaattcgttttggttacagaggagacccttggtaattatttttactcttctattttttaattacaacattatttaacaacttattttgaaacagcaaataaggttaagtcaacatagttcatcaagttcagcaagaggaaatagcaataattcagttgtgcatttcagaaatgaaaatgggatacagtagkttgctttgatgacaacacaactgcctttatatctagttaattgtgtgacgtatgggacactaaaacttgtttgcttgcatgtttgtcatttgatcttttgccataaagtaattcattttaattgtctgttcacaaaaaaattggttcatgtctagcgagaagaacacctttctttcctctgtagtctgtctggtccttcttccctgaacccccatcttatccaaactcctgtatctcactctcctcatgctccctctcaaatacccctgagtgcagttaagtgataatggaagtgagtaac

SEQ ID NO: 10660 - DNA, 561 bp, Homo sapiens
acattcatttcacgggtgtatgtgaaatgaatgtctaaacatgaagtacactatattaatatttccctgtaattcgttttggttacagaggagacccttggtaattatttttactcttctattttttaattacaacattatttaacaacttattttgaaacagcaaataaggttaagtcaacatagttcatcaagttcagcaagaggaaatagcaataattcagttgtgcatttcagaaatgaaaatgggatacagtagtttgctttgatgacaacacaactgcctttatatctagttaattgtgtgacrtatgggacactaaaacttgtttgcttgcatgtttgtcatttgatcttttgccataaagtaattcattttaattgtctgttcacaaaaaaattggttcatgtctagcgagaagaacacctttctttcctctgtagtctgtctggtccttcttccctgaacccccatcttatccaaactcctgtatctcactctcctcatgctccctctcaaatacccctgagtgcagttaagtgataatggaagtgagtaac

SEQ ID NO: 10661 - DNA, 561 bp, Homo sapiens
acattcatttcacgggtgtatgtgaaatgaatgtctaaacatgaagtacactatattaatatttccctgtaattcgttttggttacagaggagacccttggtaattatttttactcttctattttttaattacaacattatttaacaacttattttgaaacagcaaataaggttaagtcaacatagttcatcaagttcagcaagaggaaatagcaataattcagttgtgcatttcagaaatgaaaatgggatacagtagtttgctttgatgacaacacaactgcctttatatctagttaattgtgtgacgtatgggacactaaaacttgtttgcttgcatgtttgtcatttgatcttttgccataaagtaattcattttaattgtctgttcacaaaaaaattggttcatktctagcgagaagaacacctttctttcctctgtagtctgtctggtccttcttccctgaacccccatcttatccaaactcctgtatctcactctcctcatgctccctctcaaatacccctgagtgcagttaagtgataatggaagtgagtaac

SEQ ID NO: 10662 - DNA, 547 bp, Homo sapiens
gactcagtgtcaaaaaaaaaaaaaaaaaaaggccgggtgcagtggctcacgcctataatcccagcactttgggaggccgaggtgggtggatcatgaggtcaggagtttgagaccagcctggccaagatggtgaaacccccatctctaytaaaaatacaaaaattagccgggtgtggtggcgcacgcctgtagtcccagctacttgggaggctgaggcaggagaatcgcttgaacccgggaggcagaggttgcggtgagccgagattgtgccattgcactccagcctgggcgacaagagcgaaattccgtctaaaaaaaaaaagaaaaatattaacagttctttttataagatgtcagcgatgcagacatcttataaaaatgttattaaagaataagttcaggacattgtttcaggtatattattctgctaaaggttaaagatcataccttcacactctttttttcatctgatccttctgtcataagataggctttatctccatcagttccttcaacacttaggaagcaattggttatatggccaatc

SEQ ID NO: 10663 - DNA, 547 bp, Homo sapiens
gactcagtgtcaaaaaaaaaaaaaaaaaaaggccgggtgcagtggctcacgcctataatcccagcactttgggaggccgaggtgggtggatcatgaggtcaggagtttgagaccagcctggccaagatggtgaaacccccatctctactaaaaatacaaaaattagccgggtgtggtggcgcacgcctgtagtcccagctacttgggaggctgaggcaggagaatcgcttgaacccgggaggcagaggttgcggtgagccgagattgtgccattgcactccagcctgggcracaagagcgaaattccgtctaaaaaaaaaaagaaaaatattaacagttctttttataagatgtcagcgatgcagacatcttataaaaatgttattaaagaataagttcaggacattgtttcaggtatattattctgctaaaggttaaagatcataccttcacactctttttttcatctgatccttctgtcataagataggctttatctccatcagttccttcaacacttaggaagcaattggttatatggccaatc

SEQ ID NO: 10664 - DNA, 518 bp, Homo sapiens
tgaaagtacgtctgacttaacttccacgcttcctaggcaaactcaactactcactgtagctwttttttttcttttttttttcaagacatagtctcactctgttccccaagctggagtgcagtggtacaatctcagctcactgcaacctccgcttcccgggttcaaacaattctctacctcagcctcccaagtagctgggattacaggcacccgccaccccgcctggctaatttttatatattttttttagtagagacggggtttcaccatcttggctagggtggtcttgaactcctgacctcatgatccacctgccttggcctcccaaagtgctgggattacaggcgtgaaccactgcacccagcctcactgtagcatttatagccgctgggcttttgcttaaaagatggccattccctcttcccagtttccaaggaaccaaacatacccaacccccaaggcccagctcaattggagctgcagccccaaagttttcctgattccctgcagagcagagc

SEQ ID NO: 10665 - DNA, 518 bp, Homo sapiens
tgaaagtacgtctgacttaacttccacgcttcctaggcaaactcaactactcactgtagcttttttttttcttttttttttcaagacatagtctcactctgttccccaagctggagtgcagtggtacaatctcagctcactgcaacctccgcttcccgggttcaaacaattctctacctcagcctcccragtagctgggattacaggcacccgccaccccgcctggctaatttttatatattttttttagtagagacggggtttcaccatcttggctagggtggtcttgaactcctgacctcatgatccacctgccttggcctcccaaagtgctgggattacaggcgtgaaccactgcacccagcctcactgtagcatttatagccgctgggcttttgcttaaaagatggccattccctcttcccagtttccaaggaaccaaacatacccaacccccaaggcccagctcaattggagctgcagccccaaagttttcctgattccctgcagagcagagc

SEQ ID NO: 10666 - DNA, 518 bp, Homo sapiens
tgaaagtacgtctgacttaacttccacgcttcctaggcaaactcaactactcactgtagcttttttttttcttttttttttcaagacatagtctcactctgttccccaagctggagtgcagtggtacaatctcagctcactgcaacctccgcttcccgggttcaaacaattctctacctcagcctcccaagtagctgggattacaggcacccgccaccccgcctggctaatttttatatatwttttttagtagagacggggtttcaccatcttggctagggtggtcttgaactcctgacctcatgatccacctgccttggcctcccaaagtgctgggattacaggcgtgaaccactgcacccagcctcactgtagcatttatagccgctgggcttttgcttaaaagatggccattccctcttcccagtttccaaggaaccaaacatacccaacccccaaggcccagctcaattggagctgcagccccaaagttttcctgattccctgcagagcagagc

SEQ ID NO: 10667 - DNA, 518 bp, Homo sapiens
accctttgctggacctgggtttcctcacctggaaatgaggttccaaatacttctgtgttcttgtataggtaatcacggagcataatgtatgaaaggaaatatgtcaggtatagacagtgcaaaagtcactgtgaaaccagtgggcctcaatcaatgggacagtcagccaggcctgcttggggaggcaggggccgcaccggtagtgccacctgggggctttgcccagacccagcaatgcccagaccaaccaatcagaatctctggaggtgagatgcaggcaccagcatttaaagctccaggtccttgaaatgatacaaggccaagtgtgagaaccccttgggttatataatccagacaagtggtctgcaatctttgtatcagaatcacatttggaaaattggataaaaacaccattctatgttggtccagacaagggactcaagaccagtacatgagattctgkctcaacagaaaggaagaactttctaacagagtcacccaaaaatggtaggcagtga

SEQ ID NO: 10668 - DNA, 611 bp, Homo sapiens
ttttttttttctgtatgtgagcaccttttcattcttttttttttcttaatttttttttgagacggaatctcgctctgttgccaggctagaatgcagtggcgcaatcttggctcaccgcaacatctgactccctggttcaagctattctgctgcctcagcctcccgagtacctgggataacaggcacacgccaccatgcccagctaaattttgtatttcaccatgtattaatttttgggtttcaccatgctggccaggctggtctcartctcctgatctcgtgatctgcctgcctcggcctcccaaagtgctggaacttttcattcttctatcttcagcctgatcttttctattctgcttacggatggctcagatgtggttacctgggccctggctttccatgacctcccaattcataattcttcagagaccgattacagtgtatattaatttaaaacttgtaggaggaagactctggatagcccagccaagccaatggattggctccccctgtgtcagctgtgactcaccagtcaccaggtgccaggggatgcagcgtgctcctatatttcctgaacatcttcatgcaaataggttctggataacacaccc

SEQ ID NO: 10669 - DNA, 611 bp, Homo sapiens
ttttttttttctgtatgtgagcaccttttcattcttttttttttcttaatttttttttgagacggaatctcgctctgttgccaggctagaatgcagtggcgcaatcttggctcaccgcaacatctgactccctggttcaagctattctgctgcctcagcctcccgagtacctgggataacaggcacacgccaccatgcccagctaaattttgtatttcaccatgtattaatttttgggtttcaccatgctggccaggctggtctcagtctcctgayctcgtgatctgcctgcctcggcctcccaaagtgctggaacttttcattcttctatcttcagcctgatcttttctattctgcttacggatggctcagatgtggttacctgggccctggctttccatgacctcccaattcataattcttcagagaccgattacagtgtatattaatttaaaacttgtaggaggaagactctggatagcccagccaagccaatggattggctccccctgtgtcagctgtgactcaccagtcaccaggtgccaggggatgcagcgtgctcctatatttcctgaacatcttcatgcaaataggttctggataacacaccc

SEQ ID NO: 10670 - DNA, 1987 bp, Homo sapiens
gcgtgtttctctggagaaccctgataatacagtggcactaagtacctaagaacagaaagtgcacccttactattatcttggaagtctgtcccattttttatgtatttacgttaccttgaagaggtgtgttataattttttttctttttgctatacttgttttggaggttatgttttataatttttaatagactattgaaaatattaaatctgtccaggagaaacagtcgtctttgcctttgagaaaattatcatcctaaattctaatgtctttaacagaagctttagtcatcagtgacagattccatttccacttttctttcttaagaatgctgaagtacaggggtggttagggagagaatcaaaatgaagaacttgtcagaatataaccccaggaggtaatagtggctgtgtgtctgaatcttctggttcagtagtttccgtgtggatatagtttttggatttactgctttgacatgaagtccacggcaagtcgaacttcctctgagggttagtgatgaagcgggtccccttgttgaaaacttgtgcctgtctctaccttatatatgtgagttctgtcctccagactccatgcccatccttcccactgaaataaacatcccaaactaccccttctcttggtatttcatgaaccactgccactgacccaaaaaggtatctttgctgtcctttgtacagaaactatttgggatctgcattaatggtgcagttgtcaaatcccagtccaggatctgccctttaccatttttgcaagcctgaaagtcgctttaaaggcatatgtttttcccctacttgcttcactggagaatcattcacagaggatctgtcattgcagctcagcatagcatatacctgaaggaggcaaatgtgatttcttaaaatcacgatttcggatttcatgtcctccacgtcccattgttctctaatgaagtcgtgccaataccaaaatttcttcttactgtgttgcagctcacccacacatcatcacacgggcaagccactacaaaactttcaccttcagtgcttgaatcgtttcataactcgccttgttatctggtgaagggcgaagccaaactcacagaacttaaagtcgatgctatttctaaagtgtgtggcattgttcctcagcagccctggcttctagctttccattcctaaacttgctgctcagaaacagctaggtattttggtctgtggatagttatgcatttttctgtctagctgttgtctgcccagccattgttcaaacccaagtgcccttaggggctaggcatacaatgtaaatgaggatggttggcctccatgaagcctcagtgtcagggatgcaccagccgtggagactgtggcccactggagccctgaggccccaccccgaaggacagccaccaatcagttgattgttcctgtgtgtaattttggattcagtgttgtcagctcttccagttttttcaggaaaagtctgtaatctagatttttaatattggcagtcagttcatagtattcacgaacagacaaaataaaacatctgaagattgtgtgtcttgtacacaatccaaattctagcctgttttatgtaagcacatactttatctagcacatactttatctagcacatactttgtaagtatgtgagcacatactttatctagcacagacttccaaattctagcctgttttatgtaagcaataagttgatcactactataggagaagtaacatgagaaagactgcctcaaagggttagtgattctatgggaagggcaagatgcacacttagcattataaaatgatttttttwaaaaatatacagtttaaaacagtggctcttaaactttagcatgcatcagaattgcctgaagggcttgtttgactatttgacaggcttccagagttttgtattcagtgggtttggggtgggacctaggcgtttgcatttttatttaattttatttttcctagagacgggg

SEQ ID NO: 10671 - DNA, 1987 bp, Homo sapiens
gcgtgtttctctggagaaccctgataatacagtggcactaagtacctaagaacagaaagtgcacccttactattatcttggaagtctgtcccattttttatgtatttacgttaccttgaagaggtgtgttataattttttttctttttgctatacttgttttggaggttatgttttataatttttaatagactattgaaaatattaaatctgtccaggagaaacagtcgtctttgcctttgagaaaattatcatcctaaattctaatgtctttaacagaagctttagtcatcagtgacagattccatttccacttttctttcttaagaatgctgaagtacaggggtggttagggagagaatcaaaatgaagaacttgtcagaatataaccccaggaggtaatagtggctgtgtgtctgaatcttctggttcagtagtttccgtgtggatatagtttttggatttactgctttgacatgaagtccacggcaagtcgaacttcctctgagggttagtgatgaagcgggtccccttgttgaaaacttgtgcctgtctctaccttatatatgtgagttctgtcctccagactccatgcccatccttcccactgaaataaacatcccaaactaccccttctcttggtatttcatgaaccactgccactgacccaaaaaggtatctttgctgtcctttgtacagaaactatttgggatctgcattaatggtgcagttgtcaaatcccagtccaggatctgccctttaccatttttgcaagcctgaaagtcgctttaaaggcatatgtttttcccctacttgcttcactggagaatcattcacagaggatctgtcattgcagctcagcatagcatatacctgaaggaggcaaatgtgatttcttaaaatcacgatttcggatttcatgtcctccacgtcccattgttctctaatgaagtcgtgccaataccaaaatttcttcttactgtgttgcagctcacccacacatcatcacacgggcaagccactacaaaactttcaccttcagtgcttgaatcgtttcataactcgccttgttatctggtgaagggcgaagccaaactcacagaacttaaagtcgatgctatttctaaagtgtgtggcattgttcctcagcagccctggcttctagctttccattcctaaacttgctgctcagaaacagctaggtattttggtctgtggatagttatgcatttttctgtctagctgttgtctgcccagccattgttcaaacccaagtgcccttaggggctaggcatacaatgtaaatgaggatggttggcctccatgaagcctcagtgtcagggatgcaccagccgtggagactgtggcccactggagccctgaggccccaccccgaaggacagccaccaatcagttgattgttcctgtgtgtaattttggattcagtgttgtcagctcttccagttttttcaggaaaagtctgtaatctagatttttaatattggcagtcagttcatagtattcacgaacagacaaaataaaacatctgaagattgtgtgtcttgtacacaatccaaattctagcctgttttatgtaagcacatactttatctagcacatactttatctagcacatactttgtaagtatgtgagcacatactttatctagcacagacttccaaattctagcctgttttatgtaagcaataagttgatcactactataggagaagtaacatgagaaagactgcctcaaagggttagtgattctatgggaagggcaagatgcacacttagcattataaaatgatttttttawaaaatatacagtttaaaacagtggctcttaaactttagcatgcatcagaattgcctgaagggcttgtttgactatttgacaggcttccagagttttgtattcagtgggtttggggtgggacctaggcgtttgcatttttatttaattttatttttcctagagacgggg

SEQ ID NO: 10672 - DNA, 1987 bp, Homo sapiens
gcgtgtttctctggagaaccctgataatacagtggcactaagtacctaagaacagaaagtgcacccttactattatcttggaagtctgtcccattttttatgtatttacgttaccttgaagaggtgtgttataattttttttctttttgctatacttgttttggaggttatgttttataatttttaatagactattgaaaatattaaatctgtccaggagaaacagtcgtctttgcctttgagaaaattatcatcctaaattctaatgtctttaacagaagctttagtcatcagtgacagattccatttccacttttctttcttaagaatgctgaagtacaggggtggttagggagagaatcaaaatgaagaacttgtcagaatataaccccaggaggtaatagtggctgtgtgtctgaatcttctggttcagtagtttccgtgtggatatagtttttggatttactgctttgacatgaagtccacggcaagtcgaacttcctctgagggttagtgatgaagcgggtccccttgttgaaaacttgtgcctgtctctaccttatatatgtgagttctgtcctccagactccatgcccatccttcccactgaaataaacatcccaaactaccccttctcttggtatttcatgaaccactgccactgacccaaaaaggtatctttgctgtcctttgtacagaaactatttgggatctgcattaatggtgcagttgtcaaatcccagtccaggatctgccctttaccatttttgcaagcctgaaagtcgctttaaaggcatatgtttttcccctacttgcttcactggagaatcattcacagaggatctgtcattgcagctcagcatagcatatacctgaaggaggcaaatgtgatttcttaaaatcacgatttcggatttcatgtcctccacgtcccattgttctctaatgaagtcgtgccaataccaaaatttcttcttactgtgttgcagctcacccacacatcatcacacgggcaagccactacaaaactttcaccttcagtgcttgaatcgtttcataactcgccttgttatctggtgaagggcgaagccaaactcacagaacttaaagtcgatgctatttctaaagtgtgtggcattgttcctcagcagccctggcttctagctttccattcctaaacttgctgctcagaaacagctaggtattttggtctgtggatagttatgcatttttctgtctagctgttgtctgcccagccattgttcaaacccaagtgcccttaggggctaggcatacaatgtaaatgaggatggttggcctccatgaagcctcagtgtcagggatgcaccagccgtggagactgtggcccactggagccctgaggccccaccccgaaggacagccaccaatcagttgattgttcctgtgtgtaattttggattcagtgttgtcagctcttccagttttttcaggaaaagtctgtaatctagatttttaatattggcagtcagttcatagtattcacgaacagacaaaataaaacatctgaagattgtgtgtcttgtacacaatccaaattctagcctgttttatgtaagcacatactttatctagcacatactttatctagcacatactttgtaagtatgtgagcacatactttatctagcacagacttccaaattctagcctgttttatgtaagcaataagttgatcactactataggagaagtaacatgagaaagactgcctcaaagggttagtgattctatgggaagggcaagatgcacacttagcattataaaatgatttttttaawaaatatacagtttaaaacagtggctcttaaactttagcatgcatcagaattgcctgaagggcttgtttgactatttgacaggcttccagagttttgtattcagtgggtttggggtgggacctaggcgtttgcatttttatttaattttatttttcctagagacgggg

SEQ ID NO: 10673 - DNA, 610 bp, Homo sapiens
ggatgcagaaacccaccggtggcctgcggttcccatttctgaagaaaaaacatgccagaaagtctctccccttctatgagccacacagggttgccattattcataggactgactcctgcaatccacagtaaaccggtctagagaagcacttggactgccagggcttatgacaatttcttacttcaattaaaatgcctatggattttatgccgaaaggggaatgttttaaacttgaattattagcttycaatgaccatccaaaccaatgtaaaatatttaatgctccacttcatttgttttgtttaaaactgatcttgtgcttgaaaattttggctgctgtgctcattactgttcagccacaaagaatgcaaaaacaagagcagtttttattttgatgagcggcagccattatatcctaagtgttcatcttcaccacaagccatcatttgttgaggccctaatacatacatattctttcaagttgctttacatatattgatccactcagtctagtctaacagcatgcatttactgagcgccttctaagtgccatgcatcaacctgggcattagaaataaaaagtgaggagcaagtccaaggtaatggcccc

SEQ ID NO: 10674 - DNA, 564 bp, Homo sapiens
attaacccaactcactcaactctgttcccttaattcaagtgcaaacatgacttcttcttctctgcccctccccactcctctaacccccatctgtcatttcacaaatcaaccatctctatagagaaaataggactgtctgtgtcttggacaactatcctcaagtcctgaatgattacaggcttttagtgcctgttaggagttttcttttaccgagaacagccatatatggtttcttgtgcacttaggactgctcctaagtcaatgggaactcctctaartgagggtaagactaagacccacagcttttatgcttagcatagactttacctttggtgggaactatgaaattagtaataaaatgtttcatgataaaatgataataaaaacgaatggagggatggaatagctatcttagttttggctagggtcatagttcatgaccttcttttgggtcccagactcctgtgagaatctcatagaaagtatggagcttctttccagaaaatacacatgcaagaaacattttcatacaattttagcagctcatggatttctaaatttcta

SEQ ID NO: 10675 - DNA, 564 bp, Homo sapiens
attaacccaactcactcaactctgttcccttaattcaagtgcaaacatgacttcttcttctctgcccctccccactcctctaacccccatctgtcatttcacaaatcaaccatctctatagagaaaataggactgtctgtgtcttggacaactatcctcaagtcctgaatgattacaggcttttagtgcctgttaggagttttcttttaccgagaacagccatatatggtttcttgtgcacttaggactgctcctaagtcaatgggaactcctctaagtgagggtaagactaagacccacagcttttatgcttagcatagactttacctttggtgggaactatgaaattagtaataaaatgtttcatgataaaatgataataaaaacgaatggagggatggaatarctatcttagttttggctagggtcatagttcatgaccttcttttgggtcccagactcctgtgagaatctcatagaaagtatggagcttctttccagaaaatacacatgcaagaaacattttcatacaattttagcagctcatggatttctaaatttcta

SEQ ID NO: 10676 - DNA, 2301 bp, Homo sapiens
ggtctcatctctgccatttttgttttcagcaacaccaatcttcctgtagattcctgaatgaaatcatcctacttttctacccaattcttcctttctagaatgccctttctcttcttttatctatgattaatcttacttagttggattcggtatctcttctctatatttctgtaactataaaattctataatctgtgatagtttccaaaatattcttggccatatttagtcaaatgactaaattttatcttaaaacttatgctgctatctaggatcaatgttacttcacacagtggtacattccaaagcactgacacctgtgaaacatacagtgttagtgaagtacggaacatcaatgtacttagaatctagaaaaaaaaattgctcatgtttcccagctgcaaattatctggatggcatagatgcttttatctagtgctacacttaggatatttacttaaatattggcaatgataaaatggtgggtaaaaaaattacacattcatcaaaagtaggcaggctgatagaaatgcataaacatggtactcctctcaaaattaaattaccatatgtacatggtttgacttgtcatttatgtacttgtatatttatatacccatcatccttaatcacccacaagaatgaatgagtgcatttaagaacaaatgtttgcaacataagctaatagttaattgaaaatttcttcttggaggaaaaggctgagacaagactggaaaagacaaacactttttagaagaacagtaacactcactgatcccatacagtctgattttagctcaatctaaagaaaattcctggtgagacgtctcaaaattattaaagcacgccctacccaccacagagagagaacgtatgagaaaggacacggaatttagcatcaggaaagttgggttcaactctttgcacagccttttctggttgtgcgatcataagaaattcttgtgacttctccaagtttgtccttatatttaatctcagaataatgctgcaaccctgcctgcaattgggtttgaagagcacaaaatgtatgaaaatattttgagatgctaaacaatctgaattgcatcaatatgtgattttccactcacgtatacattgtataaaaatcaggatcagtagagcccagaaatgctactactactgttagtactggtgctattattacaaccactactgttaataaaatattaatggctgatgtttattgagagtttactgtatgcctgcactgttttaacattttacataaattaagaatttatgtctcataaaactcctatgaagtagttaccattatttcctccattttgtagataaagaataagagactcagggagttaagcaacgtgtctaagattatacagctagcaattgaaagaactgggatttgaacccaagcttgaactccagaattcaagcattaacaatgacactctactttttgtctcataataatagtaaaattagcttacagtgaagtagtggtttgtgtctgcatagtgataatctccttttatccctgcaacagtcctgtaaaatagaggttaattatccttattttagagatgtgaaacttgggtcaaaaggattaaggaatttggccaaagtcacagtgctctggaggagtaaaatcagatggttttcccactaaggtggcaactaaaaacttctcccaacctgtgtcagcctctgcctttgctggcaccatcttattgaagaaactgtctgtgaggatcccatttgagtcttggtgtattttgatttgttttgagagctttttcttctctgtcattctctgagacactctgtctatcatgcatgagactaattgtttctgcaagcrtcacatgattctgcagagcttagaatgagctgcagtgaatttccagcccagatgccattggcattttaggaaatcaccctgggaggatgaccccaggtgaactcaacctctgatgtcacggtcacctcccctccaggtgctgagctcaccacttatccacacgttctctgtgtggccgtccttaaacagggcattcaccgtgtcattgcttgctgtagattctgaatatgcactctgcttcctgtttgtagttttgaacactctagattctggccttgattcacctgtctaaatcctcttgcccgtggtgtctcagttatgccatcttctctgtgcatcacagaaccctgtgcttggggtattcctttagctaaaacttccttcccctaactcttggcttggctaacataatctcagcttaattagatataacctgcc

SEQ ID NO: 10677 - DNA, 2301 bp, Homo sapiens
ggtctcatctctgccatttttgttttcagcaacaccaatcttcctgtagattcctgaatgaaatcatcctacttttctacccaattcttcctttctagaatgccctttctcttcttttatctatgattaatcttacttagttggattcggtatctcttctctatatttctgtaactataaaattctataatctgtgatagtttccaaaatattcttggccatatttagtcaaatgactaaattttatcttaaaacttatgctgctatctaggatcaatgttacttcacacagtggtacattccaaagcactgacacctgtgaaacatacagtgttagtgaagtacggaacatcaatgtacttagaatctagaaaaaaaaattgctcatgtttcccagctgcaaattatctggatggcatagatgcttttatctagtgctacacttaggatatttacttaaatattggcaatgataaaatggtgggtaaaaaaattacacattcatcaaaagtaggcaggctgatagaaatgcataaacatggtactcctctcaaaattaaattaccatatgtacatggtttgacttgtcatttatgtacttgtatatttatatacccatcatccttaatcacccacaagaatgaatgagtgcatttaagaacaaatgtttgcaacataagctaatagttaattgaaaatttcttcttggaggaaaaggctgagacaagactggaaaagacaaacactttttagaagaacagtaacactcactgatcccatacagtctgattttagctcaatctaaagaaaattcctggtgagacgtctcaaaattattaaagcacgccctacccaccacagagagagaacgtatgagaaaggacacggaatttagcatcaggaaagttgggttcaactctttgcacagccttttctggttgtgcgatcataagaaattcttgtgacttctccaagtttgtccttatatttaatctcagaataatgctgcaaccctgcctgcaattgggtttgaagagcacaaaatgtatgaaaatattttgagatgctaaacaatctgaattgcatcaatatgtgattttccactcacgtatacattgtataaaaatcaggatcagtagagcccagaaatgctactactactgttagtactggtgctattattacaaccactactgttaataaaatattaatggctgatgtttattgagagtttactgtatgcctgcactgttttaacattttacataaattaagaatttatgtctcataaaactcctatgaagtagttaccattatttcctccattttgtagataaagaataagagactcagggagttaagcaacgtgtctaagattatacagctagcaattgaaagaactgggatttgaacccaagcttgaactccagaattcaagcattaacaatgacactctactttttgtctcataataatagtaaaattagcttacagtgaagtagtggtttgtgtctgcatagtgataatctccttttatccctgcaacagtcctgtaaaatagaggttaattatccttattttagagatgtgaaacttgggtcaaaaggattaaggaatttggccaaagtcacagtgctctggaggagtaaaatcagatggttttcccactaaggtggcaactaaaaacttctcccaacctgtgtcagcctctgcctttgctggcaccatcttattgaagaaactgtctgtgaggatcccatttgagtcttggtgtattttgatttgttttgagagctttttcttctctgtcattctctgagacactctgtctatcatgcatgagactaattgtttctgcaagcgtcacatgattctgcagagcttagaatgagctgcagtgaatttccagcccagatgccattggcattttaggaaatcaccctgggaggatgaccccaggtgaactcaacctctgatgtcacggtcacctcccctccaggtgctgagctcaccacttatccacacgttctctgtgtggccgtccttaaacagrgcattcaccgtgtcattgcttgctgtagattctgaatatgcactctgcttcctgtttgtagttttgaacactctagattctggccttgattcacctgtctaaatcctcttgcccgtggtgtctcagttatgccatcttctctgtgcatcacagaaccctgtgcttggggtattcctttagctaaaacttccttcccctaactcttggcttggctaacataatctcagcttaattagatataacctgcc

SEQ ID NO: 10678 - DNA, 2301 bp, Homo sapiens
ggtctcatctctgccatttttgttttcagcaacaccaatcttcctgtagattcctgaatgaaatcatcctacttttctacccaattcttcctttctagaatgccctttctcttcttttatctatgattaatcttacttagttggattcggtatctcttctctatatttctgtaactataaaattctataatctgtgatagtttccaaaatattcttggccatatttagtcaaatgactaaattttatcttaaaacttatgctgctatctaggatcaatgttacttcacacagtggtacattccaaagcactgacacctgtgaaacatacagtgttagtgaagtacggaacatcaatgtacttagaatctagaaaaaaaaattgctcatgtttcccagctgcaaattatctggatggcatagatgcttttatctagtgctacacttaggatatttacttaaatattggcaatgataaaatggtgggtaaaaaaattacacattcatcaaaagtaggcaggctgatagaaatgcataaacatggtactcctctcaaaattaaattaccatatgtacatggtttgacttgtcatttatgtacttgtatatttatatacccatcatccttaatcacccacaagaatgaatgagtgcatttaagaacaaatgtttgcaacataagctaatagttaattgaaaatttcttcttggaggaaaaggctgagacaagactggaaaagacaaacactttttagaagaacagtaacactcactgatcccatacagtctgattttagctcaatctaaagaaaattcctggtgagacgtctcaaaattattaaagcacgccctacccaccacagagagagaacgtatgagaaaggacacggaatttagcatcaggaaagttgggttcaactctttgcacagccttttctggttgtgcgatcataagaaattcttgtgacttctccaagtttgtccttatatttaatctcagaataatgctgcaaccctgcctgcaattgggtttgaagagcacaaaatgtatgaaaatattttgagatgctaaacaatctgaattgcatcaatatgtgattttccactcacgtatacattgtataaaaatcaggatcagtagagcccagaaatgctactactactgttagtactggtgctattattacaaccactactgttaataaaatattaatggctgatgtttattgagagtttactgtatgcctgcactgttttaacattttacataaattaagaatttatgtctcataaaactcctatgaagtagttaccattatttcctccattttgtagataaagaataagagactcagggagttaagcaacgtgtctaagattatacagctagcaattgaaagaactgggatttgaacccaagcttgaactccagaattcaagcattaacaatgacactctactttttgtctcataataatagtaaaattagcttacagtgaagtagtggtttgtgtctgcatagtgataatctccttttatccctgcaacagtcctgtaaaatagaggttaattatccttattttagagatgtgaaacttgggtcaaaaggattaaggaatttggccaaagtcacagtgctctggaggagtaaaatcagatggttttcccactaaggtggcaactaaaaacttctcccaacctgtgtcagcctctgcctttgctggcaccatcttattgaagaaactgtctgtgaggatcccatttgagtcttggtgtattttgatttgttttgagagctttttcttctctgtcattctctgagacactctgtctatcatgcatgagactaattgtttctgcaagcgtcacatgattctgcagagcttagaatgagctgcagtgaatttccagcccagatgccattggcattttaggaaatcaccctgggaggatgaccccaggtgaactcaacctctgatgtcacggtcacctcccctccaggtgctgagctcaccacttatccacacgttctctgtgtggccgtccttaaacagggcattcaccrtgtcattgcttgctgtagattctgaatatgcactctgcttcctgtttgtagttttgaacactctagattctggccttgattcacctgtctaaatcctcttgcccgtggtgtctcagttatgccatcttctctgtgcatcacagaaccctgtgcttggggtattcctttagctaaaacttccttcccctaactcttggcttggctaacataatctcagcttaattagatataacctgcc

SEQ ID NO: 10679 - DNA, 609 bp, Homo sapiens
ttgttcttttgttgccttatctttaataaggtggtcttgtcttgtcatttctagttaaatttatgggctggctgtttctttctgaacattcttccagactctgaggatacagagtgtgggctgacagctcagytctagttgctggttgactccacactggtttcatctgagtccacaaagtgtgctgtatcagggcccaccaccagctgtatctccccttcattcaccatctcagcacagcgcactgcaacaggctgggctctgatggcccttgttctttctgctaaagtctaacgtgcttcactagtgctgtattttctaaaaatgttcgttatatcacgacactctcctgctcaaaatcctcctcaagccaaagcccttcaatgcttcctaggcttctgtgtgatggccactggcaacactctcctatcccttggctcgcttggccccagtcacgctagctttcttgttgagcctcaaatctgccaggcccacactgtccacaggtcttttgcagtgtagttcccctgcctagaatactcttcccccagataaccacatggcttccttcctcaaatctgtcaggtctaagcttagatgtcaggatat

SEQ ID NO: 10680 - DNA, 1917 bp, Homo sapiens
aaatttattttcaaaactagacaaattttgagaataaaagtaatgttaagaattatactgaaaaataagcattgaaactggaacctgtggtcattctaaatatgaatcatatcctcagtatgatattaacaatattaaatatcaccatgttaggtgagggccacagtccatctagcaaaggacaaactctgtacaattaattttttttttttttgagacggggtctcactgtgtcacccaggctggaatgcagtggtgtctcaacctccacctcctgggttcaagcaatcctcccacctcagcctccagagtagattgcagtacaggtgcacactaccacatgtggctaatttttgtatttttagtagagatgggattttgccatgttgaccaggctggtctcagactcctgagctcaagtgacctggccactttggctcccaaagtgctgaaattacaggcaggagccaccatacctggcctacaagtaatctttatagtggcaggaagagtcataagtgtcctcattaacatcatcattttcatgtgttttatgatattttactatttctatgactaccgtaatacctcacttgcccagagatcagagttccagtggcaatggtgtgtattatttaggagctgcccttagtcccttgctcatgctacttgttgtataaactcagtcaacaaattaaaagcagctgccaaaagcataaagtaacaactgaaagaaaagggaggagacggaagaactataaaaaggagagaaaactgggataacaatgtggggtagattttattgtagggaatcttttatgtggtatcaaaacattctcaatgatgactctgagttgatgtctttagcatttttcgtttaaaagagtagaggagtaagtagagcgtgctagaaaaatatccttcaaaatggtaagctttggcacatatattgagattacattttagttttttggaaactgacttgcggaacattttattcctggacaatatctgataaatgaggtattcctgtacttccttttatttggcttgaaacaatctctttaaaactcttttaagcagtgctttgttgaaaaaataatctgaattaatccatccatggttttagcaaattttgccatagaatctctcaatgttctgcctaaaatcaaaactttaaaaaaatcttcatatggaaacaccttcattctctttatcactttagttttcctgtttcaaatgtttaccagttctgtattattttcagaattttaagctgcattatggatccattcaaataatatttgacacaaaagcagaaaaaaatattttattattttgtcctattctgtttccagagggttataagtatctgtgtcaatactactgtttggtgaaatcaagacccaagaattattcttgacagaatctttccagtctcaattagggtgctatagttggaaaacattagagattcatccatctatctattcaacacacttgtactggtgcctaaaacatgccaggcatgtgcccaggggaaacaagcatgcataaacaagtaaaacaataacaaaaacagtaataataaatcataaggattgagaagtagtgtagagaaaaaaggtagtgtacaataatagaaagtgatgggggatattctaacatttgggtggagagtaggtagycattggaaaatacaagatccactatggtttgaacgtgtcccacgatattcatgtgttggaaagttaatcctcaatgcaactgtgttaagaagtgggaaccgtaagaggtgattagatcatgagggctctaatatcattaatatggtttggctctgtgtccccacccaaatctcatcacaaattgtaatccccacatactgggggagggccctggtgggaggtgactgaa

SEQ ID NO: 10681 - DNA, 603 bp, Homo sapiens
gggagttggcgagtgatttgagtgtaatagtatcctgagaatggggagggcgagaatgaattggagttttatgtagatccctgatgtagatattaagctaacttttgtgattattttgtaatatgaaggattaaaatctgggtttggctttatgatacactgaccccatagctatgagagatgagagatgagaaattagggaagtctcagaagctccaattctgacaatgcctcgcagtgacaatgaaggctgaggaggaggagcttcactctgtaaaatgcttcagaagttgccaggctgccctgtttgggggcatcaaataccatcaaatccaggttacaggaaaacaaagtcactatgtatttcaagcagaaatgattcgacttagggaatcacatacttatcaactgccagcagtactaggggagtgaaagttagaaagggccaaataactccaggttcactgctacagagaggcaggcagcagctgctacacagggtataggtccttaaggaactcactgcaggttttatggctcttctacatgcctgaggcaggattamcaaggaaattggaggctgctaaagctcccatttggcaa

SEQ ID NO: 10682 - DNA, 564 bp, Homo sapiens
ttatcacattttatttatgattcttcacatattctaaaaaaaagctcatcagaaaacaacctagcaaactaggagagacaaaaagacatacatttgtcataataattaaaatgaagtttaaatcaatatacatcaataggattagttctgaaatgatttgttccttaagtttatatgaatctgaattcctaacacttgattactgatctaacggtaatgactcagtgacattcataaaagcaggtattaatttttattcagtttctgaaaaagtgaaattgttccccttcattaacttttttacaaaatcattggctttttatagattataaaatagtatacattcatttcagaaaacttagaaattatcacacgaaataatataaaagttacctattaccccaaatccagcaatgacaaccattaagatttkggcatatgtttttctagttttctttctgtgcctacaaaacaaaaccatcaaattatataatttaaccaactttaatcaacttaggtatactaacaaaaatatttccaaaatgtgctataccctaacctgcc

SEQ ID NO: 10683 - DNA, 1004 bp, Homo sapiens
acactaaaaaaatcttataaataaaataatatccctctgaagactgctctcccattattttgtaattaaacttttgtatctgaatctgcttatctctactagcatatagatttagcatgaaaatatatatttaattatattaagaattttaaaatttgtattttagggtaggacttctctaccaaaaaaaaattgtaaaagctactaatttaagaattgaccaggcacagtggctaacagctgtaatcccagcactttgagaggccgagatgggagaatctcttgaggccaggagtttgagaccagcctggkcaagatggcaagatccctgtggctacaaaaaatttaaaaattagctggacttagtggtgggtgtccgtagtccaagctactcaggaggctaaggtgggaggctcagccatgagcctagaaattcaaggtggcattgagctatgatggcaccactgcactccagtgtgggtgaaaaagtgagaccctcatctctactcatactaataataaataaaacaaataatttaaaaattgatgttaaaaatatttttctatgtatttttatcccttgtgaaattttaataaaataatccaggcacgtagtttaaaaaaaaaaatcaagcaggacaaaggacttataatgaaaacaccagatggtcttaataccttcagtctcactagctgaggaaatcattttaatggtttcctatgtagttttttggagtgattgcctccaaatgctaaatgatatacttaattactacatctcatttatcaaatttaatataacatattaggcataaaagatgagaagtttacactacttcatttccactaccctgccaacttgtaactcctcacttactcccaatctttgatagttctatcaaagagctatctgaaagaactttggccctctaaaggactttacacctttatattatagatttaaactgtcatttcatgttcatcaattactctcaacaccctac

SEQ ID NO: 10684 - DNA, 561 bp, Homo sapiens
atgaatattcaacacattaataaaagagccacatatgcaatctacttaatctacttggggtattgggagagtaaagaataacatagcagtgctacagataatttaagaaayggtttctctctctctctctctatatatatatgtatgtatatatatatatatatatatatatatatatatatatatgagacacaggtataattattttccttctactatttgttattgatgtatactgccaaatccctaacggaaactggaatagttaactctaagctccccccatgcctacaaaaagaagtgggttcaaagtcattttttaaatcgaaagatttattaatattatttttatcatgtccaattgatattatgattatcaaaaagtttaatcacttattattacttgaaagacctagttaggaaatgttcaatccactttttttcttttgagacagagtctcactctgtcacccaggctggagtgcagtgacgcgatctcggctcactgcaagctccgcctcctgggttcacaccattctcctgtctcagcctcccgagtag

SEQ ID NO: 10685 - DNA, 561 bp, Homo sapiens
atgaatattcaacacattaataaaagagccacatatgcaatctacttaatctacttggggtattgggagagtaaagaataacatagcagtgctacagataatttaagaaatggtttctctctctctctctctatatatatatrtatgtatatatatatatatatatatatatatatatatatatatgagacacaggtataattattttccttctactatttgttattgatgtatactgccaaatccctaacggaaactggaatagttaactctaagctccccccatgcctacaaaaagaagtgggttcaaagtcattttttaaatcgaaagatttattaatattatttttatcatgtccaattgatattatgattatcaaaaagtttaatcacttattattacttgaaagacctagttaggaaatgttcaatccactttttttcttttgagacagagtctcactctgtcacccaggctggagtgcagtgacgcgatctcggctcactgcaagctccgcctcctgggttcacaccattctcctgtctcagcctcccgagtag

SEQ ID NO: 10686 - DNA, 561 bp, Homo sapiens
atgaatattcaacacattaataaaagagccacatatgcaatctacttaatctacttggggtattgggagagtaaagaataacatagcagtgctacagataatttaagaaatggtttctctctctctctctctatatatatatgtatrtatatatatatatatatatatatatatatatatatatatgagacacaggtataattattttccttctactatttgttattgatgtatactgccaaatccctaacggaaactggaatagttaactctaagctccccccatgcctacaaaaagaagtgggttcaaagtcattttttaaatcgaaagatttattaatattatttttatcatgtccaattgatattatgattatcaaaaagtttaatcacttattattacttgaaagacctagttaggaaatgttcaatccactttttttcttttgagacagagtctcactctgtcacccaggctggagtgcagtgacgcgatctcggctcactgcaagctccgcctcctgggttcacaccattctcctgtctcagcctcccgagtag

SEQ ID NO: 10687 - DNA, 564 bp, Homo sapiens
taatggggtagaactcgctagcatcactttatttacctttcatcaaatggtcatgaagtaacctccttgcatctaatccctatccctgtaagaatatagactgagcttgaaagctgctggcctatgggtccatggtgcagccatgaggtcttcttgcttagaattggccatccccaccataggggctgagttcatgttggctggatgaaagtcagggcgagccaggcttttcctgagaccccaatgctctccatccttgagtccttcccttcctctccaccctccccagctccctctctggtgtgtgcattgttttaggtgtttgcattctaagagactttttgatgatgatgccactgatgtctgtgggtgcatttgcagacccctgggcaggagaacctgtaagggcctgtgcatgtgccacgcgtccctccaggaggcacgtggttatggagcttctcatttgactgagatggcagaagaggcatttacagtattttcccttcctcctgtaattaataccccttaagctgtttaaagaaatacagtacaatcaccyttttg

SEQ ID NO: 10688 - DNA, 539 bp, Homo sapiens
tgctattgtttatgcaatataaaatgcaagccaagtctattaaattttgttttgttatgcttctttttagaattcttgagactttgttggtattacaaatgttatgtttgcaaaggaaagtttctaatcctttgtcactgataaaagtatacaactgatttttttttatctccagtccattttttaaaggaaatttctagcattaagaataagttaatcctacaaacactaatttaaagcatttgccatgttcataaactaccttctcctaggcatgtcaggaatcccaaagcactggaatacatatatatgttttgaagtcgtgagcttctccatcaccttgcgcyatgatcacatctagtggatgaggaagcaggctctgctggttcgtggctgctgtgatgaagtcagggctggttctagagccccaatgtactgctccccagctcatgactctgtccaatgacgttgcttttcccccagagtggattgctttcatcttcctgaaagcagcacttttcagtaagatccattttagt

SEQ ID NO: 10689 - DNA, 1489 bp, Homo sapiens
gggtgaaagaggggtggtgattcagggaccagatgatgctggctcctaccatctgtgaygaagattctacctaacagcaatgaacctgaaatgaagccagtttgttgtgtgatggatttctctttaacacatcaaaactttctttgatataagttcaataggactgatgaaattgggctacaataaattatcagagcagtccacaaaatgaatcattgccaaattttcttacagtcaattttatttctatttgaggggaaaataggtaattagagaacctcaggcattgcttccaggcttcaaagtggcttctatccagccacagggaggcttgcagcagaaaaccagatgttcaaataaagacctaagtggacaaatatgaacgatgtacattacacaaatacgttatggaaatctttcatggtgtttagaaaaaacatcaatgacttgaaagtatttgtataaatgcctctgtccttccagaagccccgaagggaggagtttaaatgcatttgttgggcatatttgtgagtttctacctacagtgttagctagtacatgcagaaaattagaataatgagattattttctcggcagacatttgctgagtgccttccaggtgtagccattgtactgggtaccttgtacttggcagtggagatgaatctgacaaaaggtgtcccctctgtgtgggaagatcagacttcataagaggaaatagtgatgctgcttagaaaatatgagaggtagaaaggaggtttaggtaaaccatggagaatggaagaaaagtgcctcttaggggctacagggatactccagggtcctgtttcctgtttttatctttattttttccttttcacattgaaacattcttttaacaaaatgtatgtatttatttcaacaaacaggaaaaatggactagttacaaatggcaagcacaatttgttttctctggcttttacatattttttaatttaacaaatattcatcaagcatgtattatgggtcacagagtgatgcgtattccagttaacaggaagaaacaggtcatgaggattttaggaaaagataagagggtgcccatggtacttgtttttgtgattttgattctcttcagagaataactgaatgtacttggatgcatgatccacttatttagtcaaagaggctcccatggaaacactgatacttcctagagcccatcctgtttggctttctctgttaagagttaaaaagttggagaagcaatacatgcctgggaaactctgcagacaaattcttggagttggaaatacacattactaaattctttaatacaaaaaataatgcttcaaattatactttggacacgatgtccacttttttggctcaacaaacaaacccaaaattgttttttagctttctgctctggcattcacaaagttttgcctaaaacccttgaggatttgctggaaaagatttatttatatgcattctgaagagcatgcca

SEQ ID NO: 10690 - DNA, 1489 bp, Homo sapiens
gggtgaaagaggggtggtgattcagggaccagatgatgctggctcctaccatctgtgatgaagattctacctaacagcaatgaacctgaaatgaagccagtttgttgtgtgatggatttctctttaacacatcaaaactttctttgatataagttcaataggactgatgaaattgggctacaataaattatcagagcagtccacaaaatgaatcattgccaaattttcttacagtcaattttatttctatttgaggggaaaataggtaattagagaacctcaggcattgcttccaggcttcaaagtggcttctatccagccacagggaggcttgcagcagaaaaccagatgttcaaataaagacctaagtggacaaatatgaacgatgtacattacacaaatacgttatggaaatctttcatggtgtttagaraaaacatcaatgacttgaaagtatttgtataaatgcctctgtccttccagaagccccgaagggaggagtttaaatgcatttgttgggcatatttgtgagtttctacctacagtgttagctagtacatgcagaaaattagaataatgagattattttctcggcagacatttgctgagtgccttccaggtgtagccattgtactgggtaccttgtacttggcagtggagatgaatctgacaaaaggtgtcccctctgtgtgggaagatcagacttcataagaggaaatagtgatgctgcttagaaaatatgagaggtagaaaggaggtttaggtaaaccatggagaatggaagaaaagtgcctcttaggggctacagggatactccagggtcctgtttcctgtttttatctttattttttccttttcacattgaaacattcttttaacaaaatgtatgtatttatttcaacaaacaggaaaaatggactagttacaaatggcaagcacaatttgttttctctggcttttacatattttttaatttaacaaatattcatcaagcatgtattatgggtcacagagtgatgcgtattccagttaacaggaagaaacaggtcatgaggattttaggaaaagataagagggtgcccatggtacttgtttttgtgattttgattctcttcagagaataactgaatgtacttggatgcatgatccacttatttagtcaaagaggctcccatggaaacactgatacttcctagagcccatcctgtttggctttctctgttaagagttaaaaagttggagaagcaatacatgcctgggaaactctgcagacaaattcttggagttggaaatacacattactaaattctttaatacaaaaaataatgcttcaaattatactttggacacgatgtccacttttttggctcaacaaacaaacccaaaattgttttttagctttctgctctggcattcacaaagttttgcctaaaacccttgaggatttgctggaaaagatttatttatatgcattctgaagagcatgcca

SEQ ID NO: 10691 - DNA, 1000 bp, Homo sapiens
ggcagacttgggaatgggaaaaaacgagtctctctcccccactcaacatgcataaggaagtgcattgccttacctctgcaggcagccattttgttttcatgacataagctagagcagagacagtcaatgaagtatagaaataatctggatatctgcaattgggaaagaacctgtgtacctgatgttactgagttactaaaagactggctctgcctctgtatgatctgatatggggttccataatggaatagctaagagaactggctaaggaactatgttttcagttcagattttggctctaccaccaattacttaggtgaccacaggcaagttacttaatcctactggaccataattttccatctctaatatgagaataatgatagtatttcccctacagggttgtgatgaggattaagtaaatatttttaaggctgttggtatctggcacagggtaagcactatataaaagtttgtaaataaataatttagaaatatagtgtttatttattattttaaacagtctgagttgggctttgttatttggtcccaaaggaaaacaaaatagactgtttttcttagtcttctgagccagccatcattaattgtgatgtcaaaaatcacggatgtaacaaaagtacattttactaataattaaaatatttaagttatcaaattatttactttaatatacatgtatacatatatatgcttttgtatgtatatacatgtgtgcataaaaagcttccagcattaggaatttttaaaaacccattccaaggtgatctgaaaacagcaaaagaccaaaagtagcaaaaagaatttaatatacatgatacatatatatgtatgtatatacatgtgtgaacatatatgtatayatatgtgtgtatatatacgtgtgtgtgtgtgtgtgtgtgtgtgtgtagagagagaggcaaattcaacattatcttgatatctacactattcttacaaactttgtcacagttagctgtgt

SEQ ID NO: 10692 - DNA, 1000 bp, Homo sapiens
ggcagacttgggaatgggaaaaaacgagtctctctcccccactcaacatgcataaggaagtgcattgccttacctctgcaggcagccattttgttttcatgacataagctagagcagagacagtcaatgaagtatagaaataatctggatatctgcaattgggaaagaacctgtgtacctgatgttactgagttactaaaagactggctctgcctctgtatgatctgatatggggttccataatggaatagctaagagaactggctaaggaactatgttttcagttcagattttggctctaccaccaattacttaggtgaccacaggcaagttacttaatcctactggaccataattttccatctctaatatgagaataatgatagtatttcccctacagggttgtgatgaggattaagtaaatatttttaaggctgttggtatctggcacagggtaagcactatataaaagtttgtaaataaataatttagaaatatagtgtttatttattattttaaacagtctgagttgggctttgttatttggtcccaaaggaaaacaaaatagactgtttttcttagtcttctgagccagccatcattaattgtgatgtcaaaaatcacggatgtaacaaaagtacattttactaataattaaaatatttaagttatcaaattatttactttaatatacatgtatacatatatatgcttttgtatgtatatacatgtgtgcataaaaagcttccagcattaggaatttttaaaaacccattccaaggtgatctgaaaacagcaaaagaccaaaagtagcaaaaagaatttaatatacatgatacatatatatgtatgtatatacatgtgtgaacatatatgtatacayatgtgtgtatatatacgtgtgtgtgtgtgtgtgtgtgtgtgtgtagagagagaggcaaattcaacattatcttgatatctacactattcttacaaactttgtcacagttagctgtgt

SEQ ID NO: 10693 - DNA, 616 bp, Homo sapiens
ttttcttttttgttctttagaatggataatttctattgatctatcttcaagtacactgattttctcttctgccttttcaaatctgttgagactatttagcaaacttttcattccagttactgtattttccaaatgtagaatcaataaaagcattaaaatatttaaaaaaagatttggctcttttttatagttttattttagctattgtattttccaaatcaagaatttctatttggcttttttttctagtttctattctctatttagattttctatttgttgagccattttcaccatattttcctttacttctttgaataagatttccttttagtcttcagatatatttatgttagctgctttcgtgtctttttctgctaaactcaaaatcttgacccacaaagacacagtttctatagactacttgttctctgagtatggattttactttcctgtctatttgtaggtctcatatttttgttaaaaagtggacgttttagatactatattatagcaatttagagattgctttattgatttatttattataaaaataataacttgaatgaamtttaactgcagaatttgtctcccacattgggtatagctgatgatg

SEQ ID NO: 10694 - DNA, 567 bp, Homo sapiens
taaagaaacataaagcagatctattccaattttcaacctggagccaagcccagctgagctcaaccaagttcagccaaaccccagctgaaactctactgacctacagatgtaagaataagaaaacaaatatttattattataaaaaactgagtctgggtccggtggctcatgcctgtaatcccagcactttgggagggtgaggcaggcagatcacctgatgtcaggggtttgagaccagcctcgccaacatggcgaaaccccgtctctattaaaaatacaaaaaatggccgggcacgatggctcacgcctgtagtcccagcactttgggaggcccaggtgggcggatcacgaggtcaggagatcgagaccaccttggctaacacgrtgaaaccccgtctctactaaaaatacaaaaaattagccgggcgcggtggcgggcgcctgtagtcccagctactcaggaggctgaggcaggagaatggcgtgaacctgagaggcagagcttgcagtgagcagagatcgcgccactgcactccagcctgggcaacagaacgagactccatctca

SEQ ID NO: 10695 - DNA, 527 bp, Homo sapiens
ctgaccttggccaggtgcggtggcttacaccagcacttagggaggctgaggcgggtgggtcacctgaggtcaggagttcgagaccagcctggctaacatggtgaaaccccatttctactaaaaatacaaaaaattagccgggcgtggtggtgcacgcctgtaacgcctgtaatcccagcaactcgggaggctgaggcaggagaatcgcttgaacccgggaggcggaggttgcagtgagccgagatcacaccattgcactccagcttgggcaacaagagcgaaacaccatctcaaaacaaaaaaaagccctggcctttctattcattttccaatgtcccgggcatgcaatacagtggcactggcatagccaggaggatgatgccgcacactccccttcaggaaaaagcgcctttctggggatgtgytcctgctgtgttcattgcctgcagaggaaggcagtgaagcaggtggaggtgcagccgcagcagataagcagggtctctgtcctccaagaacaattagagact

SEQ ID NO: 10696 - DNA, 653 bp, Homo sapiens
ccgtaaattccaagcagtgatgagcatggcagtggtatgaggcatctgtcacaaccataatgaaacactaacatggctgtgattttgaccgctgacaaagtcatgggtatggttccaacctctgtggtctgttgcctacatgctgaattgaaggaaatactactaatttcagtttgagcttagggaaaataagaatgtattattttctcctccaagttaatggccctctgaatccaatccatagaacccttggaggttggtggaccccaggtataagcaccctgctctccagggttaaggctcctgagaagagaagggcatcactccactcactgtggcccacaggagagtgaagagaagatccagcaaattcggtgcatcttgcttaccagggcgggtgtcaggacagagcaggcaggagagcccgagaggagtgaaaacactgggggctatttgtattgaygccaaaactctggactcctctgcgtaactagtacagaatttctagaaaaccattttccatttgtgtcgaatgttgagtcagattatccttgcacaaggatggcccccttggccttggctccatattcaaggcactgcatagtaacttctggtttcagaacattgagtgaccctttcaaccacaaaaggaa

SEQ ID NO: 10697 - DNA, 534 bp, Homo sapiens
ttgccatggacacagccctgccaagcagccacccacgctctcctgtcaccttgggctctggagttgtttgtgggaggagggaggagtcctccgggagccaaggaaggaaaagctgatctgcagagggtggatggctgcggtaccggactactcacacggctccctctccaccatgagggagaagtaggctttggcggagagctttatgcagttcatccgcagaggacacaggtgatagaagctgctcaaaacagaaagaaggaagatcacagaaggaggaagaaacattagtttttttcacaggttagtgacccaaagagaaaaaagcagaagcaaaagggataactgcgtaagatattcatccgttcactctcatttcagcacttgttcagtgctctgcagcgccyccccatggtcccctctctgatctgttctctccctacacccatagcgatctttcctgcatgtcactgggtgcatggtgtgcataaagcacaccagtggcttccattattcttgggataaagacaaaac

SEQ ID NO: 10698 - DNA, 536 bp, Homo sapiens
gctggtcttgaactcctgacctcgtgatccgcccgcctcagcctcccaaagtgctgggattacaggcgtgagccaccgcrcccggctgtgttttttttttccatttaatttcaggctattaatcagatattttaaaataaatgtcttttctatttttttcttattaaaacctcagtttattttatgcgaacatatgatgaatttatgtgtgtatatatatcacacatttaaatataaagcaggatttttaaaatagagcagcagctctttagaatcaaaggaattctgctacagtgaatggtggaatatccaaaatgagatgagaacatcaaaatatcatatattcaattgaaattactccactggttctcaatcaaaatgctaactctacactcttcttgcagaagtcacaccaggggtactcatgttctcagatttttattttttttatttagccattttggctgagctaacaacctcccattaaaatagattctaaaatgtaggatttgttttcctaaataattaagctgctt

SEQ ID NO: 10699 - DNA, 550 bp, Homo sapiens
tgtttttatctaagtaccacattagctgacaattaaaataaattggatatatatttattgagtgaactcactatttactatcgcttccatgtcaaaattataagccccttaaaagcaaataaacatgtcttatacatctgtacatctttttctatctcaatacatctcttacaaaaatgcatgctctgtgatagggtctcaaagatttactggctatttaattttgtctttgagactaaatcataggggaacgctccaagaaactgctaaccttgggggaaagcccaccaacagccagaaaacaagcgctgcctccatcccttctaggccctcacagcagtacgtttttgagttatagaaaatcactatgaaagtgagacactgaacttaaaaaaattaatatctgagaaaaaatggaggtagtaaagacaatgggctgactataaatagaaaattctaagaaatatgaaaaaaactamatttgtgagatcttgacaaattttaaattctatttaaatgtaaataatgtaatgtaaataaattctattta

SEQ ID NO: 10700 - DNA, 875 bp, Homo sapiens
atgggggcagttcccccatgctgtgtgctcacatgctctctcttgcctgctgccgtgtaagacatgcctgcttccccttccaccatgactgtgttttcctgaggcctcccctgccatgtgaaactgggagtcaattaaacctcttttctttataaattatccagtcttaggtatgtctttatagctgtgtgaaaatggactaatacaacaattaattgctttttatcttcattttaataaatttataagcaaatggcattaataaattatgatagagcagaatgcaaagatttttaaataatttaatcaaccaaatgtggatcacatagaatgaatatatatgaagaagtattttatataatttttgaatgtacaattgcatttataaaataaaaatatgcaaaatcaacttatgtttttaaatgtccagataatgcttacccatgagggctgagtaactggaaaagggtgtgggtggtggttacatggttatgttcagcttgtaaaaattaatcaattatcaatttgtgacttatacatatacttaaacaaaaaagtaacaaaaacaaaatgaaacaaagtgcagtctctgccctttagcaacttatgttctattaggagggccagcaagaaaatctccatttctgttactcttccttyctttgtgtagagtcatttttgcatttggcatcattttccttctgcttgaagaacttcctttaccatttcttgtagagcaagtttgctggtggtgaattatttcagctctcatatatctaaaaaccctttattttgtctttgtttatgaaactttctttttttttactaaatatagaattctaggttgagttttttttcctttcaacatttgagag

SEQ ID NO: 10701 - DNA, 290 bp, Homo sapiens
gcagtgagccaagatcatgccactgcactctagcctaggtgacagagcaagacttcatcaaaaaaaaaaaaaaaaagccggtagtttttaatattgttaggaaagattcaggaatgacactaatgacatagatacagaaaaaacttttctacttaccttatagtctcaggggattttaagggattcttgaagaagtgattctggtttgtaatgtcacagggcagcgaggtgtgtgtgtgtgtgtgtgtgtgtgtgtgtgtaatgtggatrggaggtggatggggtgggtt

SEQ ID NO: 10702 - DNA, 554 bp, Homo sapiens
aggtgtgaatccctaaaggccaaagttctacattattatgcttaaacacacgatgcatttgccagttatttctctgttgtctataagcttcaagcccaccttttcagataccacaccataaggctggagctaggagtcacacctayttctcagactctctcatcaactggttctcagttagcttccaccaatggaaaacacgggcaagaaataggaagatgggaggtactgagaagaaactcacttagcacttctagcgtgagttgacatctctccagcagcagtgcacaacaagcctcctacttcaatgtaccccatccgagggaccagctgcagccgccacggctgtccctcaaccccatgtggcagtctgagcaccagctggccccatcccttgggatgcccaagccctaaccacaaagcatcacaaatcaatcagaaatccaagcatcagtcctccagatacttctccaagatcctagattttgataacatcacttctccccttatattctctcaatacctaagatgttagctcttttctcaaagtatta

SEQ ID NO: 10703 - DNA, 537 bp, Homo sapiens
tgaggtaactcacagcccccgccacagctcctagactgtttctcatttaattttcttatattttaacaatatgaaaaactgaaagtaatttcacccttctctgaacttcaacatcactttttctttgtacctttattacagcactcagatatcttagtgtgccttacatgataaattatgtacaagtattggataactccttgtacartatatagaagacatgtaataatatttttaaattggttggtgtcaattttaagcggtcaaagtgaaagcacagtgcaggaaaattacatttttaaaaagtggattaatttaatctggtcagtgcttaattaatcataggcatatatattatttgtagaagaaatttaatagtcatagtagacatattatttgttggaagctttattgagaagtatctacagtttttatccattatgtgtgtgtttaatttttcatttttaggaaaggaaaacactctgaatggtaggaatttaattctgactgatttacttcatgtattttgttttcttt

SEQ ID NO: 10704 - DNA, 522 bp, Homo sapiens
ttctatgaaaggcaactggaactgaagaaaaatgagaaactcatcttgaggtaaaattgaaaggaaccaaggagcttaaagaaggtagtgattatcagctaagcagaaatagggggtttgctagaaccatgcttggtaagtctgtctaccctccatcacagtgccttgtatagaggagggatgcagcacaaatwatggaaagtataaaaatgatgagtgagcaggggataagagaggagaaagtaaaagtttaaagaggacataaagaccattattacaaaataaacgtaaatgcagttctaggacttccagatcacaatagtgaaatcgtccattttcatggtgctgtaatccgagttccaggagtaaataatacatccctctcatgggaataatgtaaacagcaggaaggagagggaaaggaagaacggactggaaaacaactaagaagtagtgatggaggaggacaagtaggttgggcacagacaatttttaaggcagtaaaactaccctgtatgatac

SEQ ID NO: 10705 - DNA, 549 bp, Homo sapiens
gttttctgctgatcaaggatatttcctcctcccatttcagaaacaaattactgatacattttgataatgacactttgaccagatatttctcctttgatttatatgctgattggggtgatgagagttttggcaactgttctagtgaaatagaatttcatggtcratactcattaaaataaaaactaagcagaatgataacttggcatattaaagtattagactggtggctttaaacctactttttcttgctcagaacagattggtgttgagggaagtcactaaagtaccttttttaaaaaaaattaattttcactgggcactgtggctcacgcctgtagtcccagcactttgggaggccgaggcgggtggagcacctgaggtcaggagttcaagaccagcctgattaacatggcaaaaacccatctctattaaaaatacaaaattagctaggtgtggtggtgtgtacctgtaatcctagctacttgggaggctgaggcaggagaatcgcttgaacctgggaggcagaggttgtggtgagccaagattgtg

SEQ ID NO: 10706 - DNA, 549 bp, Homo sapiens
gttttctgctgatcaaggatatttcctcctcccatttcagaaacaaattactgatacattttgataatgacactttgaccagatatttctcctttgatttatatgctgattggggtgatgagagttttggcaactgttctagtgaaatagaatttcatggtcgatactcattaaaataaaaactaagcagaatgataacttggcatattaaagtattagactggtggctttaaacctactttttcttgctcagaacagattggtgttgagggaagtcactaaagtaccttttttaaaaaaaattaattttcrctgggcactgtggctcacgcctgtagtcccagcactttgggaggccgaggcgggtggagcacctgaggtcaggagttcaagaccagcctgattaacatggcaaaaacccatctctattaaaaatacaaaattagctaggtgtggtggtgtgtacctgtaatcctagctacttgggaggctgaggcaggagaatcgcttgaacctgggaggcagaggttgtggtgagccaagattgtg

SEQ ID NO: 10707 - DNA, 757 bp, Homo sapiens
ctttcctttaagagtacggcgagaggctgttctttgactccgctatgtgcggtctctcctagctctggccttgaaaggcatcgactacgagacggtgcccatcaatctcataaaggatgggggccaacaggtaagaaggctgtgcccagaccacaatgtgggaattggaggccttgaacaggcaccaggcaggggaaaaaggggaggctctgccccagagaagtgaacctgtgtcttgtggactatcactgcaggaggctgctggctctcccttgtgggacaaggtggcaaggtgtgcagtagcaggaggcctgggaagggcccaggtccagactgtgtaccctagcctgggctctccagtgcctgacmctgggagggtgggtggctagtgggtccccaccccatactgggccctctggatggctgactagggtaggagctgccttggtggccacggtgtgagatgcagggaaagcccatagccaggctgttaggatgaagcctatggctcagcagcagctgggctttgggagactgcatggatcccccagggattaccctgggcctaggatttagggccttcccagggaagggagatgggggtgggtggcaggcctggggttctcctgcttgcttggctttcctctggccaactcaggccaggccacccagcccaccagggccttgtctccacagttttctaaggacttccaggcactgaatcctatgaagcaggtgccaaccctgaagattgatg

SEQ ID NO: 10708 - DNA, 801 bp, Homo sapiens
aatggtatttcccagattatattccagggttttttaaaataggttttaggtttcacagttaagtctttaatccatcccgagttgatttttttttgagatggagtttcattcttgttgctcaggctggagtgcaatggcatgagcttggctcactgcaacctctccctcctgggttcaagcaattctcctgcctcagcctcctgagtagctgggattacaggcatgcaccattatgcctggctaacttttgtattattagtagagacgggggtttttccatgttggtcatgctggtctcgaactcctgacctcaggtgatctgcccgccttggcctctcaaagtgctgggattacaggagtgagccaccatgcccggccctgagttgatttttatatatgatgtaaggaaggggtccagtttcaatcttctgcatataactagccagttataggatggaattttagagctgtctagatgaccactgcgtgggtggcagtgaggatggggttactggtggtaggtggagcacagtggtacaaacttkaatttgtggtgacttggtatggtataccagtggacaagaattaattggtattttctatgtggaaagtctttacttcaattttttaaattgaataatttagttttattaacaagaatagaatgaaaacagttcaatttctttaataggtgtagggatattggtactttgtgtcttttaagaaattttttcttttcatctaagttcataaatttatggcataatgttcatatttccttaatatcttttaaatgtctta

SEQ ID NO: 10709 - DNA, 563 bp, Homo sapiens
tgctttttacatttttctacactgtctactatgaacatgtaacagttttgtaattttttaaaatctatttaaggctgggcatagtggctcacacctagaatctcagcactttggsaggccaaggcgggaagattacttgcatccaagagttcaagacccgcctgggcaacataaaagcccttatctctaccaaaaaaaaaaaaaaaaaaaatttgattagccaggtgtggtggtatggcacctatagacccagctacttgggaggctgagatgggagaactgcttgagcccaggaggttgaaggtacagtgagcagtgactgtgccactgcattccagcctgggcaaaactctatctcaagaaaaaaaaaactacttaagcataacaacaattatgtatccctgacagtatcagactctatttgtaaattcatggcttatattgcagaaagtaaatacaattccacctgaggaaagctttcttattcgtagaaataattaaaccctgcccaagacatcctttgcaggaactctcctcctggattctgtaaaaacagagtaaga

SEQ ID NO: 10710 - DNA, 559 bp, Homo sapiens
attgctttcactttttttaatacactagaaatatagataagtttgtaaccatccatccttcttaaaacaatttgatgtttatgagactcagttgtctttctcttaattcacaatgaataactcttcctaaaatttagagtgagatcattttaaactatatttttattcctattttccatctttttaaaacgtggtatgaacacagctgagcaaaataaatcacagacaattttctgatttttcgcacgccatattatgtttataatgaatcattttaaacctctaagttcaagattattacattgtttacagtcatttctcatagtagcagaagctatayagagagattctaaattgaaaatataaaaactgtcatgctctatataatttatttgatatggaagagagtctaaagtaatacagatatatgtgctgtactgtctttcagagctaatctttcattttttctccattaaatcgtttttgtcttaaaaagcttaaaatagctgtttactatttgctaattaatgaaatctagtaaacatgactgtgtatctca

SEQ ID NO: 10711 - DNA, 559 bp, Homo sapiens
attgctttcactttttttaatacactagaaatatagataagtttgtaaccatccatccttcttaaaacaatttgatgtttatgagactcagttgtctttctcttaattcacaatgaataactcttcctaaaatttagagtgagatcattttaaactatatttttattcctattttccatctttttaaaacgtggtatgaacacagctgagcaaaataaatcacagacaattttctgatttttcgcacgccatattatgtttataatgaatcattttaaacctctaagttcaagattattacattgtttacagtcatttctcatagtagcagaagctatatagagagattctaaattgaaaatataaaaactgtcatgctstatataatttatttgatatggaagagagtctaaagtaatacagatatatgtgctgtactgtctttcagagctaatctttcattttttctccattaaatcgtttttgtcttaaaaagcttaaaatagctgtttactatttgctaattaatgaaatctagtaaacatgactgtgtatctca

SEQ ID NO: 10712 - DNA, 548 bp, Homo sapiens
ataatgctatcctaggagcagagtccactgagcctcaatcactctgtgaacttctgtaccttaacgacagtagccactaaaattaaacctcaatgagcagatacagaaaaggcactcagtagtgacctagagaatattgagcacacctatcagaaaaggtccctaattaaatagatgtattgggagctgctattttggaaaaatagcaagagcccttaaggagattaatatacacaaccagcctaacaaaaacaccaaatcaacacattgttttataaaacttcaaaaattttataatttttcaaaattttagaagatgatctaaagaaaagaagagttattactgagacatgaataaatgttgtggaggccaaatggaatgaaattccccaaattgctcattgacaatgcaattatgtactgttatacaaaaaccaactttgtgaacaaggcytcaaacagaaataaagttagccattaaaagaaagaaaaaaaaaaagcattgagcttgtcatcttgccacactagaaaacagaacacagtagaat

SEQ ID NO: 10713 - DNA, 547 bp, Homo sapiens
tggcttttgcctggtaatctagcctctgattttttttcatctgtatggtcttctcattgaggaggggttctttcattargttgtggctggatgggactgcctctcaccaaagattattttgcttccagggatttcaaagagcaaaagggactttcaggtgtctggctgcactccaagtttgagtcgttgtctcattatggggctaaggttgtttgtaatttgcaggaggcttttgggacctctgacaggaagcattgaacattacttaaactccaggtcaatgcagctcattctgtcaggtgagcactgatttttctttgcttttatggaaatccacagtgtccttcaacagctctactggacaattctttcaggctttccatcatcaaagatgacctctgagacatggtctctacctcatcttcacccataagaggtcagtccaaggtgtgagaacgtggttcaaactttgacttgcctttgtcatggttcctgcctttctcagagagcccctgctaggcataggatgatggaggcagtgaggtca

SEQ ID NO: 10714 - DNA, 514 bp, Homo sapiens
agtgtgtggtggcctccttcttccagacttctgttgacctaaagaggttaatgtatgaccaacgagaaaaagctcccaaatgccttatatatcagcccctattcctatttacttttaagtagtgtagaagtgagtcagaaaaaaaaagtaggtcgtcctcccaattgttcactttccaaatttatttaggattgtgcagacacactaaatgatcccagtcacaactgagaaggaagtttccygccttttaatttttctgccagtaagaagtgggtatgccacaatgtacttaggtcctccagcatggggtagaactgggtttggagcatctgttgaatcttataccaaaagaaatatagctacattaacaggaaatacacccttttctaacaactatccaattggagaatctatcctttacttgcttgttactccaatacacaaccctttggaatctagatacagagttaaggtgtactgtgtcagattgcctggaatcagagcttggctcagc

SEQ ID NO: 10715 - DNA, 603 bp, Homo sapiens
tgggacaattaataaacaatcaagttttgcctccyaaagatgaacgtgtcctgatgtatattccctggacctcagatattaataaatattatgtgggaacattttgtcatcatatgtctgggaaatcctgagttaagcagggtttttaagatttttcagactctataagttgttaatgtaaaaaaaatgttctaatctagggaagtagagtgttttttaccttggggatatattttttaaaggagtatcccgcaaggtgagcatgccatggaatgaactttggaaaatattgatctggaatattcaggggattaatgcagatgtcacttaactgttgcaccatttgtaaattataatgaattatcctggacaattttcttcttcagttctgagtggtaaaatctcaaaaatattttcttcttctgaattctcatacaagtggaaaggttcctaaaccactgttactaaatttattctgcacctgtcacctaaagcatgaattataatagaaacttgacccatgaagcataacatacattatattttaatgttctcaaaatttttcataaaaattgacattctcaaatgaccagaaaactccca

SEQ ID NO: 10716 - DNA, 617 bp, Homo sapiens
atcaaaaccaaggagaatctcaaactgtaatctctggtaagacaagttgacatatgatttaaatttattaggtggaagatagggatctggcaagatgactgaataggaacagctctggtctgcagcctccagccagaccaaagcagaaggctttggttttgggggattccctcgtgtgcctacaccaccagggccctgggttttaagcacaaaactagctgtttgggcagacactgagttagctgcaggagttttttttttcatatcccagtggtgcctggaacctcagcgagacagaactattcactgccctggaaagggggctgaagccagggagccaagtggtctcgctcagtgggtcccactcccacgggacccagcaagctaagaaccactggcttgaaattctcgcagccagcacagcagtctcaagtcaacctgggatgatttagcttggtaggcrgaggagcctctgccattactgaggcttgagtaggcggttttcccctgacagtgctaaggaggccgggaggtttggactgggtggaattcaccacagtgcagcaaagcagctgtggccagactgcctctctagattcctcctcactgggcaggac

SEQ ID NO: 10717 - DNA, 617 bp, Homo sapiens
atcaaaaccaaggagaatctcaaactgtaatctctggtaagacaagttgacatatgatttaaatttattaggtggaagatagggatctggcaagatgactgaataggaacagctctggtctgcagcctccagccagaccaaagcagaaggctttggttttgggggattccctcgtgtgcctacaccaccagggccctgggttttaagcacaaaactagctgtttgggcagacactgagttagctgcaggagttttttttttcatatcccagtggtgcctggaacctcagcgagacagaactattcactgccctggaaagggggctgaagccagggagccaagtggtctcgctcagtgggtcccactcccacgggacccagcaagctaagaaccactggcttgaaattctcgcagccagcacagcagtctcaagtcaacctgggatgatttagcttggtaggcagaggagcctctgccattactgaggcttgagtaggcggttttcccctgacagtgctaaggaggccgggaggtttggackgggtggaattcaccacagtgcagcaaagcagctgtggccagactgcctctctagattcctcctcactgggcaggac

SEQ ID NO: 10718 - DNA, 1411 bp, Homo sapiens
cacataaagcaagattatgtattgattggcaacaatgatgtgataagaagcttgcaggaacctaaccctgtattcccttacgagcaatagttcagaattcactaattcagtgtttgcagcaactttataaaacataatgattgcaaacattgagaactgactctgtgtgctatgtgtgtgtgtgtgattaagtgctagacatggactacacaggagcttaatgtgtaaatttatccagtgcttttgtatttagcctggtaatctcaccagaaattgctaatttaaattagttcctttgcttttattaagataaatggaatctcatcaactcagtcttaggactcaaaggaattagccttagaaataaaactttattttgttaaaaactctagtgaaggaaattatacaacagaagcgcagtgaagggatatcgtttttcacctttgtgagcacaraacagatttgagtcttccccatatcacacagattcagctccctcaagccacccaaagtgcaaaccgtgccatctctcttttcttctagatcgctatccactcaacattcacccaaaacatacacccagtttccgatgcacaggtaataaagatgataagtccttggcttacaattaccacatgtgtagtgagctgagaggaaaatatgggaaggccactgaggaccactcagccagggaagaacagtgaatgtcagttaaagccaccagaagatgagatgcttgaccttagagatgaggagcagttaatatggtggtcttggtggaatcccctggtacaaaggtccgcgcaacctactctgtgaagagcaccagaacagatgtcatggatgattgagtcagtatcagccagtatcctgaaactccagtatttcaaggaagctttccctgagagacaccctctcctccatgaacacatgcactcccaaccaagaaaaagtctgaatccgtccataggattcctttctccttccatcctggcacttatttaatcagtatctgtctccccaaatgaagcatatgcccctaaaagcaggaaccaagtattttgttgttgttagtttgctgttgcatctcccactgcctcaagacttgcctggcataagctgctgaacaactgaatgaagattgcagagtaaggccaaggtcttattcatggggtgacagctttgctgggagattttacaaggtcatagtattgtggggatttttttccacagtgaacaatgttttatcctgggaaatcagtgtacctcccataggtatttttgttcaccgtgcttttcattgcttaactctttgacctaataactagtaaattagcagtcactagaactgagaagagagaaaacaggaaagtttcaggtcttctaacttatattcctaaatgcaacctgt

SEQ ID NO: 10719 - DNA, 1411 bp, Homo sapiens
cacataaagcaagattatgtattgattggcaacaatgatgtgataagaagcttgcaggaacctaaccctgtattcccttacgagcaatagttcagaattcactaattcagtgtttgcagcaactttataaaacataatgattgcaaacattgagaactgactctgtgtgctatgtgtgtgtgtgtgattaagtgctagacatggactacacaggagcttaatgtgtaaatttatccagtgcttttgtatttagcctggtaatctcaccagaaattgctaatttaaattagttcctttgcttttattaagataaatggaatctcatcaactcagtcttaggactcaaaggaattagccttagaaataaaactttattttgttaaaaactctagtgaaggaaattatacaacagaagcgcagtgaagggatatcgtttttcacctttgtgagcacaaaacagatttgagtcttccccatatcacacagattcagctccctcaagccacccaaagtgcaaaccrtgccatctctcttttcttctagatcgctatccactcaacattcacccaaaacatacacccagtttccgatgcacaggtaataaagatgataagtccttggcttacaattaccacatgtgtagtgagctgagaggaaaatatgggaaggccactgaggaccactcagccagggaagaacagtgaatgtcagttaaagccaccagaagatgagatgcttgaccttagagatgaggagcagttaatatggtggtcttggtggaatcccctggtacaaaggtccgcgcaacctactctgtgaagagcaccagaacagatgtcatggatgattgagtcagtatcagccagtatcctgaaactccagtatttcaaggaagctttccctgagagacaccctctcctccatgaacacatgcactcccaaccaagaaaaagtctgaatccgtccataggattcctttctccttccatcctggcacttatttaatcagtatctgtctccccaaatgaagcatatgcccctaaaagcaggaaccaagtattttgttgttgttagtttgctgttgcatctcccactgcctcaagacttgcctggcataagctgctgaacaactgaatgaagattgcagagtaaggccaaggtcttattcatggggtgacagctttgctgggagattttacaaggtcatagtattgtggggatttttttccacagtgaacaatgttttatcctgggaaatcagtgtacctcccataggtatttttgttcaccgtgcttttcattgcttaactctttgacctaataactagtaaattagcagtcactagaactgagaagagagaaaacaggaaagtttcaggtcttctaacttatattcctaaatgcaacctgt

SEQ ID NO: 10720 - DNA, 524 bp, Homo sapiens
atctccagggtatgcctgtacatactggggttgaacaataagtaaatagatgatggatgatgtttccctgtgagtgagggaagttatagatcagcaaggggtaggagggaaagctagaattaataagtgccactggattagagttggagacatcagtatgaagtcatgttttgtttaatatttataaatatataagaatgtataatactacttacatatgcctatataatgagttatatgtatttatatatacacacacatgcttcctagatctatccactgcaaggatctagaattagtgacatcccagtagcaatgagcaaacccactgcccagataaatacccttctccaataacaggagcctggtcttcttgaagaaayagctgataatttcctttccttaggaaaggaaactgtaagtatgtaagaaatactgtgaaacaatgaaatcagtaaattttatggtcattataatcattgacaatgtgactgtgaaataagaaaataatttataaaatatta

SEQ ID NO: 10721 - DNA, 524 bp, Homo sapiens
atctccagggtatgcctgtacatactggggttgaacaataagtaaatagatgatggatgatgtttccctgtgagtgagggaagttatagatcagcaaggggtaggagggaaagctagaattaataagtgccactggattagagttggagacatcagtatgaagtcatgttttgtttaatatttataaatatataagaatgtataatactacttacatatgcctatataatgagttatatgtatttatatatacacacacatgcttcctagatctatccactgcaaggatctagaattagtgacatcccagtagcaatgagcaaacccactgcccagataaatacccttctccaataacaggagcctggtcttcttgaagaaacagctgataatttcctttccttaggaaaggaaamtgtaagtatgtaagaaatactgtgaaacaatgaaatcagtaaattttatggtcattataatcattgacaatgtgactgtgaaataagaaaataatttataaaatatta

SEQ ID NO: 10722 - DNA, 583 bp, Homo sapiens
tgatggtttttgtyaactgagcaagtattttatttcagtcaagtaggaaaagggggctaagagaatgacttaatttgtctcaaatgagcactttattacaaagagtgttactgttctatgtaatacattgccagaaagtttcatattctttattgtatttggatgagatcttttctagctaagtggccataagaatttttctttgtttcctctgtagcgcaggctgtagtgcagtggcacgatcttggctcactgcaacctccacctcccaggctcaagcaatcctcccactgcagcctccgagtagctgggactacaggcatgtgccaccatgctgggctaatgttcgtattttttgtaaagatggggtttcaccatattgcccaggctggtttcgaactctttgagatcaagtgatctgcctgcctcagcctcccaaagtgctggaattacaggtatgagccaccactcctggcctgtgagaatatttttaaagctattatttaaaaaaaaaaaaaaaaaaaaagcaagccatggaatttgcgatttatcatctggttgtatgtgttagattttaataata

SEQ ID NO: 10723 - DNA, 522 bp, Homo sapiens
atgccactgcactccagcctgggcaaaaaaaaaaaaaaaaaggattaaattagataatccataaagtttttagcggagtacttgatactcttaatacatgttagctattttaacatttttttctctgaatagcaattattattgtgaaatggaaaacacattatggagttttaaattaagagactaaggagtgtatcagaaatacctccaaatatagaacagtgttgagaggagggtgggcgtgggctgtggggcaggttctgtgcatatgytcatgcttgcctgcccaaataaaaagcaagggaaaacctaaacagaaactgttctagctgaaaaaaatactaaattgggcttcccagggaggttatgatgatctgatcctcaactgattttagacaaatagccatttaccctagaaatcatgtttaaacaaacactcaagtcagagaacaggcccaggtgatcttaaaagttttctttcaattcaagatgcatgcaggattttctattcagtcagaattc

SEQ ID NO: 10724 - DNA, 522 bp, Homo sapiens
atgccactgcactccagcctgggcaaaaaaaaaaaaaaaaaggattaaattagataatccataaagtttttagcggagtacttgatactcttaatacatgttagctattttaacatttttttctctgaatagcaattattattgtgaaatggaaaacacattatggagttttaaattaagagactaaggagtgtatcagaaatacctccaaatatagaacagtgttgagaggagggtgggcgtgggctgtggggcaggttctgtgcatatgctcatgcttgcctgcccaaataaaaagcaagggaaaacctaaacagaaactgttctagctgaaaaaaatactaaattgggcttcccagggaggttatgatgatctgatcctcaactgattttagacaaatmgccatttaccctagaaatcatgtttaaacaaacactcaagtcagagaacaggcccaggtgatcttaaaagttttctttcaattcaagatgcatgcaggattttctattcagtcagaattc

SEQ ID NO: 10725 - DNA, 582 bp, Homo sapiens
agaacagaagtcttaatctgtattaaggggagggtatcaaacacgatcatatttagtgtatttgcagtaagccttgatagctggatgtaggtaatgggaaaaaaaacctacctgaggggagggggccagaatacttgctgggaatagaactacagtttggggatgggaggtagaaaaactaaaaagattttgggtctgacaatcacrtacgcattgcctccttaatactgagactaaatcaacacaatagaaatgacccctaccccttcactcctgctcccaaccaccatcatgagcctaacaagtatcaagtaacaaatagcaatgaatactgcaagaagagtttcaagagcatgaagacagaccaatcccaaagcacagtgcaaaggggatacccaaagctaaaagtgaaatcaacatttaaaagctatcttgcaaatcttcccccaccttaaacctaagggaatgctagggtatctgaagagagtggtactctgaggttaattaaggaagaaaatcctcaaagccaggtcatctctatcttaactcaaatgctaaaggcctagcagagctaagagtatg

SEQ ID NO: 10726 - DNA, 582 bp, Homo sapiens
agaacagaagtcttaatctgtattaaggggagggtatcaaacacgatcatatttagtgtatttgcagtaagccttgatagctggatgtaggtaatgggaaaaaaaacctacctgaggggagggggccagaatacttgctgggaatagaactacagtttggggatgggaggtagaaaaactaaaaagattttgggtctgacaatcacgtacgcattgcctccttaatactgagactaaatcaacacaatagaaatgacccctaccccttcactcctgctcccaaccaccatcatgagcctaacaagtatcaagtaacaaatagcaatgaatactgcaagaagagtttcaagagcatgaagacagaccaatcccaaagcacagtgcaaaggggatacccaaagctaaaagtgaaatcaacatttaaaagctatcttgcaaatcttcccccaccttaaacctaagggaatgctagggtatctgaagagagtggtactctgaggttaattaaggaagaaaatcctcaaagccaggtcatctctatcttaactcaaatgctaaargcctagcagagctaagagtatg

SEQ ID NO: 10727 - DNA, 623 bp, Homo sapiens
gacaggataaaaaagacacataataacaagtagccttgcagtatagttcgaagtcaggtagtgtgatgcctccagctttgttctttttgctattcatgraataagtttaagttgtaatattgatgtaagtaacgatttcaatatgaaaacaatttcttttctctattgcaaaaataaaaaataacaagatcatgttatttgcagggacatggatagagctggaggctatcatccttagcaaactaacacaggaacagaaaaccaaataacgcatgttctcacttgtaagtgggagttaaattatgagaatacatggacacatagagggtaacaacacatactggggccttttggagggtgtagggtggaaggaaggacaggatcaggaaaaataaatactgtatactaaggcttaatacctgggtgatgaaataatctgtacaacaaaccccatgacacaagtttctctatgtaacaaacctatgtacccctgaacttaaaataaaagttaaaaaaatttaaagcaacagcaaacacatctatattctaaagtaaaatgcaagcataatattttctttaagtaataatttgtccatgtgattatttattcttagcccaagaat

SEQ ID NO: 10728 - DNA, 623 bp, Homo sapiens
gacaggataaaaaagacacataataacaagtagccttgcagtatagttcgaagtcaggtagtgtgatgcctccagctttgttctttttgctattcatggaataagtttaagttgtaatattgatgtaagtaacgatttcaatatgaaaacaatttcttttctctattgcaaaaataaaaaataacaagatcatgttatttgcagggacatggatagagctggaggctatcatccttagcaaactaacacaggaacagaaaaccaaataacgcatgttctcacttgtaagtgggagttaaattatgagaatacatggacacatagagggtaacaacacatactggggccttttggagggtgtagggtggaaggaaggacaggatcaggaaaaataaatamtgtatactaaggcttaatacctgggtgatgaaataatctgtacaacaaaccccatgacacaagtttctctatgtaacaaacctatgtacccctgaacttaaaataaaagttaaaaaaatttaaagcaacagcaaacacatctatattctaaagtaaaatgcaagcataatattttctttaagtaataatttgtccatgtgattatttattcttagcccaagaat

SEQ ID NO: 10729 - DNA, 532 bp, Homo sapiens
ggcaacatggtgaaaccctgtctctactaaaaatacaaaaaaaaattagccggtcgtggtgcatacgcctgtagtcctagctacttgggaggctgaggcccaagtattactggagcccgggaggtggaagttgcagtgagccgagatcacgccatggcactccagcctggycaacagggcaacacttggtctcagaaaaagttaataaattggtacagcacttaataattgactagcttttttgacttcatgcctgtggcatttttgccaaaataacactaaattaaaactgcaaaataaaatttgtatgctacattgaaagaaaaatatataattttgaaaaatgatttcctctataaaactaaaataagttatgcctttatacaggaatatttatttgtcaaaaacattgtttaagcatgtcttaggtatacgtgaatcatgttaacttatacgtatttgtttgtataaatagtatctacttagcatatataatataaagaaattaaatagataaggttaacttcaagct

SEQ ID NO: 10730 - DNA, 569 bp, Homo sapiens
tatattaaaataattttattccctcagtattttttccaaaacctagtttctttctctaagagtaacctatgtggaaatamaagaaaaagtgcctggatcttggacaatagactctttaaagctaaaatctataataaaaggagaacgataagcaacagggaaaggtaaaataaactgggagggaggtggaagggacgatgtcagatcatctcatctgtaactacataattctaatgatggagcgttggaggaagtttcctgccgcagcactccaaaggcattaaaaatatctgccttccctttcaccagctctcttcagattccccaggcaactggtacactcttggcctcccctatcccagagttcagattttgctaattcacccaagtctacctctcacaactactccaatctgaaaatcattctctctctaaccacgctgtgttgtgtaaattttgtagttgtcagaataaaattaagctaatattctatagttctgaagcattaaaacactgtaaaattgaaaatatctgaaggattaataagacattgcactcaaggttaaggg

SEQ ID NO: 10731 - DNA, 209 bp, Homo sapiens
atactgcagttccgggagtcatccaacctggaatgcatgctttgcggggatctatgatgccctcgaattgtatgttacatgtgaacctgtgagcattttctaggggctctgcacctttgtgtyctcagctctgagccccatgcttgctgcaaccagcaggtgttcagagtgaatgaatttgcttatcttggcataaatcatgtaactgt

SEQ ID NO: 10732 - DNA, 308 bp, Homo sapiens
aaaatatatacaaatatatataaaaattgtgtatatataagtaaacatatatgtatatattatttatatatgtatgtatatattatatatagtgtacatgtatgtatgtgtgtgtatatatatattatgtgcatatatatatatacgatgtagtgctgacaagccagagggaaaatggtataytcaattcccattactcacaataaaaacagttacagttcaaaaaccaaatgaaaagaaggaaggaaagaaggaaggaaggaaggaagggattggttcactttcccgggaaggagggaaggaaggaa

SEQ ID NO: 10733 - DNA, 523 bp, Homo sapiens
tgcctttataaagatgtttaatttaaaataagtttttccaagtactatttttgtttttttgttttttttttttgcatcttggttagatgatccagtcctacctatatgggcccaggacatcaaaacatttaattttgactataccactctgattaatwttatctcattaagacataaattgcaaaactttgagctatggtgacctggccccagaaagatgtaattaagacacctttaggaaaataagcaaccataccatagactgggaaaatatattggcaatctggacatggatccatatttaaagagcttctacaaatacccaataaaaacacataacctaaattttaaaaatgggcaaaagatttgaatacacacttcacaaaagaagatatatgagtgaccattaaacacttgaaaagttttcaacattagttgtcacagaagcagaaatgaaaatcacaatgagttaccatttcagacccactagaaaggctaaaatgcaaaagacaacaccaaatgt

SEQ ID NO: 10734 - DNA, 523 bp, Homo sapiens
tgcctttataaagatgtttaatttaaaataagtttttccaagtactatttttgtttttttgttttttttttttgcatcttggttagatgatccagtcctacctatatgggcccaggacatcaaaacatttaattttgactataccactctgattaattttatctcattaagacataaattgcaaaactttgagctatggtgacctggccccagaaagatgtaattaagacacctttaggaaaataagcaaccataccatagactgggaaaatatattggcaatctggacatggatccatatttaaagagcttctacaaatacccaataaaaacacawaacctaaattttaaaaatgggcaaaagatttgaatacacacttcacaaaagaagatatatgagtgaccattaaacacttgaaaagttttcaacattagttgtcacagaagcagaaatgaaaatcacaatgagttaccatttcagacccactagaaaggctaaaatgcaaaagacaacaccaaatgt

SEQ ID NO: 10735 - DNA, 523 bp, Homo sapiens
tgcctttataaagatgtttaatttaaaataagtttttccaagtactatttttgtttttttgttttttttttttgcatcttggttagatgatccagtcctacctatatgggcccaggacatcaaaacatttaattttgactataccactctgattaattttatctcattaagacataaattgcaaaactttgagctatggtgacctggccccagaaagatgtaattaagacacctttaggaaaataagcaaccataccatagactgggaaaatatattggcaatctggacatggatccatatttaaagagcttctacaaatacccaataaaaacacataacctaaattttaaaaatgggcaaaagatttgaatacacacttcacaaaagaagatatatgagtgaccattaaacacttgaaaagttttcaacattagttgtcacagaagcagaaatgaaaatcacaatgagttaccatttcagacccactagaaaggctaaaatrcaaaagacaacaccaaatgt

SEQ ID NO: 10736 - DNA, 568 bp, Homo sapiens
tgggtgcagcacaccaacatggcacatgtgtacatatgtaacaaacctgcacattgtgcacatgtaccctaaaacttaaagtataataataaaataaaataaaaaaaagaaagaaagaaattgtctcctaaccaaaaaaaaaaaaaaraaaagaaaagaaaagaataagccgggcgtggtggctcatacctgtaatcccaacactttgggaggcccaggtgggtggattacctgaggtcaggagttcgagaccagcctgaccaacatggtgaaaccccatctctactaaaaacaccataattaggccaggcgcagtggctcacacctgtaatcccagcactttgagaggcagaggtgggaggatcacaaggtcaggagttcaagaccagcctggccaacatagcaaaaccctgtctctactaaaaatacaaaaattagctgggcatggtggcacatgtctgtagtctcagctactgtggaggctgaggcaggagaatcacttgaacctgggaggtggaggctgcagtaagccaagattgcaccactgccctccagcctgggtaacaga

SEQ ID NO: 10737 - DNA, 554 bp, Homo sapiens
gagtaagtcttaagtctcatatctctgcaatgtaataatttatctttctcattgaggtttagttaatagataaggacaatgattatggcgtattgtcatactacttacccatacaaagaaaacatactacttagccatactacttacccatacaaagaaaaacatactacttacccatacaaagaaaaatgaattttgcttccgcatgtcttatttcaaaccactttttaacatgcatwtcttcatagatacatatatatttaacctttacatcctaaataggttaaaaagaagttgtaattcgatttcattttatttttgtttatggaggcctacaatgtcttcctagagcacaaaagcaaacagaagtcagagaccctcctttgcaatctgaaacagacctgtggctggctccatgacggctgtgccatggaggtggggcagctggcgcctgtgcttttgaacccgcctgtcctgatattaacaacatcagccttgagacttgagctcaggcctggcccctaactttaagcaaagcatcggaaatggtattc

SEQ ID NO: 10738 - DNA, 543 bp, Homo sapiens
gagaataatcattttgtgtttctctgtaggcattctctggctgtaggaatgcactcctccgcagaaaccctgctttgctggcccttatttgttggagttgcagttggggggcagggagcaagcagtaagagctccagcctctggacactatccagagcctgacctaggcacctacttgcaccatcctgccctgatgcacttgggttgagagagggktgcgtgtgtgtgtgtgtgtgtgtagagaatatgtgtggtatgtgtactgggagaggtgtcccagacctctgccagctgtggcctaattgggagaaagaggccagtggggcacctcccttctgatctggagcttcttggcctaaccttaagctactgatcagtcccatcacttcagggcaaggtgtaccagggccatggttgctaacactagctgtaccaggtcgctcaccttcaggtctgcctgcccttggccctgagtcatggacaggagtgttatgttgtcttttctcttataaaatgtaaataatggctgggcacggtggctca

SEQ ID NO: 10739 - DNA, 1082 bp, Homo sapiens
gttgtcctctctcctgctgatggaaatgggaatgaagttaagtggtctgaaaaacttgaatcgttcacatttctcagctctgggggtcatttaccagtttgttgtagaagaaataatcaggtaagttaaaagttcatttccagagaaggtaaaccccacttaccatctctgcatgatttcagtgggaattgattatcactaatccccaactgggctagaataaatgtaaagtttgacctttttaaaacgaaaagagagacaaagtctcagcacattccaaggagtggtagaaacagagctgaaggtgtccccattgtagattagtctcttctcactaaaatttactttccaacgtagggcctaaaggaaacctttcttaaagacaggctgaaaccccttcaaaggcagatgaggaggtacagacacgtgaccttttggtgcacactggagctacttggacaagaccagcatgccttgctgcacgtgtgtgtatttcactgctgagaacatcctttaacttggtgtgcaatttgaaaggatgtgaatcatggatggaaggccatttgtacatgtccyttggcaaaattctttctggtgtctcctaacttcagagacagggactctttttggatctctattgacaagtaataaaagtctggccctcataacttgtttccgaactagaaaagtctgtgagacccctacatcattctggtttttttgcttgagtaagaacaatccttttttatttttcttctgtacagtctaaagctacagagaaaaaaaaatgcactcttcccttgccggctcctggtaccattggtctgaacagctgtagttggtctactccttacttagcacttgattgtgtggggaaacaaaggtgggaggggtggggaatactggaaataatcagggcaatttttttctttcccataattggactagataccttggtactgttgaccttctcagcatctcccttttgccttagatggcaacaccctccagtctgtagcagagcagtccaacccagattagtgcagcccggaggcttagggtgcagcctccctggtcttcct

SEQ ID NO: 10740 - DNA, 543 bp, Homo sapiens
ggaaggaaatctgtcctaatgtctacgatttagttcaaactaccacatgatatacagtgtgattttatgtgtacattattatgtatgtacattattatgtaagctctgaattaggtgctgccagcatgttactcaggaatgcacaatccaggagcaatcagcaagtattcttattagaagctcraaaagtaggaggctactagaagggcttcagtcatccatgtcttaatcaacagtgatgttttgctaattagcaaaatgactgctggaaatgggattttattggtgaaaatggtccattaaccagcatgataaatgttagatatgagttcttatcagtaaaatgagagctctcacaaagatatcagaattagctgccatattataaagacactcctacatatgctgcatgaacaggttaaagaaatccaatgaggcctctagcttttactgtaggagtggtacctcagaattgatccctaaaaagctctgtatccagccatgtgtttaagacaaagattctcatccttggcactatcaaca

SEQ ID NO: 10741 - DNA, 887 bp, Homo sapiens
gatgagaaatagaatgcatcgagctgtggggagaaaaatttctctaattgagtaattcaaacactgcctcagaagggagtatttgttaataaaaagctgggaaaacagttttattatctgcacatttcatacaccttaaatattaatatttaaatcctgattagtgctgggcgtggtggctaaacctctaatccaagctacttgggaggatcacttgagcccaggagctcgaggctgcagtgagctataattacaccactgcatgcctgaaaacaaaaaattcctgactagtwtagcagctatcacggtattctaggggcacagaatgttgctctgaacttgaggtcacaatgcaataatgtcactgaaaaaaattacttcttttttccatctgggtgtacacttacatggatatacacttctgatttatgtactttgtgatattatgcttcaatacacatagcaatcagttgggaatttaagtattcataagatcatggtgtaggaaaagaataaaataaagagatgaaaggtgtttaggaaggaagcctttaagaaggaaaagcagggctgcatcatacttcccaaggccctaggcccttttgcctttgtaaggcacttactccacaaaaactattaaatattatattttctatacatttatgactatattttctgtacatctgtataaacacgaataaaatactgtataggtttgctattacatacatgtatatacattactacttctgatttaaaagaaataaaaatgaaaatatttctgtggacccctatatgtatcttggtccaaggcacacgtttactatgcctaaaggataaattagccctggataaggaaccccagtattagaaagtttccatctttt

SEQ ID NO: 10742 - DNA, 1387 bp, Homo sapiens
ttgccctttcagaaaaccaaggaccccatgggaatgccacccgtggtattgcatttctcatgctgcaccctggaacagcctgccatctggaactggcacgtttgcggtgatttttcacatagtgcaagcatttgacaccgtcatttggatatgcctgggtatttacacactgaaatatgttgtatataggtagatgatcaataatttcacttcaggatactaaaaggaggtatgacaaagtatttattataaaaaggggtgttggatctgatagaattaagaactacagtgttaggtaatttctaaagtttagtaaattaggaactgcaaatatatgaagctacattctttggaagccggaagctggagaaaatttataaaaactgtataaaatttataaaactcataaatgtatagaatttttgaagtatagccagacgttgattccaaatactgtactgacaagctcaggacatttatataatcagtaagtacctgcctacctcatctactcatagtattaatgaatactaagcacttaatgtagcacttgtctgcttctaaaggcttttcaaacgctaattagaagaatcaggtgaaatgtggctgtttggttcacaggtttgggtgacagcctttctggtttaattttttcctagctttgacagtgtggcttcgtgctgtgtttttattcttgacaacaccttagatatcactatagttggataacacgccagagatatttaacaggctagagtgtctgcattcctcccttccacgtccccttcctcctctcctctttcttcttctaaagattttcgtattggcaagaaaatataccatatgtttaccgagaaggccgctagaacaactgctttggttgaggtcttgtggggacatgaatccacgtgtctatttatttccactcagccagcatataaggaacacctgttatgtgccaagcatggcgtgaggcttgtagatgcaaagacatagtccctgctcccatggagcttgcagcctgggatgagagatagtggacgccaaatcacactgcaagtgagagggtttatttttgtttttccctgaaaagcttggcctttattatttctctttttacacaaacatcgcatatctattgcagaaaagtcagacaatataaacaacaaagaaccacatgagtaaataarataccacccagctagctacaacttgatttatattctttcagacccttttctatgtaactacacacctatttgaatggacatatatatatgtgtgtgtgttttataaatgttatatcatttattctgatttgaaactttcttgttttgcttaacaatatgttagaatgttttcccacatcaatagttatggaaacatc

SEQ ID NO: 10743 - DNA, 1229 bp, Homo sapiens
tatatctcagtaaatcacttaggcctcatgtggcctggatgacaacaaaaaagttggatgtgcagggtttttctttgaggagggcactaatactctttttcaacatcagcacagagaacattgagttgctgtaaaagcctgttttctacatgtgtattttattagcagaatctcaacccaggccctatttaggcattcctcagaaaatctagaggaactaggtattgatttttgcctaccatagacagacacagacacactgaaggaagccacttcattggttttttcatgtgaattatttcaagatctacgttattctcactgaaatatggcctaccaggctatctcccactctcatcacaacctttgtaacagaagtaataataaatggatgaatgggagtctcatttaaaaagtggtgcgcatgaggcttttctggtccctcaaagatttcttttctcttgcacccatttctcagtcctaatcagtcagagggcagatcagagttctcagagtctgttctttcccatggcttccaggtgggttatgatgcacagttctcctactgagtgtattgtgtggtagcttcctgccttattgatttatttatttttggataaattggttggtcttcttattgggtataggccatccaggactttctaacaggatgcattatggggatccattcgtaaggccatcctttggaatgtggagcccatttttttttttcagaaacctcacagcratgggcagttctgctgcccagccgagcctggtctccagaaagcaaggtgggaaatcggagttgtccaattttgttacctagagaggttcaattccattcgtcaaactcttaataaatactgattctgtgtcaggtgctgtgctggagcaggagataaaagggaagaggttcctgccctcagggatctcatagtcagttgcttttagcttgtgaagtgaaaatatctttgaattggaagatgtggactgaccggaaggaagttgtatgacctagtgtataagagtggagacctggcatccaaaccttggttcaaatcgcagctctttcactgaccagctgtgcgatcttgttacttgagctttccacatctcagtttcattttttccttttgtaaaatggggataataatagtatcttccccaaaagtattattgtaaggattaaaggagatggtttttggaacgtgcttagaaaatgcagg

SEQ ID NO: 10744 - DNA, 570 bp, Homo sapiens
tgcaaacttcattttctggccattgccaccagccaatgactcattacaacaagagacaatgaggaaatgaccacaggtcaagaagtagccttttaagccaactttgcatgtatgaaaggtcacattgttgaggaagcattcacagcaacagctttgaatacaaaacaaaaatgtcaacaagcacagacagaattggagggaaagaaatgatgctcactctaatgggattgttagcttgctccagtcttggcagtccatgtgattgccaccaagtgcataatgtattatacttggtagtgggccaattatgtccrcagcaaattccctttaggagatggataagcaaatcgctacgctctgagtaagcatccatcgtgtaaaacagtgattattttattgtcagccttctaaagatatgtattcacctgctgtgtataagctttctcctatttaattcaatgacttttagaaaatgagagtattttatttttttactcatttcttaaagctcttaagaagaccaaagactctgcaaagtgttccagtacattagatgaaaatgatgagaca

SEQ ID NO: 10745 - DNA, 570 bp, Homo sapiens
tgcaaacttcattttctggccattgccaccagccaatgactcattacaacaagagacaatgaggaaatgaccacaggtcaagaagtagccttttaagccaactttgcatgtatgaaaggtcacattgttgaggaagcattcacagcaacagctttgaatacaaaacaaaaatgtcaacaagcacagacagaattggagggaaagaaatgatgctcactctaatgggattgttagcttgctccagtcttggcagtccatgtgattgccaccaagtgcataatgtattatacttggtagtgggccaattatgtccgcagcaaattccctttaggagatggataagcaaatcgctacgctctgagtaagcatccatcgtgtaaaacagtgattattttattgtcagccttctaaagatatgtattcacctgctgtgtataagctttctcctatttaattcaatgacttttagaaaatgagagtattttwtttttttactcatttcttaaagctcttaagaagaccaaagactctgcaaagtgttccagtacattagatgaaaatgatgagaca

SEQ ID NO: 10746 - DNA, 512 bp, Homo sapiens
tatttgaggagtagtgaggaccccagtgtgaccagagcctagagtgcagggcatgaagtttgagatgaacacactttcagagatggtcgggggacttgcagagatgggggagtttctgacccgccacataaatggaatctcacagtgtatggtattttttcactggcttctttcacttggcataagtgaaaccactggaaccacttcaaggttcatccatgatgtagtgttatagctgtgtaaagtaatatttcttttttttctttttyttttttttgagacagagtctcactctgtcacccaggctggagtgcagtggtgcaacctcggctcactgcaacctccacctcccaagttcaagtgattcttcttcctcagcctcccgagtagctgggattacaggcatgcaccaccatgcccagctgatttttgtatttttagtagagacggggtttcaccatgttggccaggctggtctcaaactcctgacctcaggtgatccacctgcctca

SEQ ID NO: 10747 - DNA, 531 bp, Homo sapiens
gtctcaagcacacaggaatcattacaaaatctgatgatttactatgcacaaaagaagtctcaaccaaacccagggaatctatgtcattttctgagcttgaggaaaggcagccgcaagaagtcgtctcttagttggttccctcggactcttttcaataacctgagctcactggaatgatctagaacatgtatatagtcccgtataagtgctggctaasctggctggttgttatttgtgtctagcacgtaatagaactctaaaaattgggggtagaatgaaatactgttcagtgaaagaattagggcaatctttaagaagtggaaactaagctaaggttaaccattttctactttttgagagattccgctataggtaaagttgaatactagaagaaatatatcagaaaaaaaaaaagatgaaaattgtttgagttttgtacaagcagagggcgtgtgggtgcctagggtcacagactccaagagtgaataggcacaggatgccagcaagcaagctggctagtgggaagggata

SEQ ID NO: 10748 - DNA, 531 bp, Homo sapiens
gtctcaagcacacaggaatcattacaaaatctgatgatttactatgcacaaaagaagtctcaaccaaacccagggaatctatgtcattttctgagcttgaggaaaggcagccgcaagaagtcgtctcttagttggttccctcggactcttttcaataacctgagctcactggaatgatctagaacatgtatatagtcccgtataagtgctggctaacctggctrgttgttatttgtgtctagcacgtaatagaactctaaaaattgggggtagaatgaaatactgttcagtgaaagaattagggcaatctttaagaagtggaaactaagctaaggttaaccattttctactttttgagagattccgctataggtaaagttgaatactagaagaaatatatcagaaaaaaaaaaagatgaaaattgtttgagttttgtacaagcagagggcgtgtgggtgcctagggtcacagactccaagagtgaataggcacaggatgccagcaagcaagctggctagtgggaagggata

SEQ ID NO: 10749 - DNA, 531 bp, Homo sapiens
gtctcaagcacacaggaatcattacaaaatctgatgatttactatgcacaaaagaagtctcaaccaaacccagggaatctatgtcattttctgagcttgaggaaaggcagccgcaagaagtcgtctcttagttggttccctcggactcttttcaataacctgagctcactggaatgatctagaacatgtatatagtcccgtataagtgctggctaacctggctggttgttatttgtgtctagcacgtaatagaactctaaaaattgggggtagaatgaaatactgttcagtgaaagaattagggcaatctttaagaagtggaaactaagctaaggttaaccattttctactttttgagagattccgctataggtaragttgaatactagaagaaatatatcagaaaaaaaaaaagatgaaaattgtttgagttttgtacaagcagagggcgtgtgggtgcctagggtcacagactccaagagtgaataggcacaggatgccagcaagcaagctggctagtgggaagggata

SEQ ID NO: 10750 - DNA, 992 bp, Homo sapiens
gacacttcaataatgtttgcccagcaatcagtgagctgtatacagcactcagggtatctatgttactggaatcaattaggaaaagggagaattgatatccgtcartgaaaaatatatggtagctgctgacattacagataacgtgggctctgcaaatcatttctgaagtcctaggcctgccgacactgttattggtgcttagggaatctgtctgagaacacagccctaacttcagttgtgctgttcactgtgcttaccagactctctcctccaatatgcagtttccatcccacacaagtaactattcctagtcattcattcattcgttcattgattcagcaaatttgttgagaacctaccttgtgctagcactattttaggacagagttcctggttggaaggggaggagagggaaggatataaacaatgaaaaagtacatagtaagtgatatattgtgtgaaaatgaataagtcatttgaagatttgggtaaagaggattccctccaggggatcaactgcaaaggccctgaggtatctatcaactgccttatcttgacactgctggtgtgttttgttgatctttggtctctggtttcttcttagactggttgctccttccttccttcttttcttcctccccaccttcttccttctcctctctcttttattttattatttcttaagatatactgtcagagtcttttaaggaattgatggccatgaagaccctacaccataaagacttatcttcctattagatctgtgttgttgttgattattcagatgtctctctcaccaaatagatttttgcttccttgaagataaggatagactcaagtttcttagatttttatggatttcccaaagtatccaatataatgaggggcagataggagaggctcagcataatgaaagttggctcagtctgaaacactataagctggagaagcttattgatgcaaatgtgcccaccaaagatactttttagata

SEQ ID NO: 10751 - DNA, 992 bp, Homo sapiens
gacacttcaataatgtttgcccagcaatcagtgagctgtatacagcactcagggtatctatgttactggaatcaattaggaaaagggagaattgatatccgtcagtgaaaaatatatggtagctgctgacattacagataacgtgggctctgcaaatcatttctgaagtcctaggcctgccgacactgttattggtgcttagggaatctgtctgagaacacagccctaacttcagttgtgctgttcactgtgcttaccagactctctcctccaatatgcagtttccatcccacacaagtaactattcctagtcattcattcattcgttcattgattcagcaaatttgttgagaacctaccttgtgctagcactattttaggacagagttcctggttggaaggggaggagagggaaggatataaacaatgaaaaagtacatagtamgtgatatattgtgtgaaaatgaataagtcatttgaagatttgggtaaagaggattccctccaggggatcaactgcaaaggccctgaggtatctatcaactgccttatcttgacactgctggtgtgttttgttgatctttggtctctggtttcttcttagactggttgctccttccttccttcttttcttcctccccaccttcttccttctcctctctcttttattttattatttcttaagatatactgtcagagtcttttaaggaattgatggccatgaagaccctacaccataaagacttatcttcctattagatctgtgttgttgttgattattcagatgtctctctcaccaaatagatttttgcttccttgaagataaggatagactcaagtttcttagatttttatggatttcccaaagtatccaatataatgaggggcagataggagaggctcagcataatgaaagttggctcagtctgaaacactataagctggagaagcttattgatgcaaatgtgcccaccaaagatactttttagata

SEQ ID NO: 10752 - DNA, 1977 bp, Homo sapiens
ccaactcaacttctacaagaaggaaagcaagatattcctttggcaaagaatgaaatataaggagatgaaattctgccagatcataaaatcacagaatgttaatttgctgattcattaacgggcataattaatctcataacttactaaactataaygcaaatacagaagaattcaccattttgaacattcagctgcatcatgagcccaactgcatccccataaacacaacaatagatagaaaaatcctcaaaaatcacccgtagcctgtagcgctactcacttgggcatggtaatgacattctgactggcttctctgctttcaattttcttcccctccaattccatacacatttctgccatggtttgcttctaaaacatacaccagagaatttcagttctcctgcttaaaaattttgcagtgactccctctctgttacctttggacacagtccaggttcctgtggaaatgaggctcttcacaataagagccaaacctaaaccaccagcctcatctcgatcttttcctgactccacaaatgcaggacatagcttgattgcaatcaagtgtggtccctgccctgggtgatgacacactatcctttgcttggtacataatcatggtcagtaccttctcctgaacagctagcactctgaccacaaagtatgaatggaaccttaattgtgttaaggagttatttaaagccatcataaggtccatcttgcagttggttcctcaaaaagacccaatggactagaccaaggaagcaagtccagtgctgccttcccggtgacgctagatcacacagtcttccaggtggccttttttccctgctgtgactggcaggaccccattcacacagtgttcccaggcactttcctttgaggatatggtctgatggggctcagtcttggtatctctctatctctctttctttctctctctctctctttctatttcacgtagagaaatagaggcatctgagtgggccagaggatctgcaaggaatcagtagggcattcaacaacattcatttattcattgaacgaacattttaaagcatttactgtgtgtcagactctgcaccaatatgagtgtataagacaagtattcactactgtatgtataccatgtatgtgcacagtgaatgaattcatgccatcaggatgttcacagtcctctgatgagcagctcttgcctaatttgtcaacatttgtgttgcttccccagctttcacatgtgtcctggatgcttcagggcaaaacgccaaatatccattgcctagggatatccaagtcatcacatgggtatgtgggccaatcaaagataagaaaggctcactggactttaagctccatgaggcaggccccattatgccacagcaaagagcacaaaagcacaggcaattatagtcaattctaaagtagcactgcccaaatttctgccacaaatgctgttctgccatttgcgtctcaagaggaatgccgcaaagacaatatacctgctactctaagtggctcctcattttgagagctttagaaactggggcgcatcactggaatccacaaagagaaaagaccaatgacttttcttaaatgtgttggtcatctaactctaagtttgcacgtggcaggaccaagtggtggggttgtccatcaggtaacatgcaggcatcccaggcaacccttactcagagatgcccacccaggtggtatgtttgaagggttatgggatatgtttatatatatatattatatatgtttatatatatataaaatatatattcatatataatatatataacgttatataatatatataacgttatatataatatatataacgttatatatatttatatacataatacataaatatacataaataaatgaacatacctctaccccttgcctgtgctgatgcttggtaacccgatgcattggtattcatgcctgccaactgtttttggtctctaaata

SEQ ID NO: 10753 - DNA, 1977 bp, Homo sapiens
ccaactcaacttctacaagaaggaaagcaagatattcctttggcaaagaatgaaatataaggagatgaaattctgccagatcataaaatcacagaatgttaatttgctgattcattaacgggcataattaatctcataacttactaaactataacgcaaatacagaagaattcaccattttgaacattcagctgcatcatgagcccaactgcatccccataaacacaacaatagatagaaaaatcctcaaaaatcacccgtagcctgtagcgytactcacttgggcatggtaatgacattctgactggcttctctgctttcaattttcttcccctccaattccatacacatttctgccatggtttgcttctaaaacatacaccagagaatttcagttctcctgcttaaaaattttgcagtgactccctctctgttacctttggacacagtccaggttcctgtggaaatgaggctcttcacaataagagccaaacctaaaccaccagcctcatctcgatcttttcctgactccacaaatgcaggacatagcttgattgcaatcaagtgtggtccctgccctgggtgatgacacactatcctttgcttggtacataatcatggtcagtaccttctcctgaacagctagcactctgaccacaaagtatgaatggaaccttaattgtgttaaggagttatttaaagccatcataaggtccatcttgcagttggttcctcaaaaagacccaatggactagaccaaggaagcaagtccagtgctgccttcccggtgacgctagatcacacagtcttccaggtggccttttttccctgctgtgactggcaggaccccattcacacagtgttcccaggcactttcctttgaggatatggtctgatggggctcagtcttggtatctctctatctctctttctttctctctctctctctttctatttcacgtagagaaatagaggcatctgagtgggccagaggatctgcaaggaatcagtagggcattcaacaacattcatttattcattgaacgaacattttaaagcatttactgtgtgtcagactctgcaccaatatgagtgtataagacaagtattcactactgtatgtataccatgtatgtgcacagtgaatgaattcatgccatcaggatgttcacagtcctctgatgagcagctcttgcctaatttgtcaacatttgtgttgcttccccagctttcacatgtgtcctggatgcttcagggcaaaacgccaaatatccattgcctagggatatccaagtcatcacatgggtatgtgggccaatcaaagataagaaaggctcactggactttaagctccatgaggcaggccccattatgccacagcaaagagcacaaaagcacaggcaattatagtcaattctaaagtagcactgcccaaatttctgccacaaatgctgttctgccatttgcgtctcaagaggaatgccgcaaagacaatatacctgctactctaagtggctcctcattttgagagctttagaaactggggcgcatcactggaatccacaaagagaaaagaccaatgacttttcttaaatgtgttggtcatctaactctaagtttgcacgtggcaggaccaagtggtggggttgtccatcaggtaacatgcaggcatcccaggcaacccttactcagagatgcccacccaggtggtatgtttgaagggttatgggatatgtttatatatatatattatatatgtttatatatatataaaatatatattcatatataatatatataacgttatataatatatataacgttatatataatatatataacgttatatatatttatatacataatacataaatatacataaataaatgaacatacctctaccccttgcctgtgctgatgcttggtaacccgatgcattggtattcatgcctgccaactgtttttggtctctaaata

SEQ ID NO: 10754 - DNA, 1977 bp, Homo sapiens
ccaactcaacttctacaagaaggaaagcaagatattcctttggcaaagaatgaaatataaggagatgaaattctgccagatcataaaatcacagaatgttaatttgctgattcattaacgggcataattaatctcataacttactaaactataacgcaaatacagaagaattcaccattttgaacattcagctgcatcatgagcccaactgcatccccataaacacaacaatagatagaaaaatcctcaaaaatcacccgtagcctgtagcgctactcacttgggcatggtaatgacattctgactggcttctctgctttcaattttcttcccctccaattccatacacatttctgccatggtttgcttctaaaacatacaccagagaatttcagttctcctgcttaaaaattttgcagtgactccctctctgttacctttggacacagtccaggttcctgtggaaatgaggctcttcacaayaagagccaaacctaaaccaccagcctcatctcgatcttttcctgactccacaaatgcaggacatagcttgattgcaatcaagtgtggtccctgccctgggtgatgacacactatcctttgcttggtacataatcatggtcagtaccttctcctgaacagctagcactctgaccacaaagtatgaatggaaccttaattgtgttaaggagttatttaaagccatcataaggtccatcttgcagttggttcctcaaaaagacccaatggactagaccaaggaagcaagtccagtgctgccttcccggtgacgctagatcacacagtcttccaggtggccttttttccctgctgtgactggcaggaccccattcacacagtgttcccaggcactttcctttgaggatatggtctgatggggctcagtcttggtatctctctatctctctttctttctctctctctctctttctatttcacgtagagaaatagaggcatctgagtgggccagaggatctgcaaggaatcagtagggcattcaacaacattcatttattcattgaacgaacattttaaagcatttactgtgtgtcagactctgcaccaatatgagtgtataagacaagtattcactactgtatgtataccatgtatgtgcacagtgaatgaattcatgccatcaggatgttcacagtcctctgatgagcagctcttgcctaatttgtcaacatttgtgttgcttccccagctttcacatgtgtcctggatgcttcagggcaaaacgccaaatatccattgcctagggatatccaagtcatcacatgggtatgtgggccaatcaaagataagaaaggctcactggactttaagctccatgaggcaggccccattatgccacagcaaagagcacaaaagcacaggcaattatagtcaattctaaagtagcactgcccaaatttctgccacaaatgctgttctgccatttgcgtctcaagaggaatgccgcaaagacaatatacctgctactctaagtggctcctcattttgagagctttagaaactggggcgcatcactggaatccacaaagagaaaagaccaatgacttttcttaaatgtgttggtcatctaactctaagtttgcacgtggcaggaccaagtggtggggttgtccatcaggtaacatgcaggcatcccaggcaacccttactcagagatgcccacccaggtggtatgtttgaagggttatgggatatgtttatatatatatattatatatgtttatatatatataaaatatatattcatatataatatatataacgttatataatatatataacgttatatataatatatataacgttatatatatttatatacataatacataaatatacataaataaatgaacatacctctaccccttgcctgtgctgatgcttggtaacccgatgcattggtattcatgcctgccaactgtttttggtctctaaata

SEQ ID NO: 10755 - DNA, 1977 bp, Homo sapiens
ccaactcaacttctacaagaaggaaagcaagatattcctttggcaaagaatgaaatataaggagatgaaattctgccagatcataaaatcacagaatgttaatttgctgattcattaacgggcataattaatctcataacttactaaactataacgcaaatacagaagaattcaccattttgaacattcagctgcatcatgagcccaactgcatccccataaacacaacaatagatagaaaaatcctcaaaaatcacccgtagcctgtagcgctactcacttgggcatggtaatgacattctgactggcttctctgctttcaattttcttcccctccaattccatacacatttctgccatggtttgcttctaaaacatacaccagagaatttcagttctcctgcttaaaaattttgcagtgactccctctctgttacctttggacacagtccaggttcctgtggaaatgaggctcttcacaataagagccaaacctaaaccaccagcctcatctcgatcttttcctgactccacaaatgcaggacatagcttgattgcaatcaagtgtggtccctgccctgggtgatgacacactatcctttgcttggtacataatcatggtcagtaccttctcctgaacagctagcactctgaccacaaagtatgaatggaaccttaattgtgttaaggagttatttaaagccatcataaggtccatcttgcagttggttcctcaaaaagacccaatggactagaccaaggaagcaagtccagtgctgccttcccggtgacgctagatcacacagtcttccaggtggccttttttccctgctgtgactggcaggaccccattcacacagtgttcccaggcactttcctttgaggatatggtctgatggggctcagtcttggtatctctctatctctctttctttctctctctctctctttctatttcacgtagagaaatagaggcatctgagtgggccagaggatctgcaaggaatcagtagggcattcaacaacattcatttattcattgaacgaacattttaaagcatttactgtgtgtcagactctgcaccaatatgagtgtataagacaagtattcactactgtatgtataccatgtatgtgcacagtgaatgaattcatgccatcaggatgttcacagtcctctgatgagcagctcttgcctaatttgtcaacatttgtgttgcttccccagctttcacatgtgtcctggatgcttcagggcaaaacgccaaatatccattgcctagggatatccaagtcatcacatgggtatgtgggccaatcaaagataagaaaggctcactggactttaagctccatgaggcaggccccattatgccacagcaaagagcacaaaagcacaggcaattatagtcaattctaaagtagcactgcccaaatttctgccacaaatgctgttctgccatttgcgtctcaagaggaatgccgcaaagacaatatacctgctactctaagtggctcctcattttgagagctttagaaactggggcgcatcactggaatccacaaagagaaaagaccaatgacttttcttaaatgtgttggtcatctaactctaagtttgcacgtggcaggaccaagtggtggggttgtccatcaggtaacatgcaggcatcccaggcaacccttactcagagatgcccacccaggtggtatgtttgaagggttatgggatatgtttwtatatatatattatatatgtttatatatatataaaatatatattcatatataatatatataacgttatataatatatataacgttatatataatatatataacgttatatatatttatatacataatacataaatatacataaataaatgaacatacctctaccccttgcctgtgctgatgcttggtaacccgatgcattggtattcatgcctgccaactgtttttggtctctaaata

SEQ ID NO: 10756 - DNA, 636 bp, Homo sapiens
aatagtaacagcagctgtatcaatagcaggaacccaagcaagtgggtgaagatattactcagagccgtaagccaaagatggacccagcccaggaaagtggcaggcagtggtctggagtgggaagacattggggaataaaggtggtcagaaggctaccaggaaagcgcaggggcaagttacaataggggaatgagctgtgtcagggttaagaagcagcagctgacacaagactcactagacccacgtcccagcctagagcaaccagtgttaatgacagcagcaccagtggagcagaaagcagtacctcaaggacaggcaatggcagcaggattggccctggtccagctgctgaggatgcagactgacctaacatccgagaacagtggaacatccctgaggatgccctggaggaactaaggtcttgccattaaacagggacacccactgagctcatatagcctgggcattcccatggaagtgactccatatccacctagagacaggggatctctagttacttttgagktatacagcataagaaataattaagggggaaattaaaggaaagaatattttcaatggctcctcattgccaatcttccaaacctgttgcaagatattcatgatttgaaccca

SEQ ID NO: 10757 - DNA, 564 bp, Homo sapiens
ctgaatctttttagatgcaatcaggaaatcattggggtgtgttgtaggtacacatgcgattgtatcttagtaactgaatttcaaaaataggattttacttttatattcatgttattggttttcatccacatgtacagcgaaaaatgtgctgggatgtcatatgattcctttcctgcacttttgaattgggggctcatcctctgatgatttttaagttttattttatttttttagagaccagtctcactcttgccsagcccggagtgcagtggtgtgagtatagctcactgcaaccttgacctcctgggttcaagtgatcatctcgtctcagcctcccaagtagctgggactacaggcatacaccaccctgcctggctaattttttatttttttctagagacagaatttcgctgtgttgccaaggttagtcttgaacttctgacctcaagtgatcctcccacctctgcctcccaaagtgttgagattataggtgtgagccactgtactcagcccctgaagattttatttgaaataaaatagtctcagattagagacctgctgttt

SEQ ID NO: 10758 - DNA, 697 bp, Homo sapiens
tcctaattttttgacattctggaaaaggcaaactataaatagtaaagcaatcattggtttccagagtttggtggtagtgggggcagtgatgaattggtgaagcacagacaaattttgtagtggtgaaactattacgcgtgatggtgtaatgttggatacatgacaatatgcatttgtcaaatatcatggaattctacagcacatagcatgaatcttaatttatgcaaattaaaaaattgtttaggaggtcaggagagttctaggatgaaatgtagaatgtgacaaaacatttaactgcattacaaaaaatatgaaacagcctcactgacggaggtgtgggaaaaggtgatgacctaagtgactgaaattgagtggagtctaggactaaaggcaatatagactacygtgatactatctagttcgcgaaagtgtgcaggttacacacatacacacaactcctggaattgaacaattaaataaatgaattgcaaatagtaaaagccagatttctcactgttgaaatgagaggctacagacatgcaaggagaggaggctagagtaattgatgtggtgataggattagagacatcggtataaattcatgttagcttcatatagatacagatacatatagatacagatacatatagatacagcttcatatagatacattaaaatatttatagatgtttatata

SEQ ID NO: 10759 - DNA, 697 bp, Homo sapiens
tcctaattttttgacattctggaaaaggcaaactataaatagtaaagcaatcattggtttccagagtttggtggtagtgggggcagtgatgaattggtgaagcacagacaaattttgtagtggtgaaactattacgcgtgatggtgtaatgttggatacatgacaatatgcatttgtcaaatatcatggaattctacagcacatagcatgaatcttaatttatgcaaattaaaaaattgtttaggaggtcaggagagttctaggatgaaatgtagaatgtgacaaaacatttaactgcattacaaaaaatatgaaacagcctcactgacggaggtgtgggaaaaggtgatgacctaagtgactgaaattgagtggagtctaggactaaaggcaatatagactaccgtgatactatctagttcgcraaagtgtgcaggttacacacatacacacaactcctggaattgaacaattaaataaatgaattgcaaatagtaaaagccagatttctcactgttgaaatgagaggctacagacatgcaaggagaggaggctagagtaattgatgtggtgataggattagagacatcggtataaattcatgttagcttcatatagatacagatacatatagatacagatacatatagatacagcttcatatagatacattaaaatatttatagatgtttatata

SEQ ID NO: 10760 - DNA, 714 bp, Homo sapiens
tcagtagtttagcctaatcttcttgacatggtggctgtcttctaagagggcagatgtggaagctgcagggtctcttaagaaggagccctgcaagtcacatgttgctgctctgaaacatcctactgggtcaaccaagtcacggggacagcccagatccaaggggagtggagacagacgccccctctggatgggaggaacagttggtggccatctctgcagacgacccaccccaaggatgcacactcaccgaagatggyaggtctacctctttcctcgagtctgaccctcaagtccttgcttgaaattgcctcaaatttccagtaacagccaagtcaaaattggacatttgtatttgttagaatttttttccatttagttgaaatctaattcccgttccagggtggtgatatgaatttaggcaggctctttaaaccttcctagttatgaaatgaactattttccttgtcaaggattagctcatgatggttgtggcagaagaccccagtgttaaaggagatataaatacacacacacacccttttctgctgtaaagtggttctgccctgggggtgtgggggtggggggtcacagaacaagaaaatgtcgcaaagaaagcccttagaatactttgtctttatagccttatctcacataaaatggctatgctcatagctccgaacgattattttcctcttatctcctacccttttgaat

SEQ ID NO: 10761 - DNA, 564 bp, Homo sapiens
cattatgcactcagcaaaatacgttattgaagcctcttcccttggttcaaccaaaaacactgaatccatgctttattataatatagcttcattataatgtagcgtcagacatactttgtcaaccagttccctataggcctctggatatgtagtaagctacgtggtaaatgttgacctggctgaaattgggtttggccgctgaatcctcctgaaaggagggaagctgagctttaggcttcagggtttgccagacccatccaagcctggatttactgcttggctgaaaagacactaccctgctgtcaaggtgacagatgattttagtgccaggtcatttctttttttattttttatttatctttattttttttatttttttgagacggagtctcactctgtcgcccaggctggagtgcagtggtgcgatctcagctcagtacaagctctgactcccgggttcacgccattctcctgcctcagcctcctgagtagctgggactaygggtgccggccaccactcccggctaattttttgtatttttagtagagacagggtttcctgtg

SEQ ID NO: 10762 - DNA, 512 bp, Homo sapiens
ctatcccagctagactcccactgcactaattcagtacctctcttagtatttatcacatctcaaggttaagtgcctttttcccactgctaggttagattccaaagaatctggaggttttattcctcaatgtttctcctaccgagcctttgagcataagaggtgcttaagcaagatttgttgaatgagcacatttattctaaatggtattttagggaaagctggagktaataaagaggcacttagtatcaactcatggtagtaaatggaggtcacagctaatgttcaacagctcatcaatattctccaatggcaaatggtaatatccatcagcagttggtcaagcctgtaacttagtggattaaacattgatagttcctactttaaggtcaaaagagaggagacattccttcagttgatatcatgggttatggtcattattttaaaaattatttctgcacaaatcactggtaaagcactggtaaaccactgctaatcaggctttttccacctcg

SEQ ID NO: 10763 - DNA, 512 bp, Homo sapiens
ctatcccagctagactcccactgcactaattcagtacctctcttagtatttatcacatctcaaggttaagtgcctttttcccactgctaggttagattccaaagaatctggaggttttattcctcaatgtttctcctaccgagcctttgagcataagaggtgcttaagcaagatttgttgaatgagcacatttattctaaatggtattttagggaaagctggaggtaataaagaggcacttagtatcaactcatggtagtaaatggaggtcacagctaatgttcaacagctcatcaatattctccaatggcaaatggtaatatccatcagcagttggtcaagcctgtaacttagtggattaaacattgatagttcctactttaaggtcaaaagagaggagacattccttcagttgatatcatgggttatggtcattattttaaaaaytatttctgcacaaatcactggtaaagcactggtaaaccactgctaatcaggctttttccacctcg

SEQ ID NO: 10764 - DNA, 580 bp, Homo sapiens
ccgtgaaacatataaaaagaaaaaatagtcaaatcacctccaaatatcttaggatatgtaaactacattgttgtgttaataagcaaacatctgatttagccctttttttcttacacaataaactccagacttcttaatacaccattttaatgtttttactttattgtgccaacgtgccttttcagatttgaacatattttgcttaggcttttgtcacatctgataattgcttgttcctgttcttcaccgtctttcaacattctacttacgctgcaaggcactatttaaatgttaccactttaggaagaaagaatcacccaccctcaatggctacatgtgccacattcttctattaaatgcttattaccatcttcccatattaggttatattgcactctttgcatgtatctcattcattaaattgttagtttccaggaaaaagagacatgcctcatctctttccttgatctcaatggcatgtcataaaatatagacattttggagttagacaaacaaggtagggttttgaaccctagttmagaagcattatgttccagagcaagttattcaatctttctga

SEQ ID NO: 10765 - DNA, 547 bp, Homo sapiens
atttttattttatagtccacacttcagaatagtcttacccccagtggaattttggggctgcatatttggcaaaataggtattggtgcctcattataagaaacacacttctaacagagttagttacayacataattaagaaaagaaagatctgttcattatttccttccttagagtggaggatgtaaggctttgcaatcaaataaagctctactgggacagcagaaagtgaaatattttcacaataaccaggatagtaaatatttgcctttttttttttaagaaaagagaaagcacccatcttcgttggcagcatagcgtagtgaaagtgatatgcgtcatttgccctcttacttacaggaagtctgtcattctatctttaataccaggacaggcagtgacaactcagtctttctgtcttggcataactgcatgccccaaaaagcttccataatttcaactgctcttttcaaatgattccagaacaaatttgggttttgagaggtgactgttagagtaagggaagggaggaacatgactgaccagagg

SEQ ID NO: 10766 - DNA, 547 bp, Homo sapiens
atttttattttatagtccacacttcagaatagtcttacccccagtggaattttggggctgcatatttggcaaaataggtattggtgcctcattataagaaacacacttctaacagagttagttacacacataattaagaaaagaaagatctgttcattatttccttccttagagtggaggatgtaaggctttgcaatcaaataaagctctactgggacagcagaaagtgaaatattttcacaataaccaggatagtaaatatttgcctttttttttttaagaaaagagaaagcacccatcttcgttggcagcatagcrtagtgaaagtgatatgcgtcatttgccctcttacttacaggaagtctgtcattctatctttaataccaggacaggcagtgacaactcagtctttctgtcttggcataactgcatgccccaaaaagcttccataatttcaactgctcttttcaaatgattccagaacaaatttgggttttgagaggtgactgttagagtaagggaagggaggaacatgactgaccagagg

SEQ ID NO: 10767 - DNA, 489 bp, Homo sapiens
cttgacagaggatacatgctcccaaaacgtttgttaccacacttaaawatcactgccatcattaagcatcagcttcaaaattatatctatccatgatttactttttccagatgactaccgttattctagtcttttgaatttgtaaggtgaaaaaaaacaaaaacaaaaacttacgatgcactttcctccagcacataagatttcaaattgaaaattaaagacatgctatggtaatgcagttgctagtactacacactttgtacaacaaaaaacaaaggcaagaaacttaatggaaagaaaagaaccttcctttattggcccttaaactgaatcaagatctgaaatgtagagatgatctctgacatttataacagatacctgtatgttatttctgtgtaaataaaattgctggtatgaaatgacaaaaaaaaaagaaagtaaacagacaggaaaagtacaagatgaaaacagtaagcataagaaagctgg

SEQ ID NO: 10768 - DNA, 528 bp, Homo sapiens
tggaaaagaactcaactgaaaagaaaaaatatttttcttatgcaagtcaaagcttgataatttgatgcagtattatccagtaaagcttgctgtgatgatggaaacgtgctatatatttgtgctgttcattatcrttccctatagccactagaaacctgcagctaccaagcttttgaaatgtgattagtgcaactgaatttttaatttcgtttaattttaattcattcaagtttaaatttaaatagccacatatggctaatgtttaccatattggacaacacagattactgtctatcgttcttggtatacagtcactatccatttaagtaaggatatgaaataaattatggtaagatttttaggaagaaactggactttagtataaacacataatgaagttccctaatacgttggttacattcgttaatttatacaataatatgtccattcctagatgcaaatgtcacacctatggagaaggaaagcatcaaggagaccctctttttgcctaaagagttactatgtacc

SEQ ID NO: 10769 - DNA, 563 bp, Homo sapiens
taaatggaagttgtaaggttcaataagaaactaatcagctcccaaacaaagtgagcttttcatgcttaaacaagtgttccggccgggcgcggtggctcacacctgtaatcccagcactttgggaggccgaggcaggcggatcatgaggtcagcagatcgagatcatcctggctaacacagtgaaaccccgtctctactaaaaatacaaaaaaattagccaggtgtggtggcgggcgcctgtagycccagctactcgggaggctgaggcaggagaatggcgtgaacccaggaggcggtgcttgccatgagccgagatcgcgccactgcactccagcctgggcgacagaggaagactccgtctcaaaaaaaaaaaaagtgttccattcatactgaaaatatctgggaggtttgcactgtgtgcaagatctgcactgggggctgccgacaagggctgccctcttgagcccatggtatgctggggagggagacgtgatacaagaatgtgatacaagagggatgtatgctcagggaaagagcagcagagcattcggaccacacggaca

SEQ ID NO: 10770 - DNA, 1076 bp, Homo sapiens
tggcagatgcctgtaatcccagctacttgtgaggctaagacaggagaatctcttgaacctaggaggcagaggttgcagtgagccgagatcgcaccactgcactccagcctgggcgacagagtgagaatctatctccaaaacataaataaataaataataggtaaaaacaagattattacttcacgtgataaaaatgaatatattagaaatatttgaaatgacagagttcttatttcaagtcaaatatgtatcttctaagtttttttgagaggtttatatcattttcccaaccaatgtaagattatcaatgtgggtattttctttagaaattggaaagcaggygccccgccactcgctctccgggcggggcgggtggcgcctcgggcctccacctccccctgcctgcgcgtgtcctgcgtgagagggcagaggcagggtggaggcgttggcacgggacatgtgggccgcggttgccgactgtggcgcgggcagtggaggaggaggcggggctggcgctgaagtcggatccggatccgttgctgtgcaccctggtcggggagagtccgatgcgcctgggtaggagcaccgactgcggggcctctaccgaccttactagaaagatgaaacctgatgaaactcttatgtttgacccaagtctactcgaagaagtggactggaggcagaatacagctacattttctccagccatttccccaacacatcctggagaaggcttgattttgtggcctctttgtactgctgacttaaatagagggtttttttttaaggtattgggtcagctgatcgagactggagttgtcagccctgaacagtttatgaaatcttttgagtatatgaagaaatctggggattatgttacagttgtagaagatgtgactctaggacagattgttgctacagcaactctgataatagaacataaattcatccattcctgtgctaagagagtaagagtagaagatgttgtcgttagtgatgaatgcagaggaaagcagctcggctaattgttagtatcaacccttactttgctaagcaagaaactgaactgttacaag

SEQ ID NO: 10771 - DNA, 1240 bp, Homo sapiens
ctttcaaagaacatttgaaaaatgtaatctagtcaraaaagaaatatatccagaagaaaacaacaaaatatgggaaggaaaaaattttagaagatgtattgttatcttaaaacaagtgtattcataagaataaataattaaaacatcacatcaccctatttcaagaaagtaggggtgcagtgtggagagtatgctaaacttcttggaatttgttgggcaaggaagggagaagagaaagattcaacttggacactgaagggatatgatataaaatggcagagctaagttctaacatagaaataatcacattaaattctaataggttaaactcagaagacatattctcagtttaagtgtaaaacaacaatccaggccaggaacaatggctcacatctgtaatcccagtgctttgtggggccaacatggaaggactgcttaaatccaggagattcgggctccagtgagctatgatcgcaccactgcactccagcccaggcaacagagccagaccctatcgctaaaaactaaataaaaattaaatttaaaaattaagttaaaaatccaaaataaataaataaaaccaggatccagcaaagctgaaaaaaataaagaaacaaaaaggtacctaaaaaatatgaaccaaaataaacccaccatagtatcaaaagaatttaaattcaaaggcaagggcaataaaagacaaatggaaacatataccggtaaaaaagcaaatgtgaatatacacagatacacatatatacagcctcaacatacataagcaacaacttatgtatagatacacatatatacagtctcaatgtacataagcaacaactaaaaatctgtgtgcaaaaacacaaaaaaacacaaaaaacacaaaagaaacacaaaaacaccaaaaaaacacacacgcagaaaaaacaactaaaaatctgtgtgcaaaagagattaacaattctaattagacgttgttaacaagccttcagaaaatgacaaaaaaaatttaaaaacctcaaaatttgaaaaatgccactttgaaagtctgatatcatatgacgtatgtgacatcacaataaacataaaatatattctttttgagcttacacagaacattcataaaaactgaccatataatagcccaaagagacacttcaattaccttcccaaatcaatgaaatacagactctgtacacaaagtatagagcaataaattaaaatcaacaaccaaaagagagcttta

SEQ ID NO: 10772 - DNA, 558 bp, Homo sapiens
tattcctcataataatataggcattatcattctcactttttaagtaaggaaactgaggttagttagtgaggtaggtcatttctttaagatcataaatcaaagaagcaatgggaatagaattccaaaccagattcgcatgactcgagggctctttataagaagcctccctacctggatggctacacattttcttttctatttgtttttgtcctgcctcttaaaactatcatgtaattacattttttatgtactaacataacagtcaggagaacaacaagtacagtgcctgagacacagaagataatccgaccatgttcaaataagtgttcattatttgaggtttattaagtaaagrtaggagactaaaatcaaagactgaggacgaggaagggtggattcaatattccaaatcatttattcatgaagtgaataatcctcgccccttctactggtatcacttagctgttgctatgtaacatacaaccccaaaacttagtgacttaaagtgataaacatgtattattaaaagtaattgcaaaaacctcatttgcttttgca

SEQ ID NO: 10773 - DNA, 447 bp, Homo sapiens
tggaacccaggcatgggcagctgtttaaatgatctccaaatggcccatggctgaatcatctccatcttcatgttgtttgccaacaaaacagacattctttgccacagttggtttttgtttgttcatttctctgatatgtcgaccctacttaatatagggaaatagaaaatttcctgattaaattaaatgagatcgaactcaagtctgtttggaagatggatttaggtggaggataaacagtagggtaagtttctggaaagtgaactcaaaatggcagcrccctggctgtcaaacctcatttccttttctcgtttccttttcatctcacatccccatctcataaatgctcatctttcctctgtgaactgactgatgtcaatcacatagagaacttcaaactccctcagagttcctttaaagagaatcaaccctaatgtggtttccatc

SEQ ID NO: 10774 - DNA, 3321 bp, Homo sapiens
ttgaaaatagtctaatgttggggattactacagtgtgcactataacaaatcagagtgtaattgaggtagtcggaatttaatgatagctaagagaagactaacacattattacaattaaagttggaagtcctttttatagcttccatttattgagcaactaccgagtgccctagatgctaagtcttctaccttaaatcttcctcttcaatccttaaattatgcttagaaagtaaattgcattattcccattttataattaagggaactgagggaagaagagatacttttatttgggctgaactattggaaatgctttctcctgtactttcctctaaatttgttgccagacttctcttcccagcctttatttgatttatctgaggtttttggccattttcagctattttaaaagtctcatttttagatactatggtgcagcctagtttttggctaatactggttggccttcatactctccaatgcggcatgcatttatattttcattttttgtgagaagcattttggagactactttactgtaaaattcccagcagaccaatgactcccacctgatttctttcagtctctctcagttcctgcttcagacagaacaccacgcaagaacttgcttctgaggctctcttaccttatcagacagccctatagaggagagacttgagtgcaataattcttaccatatccacttccctgtagaattcatgactccttaccacatccaaatttgcaaaggtacttcttcaaccactgacttttccctactcagcccttataatctttttcaagatgattcctgccttacatgtctccaaacattaaaaaaaaccaagtcatgttactatcccatcacattctgtcataacccaaggcattacttcagattataattttatggccattaaacatttttgcaagagtgagatgctgatctcttaaaagcagttacaacctctgaaaatacatgttttaagattcccatcacttggcttaagagataagaagcacacttcttcccttccctagaagtagaaaataccatcatgtacctaacgcctttaaattcccttacttcattgaactgttcttcaaatttcttatcttctcccacataaattagagatgtatgatagattcactgttacaatatcagtactgctatmtttccaatggcttcttttagaatttgggggtaacttatcattggctagcctcacttttcgtacttgctaaaattccaggaaggtgaatttttcttatctctatgcttaccacatttatctgttaccgcacagtatacaagcctcaaagtcaggaattgaacaaatctctctgactccaaagttttactctttcttctgcttcctacttgagtttcttgagagggtaaaagacactgaaatatgcatgcgataaggaggaaatggtcaggatactaagattataaatgtgagcataaatctgtgaaatgctgcagtgttcttggttcaacaactgtattcccattgtctaataaatgcattctatattattaatgaatattctgctagaatgtatatttcttcatttaagagatctaaaagttcatgacaattgcatcaagatgattgaagcagtctggagtagaaaaaaaaaataaatgtgagtcccacactggtatcattttagggagttcagaattggtatgcattgtggtaggagtagggacaggagagaacaacaggaatgattacgtgggtggctgagacagatggtgtggacttcaaataaagaaacccagaaggtggtggataaataatgatgagagtagcatcggagagtaaggaaaaattggacagttctatctcaagaactcaaggaataaaggatgaaatcagacttttaaatgtttactacctttaattatttaaatgatgtgacaacaaataacacttggaaaatcatttttcaatgtttttgttataacctcttataaacaagaggattagtttataggaaaagacaaggctgagcaacataacaaaatcaagtgtattttttttttttgttttcagacggtctcgctctgttgcccaggctagagtacagtggagcgatctcagctcactgcaagctccacctcccgggttcacaccattctcctgcctcagccacccgagtagctgggactacaggtgcccgccaccacacccagctaatttttttgtatttttagtagagatggggtttcactgtgttagccaggatggtcttgatctcctgaccttgtgatccgcccgtctcggcctcccaaagtggtgggattacaggcttgagccaccgtgccaggcacaagtgtatttttttcttttgaaaaattatattgtgattttacattctaacataaatactctatatcagaaataaacaaccactagaatgagaaacagaatgtcattacactggaatgtggtaaaaaagaaattgttgttgataaaagaaccaccaacttgtgtatgtggggaaatatctgtttaactgttaaagttttgtgttatgtagaattcttaaataacataataattttttaaaagtcactgagtgcctttcatcaacagttttgataatctgagagcctattcacctgtgaatgattttaaccaaagtaaattgcttcaactctgtgcttaatagatggtgtcagaagattgtggcccagaaaacaggatgctgaaagacatgagatgtacatgagatacacatgtttcagtcatagcctgagtatggtagatgtagtctaggagaacttggctgggaacacaacaccatgtcttcatattcatttcgaatgagatgggggtagacagagatagggtcttcctaaagaagtatattagtttgtttttatatatgcattatttgtgtcttataaagaacagtgttagataaagagacagagttaaatactgtaagatttttattctcactgtgcttaaaaatagcaaccaaaaatatttgttggcagaattaatcatattattgtcagttttaccattataaaacagtactaactagagtgttagtttggtgccacttttaaacatatgaatgtattttacaccttcttttttgtgtagatgaggtaatggaagtccacagtagtgagccgagttttccaaagtcacttatgaaaaagaacaaaactctgtctcaacccacattctttttttttattttatttttctatttttttttttatattttttattatactttaagttttagggtacatgtgcacaatgtgcaggttagttacatacgtataca

SEQ ID NO: 10775 - DNA, 3321 bp, Homo sapiens
ttgaaaatagtctaatgttggggattactacagtgtgcactataacaaatcagagtgtaattgaggtagtcggaatttaatgatagctaagagaagactaacacattattacaattaaagttggaagtcctttttatagcttccatttattgagcaactaccgagtgccctagatgctaagtcttctaccttaaatcttcctcttcaatccttaaattatgcttagaaagtaaattgcattattcccattttataattaagggaactgagggaagaagagatacttttatttgggctgaactattggaaatgctttctcctgtactttcctctaaatttgttgccagacttctcttcccagcctttatttgatttatctgaggtttttggccattttcagctattttaaaagtctcatttttagatactatggtgcagcctagtttttggctaatactggttggccttcatactctccaatgcggcatgcatttatattttcattttttgtgagaagcattttggagactactttactgtaaaattcccagcagaccaatgactcccacctgatttctttcagtctctctcagttcctgcttcagacagaacaccacgcaagaacttgcttctgaggctctcttaccttatcagacagccctatagaggagagacttgagtgcaataattcttaccatatccacttccctgtagaattcatgactccttaccacatccaaatttgcaaaggtacttcttcaaccactgacttttccctactcagcccttataatctttttcaagatgattcctgccttacatgtctccaaacattaaaaaaaaccaagtcatgttactatcccatcacattctgtcataacccaaggcattacttcagattataattttatggccattaaacatttttgcaagagtgagatgctgatctcttaaaagcagttacaacctctgaaaatacatgttttaagattcccatcacttggcttaagagataagaagcacacttcttcccttccctagaagtagaaaataccatcatgtacctaacgcctttaaattcccttacttcattgaactgttcttcaaatttcttatcttctcccacataaattagagatgtatgatagattcactgttacaatatcagtactgctatctttccaatggcttcttttagaatttgggggtaacttatcattggctagcctcacttttcgtacttgctaaaattccaggaaggtgaatttttcttatctctatgcttaccacatttatctgttaccgcacagtatacaagcctcaaagtcaggaattgaacaaatctctctgactccaaagttttactctttcttctgcttcctacttgagtttcttgagagggtaaaagacactgaaatatgcatgcgataaggaggaaatggtcaggatactaagattataaatgtgagcataaatctgtgaaatgctgcagtgttcttggttcaacaactgtattcccattgtctaataaatgcattctatattattaatgaatattctgctagaatgtatatttcttcatttaagagatctaaaagttcatgacaattgcatcaagatgattgaagcagtctggagtagaaaaaaaaaataaatgtgagtcccacactggtatcattttagggagttcagaattggtatgcattgtggtaggagtagggacaggagagaacaacaggaatgattacgtgggtggctgagacagatggtgtggacttcaaataaagaaacccagaaggtggtggataaataatgatgagagtagcatcggagagtaaggaaaaattggacagttctatctcaagaactcaaggaataaaggatgaaatcagacttttaaatgtttactacctttaattatttaaatgatgtgacaacaaataacacttggaaaatcatttttcaatgtttttgttataacctcttataaacaagaggattagtttataggaaaagacaaggctgagcaacataacaaaatcaagtgtattttttttktttgttttcagacggtctcgctctgttgcccaggctagagtacagtggagcgatctcagctcactgcaagctccacctcccgggttcacaccattctcctgcctcagccacccgagtagctgggactacaggtgcccgccaccacacccagctaatttttttgtatttttagtagagatggggtttcactgtgttagccaggatggtcttgatctcctgaccttgtgatccgcccgtctcggcctcccaaagtggtgggattacaggcttgagccaccgtgccaggcacaagtgtatttttttcttttgaaaaattatattgtgattttacattctaacataaatactctatatcagaaataaacaaccactagaatgagaaacagaatgtcattacactggaatgtggtaaaaaagaaattgttgttgataaaagaaccaccaacttgtgtatgtggggaaatatctgtttaactgttaaagttttgtgttatgtagaattcttaaataacataataattttttaaaagtcactgagtgcctttcatcaacagttttgataatctgagagcctattcacctgtgaatgattttaaccaaagtaaattgcttcaactctgtgcttaatagatggtgtcagaagattgtggcccagaaaacaggatgctgaaagacatgagatgtacatgagatacacatgtttcagtcatagcctgagtatggtagatgtagtctaggagaacttggctgggaacacaacaccatgtcttcatattcatttcgaatgagatgggggtagacagagatagggtcttcctaaagaagtatattagtttgtttttatatatgcattatttgtgtcttataaagaacagtgttagataaagagacagagttaaatactgtaagatttttattctcactgtgcttaaaaatagcaaccaaaaatatttgttggcagaattaatcatattattgtcagttttaccattataaaacagtactaactagagtgttagtttggtgccacttttaaacatatgaatgtattttacaccttcttttttgtgtagatgaggtaatggaagtccacagtagtgagccgagttttccaaagtcacttatgaaaaagaacaaaactctgtctcaacccacattctttttttttattttatttttctatttttttttttatattttttattatactttaagttttagggtacatgtgcacaatgtgcaggttagttacatacgtataca

SEQ ID NO: 10776 - DNA, 593 bp, Homo sapiens
atagaaatacagttcttagttggtggatttgtatgtcagttaaccagggtctttggaaagtatattgtcttttctataaaatgcttgggtcctttagatgattataaataaatgttcaaaatcaaaacaggagtagttagtagacaaatgcttagctattttracaacacctagaacactttgagagagtggctgtaaaatttctgcccagtgcaccctggcagaccaggagaccagcccaacacaagctacgcagctacagagaatgtactttccataggctgaagggcatggccaccatacacatctctgctccagggcaggcaggtcctcaaattgcgccacaagtgggcctcatcctttggcttggagcccttgaaggttttcctataaacaagaactgagatttgttttgtcgtttaaacttaccttaattctgactgtctgatctcatagcagatgttggaactgaactaagcacattgccaagggaataaaaattgtgtccaagaatcttgctgatctggaagttttggaggaaagcagggattttcaaggtcaaatgttattacccagatagtgctcgtggtcag

SEQ ID NO: 10777 - DNA, 655 bp, Homo sapiens
tgtgttattaagtgtcaggctggtgtggcagagctgtcctggcagaacatgcgtgtgtacatccctgcaggctgtcggggcatgagctctagtgtgggctgtattgcaggagcatcagcagagaagggcgagatcttcactctacctctcactagccctgggcacttcccactgcctttgtggacttctgtttgctcttctgtagaatgggataacagtgccagtcctgcttactatttagggttatgtgatgcttgcagatgtacagggaaagcacygctgatgggagctgctgaagtttctaggggaggtgaaggtggcgcctcctcccctggtctaagtggtagatggtgcagggagaggagaatttcattctgtggcagcagctgatagattccaggtctttaatactacctgggaaaccttaacaaagcagtcagtcaccaaaactgacctagcttctgagcattgctaaccatgcttttagagaaacaggaagtaaaaaggatctttaaaatctttttttttttttttttgagatggaatttcactcttgttgcccaggctagagtgcaatggcgcgatcttggctcactgcaacctccgcttcctgtgtgcaagagattctcctgcctcagcctcccaagtagctggg

SEQ ID NO: 10778 - DNA, 529 bp, Homo sapiens
tgtcatttcacaaatccagtcacttgctccattaatggatgaatgagctttgcctaatctacaggcttagctagaataggccaaaggtaatcacgaaatctatctggaacaaccattttgccccagtgtagattacaactgaggctcctgaattttgatttttttcctaagttaaataagtgctgatgaaaatattgcaagataatgacaaaagcaatgaagcagtcaggcaatggcctgggccaaatttgaggtaaatatttattcattcctattctcacagaaattatgcctggtgcctaaactccctgagccatgtgggcttggctgtctgaacaagcctcttctgtcataaggtcagtactaaacctgattacacctttaggctaatctctttttaacgtggttatagaagaggcttttggaaaaattagactatctattggccaytgattacagaagatgtgcattggcagagttagaaggagacaggacacaggagttccaagactggtttcaccacatactg

SEQ ID NO: 10779 - DNA, 553 bp, Homo sapiens
tgcctcttacctaaatctttggcaagcatgctaatctgacctgattctgccatttgctctggcggagaccatgttgttgactcaagggaagggggtttggaaaccaaaggaggtagtcacaactcttgaaaggagaatttgccttttcaggcacaaagaggcatcatgcataaatgctgtgtgcttgacagtagtaatgtatctcctgatatcattgctagctctactgaacagtactaaaaaaaaacaaccacataattttgtctaacacaaccacaaagttgctcgtctgccaaagaacacagaggtgtgtagaaaagggccagttcgccctgatatyttctggtggaaaagcttgacaaaaagaattgtcaaggttttttcaaagaggctctgatgaatgagtactttcaaccagcatcttcaggaagaaataccacttactacaaagcacaaagaacctcggcatatgaatacacagcccagactgtggtctcattcacttttgagtgaatgaggcactgaccatctccagccagaagtccctcataag

SEQ ID NO: 10780 - DNA, 552 bp, Homo sapiens
tgaagacacactgcccacgccgcctgctggagagggtgttagccacgtgggattgcaggggccgcccataggaggacacacccactcggggaagaaatggagatggcagggtaatgggatcaatagacaaaggcgtcaagtcagagatgtaaaccgtttaagtggaccgcctcctcagagcttaatgtcccctgccttcctcttgttttcccatttcacttaacctttaccctaatttgaagcaagtcyggaaatgagatttacaggaaaggccaaacaagaaagaaatctcttcatttctgttatccaattttgagtgaggcacaaaaaagcataaggctacatgaaatgggatatgacgggctgggcacggtggctcacacctgtaaccccagcactctgggaggccgaggtgggcggatcccctgaggtcaggagttcgagaccagtctgaccaacatggagaaaccccgtctctacttaaaatacaaaattagctgggcgcggtggtgcatgcctgtaatcccagctactcgggaggctgaggcagga

SEQ ID NO: 10781 - DNA, 552 bp, Homo sapiens
tgaagacacactgcccacgccgcctgctggagagggtgttagccacgtgggattgcaggggccgcccataggaggacacacccactcggggaagaaatggagatggcagggtaatgggatcaatagacaaaggcgtcaagtcagagatgtaaaccgtttaagtggaccgcctcctcagagcttaatgtcccctgccttcctcttgttttcccatttcacttaacctttaccctaatttgaagcaagtctggaaatgagatttacaggaaaggccaaacaagaaagaaatctcttcatttctgttatccaattttgagtgaggcacaaaaaagcataaggctacatgaaatgggatatgacgggctgggcacggtggctcacacctgtaaccccagcactctgggaggccgaggtgggcggatcccctgaggtcaggagttcgagaccagtctgaccaacatggagaaaccccgtctctacttaaaatacaaaattagctgggcgcggtggtgcatgcytgtaatcccagctactcgggaggctgaggcagga

SEQ ID NO: 10782 - DNA, 2189 bp, Homo sapiens
gcattaactacagagaacaacctctcatttctttttcccttctgcctcccccatcctgtctctcatagctcactactttctctatttcccattttttttacatttctaagaaaattggcaaaaccttgtttttaataatccacagaattaaaaaaattatagttgggtatatatctagtcacaataagctaaataacaaattcaaaataaatagcagtttccttttgctcacttggaagctaagaatgattgtgtaaaggaaacatttgagtaggaattcactgcctgctgctgaaagccaggcttgctgtaaacatgtacacaatttaacaaatgaagatatatttgtccaaacatgacctctacaggggtctcacaattctgctgttcccatttcatttccttgagaagtaaaagttactttaaaacctatagacagatcctcatcttaagaacactgcttgatttctgctctccatactccacagaaatattgaagacctaaactgattatgaaaacctcagttaccatatttctaaatatattgcattattaacagatgtcacctggaaaatagttcaaacatttgtggtctccttatttttaagttgctatcaagcttaatatatgcctactgatgctaaatctgcagatataagcaaaacctccacaaaagcttaaaacaactatttgaaacaaccacaaaaatatggaaactttgtaaataaaacttttgtgagataaaaaaaaatacaaaaatctgctccctcaccccagaacccagggaaatgctattcatgaaaaaggaaagaaaatacttcctcactttacccttgtcagggagacaaaattttacctctaccctcctagggttttagacagaacctaataattaaattgacataagtcagattaaccagagaaaagcatagaaatttaatataaattttatgtaatacgggagccctaataaggaaaagaagacccaaaaattgacaaaacctaaaagctaatatattaggttgaaaacagagaggcaattgtggaaaagtaactaaattctgtggggaagctaaaagatgacaagaattattttgacaaggtctgtttgcacaaaattctctgggctatgactccccactgaagaatgtttacctcctcatggtgtaagggaactttcacaagggagtttttaatctcctgttttcagaaaaggggagattaggacgcctctcatgcatttgctgtttttcaagtgcatttagatcaaagttacctttacgccaaagtggcatatttcggggtggcatattttgccacacttacccttgttccctcagtcgggtggtattgagaaatrtgtaacatgtgtccagattttcaatatgcactattccacttaccgcagctactctgggagagcctgagggaacacatcagcagatgagtcacagctgtgagctgcctggcctatgccagcatgtaacaggctgtctcacagggacaggagtgaactgtggaggtcctggaggctccccagcttcccacaaaacaccaaacatttcagattcagaactcaaagacctgtgccccatcaggggctagggaatccgtattcccaaaataacaatagaagctgataaaaaccaaagttaatggacaataaagatacttcctcatacatgcacaaacattgctaatttcatggctcccaaaagggagacttaaaaaactgcaaattccagtgttttcgacaacaagtagtggaaaacaaaaatcaccacactcatgtcctactatcttattagaggaagagaggaaaagttgaagtctgtatatcattcatctgaatatcaatgtggaaagaaaactgcctttttaagtcttctactagcaaattttatcagaaagtttgtacctggtctaggaaagtagccattttgacttatgataacctcataatgttacactaggaaagatggccaagcagcgaacaggcctaccttctcacctagtacaatcatctgtctgcacacttctttgagagcatggagcaacgcatgctcttctatagcagtaggggatggtatttaaaaatatataagctccaaatggataaattaaagagcaaatattgagatttcaaattacttgcccaatatcatagtatcagaataagactcaaacc

SEQ ID NO: 10783 - DNA, 571 bp, Homo sapiens
cgaggattgctttaagagtactcgggtgtcctccagctagttttccattccaaccatcgctccagaaacacttcgatctggattcgagcccccacgatggacacaacttgccgagaccagctcggtcagggagaccctaacccagtggcactagaggaattaaagacacacacacagaaatatagaggtgtgaagtgggaaatcaggggtctcacagcctttagagctgagagccctgaacagagatttacccacatatttattaacagcaaaccagtcattagcattgtttctatagatattaaattaactaaaagtatcccttatgggaaacaaatggatgggccgaattaaaggaataggttgggctggttaactgcagcaggagcatgtccttaaggcacagattgctcatgctattgtttgtggcttaagaatgcctttaagyggttttccacccttaaagcaccttaaggtgctggtacccaaacatttttcttgagtgtgattgtgaattggcataattagagagatgattcccatgttctgatatcagcctagacataatcat

SEQ ID NO: 10784 - DNA, 588 bp, Homo sapiens
atctaaatatgcctttaacaataaacttatccgtgacatagtttcattttcagcttggttttcatctcaatttaataactgtcctggtaacaacatcctctaaaatttagcaggagcaatcaatgtgcattttctggtgggtactgtgagttgtctagtttaataattatgtgtttagtcacttactctcatggcacacaggtaatactaattattaacatttcttacatcaaaatgcttattcaaagcatttgttaaacccttctttgcctggtcccttctacacttccttttgcttttattttcagtagtataggaatcatcttataagacgctatactatgctttaaaaaccattttattttctaaaagaagtaagcatacttatatcaggtacaaaagcttcagtgttcatcctggtgagctggtgaggaagatctggaaatattggtgttacattgagaaaacacctttgacaaagytgaagacatttttgtcagcattttagatccttgtttggagacatcgggcttgggagtttctgtggacaaagtaaacaagaagaatgatatctttatttttgaacac

SEQ ID NO: 10785 - DNA, 415 bp, Homo sapiens
gaaatcactgcggaaatctgttaaaggcataattttgaagtttatctattgttattggaggccttagctgttttggatattcctttgtgtataattctaygtgtgtgatttcatttaggatcaaggtgatgcagacaaggagataatttcaaatacatatagtcaagtactgcaaaagattcattcagaggaaaggctcattgccacagtacaagctaagtacaaggacagtattgaggtttgattgtgctttctcttattgatcttataaattgatgatttgaatttttcagtacttaaatttttctattgttgtttaatactcagtgtcagtaaattgttattactagaattcactgtcaactggaaatggtgatttttgatgatataaatatatcaaattttttattgtttt

SEQ ID NO: 10786 - DNA, 415 bp, Homo sapiens
gaaatcactgcggaaatctgttaaaggcataattttgaagtttatctattgttattggaggccttagctgttttggatattcctttgtgtataattctatgtgtgtgatttcatttaggatcaaggtgatgcagacaaggagataatttcaaatacatatagtcaagtactgcaaaagattcattcagaggaaaggctcattgccacagtacaagctaagtacaaggacagtattgaggtttgattgtgctttctcttattgatcttataaattgatgatttgaatttttcagtacttaaatttttctattgttgtttaatactcagtgtcagtaaattrttattactagaattcactgtcaactggaaatggtgatttttgatgatataaatatatcaaattttttattgtttt

SEQ ID NO: 10787 - DNA, 539 bp, Homo sapiens
tttcccactgcaccattgagcatttcctagcaattagggagcaggacagtgagtggtagggttcaagccccagcaaacgcccacrtctgttcctgatgtcactgtaaggaaagcaagaagcaatgccactaccactcttatgcatctgcttgatggaactatcaactgatcatacttgtaatggaggcccaaagccacttaactgggaagaaaacagaagtaaaattaggcactaagcgaagagaggaaatcaacaacgccccccgtgactatgtctccataaacaatgattcagttagactcatgaacagagtgaggcagaggacggttgatatgggaaaactcttattttctttattttggcgtaatacaaagacctcaaagaaaaatcttagcatcccctgaaaactaaaaaggacaatagagctctaagaaaagacttgaagatattaaagctgggaaacacactaaaggggagtaaacaaagaaacctaaggtggcaggttagtgcacactttgaaacattctataatgacatg

SEQ ID NO: 10788 - DNA, 480 bp, Homo sapiens
agaatcatagaaaattggagrtaggtggatgttaagcacattttattttttattttcattttatatacataaaaattgaggctcaaacaaatgaatattcttagtcatgattacatagccagcaaatgcattgatgaatatacagctaaatcactttccattatacaacactgaatttgaagaaataagatcacattatggatgtaaggcaaacataatagcccagggtcaatatggcagagaaataaaagttagcatttttctatcttaaaagtattctggattttccccccatcttcataaggttggtaacaacaataatggttcatggacaacctagaatatttcatatttaaactagagtcttttctcatggaaaacaaaccatccatgtcttgatcaaaacaggggcatgaattactagaagaataagagcaaagaagaaataagcataaaatgtttttcaaggaccatcttgag

SEQ ID NO: 10789 - DNA, 480 bp, Homo sapiens
agaatcatagaaaattggagataggtggatgttaagcacattttattttttattttcattttatatacataaaaattgaggctcaaacaaatgaatattcttagtcatgattacatagccagcaaatgcattgatgaatatacagctaaatcactttccattatacaacactgaatttgaagaaataagatcacattatggatgtaaggcaaacataatagcccagggtcaatatggcagagaaataaaagttrgcatttttctatcttaaaagtattctggattttccccccatcttcataaggttggtaacaacaataatggttcatggacaacctagaatatttcatatttaaactagagtcttttctcatggaaaacaaaccatccatgtcttgatcaaaacaggggcatgaattactagaagaataagagcaaagaagaaataagcataaaatgtttttcaaggaccatcttgag

SEQ ID NO: 10790 - DNA, 480 bp, Homo sapiens
agaatcatagaaaattggagataggtggatgttaagcacattttattttttattttcattttatatacataaaaattgaggctcaaacaaatgaatattcttagtcatgattacatagccagcaaatgcattgatgaatatacagctaaatcactttccattatacaacactgaatttgaagaaataagatcacattatggatgtaaggcaaacataatagcccagggtcaatatggcagagaaataaaagttagcatttttctatcttaaaagtattctggattttccccccatcttcataaggttggtaacaacaataatggttcatggacaacctagaatatttcatatttaaactagagtcttttctcatggaaaacaaaccatccatgtcttgatcaaaacaggggcatgaattactagaagaataagagcaaagaagaartaagcataaaatgtttttcaaggaccatcttgag

SEQ ID NO: 10791 - DNA, 563 bp, Homo sapiens
ctttcaaagtacttggcacagaagagaaactcaggtgcattgtgtgatgcacaatgcctcccaaatatgtgtgatgtgatgcctcccaaatattattttactttttgagtgtggcaactgaaatgtcgaaaattacatatgtggttcgcattatcatttctgtcagacactgcacatctagcccccaaatcagaagacctagaacgaactgggagtcctctctcccatttgtccaaggtttgccttttcagttacaatttcctccttagaattttgtctgtcataatattctcccaaatattattttgggaggcatgacrtatatgtatgacaatgctttttaaacttctaccaactttcccctaagaagcaagagaataccatatctctggcaatctaaggatataatccaaacaatttaccatgactgtaaaatttcttttcaatccacttttttttcccttgaaagttttgtagattttatattttactcttcagtattcctcttttttttttctgcattaatgttgtttttggggaaaaaaacaaaaaaacaaaacaaa

SEQ ID NO: 10792 - DNA, 563 bp, Homo sapiens
ctttcaaagtacttggcacagaagagaaactcaggtgcattgtgtgatgcacaatgcctcccaaatatgtgtgatgtgatgcctcccaaatattattttactttttgagtgtggcaactgaaatgtcgaaaattacatatgtggttcgcattatcatttctgtcagacactgcacatctagcccccaaatcagaagacctagaacgaactgggagtcctctctcccatttgtccaaggtttgccttttcagttacaatttcctccttagaattttgtctgtcataatattctcccaaatattattttgggaggcatgacatatatgtatgacaatgctttttaaacttctaccaamtttcccctaagaagcaagagaataccatatctctggcaatctaaggatataatccaaacaatttaccatgactgtaaaatttcttttcaatccacttttttttcccttgaaagttttgtagattttatattttactcttcagtattcctcttttttttttctgcattaatgttgtttttggggaaaaaaacaaaaaaacaaaacaaa

SEQ ID NO: 10793 - DNA, 605 bp, Homo sapiens
agagaaaccaggccatcacttccactctgccactacttagctggtgaccttaggcaagtcctgtccatgtctgagagctgtggtatctacgtccacataggaagagagttggcatacatgcttgatgagctcctttttttctttgataactgttcatctgttaacatttcccaacgggaagaagtcatcaggagctttctgtttaactatggtctccactgtgtatcttagtgcttcaatatcagttttactttttccttaattacttactacttgcctgtagatcttccacaaacttttctaatcttcttttacattataggagtagagctgcatgactattaagacctgcatatacctttaatgttatttatcaactttcagattgtcacctcttcagtttacttctctatcttccatgttcctaaagcaaatctagaattgaaattgtctggtaggagcactactaggtttcctgttttactgaggaaatgtckaatctgagaatgaccttaaactgaaacatgtagaaccataggcctgaatgtctttaaggccataaagttagtttcgtctttcagtattttatttatattcttgcccca

SEQ ID NO: 10794 - DNA, 528 bp, Homo sapiens
atgccattttttttcactcatcagtctggcagagattaaagaacaatccagcctagcattggtcaggatatggtgatctaataaccaggtatgctggtctctcacacacagtggttgagagctcacctggaataggctttgtggaggggacctgggctatttgtttcaaagataccaccaaaatgcctccctttaatcttgtaatgaaccatacatgctatattctaagaaaatactcggagaaatgcatcaagacatgctcaaaaactatatttttcataggattgttacaatggccgggcgcggtggctcacgcctgtaatcccagcactttgggaggcygaggtgggcggatcacgaggtcaggagatcgagagcacggtgaaaccccgtctctactaaaaatacaaaaaattagccgggcgcggtggcgggcgcctgtagtcccagctactcgggaggctgaggcaggagaatggcgtgaacccgggaggcggagcttgcagggagccgagatcgcgccaccgc

SEQ ID NO: 10795 - DNA, 528 bp, Homo sapiens
atgccattttttttcactcatcagtctggcagagattaaagaacaatccagcctagcattggtcaggatatggtgatctaataaccaggtatgctggtctctcacacacagtggttgagagctcacctggaataggctttgtggaggggacctgggctatttgtttcaaagataccaccaaaatgcctccctttaatcttgtaatgaaccatacatgctatattctaagaaaatactcggagaaatgcatcaagacatgctcaaaaactatatttttcataggattgttacaatggccgggcgcggtggctcacgcctgtaatcccagcactttgggaggctgaggtgggcggatcacgaggtcaggagatcgagascacggtgaaaccccgtctctactaaaaatacaaaaaattagccgggcgcggtggcgggcgcctgtagtcccagctactcgggaggctgaggcaggagaatggcgtgaacccgggaggcggagcttgcagggagccgagatcgcgccaccgc

SEQ ID NO: 10796 - DNA, 650 bp, Homo sapiens
aggcaggcggatcacgaggtcaagagatcgagaccatcctggccaacatggtgaaaccctactaaaaatgcaaaaattaggccaggtgtggtggctcatgcctgtaatcccagcactttgggtgatgtagccagggtgacgcagcccctaggacagagggtcagagaaagcccccctcgctggagactgcatctgaatggagtctaggttttgcctagtggtaggagtggagggaaggactctcattttaggcagagggactgcacgaagaaagtgagtaaaaagtgcgtggtgcctttggaaacgactaacgtggccttgctgaggagaagggcrctttgcagagtgtgagagcagcctctgaaaggtggttaaaatggattaggaagggctcggaggccgtgggggaccatggaagattttggaatcaggaagtcacatgtgcggatagatctatgatttggagaaatacctctggtggttggtgtcggggagggctcagaagcttagtggccatttgagttacactgtggtcatccaggccacagagccacatgcctgagtgagggccgggcatggtggtggggatggtgagaggacagtggggagaggcacgctgaaaggagaactcttccacctagtcacttccc

SEQ ID NO: 10797 - DNA, 650 bp, Homo sapiens
aggcaggcggatcacgaggtcaagagatcgagaccatcctggccaacatggtgaaaccctactaaaaatgcaaaaattaggccaggtgtggtggctcatgcctgtaatcccagcactttgggtgatgtagccagggtgacgcagcccctaggacagagggtcagagaaagcccccctcgctggagactgcatctgaatggagtctaggttttgcctagtggtaggagtggagggaaggactctcattttaggcagagggactgcacgaagaaagtgagtaaaaagtgcgtggtgcctttggaaacgactaacgtggccttgctgaggagaagggcgctttgcagagtgtgagagcagcctctgaaaggtggttaaaatggattaggaagggctcggaggccgtgggggaccatggaagattttggaatcaggaagtcacatgtgcggatagatctatgatttggagaaatacctctggtggttggtgtcggggagggctcrgaagcttagtggccatttgagttacactgtggtcatccaggccacagagccacatgcctgagtgagggccgggcatggtggtggggatggtgagaggacagtggggagaggcacgctgaaaggagaactcttccacctagtcacttccc

SEQ ID NO: 10798 - DNA, 663 bp, Homo sapiens
tggaaggcagatgccaaactcagccaaggagcagccccagtggccgagaggtaatgtgkctcctcccattcctcaaatcctctctgccctgccaccccttctgctgtgcccctcactcctagagcctccattgctccatctttccctctctcctgccaaggactttgagtcctctcatctctcctcatcgccctttccaggctagcctgtggtcgtcaggctttgggatgaagctggaggctgtcactccattcctgggcaagtatcgcccctttgtgggtcgctgttgccagacctgcacccccaagagctgggtgagtgatggtagggccaggccccaagcaggaagcttggttctgggagccgaagctctgggaagctgcttcctttatgtccctgaaagcttggctcttccctgccccatgcctctgcttctgtctttcaggggaatggatgcactggtattggttgtatggttgggcggtggcttgttcccaggcctgggagagttgggtgggagaagtacagaggggcctaagtggtggtagggtgtgcccagagggctgggttcttatcatgcctgtgtcagttttgttgttcagttttgtggacatcacccactcagacttccccagcactcagcacatgcttgaagacctcttt

SEQ ID NO: 10799 - DNA, 663 bp, Homo sapiens
tggaaggcagatgccaaactcagccaaggagcagccccagtggccgagaggtaatgtgtctcctcccattcctcaaatcctctctgccctgccaccccttctgctgtgcccctcactcctagagcctccattgctccatctttccctctctcctgccaaggactttgagtcctctcatctctcctcatcgccctttccaggctagcctgtggtcgtcaggctttgggatgaagctggaggctgtcactccattcctgggsaagtatcgcccctttgtgggtcgctgttgccagacctgcacccccaagagctgggtgagtgatggtagggccaggccccaagcaggaagcttggttctgggagccgaagctctgggaagctgcttcctttatgtccctgaaagcttggctcttccctgccccatgcctctgcttctgtctttcaggggaatggatgcactggtattggttgtatggttgggcggtggcttgttcccaggcctgggagagttgggtgggagaagtacagaggggcctaagtggtggtagggtgtgcccagagggctgggttcttatcatgcctgtgtcagttttgttgttcagttttgtggacatcacccactcagacttccccagcactcagcacatgcttgaagacctcttt

SEQ ID NO: 10800 - DNA, 663 bp, Homo sapiens
tggaaggcagatgccaaactcagccaaggagcagccccagtggccgagaggtaatgtgtctcctcccattcctcaaatcctctctgccctgccaccccttctgctgtgcccctcactcctagagcctccattgctccatctttccctctctcctgccaaggactttgagtcctctcatctctcctcatcgccctttccaggctagcctgtggtcgtcaggctttgggatgaagctggaggctgtcactccattcctgggcaagtatcgcccctttgtgggtcgctgttgccagacctgcacccccaagagctgggtgagtgatggtagggccaggccccaagcaggaagcttggttctgggagccgaagctctgggaagctgcttcctttatgtccctgmaagcttggctcttccctgccccatgcctctgcttctgtctttcaggggaatggatgcactggtattggttgtatggttgggcggtggcttgttcccaggcctgggagagttgggtgggagaagtacagaggggcctaagtggtggtagggtgtgcccagagggctgggttcttatcatgcctgtgtcagttttgttgttcagttttgtggacatcacccactcagacttccccagcactcagcacatgcttgaagacctcttt

SEQ ID NO: 10801 - DNA, 694 bp, Homo sapiens
ggggtggctggggcaaggcttctagagcatgagctttgcctgggacccttccttaaggaggagagtgaagactggaggctgtgccctgctgcagcctcatagcactccttctaaccccctcacagggtgcagaacctcctctcagggagggtcccaggaggcactggggaaggccaggtgcctgaccttgtgaagaaggaggtacagcgcatcctgggtcacatccaggccccaccccgtcccttcctggtcaggtaactgggctgaagggcactcacccttgggctggggactctgtccttctggagagcgggtgttggccgggcttggggaagtgctggactctcctcctgggttgctggatagtgtttaccagagtgggctgcagcctgccttcaccaccgcctcccatccccacattttgccagcacaggttggagcctmtgttagatgcagcacactgttccagggaaacggagggtaaacgagatatgcgcggctgcaaggaggaaggaacagggctgagacagaataccaggaaggggacaaagagcctgtaagccagagccaagaggaagaaaaggcgaacaagaatgaggcgaacagtcttgctagagggaatagcctgagctttggccctgggcaggaaaggactaggtttgctccagaagctgacgtggttggaagccagcaa

SEQ ID NO: 10802 - DNA, 566 bp, Homo sapiens
tttttttttttttgagatggagtctcgctctgttgcccaggctggagtgcagtagtgtgatctcagctcactgcaacctctgcctcccaggttccaacgattctcctgcctcagcctcctgaataactgggactacaggtgtgtgccgccatgcctggctatttttttgtgtttttagtagagacggggttttaccagcaattaaaacagtcactgcagtcaccaggagctgttgatctttatattggatcctcagcatgctccaagacatctaagtcactcatatctagatgttgttttggtcactttgatctttgcttgcaggtgtttttaaacttctctcaacacaaatgtagatactttaaaygaagtgttaggaagcaaaacatgctttgggccacatcatatcaatggtttttctaacttacatgcaaacaaaacacagttgagtattctttctaaagagtttgtacaacaacaggactggaacttcaattagatagtggaagtggaagctctgagaaagtgtgttcattcatctgaaatactgcacctcatgccaattt

SEQ ID NO: 10803 - DNA, 338 bp, Homo sapiens
tgtgtttttttattattattaaaattttgctttttcttatcaattcaggmaaatataatgcaggatgagaatggaactaatacttaatattttcagagtctgctagcatacctcagtatacatactgaggagagaatacacttttggcatattatccagtctaaaaaagaaagtggaaaatttcactaaagagatatcaataaatgcttgtagaattgaatatcaaaaaggcccactgctattaaatcaaggatctgtgttttattattcttaaaattttgctttttcttaccaattcaagaaaatataatgcaggatgagaatggaactaatactta

SEQ ID NO: 10804 - DNA, 339 bp, Homo sapiens
ccaagtgtgtttcttgctgggtctgccttggtgataagtcctcactatccatgagtgggctgcaggcaaacagcagaccctgaggggacagagagagccccaaaggcccacctcaccaacaccttcctgcagaaggaaggagggcragggtaccagacaaccttctgtgttctgacacggcaccaatccgcctttgttctaattgcctctatttttctttgctcttctatatcattttgcttaacatggaagaaggttttttaatgagctagaatgatctaatcagccacaaatgtgatgtccttgccacattgtttattggtttgtagacagccagtg

SEQ ID NO: 10805 - DNA, 542 bp, Homo sapiens
gcatactcttctccctgcctgacttggaaccaaggatttgaagcggggaaagaaagaaacaaatacttgaatatttgtctgtcttctattgactatttttgtgtctctttcattaaaaaaaaagtgaataaagctcttgtcagtagtatctaaatcaaataatatgaggatttttaatcttattgyttttatggtataaatggttgtgagtaatactgataaaaatgccaaacttttataggctaaaacagctcttggagaacatttgctgaatgttggtgtgaatcgagacaatgtttccgagattttacagatatttatggaagcccactgtggacaaactgagcttactgaaagtctgaagaccaaagcttttcaggctcacactccagcacagaaagcttcagtcctggctttcctgatcaatgaactggcatgcagcaagagtgtggtcaggtgagcatatgcccaggcttttccgtgatttttccattttgaatttttctaatcaaaaagtaatacaaattgattatagaaaattg

SEQ ID NO: 10806 - DNA, 716 bp, Homo sapiens
tttagttcattattcaggtagaaagagaaaactgaattcctatttatggcctaacagagccaaaacaagttacaatccacatttaaaacattctcgaatggcatgtattttataaaacaataattgaaaaatatcagagtagaaccaaatagctcctatttcagtttgtagactctgcaatatgtagtttcaaaaatgcattaacaacaatctggctccttttctgcaggcacacacatgaaatatcatttggcatatgggagttattcccataaagatgagtcagataacaagcaaatgatcattacctcacattatgtgaaatggaaagaagccattaatgcagtattaaggtcataaattcacacacacagaagccaacaaaataaaacattagctctcaaagcattattttcttatccttgctgccacattaaccrtacacactaaaaactctgacaaatattataatttgtataaaatacagaagggtaaagcttcccatgttcatgttaatttgtagatttctcgatttacctactggctaggagcaggtatctaatgccgaagctcaaaagaaccctgtatatctgaatcactccaacactctaagcacgctcctcagaaacctatcttaggccccccaagctctcacccagtgaaagggctgcactgggaaaaaggcaattgaatacccaccaaattattcttctggc

SEQ ID NO: 10807 - DNA, 1729 bp, Homo sapiens
tgaactgtgtcccgcacaaattcgtatgtcgaagcccttaccctcagtacctcacaatgtgactttatttacagacagggactttaaagaggcaatgaaggtaaaatgaggtcatcaggatggactccgatataaccggtgtccttacaagaagagaagacaggacacgcacacaaagcragggtcagccatgtgaggacagtgagaaggcggccgtcgacacgccaaggagagaggcctgggaagaaaccaaccttacaccttgacatcagacttctggtctccaaaactgtaggaaaataaatttctcttgtttaagtcacttagtctgtggtactttgttagggtaatatgagcaaattaatacatcaggcaaagtatctgaaacatttttttggttctaaatatgaatgtaagcacaaccacataatgatgtcaactgtgccagcttacagcggtgacatcagcatgggaatgcatcagtgtcacatcacgaacttctcagctttaggtgttaatattttgataggaaaaaatcacttgctaatttaggagatatgtaatggtacctcaaggttgctttcatttgaatttatttgcaagaatgaatttttccataaatttcctatcatttttattttttgttgtgggaagaatcaatcattcactcatttaggagagttataacagcttcccactctttcacatgtgaaggattctctgtataactgaaatcttaaccctgatttttgttatcatgaacattctaacctattgtttacagttctgtttcggttgttttttgttgtatagaagttttacactttcatattgtcaggaaaggatctactcctttatgacttgttttattgctttaaaactcagaacttacaattcctcaaaggaactgatatgttatttttatattttctgacttttaacaacatttgacttttaaattgatcagaaattgactttggtatatggtctgtggaaaatcacacagccctgccagtgggttgactggtgcttaaggggcatgagaaagaaaatatattctgtcatttttggatgcggtttggatgtgagaaataaatatgagacaagtccagagaattagttgacttaattcccctgatcaaataactttgaattacagtgagagatagtctggtgctatgaaaagaagacaggcttttgggttagagacaaatttccaatcctggttctgtcactaaacaactgtgtgaccttgttcaggacgatctctctgagctccagtttccacatcagaaatacacactgtctgtaagggttgggaataatacaagcttttaagtgcccagcacaatgccaagtgcagagtccaggttcagtaaatagctgatgttaatacaggcaaacaaatcatgagaaaaggattttctagaaagggaagggcttatatatatcagaagatgagtaaaatgcttgctatctctgtcagagattgttttttgtgtgtcagcaattaatttttgagaataaatgatactttacagatcttgggaaagaaatctattaaagcacaaagcactgctgtcttccaagccattaaaatgttatctgcttaattcctcttccaacaataggtaatgaaccttctctgatttaaaatctttgattttatggatctatatcaagctaagagtaattacaataatgaggaaagctgaaattccagaagcat

SEQ ID NO: 10808 - DNA, 1124 bp, Homo sapiens
caggtattgctgttatcccctttgtgtatggacgagatcatgaggttcagagagatttagcagcttgcctatggtcacccagttcataagtggccatgccaggactcaaacctgggctgattggactccagagttcatgatctccgtcagtacactctcctgtccagaaagaatccttgcctaggtgcagtggctcaacgcctgtaatcccagcactttgggagaccgaggtgggaagattgagtccaggagttcaagaccaacttgagcaacatagagagaccctgtcactacaaaattgatacaaaacaatattagccagacatggtggtttgtgcctatggtcccagctacttgggaggctgaggtgggaggattgcctgagcccaggaggttgaggctgcrgtgagctgtgattgcaccactgtactccagcctgagtggcagagtaaacccctgtctcaacaacaacaacaacagcaagaaaaacaatgataacacccaaaaataatccttggcttattaaaatattggcataataaaatggggacagggaaattttcataaaataaagagaaatatcaaggaaataaagagcatgctagaaagcaaggttttaatttattcttttaatttattattttccagctttattgaggtgtaattgacaaataattgtatctattcaaggtgtacaacttgatgatttgatatatgtgtactgtgtaatgattaccacaatcaatcaacatatccatcacctcagatagttacccttttgtgtgtgtgtggtgaggacacttaagatctgctctctcagcaaatttcaagtaaacaatacagtagtattaactagagtttccatgttgtacattagagtccccagaacttattcatcttgtaactgaaactttgtaccctttgaccaatatcgcctaatttccctccaacccccagcccctggtaaccaccgttctaacctctgcctctaagagtttgacttctttagattccacctaagagtgagatcatgcagtatttgtctttctgtgtctggcttatttcacttagcaaaatgttctctaggttcatccatgttgtcaccaatggcaggcttccttcct

SEQ ID NO: 10809 - DNA, 547 bp, Homo sapiens
ttagcaggatttaaaacacttactttgattgttcacaaatttagacaataatcaattctatcagtaaatgtgtaatgataatttagtatatttaggactaagaccggtacaactgtttttgtgcttctagaatttattaaggtttgaaaaattgttagctgmcaactttaagattcagggattgaatactgactttttttctttctctaagaaactaatagttcattataacttcagaattccaattaaagtgatggattgtttgaaaagaatattactcaaaaagtctgaattataaattgagtcagtatctgatgctttacacaaaggttttatttggtgccaaatagtttctctggcttgcatgatttaataatgtcactcaaattatttctgagactgtaaggactaaggtttcaaggatttttccctcaatgtatggtacatattcaatttctctttaaagaagctttttatatattaatcaatttatctttttaaattctatttttaattctttcattttgttttttaaaatatcatgttt

SEQ ID NO: 10810 - DNA, 534 bp, Homo sapiens
cagcatatttttgagcacctactatgaatatcaaaaacagacaaaaataagtcyttgttttcatggagtttatgttgaggggggtgggtggacagtatatataactaaattatagtcatgtgccatatatgtatggactatatacatacatgacagtggtcctgtaagacagtggtccccagcctttttggcaccagggagtggttttgtggaagacaatttttccagggactgggggatgggagggttatggtttcaggatgaaactgttgtccctcaaatcatgaggcattagattcctataaggagcaagcaacctatatccctcgcatgcacagttcagaagagggttcacactcctgtaaggctgtaatgccaccactaatctgatagaaggtggagctcaggcggtaatgctcactcacctgctgctcacttcctgctgtgtggcctggttcctaaccaggaaccagtactgtaccagtaccggtacgtggcccaggggttgaggacccctgctgtaagattataatg

SEQ ID NO: 10811 - DNA, 588 bp, Homo sapiens
gaacgaagatcagcctcggcgragcgcctaggcgccgaggcctgggtaaaaacaactgcggccaagccccgccccgccgccggccccgcctcgcccgcccccagccccgccccgtgcccgccccttcccgggcgcccggcggcggagcaggctcgacccgggctcgcacttccgctggcgtcaggcgggtgggctgctgcgatcacttcccggttggggcgccgagctccggagtcggccgccagcctttgggccccacgctccgggtctggtgcgcggtctggccgcgctcgggccctcgccaaatgagagcgcagcgcctctccgccttcggatccagagaaagagcttgttgctgcctctaaaaggttggagccttagtaagcggttcctgcctttcctgcacagaccagaccgccgggtgctggtctgcgctctgccgcgcgccgactgggacagcccacccacgagatccttgttcctgaaatccctttccttccctcatctgccaagaaaactttcaacttttgggctctccgcgcctcccaagcttcctcgaatccctgggcccttgactgttctgccctg

SEQ ID NO: 10812 - DNA, 1303 bp, Homo sapiens
tcttccagaggtgatcagaagggtataaacggggaccctctcacatcctttgttctgaacacttgtgtctttatagatgtgacctatcacaaagacataaatgagggatcaagagcaccactagactccactggaatgcaggcttcatgcagcagagactctcgtgtcttgtttgcttctatattcccaggggctacaaatgcacagggtagataggtgctcaataaatatttctcaaatgaatcatggccagaggttctggtgggagatgaaaggtaaagaaatcatctaatgactctgaggaagcaaatatcaaagaataaaagcattgctcttaaaaacaaataccaccctggcaaagatagtttggctgaagaccatgtttttttgtagaagctctagaacccagaggattccaaaggggagagtccagtctctgggttggaaccactgaagatcagaagtcatgacagaggcagcaagggtctcgccttctttagacatagaagccacttaccaggcctggagataagaaaagattcactccaaggaaatggaattatatatttggtatctattccattcagtagatgttaatggaaacttgctgtgtgccagtccctacagaggctaccgtggggacgtgcaaagggaaatcagacagttcttgcccacagagctttcaattaaatgaggaaggtgggtctgttagaaaataaatatgtcgaccggacgaggtggctcacacctgtcatcccagcaccttgcgaggccgagatgggccagtcacctgaggtcaggagtttgagacctgcctggccaacatgatgaaaacctctctacaaagaatacaaaaattagctgggcgtggtggctcacacctgtaatcccagcaactcgggaggctgaggcaggagaatcgcttgaacccgggaggcggaggttgcagtgagccaagattgtgccactgcactccagcctgggcgacagagcragactctgtctcaataaataataataaataaataaatatcttatcttcgtaagtgctttaagaatcccaggtaaggtagatataaatggtagaaaaatacaaagtgaggatggcattagtgatcataagaaagtgtaaagttttagagaggaggcactttaaaaagacagaaatgagggggcaggaacagcacaggaaaagagaaagaggtaggctggtgtggggagagtggattggtgggattgatggaggcgtctatcttcatgtccaagacactttctcatgcgccctcaagtggtttggaacagg

SEQ ID NO: 10813 - DNA, 1303 bp, Homo sapiens
tcttccagaggtgatcagaagggtataaacggggaccctctcacatcctttgttctgaacacttgtgtctttatagatgtgacctatcacaaagacataaatgagggatcaagagcaccactagactccactggaatgcaggcttcatgcagcagagactctcgtgtcttgtttgcttctatattcccaggggctacaaatgcacagggtagataggtgctcaataaatatttctcaaatgaatcatggccagaggttctggtgggagatgaaaggtaaagaaatcatctaatgactctgaggaagcaaatatcaaagaataaaagcattgctcttaaaaacaaataccaccctggcaaagatagtttggctgaagaccatgtttttttgtagaagctctagaacccagaggattccaaaggggagagtccagtctctgggttggaaccactgaagatcagaagtcatgacagaggcagcaagggtctcgccttctttagacatagaagccacttaccaggcctggagataagaaaagattcactccaaggaaatggaattatatatttggtatctattccattcagtagatgttaatggaaacttgctgtgtgccagtccctacagaggctaccgtggggacgtgcaaagggaaatcagacagttcttgcccacagagctttcaattaaatgaggaaggtgggtctgttagaaaataaatatgtcgaccggacgaggtggctcacacctgtcatcccagcaccttgcgaggccgagatgggccagtcacctgaggtcaggagtttgagacctgcctggccaacatgatgaaaacctctctacaaagaatacaaaaattagctgggcgtggtggctcacacctgtaatcccagcaactcgggaggctgaggcaggagaatcgcttgaacccgggaggcggaggttgcagtgagccaagattgtgccactgcactccagcctgggcgacagagcgagactctgtctcaataaataataataaataaataaatatcttatcttcgtaagtgctttaagaatcccaggtaaggtagatataaatggtagaaaaatacaaagtgaggatggcattagtgatcataagaaagtgtaaagttttagagaggaggcactttaaaaagacagaaatgagggggcaggaacagcacaggaaaagagaaagaggtaggctggtgtggggagagtggattggtgggattgatggaggcgtctatcttcatgtccaagacactttctcatgcgccctcaagtrgtttggaacagg

SEQ ID NO: 10814 - DNA, 544 bp, Homo sapiens
ttctatcagcttaggtaaaaacacacaaaataatcattttcaatcaagtattgtaacaatgctcttgaaagcacctayacataatagaaagaatataatgttcagaggtagagaaacctgggtatgaatccaaactttgccattaattagctgtgtgacctgtagaagttactcaatccctctgagcttccgtgtcatttataaaatagggatatcaccattaaccttatagggttctggtaaagaccaaatgaaatactgtacagtgatattctcacctccatcattaaattccaatacattttagttactgtttctcccatttcctatatctgaatatcaccaaatggataaaagatcaggctaacaatgaaaataaactttaatctcttacctaaggttagttctttaatatgctatgtttatataggtggcccttagtttgaatttaagaaatgataattcatgttgtatccaagtttattggcattgtcatctataacacctgtgattcctagaccatgaaaggctttacaaagctttg

SEQ ID NO: 10815 - DNA, 539 bp, Homo sapiens
agataatgtctaaaatcccttccagccctgaatattcatatggtaaattcttccccaacattttgttatattctgagttttattctcttccttacgaaggcaactaaagagcattaggggagaaaagggaaaagcaaatgctatagaagtgtgtttattaaccaacatagagaaataaaaaggcaacagaggggattctatttatatctccctcaaggattatgccataatctgtattatttgattttttaatgcattcattcagagctggagccctgtagggtgctctttaagcctgacactgaatgaaataattcaattaaaataagcttgaarccttttcaaggcattaaactccctgaagagaagatttaggactggctcgagttggttttagcatcagcattggtgagaccataggaaagcatcggaagggtttggcaatgagtgattctggaggcattagaagatgtgagttccaggctgcttggaaagggactatcaatattggaactgtgcttcagggaaaacagactctt

SEQ ID NO: 10816 - DNA, 539 bp, Homo sapiens
agataatgtctaaaatcccttccagccctgaatattcatatggtaaattcttccccaacattttgttatattctgagttttattctcttccttacgaaggcaactaaagagcattaggggagaaaagggaaaagcaaatgctatagaagtgtgtttattaaccaacatagagaaataaaaaggcaacagaggggattctatttatatctccctcaaggattatgccataatctgtattatttgattttttaatgcattcattcagagctggagccctgtagggtgctctttaagcctgacactgaatgaaataattcaattaaaataagcttgaagccttttcaaggcattaaactccctgaagagaagatttaggactggctcgagttggttttagcatcagcattggtgagaccataggaaagcatcggaagggtttsgcaatgagtgattctggaggcattagaagatgtgagttccaggctgcttggaaagggactatcaatattggaactgtgcttcagggaaaacagactctt

SEQ ID NO: 10817 - DNA, 542 bp, Homo sapiens
gaccactctgaatttctagccctagtttggtggtttgaaaacttaagtgtatgttagaatcaccttgggagcttgttaaaacacagattgttgacccctaatcccagaatttctgattcagtagatgggagaagttttatatttcttactagttcccaggcaatgctaatgctgctccttcagagtctagccctttgagaatcagcagcaacctccattgtgcatgagaatcacattggggagctatgaaaacgtttaggccatcctcctgataaattacatcagaatccccgtgggtggggccaacgtatgcacgtttttaaaamctgggtattccgtgtgcagccataccacaaagtaatgtagaagatacgtgagcctgaaattagtgcaccataaaagtaactaatatttactgagcacttagcatgtgacagtccccctactaaatatgttaccacatgatctcacttaatccccacacgaacttttcaagtagggactattattcccattttacttataaggagggtcagagaaag

SEQ ID NO: 10818 - DNA, 963 bp, Homo sapiens
tcctggcctaggcccagctcccagtgggaccactgggtccacagctccacccagccatttccttggccttgatatctaatcaaagaggactcacttcatagttgacagaagcctcacacggggtattggcctgggaagccacagtggggaaggcccagagaagaaatgacaaggagccttgcttcccagtgggtcagacacagggtggcgtctgcctcataggtgcctttttttttttgagatggaatttcgctcttgtcgcccaggctggagtagagtggcacgatctcggctcactgcaacctccgcctcctgggtttaagcgattctcttgccataccctcccaagcgtgggattacaggctcccgccaccacgcccagctaatttttgtatttttagtagagacgaggtttcatcatgttgaccaggctggtctcaatctcctgacctcaggtgatccgcccacctcagcctcccaaagtgctgggattacaggagtgagccaccacgcctggccatagatgcccatttgattttccagtctgggcccaacgaaacgcaaatgatccctagcagctgacagcagtctgctgcaaacacagcaaagttgagtcccagttgcagctgcagtgaccaccagccagcctctgtcatggcccccragtgctgggcccagcaaggcgggctcaagagcagtaagcagcagtggcaggggtggggcccagcgggatcccagcatcgtggctctggctcacccagacaaacccggatctgccacccaagtgcccaagtctccagcctgccagtgacagagaccagcgttggtctcctcaagggactgagtgaggagaccagtcaccacccggtgcaaactgagtcccttccacgcgggaaagggccacgagcaattcaatgttcttcttttttttgtttgtttttgagacagagtctcgcttggtcg

SEQ ID NO: 10819 - DNA, 963 bp, Homo sapiens
tcctggcctaggcccagctcccagtgggaccactgggtccacagctccacccagccatttccttggccttgatatctaatcaaagaggactcacttcatagttgacagaagcctcacacggggtattggcctgggaagccacagtggggaaggcccagagaagaaatgacaaggagccttgcttcccagtgggtcagacacagggtggcgtctgcctcataggtgcctttttttttttgagatggaatttcgctcttgtcgcccaggctggagtagagtggcacgatctcggctcactgcaacctccgcctcctgggtttaagcgattctcttgccataccctcccaagcgtgggattacaggctcccgccaccacgcccagctaatttttgtatttttagtagagacgaggtttcatcatgttgaccaggctggtctcaatctcctgacctcaggtgatccgcccacctcagcctcccaaagtgctgggattacaggagtgagccaccacgcctggccatagatgcccatttgattttccagtctgggcccaacgaaacgcaaatgatccctagcagctgacagcagtctgctgcaaacacagcaaagttgagtcccagttgcagctgcagtgaccaccagccagcctctgtcatggcccccgagtgctgggcccagcaaggcgggctcaagagcagtaagcagcagtggcaggggtggggcccagcgggatcccagcatcgtggctctggctcacccagacaaacccggatctgccacccaagtgcccaagtctccagcctgccagtgacagagaccagcgttggtctcctcaagggactgagtgaggagaccagtcaccacccggtgcaaactgagtcccttccacgygggaaagggccacgagcaattcaatgttcttcttttttttgtttgtttttgagacagagtctcgcttggtcg

SEQ ID NO: 10820 - DNA, 581 bp, Homo sapiens
ttttatccactttagcactactatctctattctttaaataaaatttccaaactgttctaaaagtcaggtgtttttgcctttaaagaagcactgtcaaatgtacttgcttccaaatccaatgagtaaagccaaatccacaggaatatatccttaacttgccatattgtgtctactttcatttccactgcaatatttcaggcacttcttagttcaggagcaatctattgtgctaacttgcttactggtgtctatgctttcactcatgtatccctccaagtcctttctctgctgccaaagttttgttattaaggccaagtttaattagttaactccacttctcaaactctctcaattgttctcattgtgggtataaataccccaaattatcatcctagtgactttggccctttataatctgaatccaatccattggcctaatcttattcttttaaatctcagctttcactctatgacctttaatcagatcactcaccactcaccagtacttsgactttctatttatttgccagtgcccagcgctatttctcttgaaatgcatgttctatgatttgaaggtatct

SEQ ID NO: 10821 - DNA, 556 bp, Homo sapiens
tggggcgtgataaggtatgtccccctcctccgccctcgttttctttaccaacgacttgctggagtgaaggatgtgtctcttgttgaagcgccgccaggcctcctggatggccttggccgccatcatctgggaaatcagcttctgccggagccaatagcccctccagttggcttggatgagcgtggctgcacgggcgtgcatcatgtccatctcgtctaccaggatgttcttgaaggcctggctctcgaccacagcccggaggcgtgggacgcggcgggacgccgtcttgccttcggcaggctgttgcggaagatgctccttggacttgaggccctcgtgctggggctgtggaggcgctttctccattttgtccrggagactggggtgagcgggggctggaggatgcaccgcccactgggtgacaactggctcgtgaactgtagctaggcggccggctgcattgccttgattaccggacaggtcagctctgcctgtgggggcggcagggggtggtcagggtgtagcaggtcctgcaaacaagaggtctcctggctgg

SEQ ID NO: 10822 - DNA, 488 bp, Homo sapiens
ccttggcttcccaaagtgctggcgttacaggcgtgagccaccttgcccggcctaatttttgaatttttagtagagatggggtttgaccatatgggtcaggctggtctcgaactcctgaggcaggaaaatcacttgaacccgggagacagcagctytgggagctgaatgggcccattccaggggctgaggtttcatcaaccaaacggtgcagctctttagaggaactcaaccagaaggggtgagaaacgggattgtgggggatgagaagaaggaacaggggccccctggacacagaagccaagcgactggctcggtaattttgagtaaacccctctgagcctcaatttccctatctgtcacaagacataagatcaccatcctcaggttgccaaagagacacaacaggctcagctgggcgcagtggctcctgcccgtaatccaagcactttgggggaccaaggtgggaggatcgctgcagcccaagagtt

SEQ ID NO: 10823 - DNA, 488 bp, Homo sapiens
ccttggcttcccaaagtgctggcgttacaggcgtgagccaccttgcccggcctaatttttgaatttttagtagagatggggtttgaccatatgggtcaggctggtctcgaactcctgaggcaggaaaatcacttgaacccgggagacagcagctctgggagctgaatgggcccattccaggggctgaggtttcatcaaccaaacggtgcagctctttagaggaactcaaccagaaggggtgagaaacgggattgtgggggatgagaagaaggaacaggggccccctggacacagaagccaagcgactggctcggtaattttgagtaaacccctctgagcctcaatttccctatctgtcacaagacataagatcaccatcctcaggttgccaaagagacacaacaggctcagctgggcgcagtggctcctgcccgtaatccaagcactttgggggaccaaggtgggaggatcrctgcagcccaagagtt

SEQ ID NO: 10824 - DNA, 1300 bp, Homo sapiens
ggattccacatctgtatcgttacacccaggggctggcagagactaaagtggggtatggagggcagagatgggggagctgccttctacggttggcctttccctctccccttgcctgcttatccactgtgctgatctcatccgcgccattatcttctcttgctcaaaggactgcagacctcctctcttccctgtctgcttccactctggccccacagacaatgtactccacactagagcagccagagtgagcttcccaaacacagactatgcttaacacccttcctcagcttcccttggctcttagaaaccaaactttggttccctgccatggtgctcagggctcagtagcacctggcccctggcccctgcctccctctctagtgtcacctctgcttttccctctattgggaaatcaccccctgccgcccaccccctgtcttctcttttgtggcaactgccattcatttttcagctcaaaacagtcacttcctccgggaagccttccctgcccctcgggcgtggccccactccagtctcatacagtcttatggggcctttgttagtggtgttggcttggcatctctctctctccttagactataaggcctctaagagggaaaccacatatttgtgtggccaaagcacagtatcactggtacctagcatcgtgcctggccggaacccacacttggtgatgtttgctgtgagagtgagcagcgtcctgctttggaatcccagtcagagcactgagagaggggcagccagacctgggagctctgtgttgcccctgccattgtccttacatctccagttagagagattttgctgggttattcttcagcctgctcttttcccacccacttgcagkgggagtggtaaaaatctagaaaaacttccagtagttaccttgtggggccacacccctgtcccagtgatggacctgtctgtaaaacacttcttgtagagccttggcctctccctggttgtcatacaagacttgtcacatagtgggtgcttaggaaacatttgctgaattcccagcagccaattattttgagtatccttattagtaggaagtacttttctcttatgatgtaatttacataaaatatatagattttaagtgttacatattttaaagtgtgtatttaatttaaaaaatgggccaaacgtgggggctcattcctgcaatcccagcacttcgggaggccaagatgggcggatcacttgaggccaggagcttgagaccagcttggccaatatggtgaaaccccatgcctaaaaatacaaaaattagctg

SEQ ID NO: 10825 - DNA, 543 bp, Homo sapiens
ggctaaccccaagtatacaaggaaatacggtgcacaccaagaagaaagaatgactcctgtctagctctgggaagagctrtaatccctctggacatttattttatactcataacagggttgtgcaaatattttaatgggcatttgctatattttgaggtgtacagtcttgttgccaggcatttatttttttgaaaagatgacttttggtattatttttattttcaagccattgcttttgttcctattctactctcacaatgtcttttctctttgcaactacctcttcagtagagagacatagacaactgtttcctgtgtgtggggaggcggttacaggtgcattagctgtgatgatggctagcaagaggtgcctgtagtttatgatctgcaccttatccttcttttccttcttttatccaagtcgagatattatatttctacctgcaggcaggaacttcctctttctccattccctttccccacctgcatccctcaagcccattatctctgtgggcacggcccaggcacaagcctgcttcactt

SEQ ID NO: 10826 - DNA, 611 bp, Homo sapiens
ataaacagcactttagtaaaacctcggccgggcgcggtggctcacgccggcaatcccagcactttgggaggccgaggcgggcggatcgtgaggtcaggagatctagaccatcctggctaacacagtgaaacccctgtctctactgaaaatacaaaaaaaattagccagcatgctggtgggcgcmtgtagtcccagctactcgggaggctgaggcaggagaatggagtgaacccgggaggcggagcttgcagtgagccaagatcgtgccactgcactccagcctgggcagcagagcgagaccccgtctcaaaaaaaaaaaaaaaaagaaaaaacaaaaacaaaaaaagaaaaacttctgaagaaatggccccaaagtcttcggttactgcgcgtgttcttagtaactacgctatattatggaaaaatcccccagaaaacattcaagggaaatgaaactgaggacaattagcaccaaaaagacatcccaagtatttttctacaaagtaattcttcatattgtcagcttgttaaatgacctgaagttccagggtatacaccaaaccacagactttcttctgaagccaaaactcaaagggcagttattatcatgc

SEQ ID NO: 10827 - DNA, 543 bp, Homo sapiens
tgggggttaaaagtacaaaaagcaaataatacgttttgtggaagaaagaagtaagaaggcatacacatatctgcttattacaaacacagcacaggattaagaaacaaacacaaaaaaacaaagcaaagtcaaaacaaaacaataagattagttatctacaaaggggaatgaattcaaagggacagggtaggaaagatacttctatgactaaagtttttggcatagtttctttcccttttgaaggtacagtgttattaaattaaattattttatcaaattataaataaacataagaatttataaataaataaaatttaactttttatttcccttaagaatgagaaggtggggagtaatctcaaagaaaaatggaataaatgaacacaattttattgcaatgaatattataatcacatagatgggatgaaagaaaggaagggaggaaggaagggagggggcragggaggctgaccaaatcaaaataatttatcaacacagtttttgtgttgggcagtccaggaggaagcagggatataattgcaa

SEQ ID NO: 10828 - DNA, 520 bp, Homo sapiens
tctcgaattcctgggctcaagcaatctgccctcctcggcctcccaaagtgctaggattagaggtatgagccacgaaacctagcctaaaatctcttttaaagagcaaatagttcaaatatgatgtatgctgtcctaatccctactaatctggttgaccttcaagaatgartttatattcatctggcatttactgccttatgtcaggcaggtatttcactaaatctcatttattcctcacagcaatccaacaaggcatggattatcattttccttcttcaaatgaggaaacatatttaggatatgttaaagtctctcaactaacaactggcaaaccagtgatcaatctacgactaggtgcctccaaatttgtgcccctagacgccttcaaatatatgtatttgacccctctgtattagaataacaggtagttcagattgcggtttgctacctatgcaggaatgtcagatacccaatgcaaacaagcaacacacgagtagtgcagaatctgagcattttagca

SEQ ID NO: 10829 - DNA, 612 bp, Homo sapiens
tgctgggcgtgtttcagtttgcttcttttagtcctaggagggaattgtacttcaacgcatgactgttacagtgtgagacactttgaaaggagaatggctggtcctcaaaaaaggctagtgaactgaagaaaaacacaaatttgtttgaaagattttgattggaaagacttctgcattcccttctcctgatagtacccaccatttactccagacttcaaccctgcaaagcagcccgtgcacttttatgtcttgacagatgtttttcctccaacacaaatgcccctctatgttagattattttctacctgtctggaacctactcctgctcatgaggcagagtgggatttgtgaaataagtatttcacttaacagtgactctgttagacctaaagggtccctcccaagttcatttatgctcccacacatagtttgcatacctggattgtgattcttaccactttggctaaaactgtccctgtgatggtaaggtgtgctacaatgcagacttttgagagcgcaggaaggaccttcrcctgattagttttgcctccattgcctaacatatggtgtaacatcgtaatcactcagtcagtgtcttgcattaatgcaaca

SEQ ID NO: 10830 - DNA, 612 bp, Homo sapiens
tgctgggcgtgtttcagtttgcttcttttagtcctaggagggaattgtacttcaacgcatgactgttacagtgtgagacactttgaaaggagaatggctggtcctcaaaaaaggctagtgaactgaagaaaaacacaaatttgtttgaaagattttgattggaaagacttctgcattcccttctcctgatagtacccaccatttactccagacttcaaccctgcaaagcagcccgtgcacttttatgtcttgacagatgtttttcctccaacacaaatgcccctctatgttagattattttctacctgtctggaacctactcctgctcatgaggcagagtgggatttgtgaaataagtatttcacttaacagtgactctgttagacctaaagggtccctcccaagttcatttatgctcccacacatagtttgcatacctggattgtgattcttaccactttggctaaaactgtccctgtgatggtaaggtgtgctacaatgcagacttttgagagcgcaggaaggaccttcacctgattagttttgcctccattgcytaacatatggtgtaacatcgtaatcactcagtcagtgtcttgcattaatgcaaca

SEQ ID NO: 10831 - DNA, 1537 bp, Homo sapiens
tggaacttattcagtctacatattcattctcttaacaatatgttttgatgagcagaagtaattaattttgatgaattccagcttgttaaattttcataattttatggatcacacttttggtatcatatctgtaaaatctttgccaaacccaaggtcacaaagattttctcctatttttttccaggaactatttttttaaaaagagaatagaagtttgtttgtctgcaggtgaagtagctcaatttgtaaatgttttaaaacaaaacatgtctgttttcttcctaaacatgtctaggaaagggctatgggttatcggttttaatatattagcttatattatactaaaaatcacagatactcagctatgtttgacctatagaaacagcagcttttaaaattgtaggcagtcaacctagtcacatatgtctttggctcagtacagaatctatctttttttttttttttttggtctggtaaagtcctatgaattagacaagccatctttaactcacgcctaattagggaaacatcttccccaggggacatacaacaggagtccacttaggggtatggactgtaaagctcaaaggtcacttggtgcgcggatctccaaagcagaggcctccacagacattttacttgaatttcatatttgaaataacattcaagtaagcaccataattaatgcagtgtgaatcttcagatacgttgcatgctaaatattaacattttggagatggctagcacagtttcctatacctctaactaggctgggtagatgcttgacactaaagtttctcctcctatctctgtgtgattaaagaggatcctgacattgtaaagcaagcttttaagtactgctagccttttaagtactgctattctttgcgacctgggattttcataatatttggaacaacaacaamaaaagatgagactaagttcagtactgaagttgagacatgactgcttctgtttctagtttcttatctagtttcttattctttttgacctgtaaagcaacgtcattattctcaatgaatgacctgataagtaagtgtggtagagtaagtatacagtgccattttccttttccagcagaggaagattacatttcccagactaccttgcatttgaatggaggcctgtgcctggatactgagggcgcctgggatgtggatggaagtggtgtatgttcttttggagaaattccagggctttattttccctaaagcctggctctatgctgggtttcctccatctccctagattaataagtttgggtaatgatttttggtcattttttccttcaaacggttgccagaagcaatactagaagagcaggtcattggatacatgaaataacattaacattcataggagaacttttcagccataggcaaatctccagcagcccggagaaacaagacattagaaagtccaaaaactcacagtagtggcaaaatcagtttagtgaaaaaaaaaacaaaaaacaaacaaacaaaaaaaacagtaataatactgacaaaaagagttg

SEQ ID NO: 10832 - DNA, 542 bp, Homo sapiens
gttggaagagctggaactgcagctgcccccatccttttcaatggcaactagcatgtggcctctagcccccacagtccccacagtagtatttrtgtccatctccaggctggaatcaataggcatgggagtcagcttctgtattttatatccttagaatgctacatgaaacccgttcgcaagcagcagcatcttctttagcccgtaagaaacctctgtgagttacgtactatcaactcacatcatagttgaaaaaactaaggctccaagaggcaaagaaactcatccaagagcacaaagttagtaagacacaaattcatggctcaatcataaattcctgttacctggagagagattaacacctctaataagtggcttccatttatttaaagtgatattcactgcaactacactctggtgcaaagactttgaggcaagcagatcttgttccaaatctggattctgccatgtactgacattgagacttgaccttatccatttctgcatctctaaaatggagcctcaaattccttcctcacagggct

SEQ ID NO: 10833 - DNA, 542 bp, Homo sapiens
gttggaagagctggaactgcagctgcccccatccttttcaatggcaactagcatgtggcctctagcccccacagtccccacagtagtatttgtgtccatctccaggctggaatcaataggcatgggagtcagcttctgtattttatatccttagaatgctacatgaaacccgttcgcaagcagcagcatcttctttagcccrtaagaaacctctgtgagttacgtactatcaactcacatcatagttgaaaaaactaaggctccaagaggcaaagaaactcatccaagagcacaaagttagtaagacacaaattcatggctcaatcataaattcctgttacctggagagagattaacacctctaataagtggcttccatttatttaaagtgatattcactgcaactacactctggtgcaaagactttgaggcaagcagatcttgttccaaatctggattctgccatgtactgacattgagacttgaccttatccatttctgcatctctaaaatggagcctcaaattccttcctcacagggct

SEQ ID NO: 10834 - DNA, 568 bp, Homo sapiens
ctttcaatgaatggaagattttaacacaaacaagagtttgtaggcagacattgagaagaagctctatctcctcaatgtagggagtctgctgggatctgcctcagttcgcctgccctgggttatggttgggaaactctgttaatacggtgattggggaaaattacagggtttgtcttattttgcatctctcagagatcactgtcctttgttgttgtctggtgtccagtgtcttgaaaactgctatttcattattttatttatatataaatatatgtattttatatataaaatattagatwtatgtatatatatatttgagacagggtctcgctctgttgctcaggctggagtgcagtggtgtgatcttggctcactgcaacctccgcctcctgggctcaagcagttcttctgcctcagcttcccaagtagctgggattacaggcacctgccaccatgctgggctaatttttgtatttttagtaaaggcgagttttcaccatgttggccaggctggtctcgaactcctggcctcaagtgatccacccaccttggcctcccaaagtgctgg

SEQ ID NO: 10835 - DNA, 568 bp, Homo sapiens
ctttcaatgaatggaagattttaacacaaacaagagtttgtaggcagacattgagaagaagctctatctcctcaatgtagggagtctgctgggatctgcctcagttcgcctgccctgggttatggttgggaaactctgttaatacggtgattggggaaaattacagggtttgtcttattttgcatctctcagagatcactgtcctttgttgttgtctggtgtccagtgtcttgaaaactgctatttcattattttatttatatataaatatatgtattttatatataaaatattagatttatgtatatatatatttgagacagggtctcgctctgttgctcaggctggagtgcagtggtgtgatcttggctcactgcaacctccgcctcctgggctcaagcarttcttctgcctcagcttcccaagtagctgggattacaggcacctgccaccatgctgggctaatttttgtatttttagtaaaggcgagttttcaccatgttggccaggctggtctcgaactcctggcctcaagtgatccacccaccttggcctcccaaagtgctgg

SEQ ID NO: 10836 - DNA, 778 bp, Homo sapiens
tcaggtgatccacctgcctcagcctcccaaagtgctgggattacaggtgtgagccaccgtgcccggccagtagaaacagaatccgggttttgaaaagaaatcaggactgagacaagacagatcccagtcctgtaagatttggattatgagaaagggaactggggcaaagtctcacactcaggagagagaagcatcttagtcacttccactggtctgcaaggtgggtgcttggagataagaaatgtaccaaaaactcagttattagaacaaaagctgctttagtaggcccattgatctaggttagtgggcaatctgaagagatggggatacagccaggatgacccatagtgcccctaaaggattattggactaaggaaatttccaatttccaaagtttagaaatccactctctttataacwgatatcttcagatgtacttggatgtaaagggtgaggacaaagatgctgtttgttcccataggcctgcttacagagtctccccagagggggttgaagtgaaagaagctcttgctcaaaaacctggtggaggaggtacgagatgccagccctcagggaaatgtgaaacatgcaggtatgagtggtccatgcttaggaatgttagaacagaggaggccaaccaggggtgccagctagagatgagctctctggaatggtgttcagtcatgtggaaatcacaccagattgggacttaaggtggagtctggcagtggtaggatagaatactttaaaagtggagggtgccaggtgaatgaatcag

SEQ ID NO: 10837 - DNA, 667 bp, Homo sapiens
tttttaatttaaagttctatataacattggaagtaatattctttatgtacaactacaatagattttatcctttttctaatacttctgttctagttacagaaccatgaatgacctctttgataactggaatgaaaatgttgtagctgcttataagattttttaaagataattctttacgacagccttgggggggtgcatgttggtgtgagagaggagtaagttaaggggatgatatgaatatcaaagrgaaactaatgaataaagaagtccaaccttaagattagtttcagcagaagtaattttccaccaaaatttcagattaccttttcacttatataggagtgtgattaattagggaagacatttgtaacacttgcacttttaaaaccatatttattatgcagcattgcaaagcagtcttttcttccacagcccccagtcccagaacaaaaaaagtatgggggaaagtacctcagaaaacccagtcacaatatgctatatttgaaaatagccattttgtggagaccttagcagaaatttggccttgaagtcatctgggggcattttaaaattcttacctgtgttagattcactagtttagatgttgataccatactaccatagccatgcatgtaatggtggtaagctttaaggttgaatatagtat

SEQ ID NO: 10838 - DNA, 576 bp, Homo sapiens
agagtggawccagggtcagaacgaagaactttgtacatggacacaacaaaatctttataatatctgacctacagaattccactattgcaatggatcagtgacttctgtgtttttttcccatcttctattttccaaatgaaaaattttactgggactgggagggttccaacatagccgaataggaacagctccagtctacagctactagcatgagagaagcagaagacgggtgacttctgcatttccagctgaggtaccgggttcatctcactggggcttgtcggacagtggatgcaggacagtgggtgcagtgcactgagtgtgagctgaagcagggcgacgcaacacctcgcctgggaagcgggaggggtcagggaattcccttccctagccaagcaaagctgtgacagatggcacctggaaaatcaggtcactcccaccctaatactgcactgttccaacacccttagcaaacggcacaccaggagatcatatcccgcgcttggctcagagggtcctacacccacggagactcactcattgctagcacagcagtctgagatcaaactgcaaggc

SEQ ID NO: 10839 - DNA, 576 bp, Homo sapiens
agagtggaaccagggtcagaacgaagaactttgtacatggacacaacaaaatctttataatatctgacctacagaattccactattgcaatggatcagtgacttctgtgtttttttcccatcttctattttccaaatgaaaaattttactgggactgggagggttccaacatagccraataggaacagctccagtctacagctactagcatgagagaagcagaagacgggtgacttctgcatttccagctgaggtaccgggttcatctcactggggcttgtcggacagtggatgcaggacagtgggtgcagtgcactgagtgtgagctgaagcagggcgacgcaacacctcgcctgggaagcgggaggggtcagggaattcccttccctagccaagcaaagctgtgacagatggcacctggaaaatcaggtcactcccaccctaatactgcactgttccaacacccttagcaaacggcacaccaggagatcatatcccgcgcttggctcagagggtcctacacccacggagactcactcattgctagcacagcagtctgagatcaaactgcaaggc

SEQ ID NO: 10840 - DNA, 576 bp, Homo sapiens
agagtggaaccagggtcagaacgaagaactttgtacatggacacaacaaaatctttataatatctgacctacagaattccactattgcaatggatcagtgacttctgtgtttttttcccatcttctattttccaaatgaaaaattttactgggactgggagggttccaacatagccgaataggaacagctccagtctacagctactagcatgagagaagcagaagacgggtgayttctgcatttccagctgaggtaccgggttcatctcactggggcttgtcggacagtggatgcaggacagtgggtgcagtgcactgagtgtgagctgaagcagggcgacgcaacacctcgcctgggaagcgggaggggtcagggaattcccttccctagccaagcaaagctgtgacagatggcacctggaaaatcaggtcactcccaccctaatactgcactgttccaacacccttagcaaacggcacaccaggagatcatatcccgcgcttggctcagagggtcctacacccacggagactcactcattgctagcacagcagtctgagatcaaactgcaaggc

SEQ ID NO: 10841 - DNA, 576 bp, Homo sapiens
agagtggaaccagggtcagaacgaagaactttgtacatggacacaacaaaatctttataatatctgacctacagaattccactattgcaatggatcagtgacttctgtgtttttttcccatcttctattttccaaatgaaaaattttactgggactgggagggttccaacatagccgaataggaacagctccagtctacagctactagcatgagagaagcagaagacgggtgacttctgcatttccagctgaggtaccgggttcatctcactggggcttgtcggacagtggatgcaggacagtgggtgcagtgcactgagygtgagctgaagcagggcgacgcaacacctcgcctgggaagcgggaggggtcagggaattcccttccctagccaagcaaagctgtgacagatggcacctggaaaatcaggtcactcccaccctaatactgcactgttccaacacccttagcaaacggcacaccaggagatcatatcccgcgcttggctcagagggtcctacacccacggagactcactcattgctagcacagcagtctgagatcaaactgcaaggc

SEQ ID NO: 10842 - DNA, 564 bp, Homo sapiens
tgcactgtttatcaaaaacagagacagatatgagagaccaagaaactgaggtgtgcatgcatgagacagacagacagagaaagagagagacacggagagagattgttctaggtcttttaattttgtttgccattgtgtgagatctgactgttcttcctgggtttacatccatgaaatatctgtgtatcattctattacttttagtggcaaaacccacaattatttttggaccaacctaataatagtttctctttttctctgaagctaatttgagcaggtttctagtccttgtactagactacgtttaagacatatctgtctctcttctgggaaatcttaaggacttccaagttaacatgtctcattaacttctttcactcacrgttcctaaaatagagcctgacacagagttgatgctcaatgaatgtttgttccccaaatgaataaacatacttcttcaactagtcactaatgtcttgatttgttaagatgaacccgaaaaaaaaagaattttatctcttaggacatggaaaagttcaatgaaggggaaacattgttcatcca

SEQ ID NO: 10843 - DNA, 552 bp, Homo sapiens
aacaacaaataaaaggatagaagacaaaaggcataatatgattgtaccaattatcctataaattccaagtattccacatctccttttgttctttctaatttcatgtaatgtttaatgttttaaagtactaatctgtcacactaaaaaaagtaaaggtgttattttttgtcaattctacatttcctattctgacccaatagcttaaaacatttgcagggggtggggcacatacatttactctattcatataacagtttcccaatttaaaaactrtatcatgaaatcctatgttgaataggaactttgtggtaatttaatctatggttgggtgccactctgatattgatattgagttatcttggaagaggtagatagaattgattgaagatttttctgcagtcagtgcacattataagatcttagattagaacacttactttttagagtaatctctgtatctctggcttgattttgtgatactgccatccttcttacgagtgctcttggccagacacagtggctcatgcctgtaatcccagcactttaggaggc

SEQ ID NO: 10844 - DNA, 552 bp, Homo sapiens
aacaacaaataaaaggatagaagacaaaaggcataatatgattgtaccaattatcctataaattccaagtattccacatctccttttgttctttctaatttcatgtaatgtttaatgttttaaagtactaatctgtcacactaaaaaaagtaaaggtgttattttttgtcaattctacatttcctattctgacccaatagcttaaaacatttgcagggggtggggcacatacatttactctattcatataacagtttcccaatttaaaaactgtatcatgaaatcctatgttgaataggaactttgtggtaatttaatctatggttgggtgccactctgatattgatattgagttatcttggaagaggtagatagaattgattgaagatttttctgcagtcagtgcacattataagmtcttagattagaacacttactttttagagtaatctctgtatctctggcttgattttgtgatactgccatccttcttacgagtgctcttggccagacacagtggctcatgcctgtaatcccagcactttaggaggc

SEQ ID NO: 10845 - DNA, 517 bp, Homo sapiens
tgaatgactattccattcaaactaaggggcataagagggaaaaaactctgccccaaatcctaaaaaggaattttatcccataaacatatgcatgaaagaggctgcctttcactrttcaaagatgaaagcagcccttcctgcactccgtggctggtactgcctcattagtttaacttacgcaaaataagaacactctttgaagctaaaaataatccatgagtttttaaaaataaaattattattccaaatttcctaaaaatgttatggcaaatgccaagcacgcagaactgattctgaacacttttttccacttacgtaaatcgaatccactgcaattgctccctcttttgaaaaatgcttaactgtaaattatgcatgacaggccgaaaacagtggctgtacacacatgtagcaattggctgctattatccaagcagctagcaggtagttattgggcacccagtgtgctagatacagcaggggaaatagaaacagataaagacatggccctatagcc

SEQ ID NO: 10846 - DNA, 517 bp, Homo sapiens
tgaatgactattccattcaaactaaggggcataagagggaaaaaactctgccccaaatcctaaaaaggaattttatcccataaacatatgcatgaaagaggctgcctttcactattcaaagatgaaagcagcccttcctgcactccgtggctggtactgccycattagtttaacttacgcaaaataagaacactctttgaagctaaaaataatccatgagtttttaaaaataaaattattattccaaatttcctaaaaatgttatggcaaatgccaagcacgcagaactgattctgaacacttttttccacttacgtaaatcgaatccactgcaattgctccctcttttgaaaaatgcttaactgtaaattatgcatgacaggccgaaaacagtggctgtacacacatgtagcaattggctgctattatccaagcagctagcaggtagttattgggcacccagtgtgctagatacagcaggggaaatagaaacagataaagacatggccctatagcc

SEQ ID NO: 10847 - DNA, 305 bp, Homo sapiens
ccaacctcaggtgatccacacgcctcagcctcccaaagtgcagggattacaggcgtgagccaccacacctggctattactttaatttttaagttactatgagtacattttttaaacaaccaawctaaacttaagcctcagtgactaaataccaaacaggatttagagtgtcctctccctgaacctagtccctgcacccttaccccagagatcttttcctctgtgactttcttcttcccattcagcttaatggggagacacataaacagctgggagtcagctgtaaagtctcttagaaagcaggca

SEQ ID NO: 10848 - DNA, 932 bp, Homo sapiens
ttttcctgctccttgaggtggatgatgctagagccccctcccagggctgrtggcaattggggagagagtccaagggaggggcctggtgacacagttctggagttggggaaaggtacatagaagttcagattctaggctgggcacggtggctcacgcctgtaatcccaacactttgggaggccgaggtgggcggatcacctgaggtcagaagcttgagaccaggatggccaacatggtgaaaccccgtctctactaaaaatacaaaattagtctgtaatcccagctattcaggagtctgaggcaggagaatcacttgaacctgggaggcggaggttgcagtgaaccgagatcgcaccactgcactccagcctaggcaacagagacagacattgtctcaaaaagaaaaaaaagttcagggcaggcgtggcggctcatgcctgtaataccagcactttgggaggctgaggtgggcggatcacctgaggtcaggagttcgagaccagcctggccaacatggtgaaactccgtctctactaaacatacaaaaattagccaggtgtggtggcgtgcacctgtaatcccagctacttgagaggctgaggcaggagaatcgctggaacctgggaggcaaaggctgcaatgagtcaagatctcaccactgcactctagcctgggcaacacagtgagactccatctcaaaaagttcagatttagtttcagtgtacaatgagcagtggctctagccactgttgttactcatgggtcagacaggcccagcgctggtcccccgttcaccctctctgcctctttctgttgcaggaagccttgggagcaggtccccaaaaagccaaagcggaagaaaagtaagtggaggctcagcctgggggaggtggggagagttgggagcggtgggaatatggagatggaggccc

SEQ ID NO: 10849 - DNA, 932 bp, Homo sapiens
ttttcctgctccttgaggtggatgatgctagagccccctcccagggctgatggcaattggggagagagtccaagggaggggcctggtgacacagttctggagttkgggaaaggtacatagaagttcagattctaggctgggcacggtggctcacgcctgtaatcccaacactttgggaggccgaggtgggcggatcacctgaggtcagaagcttgagaccaggatggccaacatggtgaaaccccgtctctactaaaaatacaaaattagtctgtaatcccagctattcaggagtctgaggcaggagaatcacttgaacctgggaggcggaggttgcagtgaaccgagatcgcaccactgcactccagcctaggcaacagagacagacattgtctcaaaaagaaaaaaaagttcagggcaggcgtggcggctcatgcctgtaataccagcactttgggaggctgaggtgggcggatcacctgaggtcaggagttcgagaccagcctggccaacatggtgaaactccgtctctactaaacatacaaaaattagccaggtgtggtggcgtgcacctgtaatcccagctacttgagaggctgaggcaggagaatcgctggaacctgggaggcaaaggctgcaatgagtcaagatctcaccactgcactctagcctgggcaacacagtgagactccatctcaaaaagttcagatttagtttcagtgtacaatgagcagtggctctagccactgttgttactcatgggtcagacaggcccagcgctggtcccccgttcaccctctctgcctctttctgttgcaggaagccttgggagcaggtccccaaaaagccaaagcggaagaaaagtaagtggaggctcagcctgggggaggtggggagagttgggagcggtgggaatatggagatggaggccc

SEQ ID NO: 10850 - DNA, 932 bp, Homo sapiens
ttttcctgctccttgaggtggatgatgctagagccccctcccagggctgatggcaattggggagagagtccaagggaggggcctggtgacacagttctggagttggggaaaggtacatagaagttcagattctaggctgggcacggtggctcaygcctgtaatcccaacactttgggaggccgaggtgggcggatcacctgaggtcagaagcttgagaccaggatggccaacatggtgaaaccccgtctctactaaaaatacaaaattagtctgtaatcccagctattcaggagtctgaggcaggagaatcacttgaacctgggaggcggaggttgcagtgaaccgagatcgcaccactgcactccagcctaggcaacagagacagacattgtctcaaaaagaaaaaaaagttcagggcaggcgtggcggctcatgcctgtaataccagcactttgggaggctgaggtgggcggatcacctgaggtcaggagttcgagaccagcctggccaacatggtgaaactccgtctctactaaacatacaaaaattagccaggtgtggtggcgtgcacctgtaatcccagctacttgagaggctgaggcaggagaatcgctggaacctgggaggcaaaggctgcaatgagtcaagatctcaccactgcactctagcctgggcaacacagtgagactccatctcaaaaagttcagatttagtttcagtgtacaatgagcagtggctctagccactgttgttactcatgggtcagacaggcccagcgctggtcccccgttcaccctctctgcctctttctgttgcaggaagccttgggagcaggtccccaaaaagccaaagcggaagaaaagtaagtggaggctcagcctgggggaggtggggagagttgggagcggtgggaatatggagatggaggccc

SEQ ID NO: 10851 - DNA, 584 bp, Homo sapiens
tcaaggaatcattattcctatcattcagtgagtcataaaagaacatgttggaaggtcatttgtaggacaatattcttaaattctagaaaactgcagttatcttcgagaactaaagatattgaacaaaatttttggaatatttattacacgtttggtaggctggtaagatgaactgctaacaagaattaaatacattaaacagtatgagttcattactttcctttttaaagctttaaaatactgtgttccacatatatacaggtatatttaaaaggatattcacggcagcattggtatgacaaaacaacacaaagaaacaaataaaaccaatctggaaacaactcaaatgtccatcattatggatttattatatatatatatatatatatatrtatgtgtatatatatatatatatatgtatgtgtgtatatatatatatatgtatgtatatatatacatgaatactatgtgactaatgaaaagagtgaagtagaatttataagtacttacatggaaagagagccaagagatacaagatgataaacacgatgtgcaaaacaatatttaatgtatgatgagtatgt

SEQ ID NO: 10852 - DNA, 584 bp, Homo sapiens
tcaaggaatcattattcctatcattcagtgagtcataaaagaacatgttggaaggtcatttgtaggacaatattcttaaattctagaaaactgcagttatcttcgagaactaaagatattgaacaaaatttttggaatatttattacacgtttggtaggctggtaagatgaactgctaacaagaattaaatacattaaacagtatgagttcattactttcctttttaaagctttaaaatactgtgttccacatatatacaggtatatttaaaaggatattcacggcagcattggtatgacaaaacaacacaaagaaacaaataaaaccaatctggaaacaactcaaatgtccatcattatggatttattatatatatatatatatatatatgtatgtrtatatatatatatatatatgtatgtgtgtatatatatatatatgtatgtatatatatacatgaatactatgtgactaatgaaaagagtgaagtagaatttataagtacttacatggaaagagagccaagagatacaagatgataaacacgatgtgcaaaacaatatttaatgtatgatgagtatgt

SEQ ID NO: 10853 - DNA, 584 bp, Homo sapiens
tcaaggaatcattattcctatcattcagtgagtcataaaagaacatgttggaaggtcatttgtaggacaatattcttaaattctagaaaactgcagttatcttcgagaactaaagatattgaacaaaatttttggaatatttattacacgtttggtaggctggtaagatgaactgctaacaagaattaaatacattaaacagtatgagttcattactttcctttttaaagctttaaaatactgtgttccacatatatacaggtatatttaaaaggatattcacggcagcattggtatgacaaaacaacacaaagaaacaaataaaaccaatctggaaacaactcaaatgtccatcattatggatttattatatatatatatatatatatatgtatgtgtrtatatatatatatatatgtatgtgtgtatatatatatatatgtatgtatatatatacatgaatactatgtgactaatgaaaagagtgaagtagaatttataagtacttacatggaaagagagccaagagatacaagatgataaacacgatgtgcaaaacaatatttaatgtatgatgagtatgt

SEQ ID NO: 10854 - DNA, 558 bp, Homo sapiens
tgcaggaagggccttggtaacatgatctccagcatgccagggattgtcactatgtacttactatcagtcatggggtcctagtttcagtctggccagcaagggacccgagtctagatctcccttatccactttctgaagcctcttccagtaacagctgtcttcaagttttcctagaagcaggtctcaagaattcaagcgctaactttctkcctttcccttttcctcatttccctattcttttactatcatttcctagtaacctcttctgaatgaagggcacattgtcaagcaagttaaccctgtgggaggactcagaaccagagggtcgagattatcccacccgagtggcaattgggctgaagtatttatataagactttccatcagtccccagatggggtggtttccaggggtgcagagtcctgggtgcctgaggtctatggtatgtgcaaggacagaagactgcagtggctggagacagtgctcaatgaggagggcgagagggtggtggtcacaccatgtgcactataggaaaaggcagaaaggggcactgatattc

SEQ ID NO: 10855 - DNA, 543 bp, Homo sapiens
caataaaactgaaacacacatatgaaaataattcttaaaaacctgtgattcagcgataaatatgcttcctgactgatgcattcaataatgagagctaccggtgggcctggcacctccagtgagctccgagtgacggtgcacgtctgcaatgctcaagacgtctgcaaccgcagaacgtggcatgaaaatacagcttgtttctgtggatgacgcagcaacaagaaatgctaaatttcagccagagggcggtagaaatgaagatggtgggattttccccatccaggttcttggaccctcctgaatttcactcagagctgccaaggtttcaggagtcccgtccagggttgtccttggccagccccacagggcaagaggggttgtggttataggwtgcacaggccctggtggcttggggcgcgggtatgtgactgggacacatcaaagaaagtacagtgctccatgctaggtgttctgatgctaatgagcaggggggctgtggagcccagcgaggaccccaacccaatctagggtggctaggggagg

SEQ ID NO: 10856 - DNA, 564 bp, Homo sapiens
gtccctgccatgaagtctgacactttagggaagctggggtcttgtcacccagagactgggcttcagaagcagcaggaggctgcaagtcctgacacgaatgtgctttttgagccttttcttgtgtcacatgtgggtctgccccttcgtcacatgccaagcccagactccagacccccagcgctgggctggggagccatggctactgcagggcaaatggctttgcacccyagtccttgtccttcatcagttccttggctcaggggactttctccagctgtgggcctgagtctccacgggtgctttgggacagagaagggagagagctaccctgtgttggtcactactccccgccagacagcgtgccaggcacacttgcaaaatgagcagatgcaggcagagcacccggggccacatcttggcgtcactacttgctagtggtctccaccttccatgcctccatttccacttctgcaaaatggggatgatgctggaactgtcccaggggattctggtgagcatcaatgggctgtttcacagagcgagtgctcggtgagtggtaacagc

SEQ ID NO: 10857 - DNA, 563 bp, Homo sapiens
ggcgcatgcctgtagtcccagctactcaggaggctgaggcacgagaatcgcttgaacctgggaggcggaggttgcagtgaggcgaaatcatgccactgtactccagcctgggtgacagcgtgaggctccacctcaaaaaaaaaaaagaaaacatctgaattcaagttttgaagtattttttaaaaactacaagtatgatcaacacatttacattatagaagacaagcacaatcatcttgacatacattctagatttatccactttgcacacatattttagaaagattttgagggattcaacataatatcttaaaatgaccacttaattttagtaaaaatagattcccagcttctgttaattgactataactatggtctgagagtgattagattttaaagtgtgtgtgtgtgtgtgtaaaattctcacaggaaaatcaatagtagtgcactgcactgaagtgtaatgagttttactctgcagtttgtcctgctccagagatgccaggccagtaagttacatggagtaagttcacataacaygactggctttatagactctaacc

SEQ ID NO: 10858 - DNA, 532 bp, Homo sapiens
tataatacttgataggatgaagctattctccatgtttctataagttctgttagagaatgcatctgggtctatccaaccatgttcaatgttttcaaatgccaaatgagggcttcagaagaaccccttgaggaagaagagatgacatttgccatgctctgttaatatcaactcaggaagaatgyatctggcaacacatttatcctgataaacatgacgatagggaatttttttgtttagcattggcagcgtgtatttactgctacatctgtatatgggctgtcaggtcacatgaagaagccatagcagaagacagttgcagggaatagcttatgtaatgagatcaagccagtgaaagtctgggttcaagctgtaatattacagtgtgaagagcccacttatctgcccaagtcaaggatattttcttctctttttggtcactgttcatgaaattacattgttatccccttcagctgttcaatgagccaatagaaaaatgaataaaatgcataaaaatgggaggtaaagaagaaag

SEQ ID NO: 10859 - DNA, 529 bp, Homo sapiens
caaatttagataagaatagcctcatatttctgactgagtcaaagagaaactgacagtaaatggcactttggtgtaagaaaactattggctatgttgatcaaaaggatcatagatccaaagccacaacttgacaatggatattgggcagttggaggctgttgcaaaacttaccatcaaaggttggggctcctgtggttggcaarctagtcacaaagtaaattgattgatgttggatggcccattcagtctcagggggagtatccttgtggtgaggtgtactgtgagagcacagcacagcccatccctgtggtctttccattttggacatttttctggactctggtagatctgaaattcaacataaaaatgtgattcttaatttctagagatctggatgctctgccttccagctatgcctgttttttatatgtgtaagtattaggcagtgggagctacaaatgctttgtcagtcctattcattaatgggttctacctgatttattttttgttaagaaacaaaaataaatta

SEQ ID NO: 10860 - DNA, 542 bp, Homo sapiens
ggtacatgtgcaggtttgttacatggataaatttcaagtcatggaagtttggtgtacacaaattattttgtcacccaagtaactagtatagtacccaataggtagttgtttgatcatcaccctctttctaccctccaccctcaagtaggccctgatgtctatctattgctcccttcattatgtccatatgtattcagtgtttttctcctacttatcaatgagaacatgaagtatttggttttccattcctgtgtgatttgctgaggataatggcctccagctgcatccatgttgctkcaaaggacatgattttcttctttttaaggctgcatagtattgcatggtgtatatatatatatatatatatatacacacacaccatggaatatattccatggatatatatatacaccatggaatatagtccatggatcgtattccatggtgtgtgtgtgtgtgtgtgtgtgtgtgtatatatataaaacatggaatatattccattgattccatgtctttgctatcatgaatagtgcttcagtgaa

SEQ ID NO: 10861 - DNA, 525 bp, Homo sapiens
tcttaacaactttaatttttttttttttttttttgagacggagtcttgctctgtctcccaggctggagtgcagtggcgcgatctcggctcactgcaagctccacgtcccaggttcacrccattctcttgcctcagccttccgagcagctgggactacaggcgcccgccaccacgcccggctaattttttgtatgtttagtagagacggggtttcaccgtgttagccaggatggtctcgatctcctgaccttgtgatccgtctgcctcggcctcccaaagtgctgggattacaggcttgagccaccacgcccggcaacaactttaaaaataaatattcactgattttcttccatgttttacatctcacttttatatgaactactgaaactatttcattttgtgacaaaacagtaagtttcctgatgtgaactgtgaagctattgctgtttcagtgaattcccattttagccaacttgcctggataaatacaccaagaaagacaaatagttgtttgggcttcattaa

SEQ ID NO: 10862 - DNA, 525 bp, Homo sapiens
tcttaacaactttaatttttttttttttttttttgagacggagtcttgctctgtctcccaggctggagtgcagtggcgcgatctcggctcactgcaagctccacgtcccaggttcacaccattctcttgcctcagccttccgagcagctgggactacaggcgcccrccaccacgcccggctaattttttgtatgtttagtagagacggggtttcaccgtgttagccaggatggtctcgatctcctgaccttgtgatccgtctgcctcggcctcccaaagtgctgggattacaggcttgagccaccacgcccggcaacaactttaaaaataaatattcactgattttcttccatgttttacatctcacttttatatgaactactgaaactatttcattttgtgacaaaacagtaagtttcctgatgtgaactgtgaagctattgctgtttcagtgaattcccattttagccaacttgcctggataaatacaccaagaaagacaaatagttgtttgggcttcattaa

SEQ ID NO: 10863 - DNA, 525 bp, Homo sapiens
tcttaacaactttaatttttttttttttttttttgagacggagtcttgctctgtctcccaggctggagtgcagtggcgcgatctcggctcactgcaagctccacgtcccaggttcacaccattctcttgcctcagccttccgagcagctgggactacaggcgcccgccwccacgcccggctaattttttgtatgtttagtagagacggggtttcaccgtgttagccaggatggtctcgatctcctgaccttgtgatccgtctgcctcggcctcccaaagtgctgggattacaggcttgagccaccacgcccggcaacaactttaaaaataaatattcactgattttcttccatgttttacatctcacttttatatgaactactgaaactatttcattttgtgacaaaacagtaagtttcctgatgtgaactgtgaagctattgctgtttcagtgaattcccattttagccaacttgcctggataaatacaccaagaaagacaaatagttgtttgggcttcattaa

SEQ ID NO: 10864 - DNA, 519 bp, Homo sapiens
attccaactcttgactaaaatttgacatctaagaaaatcaatattttagctctattttcatacttgaaattttccctcagcctaattttttaaaatttctacttctttttttttttttttttttttttgagatggagtctcactctgttgcccaggctgaagtgcagtggtgtgatctcggctcactgcaatctctggctcccgggttcaagtgattttcctgtgtcagcctcccaagtagctgcaattacaggcgtgcgccaccatgcctggcttattttttgtatttttggtagagacaggtttcaccatgctggccaggcttggctcaaactcctgacctcgtgatcggcctgcctcggcctcccaaagtgctgggattacaggcgagagccaccacgcctggacaatttctacttcatttatttcagygtccagtgtcctaactatagttacatatgagtgagagagatctagtctgcactcatcacttcacacgggtgggaaaacgggcagggg

SEQ ID NO: 10865 - DNA, 519 bp, Homo sapiens
attccaactcttgactaaaatttgacatctaagaaaatcaatattttagctctattttcatacttgaaattttccctcagcctaattttttaaaatttctacttctttttttttttttttttttttttgagatggagtctcactctgttgcccaggctgaagtgcagtggtgtgatctcggctcactgcaatctctggctcccgggttcaagtgattttcctgtgtcagcctcccaagtagctgcaattacaggcgtgcgccaccatgcctggcttattttttgtatttttggtagagacaggtttcaccatgctggccaggcttggctcaaactcctgacctcgtgatcggcctgcctcggcctcccaaagtgctgggattacaggcgagagccaccacgcctggacaatttctacttcatttatttcagcgtccagtgtmctaactatagttacatatgagtgagagagatctagtctgcactcatcacttcacacgggtgggaaaacgggcagggg

SEQ ID NO: 10866 - DNA, 634 bp, Homo sapiens
ccaccaccccctgggccattggcagcccctgcccggttgtgaggcctggcctgagtggtgctgacaatcaggagtgggagggggcctgcctggctctgagctcaggagtgtgttgggaaattccgccaccctcccaygcaggcagggaagagttaagtggctgccttgtccctcatgggtcccagaggcctcttcactccttttacagactgggtctcctaaggaaactgccgggcagccggcccctcccccagcatcctcacatcttgccttctttggtcctctctccccatgagaaccacaccacccagggcctctagcttcccaagatggggacacttggaagtagagatttaaaaactgtctttgtaacacacacacacacacacacacacacacacacacacacacacagtatccggctgcttgtatccatgtagcagtgcccccctccccccccaccacagacacacacacagagtacccggctgctcatatccatgtagcatcacacacacacacacacacacacacacacacacacacacacagtatccggctgcttgtatccatgtagcagtgccccccttcccccccccacagacacacacacagagtacccggctgcttatat

SEQ ID NO: 10867 - DNA, 634 bp, Homo sapiens
ccaccaccccctgggccattggcagcccctgcccggttgtgaggcctggcctgagtggtgctgacaatcaggagtgggagggggcctgcctggctctgagctcaggagtgtgttgggaaattccgccaccctcccacgcaggcagggaagagttaagtggctgccttgtccctcatgggtcccagaggcctcttcactccttttacagactgggtctcctaaggaaactgccgggcagccggcccctcccccagcatcctcacatcttgccttctttggtcctctctccccatgagaaccacaccacccagggcctctagcttcccaagatggggacrcttggaagtagagatttaaaaactgtctttgtaacacacacacacacacacacacacacacacacacacacacacagtatccggctgcttgtatccatgtagcagtgcccccctccccccccaccacagacacacacacagagtacccggctgctcatatccatgtagcatcacacacacacacacacacacacacacacacacacacacacagtatccggctgcttgtatccatgtagcagtgccccccttcccccccccacagacacacacacagagtacccggctgcttatat

SEQ ID NO: 10868 - DNA, 634 bp, Homo sapiens
ccaccaccccctgggccattggcagcccctgcccggttgtgaggcctggcctgagtggtgctgacaatcaggagtgggagggggcctgcctggctctgagctcaggagtgtgttgggaaattccgccaccctcccacgcaggcagggaagagttaagtggctgccttgtccctcatgggtcccagaggcctcttcactccttttacagactgggtctcctaaggaaactgccgggcagccggcccctcccccagcatcctcacatcttgccttctttggtcctctctccccatgagaaccacaccacccagggcctctagcttcccaagatggggacacttggaagtagagatttaaaaactgtctttgtaacacacacacacacacacacacacacacacacacacacacasagtatccggctgcttgtatccatgtagcagtgcccccctccccccccaccacagacacacacacagagtacccggctgctcatatccatgtagcatcacacacacacacacacacacacacacacacacacacacacagtatccggctgcttgtatccatgtagcagtgccccccttcccccccccacagacacacacacagagtacccggctgcttatat

SEQ ID NO: 10869 - DNA, 532 bp, Homo sapiens
tgttgtagctatagtgataacaattcttcagtgcctccaacttgccagcctccaaaattatctgtacctaatcctcagaatagtccaataagctagatgctattagccccatctgacaaatgagaaaactggaatttagaaagattagttaatggggctaaggtggcgcagtaagtggcagagttgtgattcaaatatagatccaagtaactccaaggctaatgtcctttcaccaaatactgcctttcagattagaaatattcagagtttttgtggtggccagcctccawgatggtccccagtgatcacccttcttggtattctcagccttggattgtccacctcatgaaagtccctgagccagagctacctagccaatttacttccagattcagaacccacagatactgtgtaagataatacatgctcattgtttaagaggctaggatttggcataatatgctgtgaagcaattgacaactcatctaacccttatcattcttactcagcttggaacgtgcttccttgggga

SEQ ID NO: 10870 - DNA, 532 bp, Homo sapiens
tgttgtagctatagtgataacaattcttcagtgcctccaacttgccagcctccaaaattatctgtacctaatcctcagaatagtccaataagctagatgctattagccccatctgacaaatgagaaaactggaatttagaaagattagttaatggggctaaggtggcgcagtaagtggcagagttgtgattcaaatatagatccaagtaactccaaggctaatgtcctttcaccaaatactgcctttcagattagaaatattcagagtttttgtggtggccagcctccatgatggtccccagtgatcacccttcttggtattctcagccttggattgtccacctcatgaaagtccctgagccagagctacctagccaatttacttccagattcagaacccacagatactgtgtaagataatacatgctcattrtttaagaggctaggatttggcataatatgctgtgaagcaattgacaactcatctaacccttatcattcttactcagcttggaacgtgcttccttgggga

SEQ ID NO: 10871 - DNA, 537 bp, Homo sapiens
tgcagccttgagatcatttcttctcatatggcagattcatgagtgctcactatggtagggacaaaaattctacttaaataaaatgattatggactttatttaaatagtcttgtaaataaatatgaaaaatgcaccagcattttactctcacttctgagaatttatataataaaaattaattctaaagaaggaaaaagctccccayaatcccagaattttggaggacgaggcgagtggatcactcgaggtcaggagtttgagactagcctggccaacatggtgaatccccgtctccactaaaaatacaaaaattagccaggcatggtggtgcgcccctgtaattccagctactcgggaggctgaggcaggagaatgttttgaacctgggaggcggaggttgcagtaagccaagatcgtgccactgcactccagcttgggcaatagagtgagactctgtctcagaaaaaaataaaaaaagaaggaaatagctttatgcacagagtccaatataattaactttaaaagaccaaacaatct

SEQ ID NO: 10872 - DNA, 537 bp, Homo sapiens
tgcagccttgagatcatttcttctcatatggcagattcatgagtgctcactatggtagggacaaaaattctacttaaataaaatgattatggactttatttaaatagtcttgtaaataaatatgaaaaatgcaccagcattttactctcacttctgagaatttatataataaaaattaattctaaagaaggaaaaagctccccataatcccagaattttggaggacgaggcgagtggatcactygaggtcaggagtttgagactagcctggccaacatggtgaatccccgtctccactaaaaatacaaaaattagccaggcatggtggtgcgcccctgtaattccagctactcgggaggctgaggcaggagaatgttttgaacctgggaggcggaggttgcagtaagccaagatcgtgccactgcactccagcttgggcaatagagtgagactctgtctcagaaaaaaataaaaaaagaaggaaatagctttatgcacagagtccaatataattaactttaaaagaccaaacaatct

SEQ ID NO: 10873 - DNA, 535 bp, Homo sapiens
agcctttctctgatttttttttttctctgatgacttgtcttttattttttctaatatagaggttgcagagtgatggcctgwgagttggctatggccttcagttatgttttgggggacttcacagttttattttttagtcaatgtttaaaccctggagatttcggccgggtgcagtggctcacacctataatcccagcaattcaggaggccgaggcaggcagaccacctgaggtcaggagttcgagaccagcctgaccaacatacagaaaccccatctctactaaaaatacaaaattagccaggcgtggtggtgcatgcctgtaatcccagctactcgggaggctgaggcaggagaatcgcttgaacccgggaggcggaggttttggtgagccgagatcgcacccttgcactccagcctgggcaactagagtgaaaactctgtctcaaaaaaaaaaaaaattcacattcacaaaatgtgaattggagatttcacattcacattcacaaaacaaaaaaatctctgccttcttaatca

SEQ ID NO: 10874 - DNA, 535 bp, Homo sapiens
agcctttctctgatttttttttttctctgatgacttgtcttttattttttctaatatagaggttgcagagtgatggcctgagagttggctatggccttcagttatgttttgggggacttcacagttttattttttagtcaatgtttaaaccctggagatttcggccgggtgcagtggctcacacctataatcccagcaattcaggaggccgaggcaggcagaccacctgaggtcaggagttcgagaccagcctgaccaacatacagaaaccccatctctactaaaaatacaaaattagccaggcgtggtggtgcatgcctgtaatcccagctactcgggaggctgaggcaggagaatcgcttgaacccgggaggcggaggttttggtgagccgagatcgcaccmttgcactccagcctgggcaactagagtgaaaactctgtctcaaaaaaaaaaaaaattcacattcacaaaatgtgaattggagatttcacattcacattcacaaaacaaaaaaatctctgccttcttaatca

SEQ ID NO: 10875 - DNA, 535 bp, Homo sapiens
agcctttctctgatttttttttttctctgatgacttgtcttttattttttctaatatagaggttgcagagtgatggcctgagagttggctatggccttcagttatgttttgggggacttcacagttttattttttagtcaatgtttaaaccctggagatttcggccgggtgcagtggctcacacctataatcccagcaattcaggaggccgaggcaggcagaccacctgaggtcaggagttcgagaccagcctgaccaacatacagaaaccccatctctactaaaaatacaaaattagccaggcgtggtggtgcatgcctgtaatcccagctactcgggaggctgaggcaggagaatcgcttgaacccgggaggcggaggttttggtgagccgagatcgcacccttgcactccagcctgggcaacwagagtgaaaactctgtctcaaaaaaaaaaaaaattcacattcacaaaatgtgaattggagatttcacattcacattcacaaaacaaaaaaatctctgccttcttaatca

SEQ ID NO: 10876 - DNA, 600 bp, Homo sapiens
gagactctgtcttaaaaaaaaaaaagaaaatgaaaaagaaaaaatgacaaaagacattatttagctgttaatatgatttacatacatttcaaaaaagcagagaaaattgtctatatataatctaaatcccttaagcaaagagggaatagcaaaatatttttttggaacttattgaagagttttgaactcttggacatctgaaatttgcacactctatgcacttgacagaatgtttatgaaggaaaaaccagaaaagagaaagatgttataaaaaaatccatgagtgcacaagaccaatgcaacagaatagagagcccagaaataatgccaccctcctacaaccatcagatttttgatgaagctgacaagagaaatgtgggaaggattctctatttaataaacagtgctggaataactacctaacattatgtagacgactgaagctagacctcttcattataccgtatacaaaaatcaactcaagataaattaaagacttaagtgtaaaacttaaaattatggcggggygcggtggctcatgcctgtaatcccagcactttgggaggccgaggcgggtggatcacgaggtcaggagatcga

SEQ ID NO: 10877 - DNA, 625 bp, Homo sapiens
tagctgggcatggtggtgcacacttgtaatcccagctactctggaggctgaggcaggagaattgcttcaaccaggaaacagaggttgcagtgagccaagattgcaccactgcactccagcctgggcaacagagtgagattccatctccactcagccaaaaaaaaaatctttctaccatgcctctctgactaaacctccactttacctcccttttcttcttttccaatcaccacatactttttcttccctattttatactatgctctggtttctctctagatcatataaatcttttgcctgttactacaaacatactgtaaatttgaaacaattcacaagactaaatatttaaaattgagtggaatcaataagatatttttatttcaatgttacaaattatagttttattatttactaaagctctcactttgggaaagttctgtatttgctgtttctgcagttttaatttttataaagtgagaagactgwcatttatgccttctaaggtctactccaactagttgaatctatgacacctacatttattaatgataatgcagtgagagaggcatttaattagctcctgcaaaaaatctagctaaaatctaatgagggcttgagctat

SEQ ID NO: 10878 - DNA, 529 bp, Homo sapiens
gcactgagataaatgctttatgtaatcatgtcctttgactttcccttcctgactacaaaagctacatcagttctctacttttacattacagaaaaggaaagcaaggctcacaacaattatacaacttgctgacagtcacacagtcaggactcaaacacaagtctgtaagattccagctattttctttcactacacttagcaacacagatctcagttttagatccagcttataaaatattgaagaccatgtcaggtataatactttgtatttcagggaaaaaaagcctcaggggatgatggttcccatggaaacatgggaaagcagtaaagaagggaattgaaactagattgarctcacactcttggataggacaatcctagttggtaggtccttaggagcaggctcctaggtgaacctctcaaaacacagcagcttcatttgcatcgtagaaaatggtttacattatttaatgatggccaaaagagaaatttctatagtggctaaccccaggaaaccaggattatgcca

SEQ ID NO: 10879 - DNA, 612 bp, Homo sapiens
cacacatagatgtatactggataagagtcttttgtcaaatgtatatattgcaaatgctttcttcccatatatagtctttaaaaattctataaatactacatttatatgaacacagtttcttaattttagtatattccaagtttataaatttacattgcattaagattttttgtgtgagtatatgaaatcttggtctacgcaaggcartggttcttttacagtctttttttcttggatgttttataattttattacatatcccgtttccaaagaaatatttttacaaacaaaatagtttgagaaatgttactttaaatgtctgaattccttctatctaatatgtatgtattcttaccttactaattcttccaagacagatggatttatgggtttctctaatccttcagttagcattgtttcagatgactacaatatccaaatagttctctttgtagtaaaccaatatctgtgcagagagtaatcccagagcttcagggaatgattccaatttaatatattaattgaatcagaattttggttcagtatactccccaacttggactgcttcttttcagagatataaatataaatatatatatatttattatttat

SEQ ID NO: 10880 - DNA, 612 bp, Homo sapiens
cacacatagatgtatactggataagagtcttttgtcaaatgtatatattgcaaatgctttcttcccatatatagtctttaaaaattctataaatactacatttatatgaacacagtttcttaattttagtatattccaagtttataaatttacattgcattaagattttttgtgtgagtatatgaaatcttggtctacgcaaggcaatggttcttttacagtctttttttcttggatgttttataattttattmcatatcccgtttccaaagaaatatttttacaaacaaaatagtttgagaaatgttactttaaatgtctgaattccttctatctaatatgtatgtattcttaccttactaattcttccaagacagatggatttatgggtttctctaatccttcagttagcattgtttcagatgactacaatatccaaatagttctctttgtagtaaaccaatatctgtgcagagagtaatcccagagcttcagggaatgattccaatttaatatattaattgaatcagaattttggttcagtatactccccaacttggactgcttcttttcagagatataaatataaatatatatatatttattatttat

SEQ ID NO: 10881 - DNA, 525 bp, Homo sapiens
tcaggctctgacttgccaccaggtggccagcctactctgcctgtaaaagactctccattctattccttcctcagtcttccagaaatcctgtcctctactcaagtcgccagcggacaacctaaatgtttcttttactttattatgcacagcaatttagtttctcagactccatccttsactggtagttggttcctttacacaaccaaaaataggatttcctctcatgaaattgatttatattgctgtcttggaatgttaatgcagtgactgtggtcatccttttgagtaatatttaatctttccgatgacaatagccatgtgtatacaagccaatggatttatctgagccttggtttcctcacctacctcacatggttgttttaaagagtaaatgtaaaagcccgcatgatgcttgctacatggtagctgctgatattaaccacaagaaatttctactggaaagggaattaacacgagcaccactgagtagtattagccaacagccacagccagttgctgacatgc

SEQ ID NO: 10882 - DNA, 525 bp, Homo sapiens
tcaggctctgacttgccaccaggtggccagcctactctgcctgtaaaagactctccattctattccttcctcagtcttccagaaatcctgtcctctactcaagtcgccagcggacaacctaaatgtttcttttactttattatgcacagcaatttagtttctcagactccatccttcactggtagttggttcctttacacaaccaaaaataggatttcctctcatgaaattgatttatattgctgtcttggaatgttaatgcagtgactgtggtcatccttttgagtaatatttaatctttccgatgacaatagccatgtgtatacaagccaatkgatttatctgagccttggtttcctcacctacctcacatggttgttttaaagagtaaatgtaaaagcccgcatgatgcttgctacatggtagctgctgatattaaccacaagaaatttctactggaaagggaattaacacgagcaccactgagtagtattagccaacagccacagccagttgctgacatgc

SEQ ID NO: 10883 - DNA, 655 bp, Homo sapiens
ctcttaactcctactggagaaggatggtctttcctccaaacaggaaagttctagaagctgtttatttattttctaatagtaagagtttggttagaaagtaggtaactaataccaaataactttatgagttcaaagttggagaaggttttgaacattaatgagcaaattaatataatggaatatgggattgttttataccaaaatgttagcctctcccagtccttgatgccaaaatgaccaggcatgaaaagtgatagttggtatggaggacaagcaaatattccctttctcctgggcataaaagtgatctctctcccaggtctccttctggttacatcttagcctttgattgatagcatggtaggtatgtcagttcaaaaggagacaaccatctttgttgatttcacagctaagaactgacctggcaatagttgttgttttaaccagcacaaatctcctttctgcccctgaggtatatcgtttatttaagcacaggacagtacttttcccttaatataaaatggaactatgttatagttctatatagcaacacaaagacagtgtggatgggtrctaagataaaaacaattaatgaaacaaacccatgtggaatcaaagtgtaagtccatattgcactgaatgaagtatttctcca

SEQ ID NO: 10884 - DNA, 560 bp, Homo sapiens
ggttcaagagattctcctgcttcagccttctgagtmgctgggattacaggtgtgcgccaccatgcccggctaatttttgtaatttttttttttttttagactgagtcttgctctgttgcctagactggagtgcagtggcacaatctcggcttactgcaacctctgcctcccaggttcaagcaattctcctgcctcagtctcctgagtagctagaactacaaacacctgccaccacacccagctaattttttgtatatcatttttagtagagatggggttttgccatgttggccaggctggtcttgaactcctgacctcaggtgatccacctgtcttggcctcccaaagtgctgggattacagacgtgagccactgtgcctggtctattattacccttagccttatttttacaaagcaagggaacaggctcaaagtgattaagcagcttgccgagggtcacacgctagtaagaggcagaactgactcataaatgagggttttaggaggcagaggaaaccatgacataggtgggtaggtatagagggaggtgtggggagatg

SEQ ID NO: 10885 - DNA, 560 bp, Homo sapiens
ggttcaagagattctcctgcttcagccttctgagtagctgggattacaggtgtgcgccaccatgcccggctaatttttgtaatttttttttttttttagactgagtcttgctctgttgcctagactggagtgcagtggcacaatctcggcttactgcaacctctgcctcccaggttcaagcaattctcctgcctcagyctcctgagtagctagaactacaaacacctgccaccacacccagctaattttttgtatatcatttttagtagagatggggttttgccatgttggccaggctggtcttgaactcctgacctcaggtgatccacctgtcttggcctcccaaagtgctgggattacagacgtgagccactgtgcctggtctattattacccttagccttatttttacaaagcaagggaacaggctcaaagtgattaagcagcttgccgagggtcacacgctagtaagaggcagaactgactcataaatgagggttttaggaggcagaggaaaccatgacataggtgggtaggtatagagggaggtgtggggagatg

SEQ ID NO: 10886 - DNA, 546 bp, Homo sapiens
aaggattcagtaattgagtcatatataaggcacccagaaaaatactcagcaaactggtagacctcaataaagaattcccccttcatgaaacagtaaagcttacttgagtacgttataaaatttcctttttgtatttgatctttacttaccagcatactcattgatcctacagcaatgggtttatccttcaattctggattgtccctcatttctacagctgcatagaaagcatccatgtcaatgtgcactatggtattgctcaaatttcggctttgttctaattccattgcaaatctgtcaaccttaattttttaaaaaagttaacatacttttagacaacataatattgaaacaccattaaccacaacattaatcttaatttattaagtgtctatcagtctctgtccacacacccatycatccatccatccatccattcatccatccacccatccacttacttatgggtgtgtattttgttgttcatgggtgtttatgggtttatattttattattgtttataagtgtttatctatgtatattgta

SEQ ID NO: 10887 - DNA, 540 bp, Homo sapiens
ggcaaagatttcatgacaaaaatgccaaaagcaatttcaacaaaagcaaaaattgacaaatgggacctaactaaacaaaagatcttttatgcagcaaaagaaactatcaacagagtaaacagacaacctacagaatgggagaaaatatttgcaaactatgcatctgtcaaaggtttaatacccagaatccataaggaacttacatttacaagagaaaaaaaaaccttatcaaaatgtgggcaaaggacattaatagacacttgtcaaaagacatacttgcagccaaaaagcatatgaaaaaaagctcaatatcattgagccccagataggagggrcacctctctctttcttacacctaggatttgcaatgcaaattaaagaaatgcaaattaaaaccacagtgagttactctctcacacaagccagaatggctattattaaaatgtcaaaaaataagagatgcaggcgagattgtggagaaaaagaaatgcttatacactgttgatgggagtgtaaattagttcagctattatggaaaac

SEQ ID NO: 10888 - DNA, 527 bp, Homo sapiens
gaagctgcctttgcctctttcagcttctggtggccatcagcattccttgacttgtggccgcatcactccaacctctgcctctgtggccacactgcctcctcttcgtgtgtcttctctgtgtctcaaatcccccgttggcctttctcctacaaggacacttggatgcaaggcccacctaggtaatccaggagtatcaccccatctcaagatccttaatttaatttcacctgcaaaactgtttttccaaataaagtcacacacactgggctcarggacgtagatacatcttttgggggaccacctattcaacctagtctataccccaacctaagggaataaaacaagagtctggcttttagagtcaggaagcactgggattgaatcccaccactgccactgacttaataactaaaattctgtcttttcttaggatgtcaccagcacccagtgtgattccaataacagggcccagcagggcaaggatctgagaacaggccttgccctcctcccctctcaccacagaaggc

SEQ ID NO: 10889 - DNA, 518 bp, Homo sapiens
ggaggaagtctgcagccatcccttgtgtttttctccatcatcttatttccagtgtgacctagctcccgggctgggtggtgtcactctctgctgtgatgtgtcaggggcactggtgtggaatacagattatccaccaacaccctccagccacacccagggactcctgcccgattcagtttccaagacaggaacgtgcttgttatgctgagcactggaagacggcttttcacattccacgtggcttccgtgcaacctccaaccggaggatgcacatcctgcccagttcctccctttctcctccccagaaccttgcacgaagacccagccagccctcaggaaaaactcactgcatcaaattcagttaaatttctcactcttcccacattggatccacccaaagaggcaagcctgagaagtattagtgtcaggttttgtgttcttacttcagcaggctgttgctgtccttgttggtgacagtccctggtttcccagccccygttgcctggtgtttagcccag

SEQ ID NO: 10890 - DNA, 509 bp, Homo sapiens
ccatttgtaaacttacaagatttttcataaattaagctgaaagttactcaatacctggtatacaaatgcttgtcaataatagtgaaagaatgtttaaaaacaggagctacatttattgaaccccttccacaacgccacgtgtagcaaaatggtctgcgggggatgggctggattcacccaaaaagccccaagggtgtcagggtttctacttagcccttctccacaccggcactgttctaaaggtttcatgctaattaattcattttattattccccaaaactcatcgaaggagaggtacaattgctcccgtcctatagatgagaaaacgaaggtatggggacttcccagctgtgtgaccttgtacaaaccactaagactgcgggcctctaatccaaagtcaggctcsgaaacagtttccagaatgcaccgccgcatttggcgaatgaatgaacgaccgaaccagtaatcactcctaagaccaagaaggccacatccttccccgtggggc

SEQ ID NO: 10891 - DNA, 523 bp, Homo sapiens
gaatttgggtctcctacaatttcacgctgttttgatgtaaggaagcttgtgtctgaaccagacaggtatttacatggtgccccgtgtcactcctttgcgtgggcccctggagcccagccacaggaatccctccgaggcacagtgcttttttggctctgtgggttgaggaattcgagtacgagttagtgcatgtgacttaaaaaccgtgcatggcgaaatcaacctgcagctaaacacgggtgcatttcactttctctctcaacatctaaaactaccaaccaaactgggctcatcctaggactgtctccactgtccaaagggaaagctcactccaatttcaaccatttcttcacaggggtcccctttggggtcagccctgggtcctagcctggctcctgcgacttcccccaccccgaycccccaagtttcctgacacaaggtagccgccttcttccaacctccctagggcagccaatcccgcccccaccccatcccatcccgtcatgaaaactctgttgcccac

SEQ ID NO: 10892 - DNA, 598 bp, Homo sapiens
tgatgtgagtgctatgaagttaggcctggagtgctgggaactggtgtcccctctgtttttttgtttttatttttttgagatgcagtttttgctctgttgcccaggctggagtgcagtggagcaatctcggctcactgcaacctctgcctcgtggattcaagttattctcctgccttggtttcctgaatagctggaattacaagcacccatcaccacgcccagctaatgtttgtatttctaatagagatgacgtttcaccatgttggccaggctggtctcgaactcctggcctcaggtgatccactcacctcsgcgtcccaaagtactgggattacaggtgtgagccaccgcaccgccttcctaatgagaagcacccatcagtgctccttggtggaacctcagatctgacagctaggcttttactcttttcccataatcctcgatcctgacaatttctggtttcctgttctctctcatgcacttgaggcaggtggcaggtgagtctgaggtagcgacaggtgtgggccctcctcaatgcaggccacactgtgacgtagaatttcaagcagcgatgagccatgctcaaatttagaaaact

SEQ ID NO: 10893 - DNA, 532 bp, Homo sapiens
gagctaatcaatggcagagccagaattagaaagcaggtctgactccaaagcccaagatcttaactacaatatcaaactgcctgcctccaaatgacaccaaatgaatgggggaaagttaatagtgtaagctagagaagaactaaaagagacaaattacacatctttgggtgagcctctgaagtgctcagaaagactcacaaaaatgttcttagaattctgtctagaaaatttcttccattcctgcatcctcagagagaatcatcttgaaaatgcagttagtccctaagaatccttgtgggaggcaaatgaatctagaaatgacagcaagcttaccccttccccagatgaaccaaacccctcggatttagcagtacctgaagggagcccacccctgctccctccacctgcctgatctcagcaggctgtcaccagcaagatcctcattcatcgcaccatgagggaaataatggagagtccccaagtgtgggggagaaaaccaaaaagtaatgtaaaaagawaaggagtaagaaga

SEQ ID NO: 10894 - DNA, 557 bp, Homo sapiens
atatatatatattttttttctttcaaaagtgagataccactttggtattacatcatgtctttgtgtacacaagcgatggaggaagggtcatctcaattttggaggaataaggccagtttttcattgcaatgagggctgacaaaggggatctgaagtaaaaagccagaagagcctctggatataagaggaaagggragaaacgggatcagggaagtggaaagaagaaagtgtacctaatgacaaatgaatatgttatggcaaaataaatttaattagttctgacatttaaaaataatatatttttatattattttttaaagacatgctgtaagagtgtttgaaaggacattcgaattttaaatagtgccatcagaatagtatcccttgagggaatattttaagtactttaaaaaatgagatgaagcatcaaaatgcattacaaactgaaaactacttcccacgtaaaaaattgtgattttcaaataaaccttagctgcttgtgtgtgtaagtttataaatataagtaactgacaagatgggaattattactctggaat

SEQ ID NO: 10895 - DNA, 460 bp, Homo sapiens
aagggctggagttcactcaccacttacaaaaaaaactttaggccaagtatgaaaaataagcccaacatgtctcctgtttcttgggtcatatcactgcatcacatagtcattattcctgaaatgagctactccggcttctgttctgcacctcaaaataatgtctgctacaaaataatgtctacagtatgatyctgttaaatatatatatacacacacacatacatatgtgtgtacatacatacatatgagtgtacatatatggatgtgtgtgtacacatacatgtgtatatggaattctgtgcagcattaaaaagaatgaaggtagagttagaagcactggaatggaaagaaatgtacagcatattgtgacttgagaaaaccaagttgcagaatactattcaaagtatggccccatttctgggagaaaaatgaaagcatgaaagagtgaaagggagagagg

SEQ ID NO: 10896 - DNA, 460 bp, Homo sapiens
aagggctggagttcactcaccacttacaaaaaaaactttaggccaagtatgaaaaataagcccaacatgtctcctgtttcttgggtcatatcactgcatcacatagtcattattcctgaaatgagctactccggcttctgttctgcacctcaaaataatgtctgctacaaaataatgtctacagtatgattctgttaaatatatayatacacacacacatacatatgtgtgtacatacatacatatgagtgtacatatatggatgtgtgtgtacacatacatgtgtatatggaattctgtgcagcattaaaaagaatgaaggtagagttagaagcactggaatggaaagaaatgtacagcatattgtgacttgagaaaaccaagttgcagaatactattcaaagtatggccccatttctgggagaaaaatgaaagcatgaaagagtgaaagggagagagg

SEQ ID NO: 10897 - DNA, 501 bp, Homo sapiens
acttcccacagataactaggaggtaattaggttaagatgagccatgagggtgggattagtgtccttaaaagaagaggtagagactaaagctagcaagcactctccatctgtctctctccctctctgtctctccctgtcatacgaggacacaacaagaaggtagctttctgcaaggcaggaaragaaccctcaccagaacctcatcatgttggcatcctgatctcacacttcccaacttccagaatggtgagaaataaatgttagttgcttaagccacctagtttgtggtattttgttatagctgtctgagctgactaagacaactagaaaataagagtagacaacatgaacttcagggtaccactcagttctactaagctagaattttgaggtatctgggtgatagcagtttcagagttgatgctacagtataaaaatcttcctgtgtctccatccccaacactattttgtgaatcttttttcatttttttatactgatct

SEQ ID NO: 10898 - DNA, 525 bp, Homo sapiens
gccgggtgtggtggctcacgcctgtaatcccagcactttgggaggctgaggcaggtagatcacctgaggtcaggagctygagatcaacctggccaatgtggtgaaatcccgtctctactaaaaatacaaaaattagctgggcacattggcgcgtgcctataatctcagctactcgggaggctgagacaggagaatcacttgaacttgggagacagaggttacagtgagtcagcatcgtaccagtgcactccagcctgggcaacaagtgtgaaactccatctcaaaaaaagaaaaaagagaatataccctcagtagtaaacagtgcagccctttacattttagaaagccctctcatgcacgctgtctcattttattgtaaggaaactaaggcacgaggaagtcatgtggctgatattggaggagagtgcctggaacagagaggactctaaacaattgctagcccctgtgtagtactaacttctaactccgtgtctggctgcaaagtgatgatttgtgaacctaatt

SEQ ID NO: 10899 - DNA, 359 bp, Homo sapiens
atgtcttgaccactgtcagtattttgaagaggatattattcacatgccattcaagacctaaacatgtttttatcatcactgccaagaaagtcataaataacaaatgtcatgtgtcaaattcttggtttattttagaagaatagcaatagctaaaaaaaaaaaaaaaaaaaaaaagactataacacaatctagtctagctgaattaggagttttggacttggcctgactttatgggctaggtacctcaggcgatrtaaaaaaattcctatggctcagtttctccaactgaaaaatgaaggctttgggccaaataatatttcaagtctctcaagctttaaaattctatcatttttttactt

SEQ ID NO: 10900 - DNA, 543 bp, Homo sapiens
ttccttttagaaagccttgatattaagtcccaggcaatgttgaaattggtctgattatttgcagtgccaggatgagaggcatcagcaggttcttataagtaaggttgcaacttgggttagaatgagaactacaggaggataattcagaatagacttaggtgagagctagagacctggatccagataagtgggactaggagagcactgtgtgatttctgagtcacagaacaagccagtgaaactgaacatggcatcttggaacgattttaaaattagagagatgaagaattttcttcaagaacacataccaagatatcactaaatacagaggccgatcctcatttatgcctttcttggcaaaacaggagtaaggctcaaaggaagccaggtcaaacaaaatagtgaatcagatgaatgcaaataaggtgacagtrgcacatgagaatgggtggcttcaaatgtatttgttcctttaacaagtatttactgagccactattttttggttccagccactaagcacagagctagagagactatagtg

SEQ ID NO: 10901 - DNA, 574 bp, Homo sapiens
atgaatcaaatttgttctttcatgttgttgttcaatartgattataagactggatattagagatacaaaggtaatgaaacatggctcctgccgtcaagggatatgtagttcagtaagaaaaagtcagacttttaaggaaacaattcaaatccaaactatttagtgtttccctggaagcttggacagctcagagcaaagacagcttattccgactagggcctcagtgaaggttttttaatgcggtaaatggaagggaggaattccttcatactaaagaatgataggatgattgcaagccagttagataaacatccacaagtaaagcatgaaggggtaagctggcaactagaatatgactggagttaagactataggaggatggcaggtgggaaggagggatagcaaaaagctgtaatggaaagatcttcctattccttctcccacatgggaaatgtgctctactctctcttggtcagatatcctgtatgccatatattcattactatttattttggtggagcatgttcaccagtagctaagtgtgggaggtatttttaatcgttttttttttttt

SEQ ID NO: 10902 - DNA, 574 bp, Homo sapiens
atgaatcaaatttgttctttcatgttgttgttcaataatgattataagactggatattagagatacaaaggtaatgaaacatggctyctgccgtcaagggatatgtagttcagtaagaaaaagtcagacttttaaggaaacaattcaaatccaaactatttagtgtttccctggaagcttggacagctcagagcaaagacagcttattccgactagggcctcagtgaaggttttttaatgcggtaaatggaagggaggaattccttcatactaaagaatgataggatgattgcaagccagttagataaacatccacaagtaaagcatgaaggggtaagctggcaactagaatatgactggagttaagactataggaggatggcaggtgggaaggagggatagcaaaaagctgtaatggaaagatcttcctattccttctcccacatgggaaatgtgctctactctctcttggtcagatatcctgtatgccatatattcattactatttattttggtggagcatgttcaccagtagctaagtgtgggaggtatttttaatcgttttttttttttt

SEQ ID NO: 10903 - DNA, 682 bp, Homo sapiens
ttatcctgcacgagactctcacaccagtgcttkgggtgtaagaacaccccaaggattgtgttcccttttctcgaagagtctgtggtctaaggggattcaatggggtccactttccaaaccaagacagcaaaggaacactaggagagaagtattctgtgcagagattcagttatatgatagctaagaggtggaccttccatttaatactttgccttgggcaagtcactctcctcagtttcctcacctgctaagtgggcataacaatagtactgacttcactgggctgttgcgaggactgaatgagatgacatggaaggtatctggctcacagtcagtgctcaataaatggtgattactaaagaaaacccatgaggaaaggctaaagggtctggaattcaatgggacagctaattttgcttgctttttttgtttgtttgtctcaaaattttgcttttaaattgaacattttgcacagttattaaatgtgtgcactggtcttgtttatacctgtgatctagttgaatcctcaaagcaacttcttggagcaggcattgttaatttcttctcatcttgcgcatgagaaaactaaggaccagtgataggaagttctccaaaatcacacagcaagaaaggatgtgagccagcgtcctgggctgcttgtctccaccctgggctccctctt

SEQ ID NO: 10904 - DNA, 682 bp, Homo sapiens
ttatcctgcacgagactctcacaccagtgctttgggtgtaagaacaccccaaggattgtgttcccttttctcgaagagtctgtggtctaaggggattcaatggggtccactttccaaaccaagacagcaaaggaacactaggagagaagtattctgtgcagagattcagttatatgatagctaagaggtggaccttccatttaatactttgccttgggcaagtcactctcctcagtttcctcacctgctaagtgggcataacaatagtactgacttcactgggctgttgygaggactgaatgagatgacatggaaggtatctggctcacagtcagtgctcaataaatggtgattactaaagaaaacccatgaggaaaggctaaagggtctggaattcaatgggacagctaattttgcttgctttttttgtttgtttgtctcaaaattttgcttttaaattgaacattttgcacagttattaaatgtgtgcactggtcttgtttatacctgtgatctagttgaatcctcaaagcaacttcttggagcaggcattgttaatttcttctcatcttgcgcatgagaaaactaaggaccagtgataggaagttctccaaaatcacacagcaagaaaggatgtgagccagcgtcctgggctgcttgtctccaccctgggctccctctt

SEQ ID NO: 10905 - DNA, 520 bp, Homo sapiens
tttatcattatttgcatttttaatttgtagtattttaggcccagagaattttcatgagtcttaaaatgatagcacaaacattaatacataattcatcagctatttttcataatacatgtggttagcaacccattgataaacagaaaaatcattaccactttaagtaggataaagttagttcttgccccctattcttcccctctgaagtctcaaaggataaattgcctgtgactgaaacaccatcgacagcctccgtgctattttgtcaacaggaagagccttcttagttgtagctttgytattctttagaaccaccagatgttaaataactgcaatacggtgtttgtggggcttccacagtctctgatttgggcacactggatgctttcaaatgtaagcaaaagatgagaaagcaagagagatacccctaccccatactgctttctctttccttccaaagtcctaaacctcactctacaatattcccttgtcatcctttctttccatgtccccgccctgc

SEQ ID NO: 10906 - DNA, 569 bp, Homo sapiens
tcgtgaagaagtgcgtggaaagtgcatagcatcacgcctgacacttttcaattattcaatattggcttatgattgacaatatttaatatttgggaggaaatccacacacatataagacagayttaaggaaaacttttattttcttcttcacacttttccgttattttccaattttctaaaatgagtatgcattgctattaaaaccaaaaggagggaaactcacaaatttctgaacaatagaagtttgactgttccactgtttccggaatttcccggaacatgttgttcaagaaggacgtgggagtgcatgctgaagcacagattgctaggtctcgacccgtaaatactggataaaaatctttaagaaataattctggtaatctatacttttaatcagctccacagatgactgttataatcgggcactgctgggacgtgttgattgaatgggaagtgagcagagagtgggcggggaaggcctggcggggaaggcctggcgggttgcagcgatcacgaggcctgcgcctacagttcccatattaccccgcgaaatcgcgacgagcaagcac

SEQ ID NO: 10907 - DNA, 569 bp, Homo sapiens
tcgtgaagaagtgcgtggaaagtgcatagcatcacgcctgacacttttcaattattcaatattggcttatgattgacaatatttaatatttgggaggaaatccacacacatataagacagatttaaggaaaacttttattttcttcttcacacttttccgttattttccaattttctaaaatgagtatgcattgctattaaaaccaaaaggagggaaactcacaaatttctgaacaatagaagtttgactgttccactgtttccggaatttcccggaacatgttgttcaagaaggacgtgggagtgcatgctgaagcacagattgctaggtctcgacccgtaaatactggataaaaatctttaagaaataattctggtaatctatacttttaatcagcyccacagatgactgttataatcgggcactgctgggacgtgttgattgaatgggaagtgagcagagagtgggcggggaaggcctggcggggaaggcctggcgggttgcagcgatcacgaggcctgcgcctacagttcccatattaccccgcgaaatcgcgacgagcaagcac

SEQ ID NO: 10908 - DNA, 647 bp, Homo sapiens
tacatacatgtgtatatatatacacacacatacatgcatgtatatatatatatacacatacatacatgtatatatatacatacatacatgtgtgtatatatatacatacatacgtatatatatatatacacatacacatatcagtataaagaaacgcatacccaggtgatgcagagagttaataacacattcagcatgccccaccgtgcactccctactaaaaggcactgtgctcgcttgagtgctaagtgctccagagatggtagccttgaatcagcaccaggaactatgctgaggatattacaaacattaccrtctccaagtctcacaatcctatgagagtagttagccccgttttacaagtagggaagttaaggctttggcaggttacgcagcttactcaattcacagctgataagccactgagcctgggttccaccagatgccaaagcctgtgtgtctccttccctactgttcaaagcattttactctggcactgtgtgaagaaccaaggaagatacgaagataaaaaagcggtccttgccctggaggagctcacagtctattataagagccatatatactactaacaaggcagaaactaacaaacctcccagcacagcaaaaagttaggaagcacatagcaa

SEQ ID NO: 10909 - DNA, 647 bp, Homo sapiens
tacatacatgtgtatatatatacacacacatacatgcatgtatatatatatatacacatacatacatgtatatatatacatacatacatgtgtgtatatatatacatacatacgtatatatatatatacacatacacatatcagtataaagaaacgcatacccaggtgatgcagagagttaataacacattcagcatgccccaccgtgcactccctactaaaaggcactgtgctcgcttgagtgctaagtgctccagagatggtagccttgaatcagcaccaggaactatgctgaggatattacaaacattaccatctccaagtctcacaatcctatgagagtagttagccccgttttacaagtagggaagttaaggctttggcaggttacgcagcttactcaattcacagctgataagccactgagcctgggttccaccagatgccaaagcctgtgtgtctccttccctactgttcaaagcattttactctggcactgtgtgaagaaccaaggaagatacgaagataaaaaagcggtccttgccctggaggagctcacagtctaktataagagccatatatactactaacaaggcagaaactaacaaacctcccagcacagcaaaaagttaggaagcacatagcaa

SEQ ID NO: 10910 - DNA, 569 bp, Homo sapiens
ggtgcggttagagactttgctgggtagagccaaaggacggctctggggaaagtggagaagggaaagctggaaagttaagaacaacatctagcaggcacaaaagattttccttaaagtagatcttgtaaactaaaataactaagaccttcagttcacgaaactttggaggacaaattagcactgccattaggttgagactccagtataaagggggaaaaattctgcaaggctttggctgtcaatgaggggagagctcttcagcgaagaagcctgtcgcattggattgtgattataatccacaaagctccccttccccgggtcagctcattcatttrtaaataagaagattactcactgcctacatgcataaacagctttctgcatcattcttggggtattttccataaatgttttctgcatgcccctttttttctttttctcttcaaatgctcaccgtgtctgggtcaggaacgtgcccttatcagccaacttcaattaatagttccaaatcaggtcagcaatggcccctctcttctctctggcttctcctaagggaagtcccttgatta

SEQ ID NO: 10911 - DNA, 589 bp, Homo sapiens
cactgcgcccggcctgttatccacattttataaatgaggaaaccaaggcacagagaggtgaagtgacttgcccaagatcatacagtgggaaaagtggcggagtcaggatttgaatctgggcagcctggctctaggtgctgggctctagatggaaggccctgtctgagctccctgcactaggaacaagtgtggtcaggggctggacggtcagcttttgggtagccattcaagaaatgtattgaaaaacctagagaggcaggctagggagagctgagytggttacatctggggtccatctagggttccatccctggaagagatggtggtggttagggctgtccggagctcctcaggggcaaagacccccagttctgtgatgatgccaccagtgatgaggtcgtggggggtgacatcgaaggcaggattccaaactccaatccctgcaggggagagaggggaggcaaggaggcaagaatttgcttctgtgaaagttctcaggttgtagtcatctgtttctaccacagtggttcttggagttggggagtccttgagaacctgaggattctcaccccaaaagtacatgcaggca

SEQ ID NO: 10912 - DNA, 507 bp, Homo sapiens
gacactgactgactgactgactgactgamtgaatgaatgaatgaatttttgcatttcactccttcctctgcttcttcccccataactcaattttcaccattgattaagtcagaaatcagaactgagacattactgggccactccaaaggctctctgaggtgccacctgccccccgacaccccttcattgcagctcagcccagctgggccccaactccaggatcctaaggctaaaaatacctcagtgcagccttaacagctcccagcatcctggctatttttaggatacaggaaaggatgagggataaatgtgactgagggtcacctccagggaggaacatctccttccaccatccagaaatggccacacctgggaaagactcaaatccaagaagtagatgatcacacgatatgctttccttcaattctggattttgaatgcctgccgggcagctggcatgctctgctggagatgaaaggaaacagtgttgcagagtcaaatcagaga

SEQ ID NO: 10913 - DNA, 561 bp, Homo sapiens
tgagaggcagaagagggcttgaacccaaayaagaaggcctaagagcgttaagttactttccaggggaaattcagaaagatagtagcagagacagatctggaatccaggagtctcaagtctggtccagacattttgtcactaatcagacagaaaaaaaaaaaaaaaaagtgctgataaagtgggttttttgtttgttgtgtttgtttgttttttaaagggcctctcctgtctgggagaacacttcttcataaacaaacagtgtgggaaaagcaaaattttaatgggcatgtttgctgtattcttcatttagaggaagcatcaaattgcagacataggttcaccagcaatacatttactttaactggaaaagttacagagaattatcttaattgctgcagaacagaaaagacaagtcagagaaactatccatttcattcactagtaattggatacaaagtgccgatcttaaaagttcgtgttccaataacgcaattatttgccaaaaatcttaataaaaagcacattttgttccctcatgcttctcagatgaaagtcacttaa

SEQ ID NO: 10914 - DNA, 1372 bp, Homo sapiens
atgcaaattctcaatctattggctgatgctgacctttccatgttttaggaataaagtgtctgaaaacaaaatgagaatatgtacaaaaaagcaacaacaaaaaacttcagggagtataaaatatccaagagaacaaactgttttaagcactatagaactcttcagaaacacctatatattcagtgtacaattacaaataattcataggtggtttytgaaatattttaagttccaggatacatgtgcaggatgtgcaggtttgttacataggtaaacgtgtgccatggtggtttgctgcacctatcaacccatcacctaggtgttaagcctcacgtgcattagctattagctatttatttttaaagtttaaaatttttttttaaataggtaaaccctctcccaccaccaccactccccaaatataccccgcacatccaaaatgtatttacaaagcaggaggggtgtctatcctggtttgatcatacactcagcctaatatcctaaaattgctgtaagtacagacctttaaattcagccatgtaggaacttcaagctttgcgtggctacagttccttgattttgcagttgagtgaactgaaattcagagaagtcaggtgaagcgacttacctaaggtcacatggttcatgatttatgagggcaggatcaaagcttaaatctcctgttcttgagtcagagcataaaaggaatcaaagctcataacagtgttcctgaagcctcacaacaatgcaaatcataccaggacaactgacctttagccatcctccagtccttactaggccagaaagagaacctggatgttctggaaagatgttgagtaatcccaggattggaacaaaagcattttctgcttgacccttaatacttttaatactctgaaatactcttaatgttctgaaacaactcaatttctccaagtatttatagctgttttgcattgtgtggggaacccttacattctaggtaccccacttttccatatcaatcagaagggtctttgttaacacacgcttaagctagggtttttctaagctttcctatgagagtcccgcgcaactgaaacttgcttttcattacagtttgggggtcttgacatttaggacaccactgtctatcatgggatgattaattaatattttgccatctctctgattccatgagcagaacatcattgttcagcttccagtctttctttatgccaacaacagcaaaccctgactctaggttgacaaagaagagaaaatttgtaaacatcctgggattaattactactgggatctgtctgcccatccacgctaataaagtatgagacttccccctatttatcatctttatttcctcagagacatcaga

SEQ ID NO: 10915 - DNA, 576 bp, Homo sapiens
aaaaagtcatagctgaacaatgttgacttctagctagattctgttgcctgcccaaggccctgggcctaaggcctccctttgtgaaaagggtgagagaggtaaaagacatagtggtatcaaatgggaaaatttatccttaactcatcaaaattcctgagagactactgaaaggagaatgtactcactataagaactgaattaccgaaggcaggtagtacttacattttttcgaatgtacaagtcccatacgtgagacataaggaataaggtttgtccagagctttgcacagggtatggcacacagaaggagcctaatacgtgctacctgacctaaggtccttccagctctgygcaatttgcagcctttcactcttgtgggccagcctcaacctggacagatgtcacagcccaggtcacaggcagccttctcttgcctcctcccacattctgctctgaaaccttgtttatctttctaagaacaatacacagcctctccccacccacccatccagcaaggacccatgaattccaccattttgccaagacttattactaattaagtgaactaggtaagca

SEQ ID NO: 10916 - DNA, 576 bp, Homo sapiens
aaaaagtcatagctgaacaatgttgacttctagctagattctgttgcctgcccaaggccctgggcctaaggcctccctttgtgaaaagggtgagagaggtaaaagacatagtggtatcaaatgggaaaatttatccttaactcatcaaaattcctgagagactactgaaaggagaatgtactcactataagaactgaattaccgaaggcaggtagtacttacattttttcgaatgtacaagtcccatacgtgagacataaggaataaggtttgtccagagctttgcacagggtatggcacacagaaggagcctaatacgtgctacctgacctaaggtccttccagctctgtgcaatttgcagcctttcactcttgtgggccagcctcaacctggacagatgtcacagcycaggtcacaggcagccttctcttgcctcctcccacattctgctctgaaaccttgtttatctttctaagaacaatacacagcctctccccacccacccatccagcaaggacccatgaattccaccattttgccaagacttattactaattaagtgaactaggtaagca

SEQ ID NO: 10917 - DNA, 576 bp, Homo sapiens
aaaaagtcatagctgaacaatgttgacttctagctagattctgttgcctgcccaaggccctgggcctaaggcctccctttgtgaaaagggtgagagaggtaaaagacatagtggtatcaaatgggaaaatttatccttaactcatcaaaattcctgagagactactgaaaggagaatgtactcactataagaactgaattaccgaaggcaggtagtacttacattttttcgaatgtacaagtcccatacgtgagacataaggaataaggtttgtccagagctttgcacagggtatggcacacagaaggagcctaatacgtgctacctgacctaaggtccttccagctctgtgcaatttgcagcctttcactcttgtgggccagcctcaacctggacagatgtcacagcccaggtcacaggcagccttctcttgcctcctcccacattctgctctgaaaccttgtttatctttctaagaacaatacacagcctctccccacccacccatccagcaaggacccatgaattccaccrttttgccaagacttattactaattaagtgaactaggtaagca

SEQ ID NO: 10918 - DNA, 576 bp, Homo sapiens
aaaaagtcatagctgaacaatgttgacttctagctagattctgttgcctgcccaaggccctgggcctaaggcctccctttgtgaaaagggtgagagaggtaaaagacatagtggtatcaaatgggaaaatttatccttaactcatcaaaattcctgagagactactgaaaggagaatgtactcactataagaactgaattaccgaaggcaggtagtacttacattttttcgaatgtacaagtcccatacgtgagacataaggaataaggtttgtccagagctttgcacagggtatggcacacagaaggagcctaatacgtgctacctgacctaaggtccttccagctctgtgcaatttgcagcctttcactcttgtgggccagcctcaacctggacagatgtcacagcccaggtcacaggcagccttctcttgcctcctcccacattctgctctgaaaccttgtttatctttctaagaacaatacacagcctctccccacccacccatccagcaaggacccatgaattccaccattttgccaagacttattactaattaagtgaacyaggtaagca

SEQ ID NO: 10919 - DNA, 567 bp, Homo sapiens
tcaattatgtcattggttaatgggaaagtttttgactgatggatagtgtcragacagggtacagttgaacagtgaacactacagatgagagttaaaatgactggcccacctggaccacaggtccttagacagagtagtagtggaaaacaaaatataataggtgagttgaaatcaatactggaggatctaaaaatgcaaattgaagaccctgttcttagttaagaaaacgtcatggagaaagtcatattttgaaaaagtaacccagccatgatattttagtgtatcctgcacattaaaaaaatattgaatatacttgaaagataataggacccaaaactcttttcttcagcccccaaaattgggtcaaatgtaattatggtaaaaagaggtccaaaaagttatcctacataagaaaacaccctaaaactagattgaaacaaggtacaaaggtatgatatacttcaatttatttctcaataacataatccgtttgggacattagaaagtagccaattatgagagccagaaggaattggactttgatctttgaggtcccttgagagaaaa

SEQ ID NO: 10920 - DNA, 526 bp, Homo sapiens
tggcccacctgtgaatggttgtcctggcttggaccactgatgaagcccaggggagcttctcccactaggtggtgggctttgtcctctctgatggacgttccttccacagctcccaagccagccaccacattcctgcctcctctgtcagaagccacaacaggtatttggggccatttttcctcctcgaagattagaatagcatttcaatcagacacctgccctcgtggagtcccagattttatgaaataaatagaccatcataatgtcagatgttttggggtgagayacctggcatagttgggaaggaggagggctttctggagaaagtttcacctgaactgagtctttaaggatgactaagagtgattcaggcaaatagggcatgaatagtataactgaaagaggggaatctgtgagcaaagcctcagtggccagaaacagcatagagtatagggagaagtgagagaaatttggtttgcatgaaacataaagcttaacccagagtggatggataagtgagactgaa

SEQ ID NO: 10921 - DNA, 526 bp, Homo sapiens
tggcccacctgtgaatggttgtcctggcttggaccactgatgaagcccaggggagcttctcccactaggtggtgggctttgtcctctctgatggacgttccttccacagctcccaagccagccaccacattcctgcctcctctgtcagaagccacaacaggtatttggggccatttttcctcctcgaagattagaatagcatttcaatcagacacctgccctcgtggagtcccagattttatgaaataaatagaccatcataatgtcagatgttttggggtgagatacctggcatagttgggaaggaggagggctttctggagaaagtttcacctgaactgagtctttaaggatgactaagagtgattcaggcaaatagggcatgaatagtataactgaaagaggggaatctgtgagcaaagcctcagtggccagaaacagcatagagtatagggagaagtgagagaaatttrgtttgcatgaaacataaagcttaacccagagtggatggataagtgagactgaa

SEQ ID NO: 10922 - DNA, 848 bp, Homo sapiens
tagcacatgcaggaaagctcagctcagaagaatctgtgtaatattccatttttccctctctttggggcaactttctgtctaagagctcctgcaatgcccagcgtgtggacctgaaattgattctgacagtaggcaggggactgctgggcaactttggctctgcattttgtgatcaacatttccccaccatatgttgccttttcttcttctctgtggctccaggctatgcaccccagaatttatcaatccggggcgagtaccagataaatttccacattgtcaactggaacctcagtaatccagaccccacatcctcagagtacatcaccctgctgagggacatccaggacaaggtggggcatctctcacccctcccgtcttctctgtcctgtgtgcttctctccctcttctacctgatttctctgttaagtgatcactttaaatgcttcacttcactatgtattctgggttctctctcagtttccaaaagtactctcttgactaccattcccatttcacagatgggcaaactgaggctcagaaaggggcgtggtgtgcctagggtcayacagtgctttaggaacagagttaggatttgaactctggtcccctttgctccaagtcctgtgtttttttccactggcatcagcggcccctccacccccaagaggcctccatctcacccactctccctacccatctttctaggtcaccacactctacaaaggcagtcaactacatgacacattccgcttctgcctggtcaccaacttgacgtaagttctgaaggtcataagcagtgaccaagcttgtggctgtgtctctgagcacccttgagctagacgtcc

SEQ ID NO: 10923 - DNA, 525 bp, Homo sapiens
ggttcacaagcctgtcaaagggacctataataaraagaggttaagaatccatgctctaaacagaatattactccattttatttcatttatttttaaagagacagtctcactctgtcatccaggctggagtacagtggagtgatcatagctcattgcaaccctgaactcttgggcacaagcaattctcctgcttcatcctccagaggagctgggactacaggtgcacatcaccatgcccagctagttttaaaaattattttgtagagatggtgtctcactatcctacccaggctggtctcaaactcctgggctcaggcaatcctcccactttgacctcccaaagtgttgagattacaggggcaagccactgtgcctggccacttgtcacattttaatttgtgattacttataaaatgaaccccttcccatctgagatctgtcagtctttctggtgacggtgcctggtgtctgctttctaccatgtcctgttagactagtgtttgatgggaggtcacctgggcagct

SEQ ID NO: 10924 - DNA, 530 bp, Homo sapiens
ctgggattacaggtaggcactactgggctcagcctgtcagattttagtaatacaaatcctgcatcctaggaacccctccgtcccaggcaaactgggatggtagtcgccctgcattgctccccctgatatggtttggctgtgtcttcacccaaatctcatcttgaattgtagctcccataattcacacgtgctgtgggagggacctggtgggagataattgaatcatgggggatagtttcccccatactgttctcgyggtagtgaataagtctcacaagatctgatggttttataaggaatttcccctttcgcttggctctcactctgtcttacctgccaccatgtaagatgtgcctctttgcttctcctttgccttcagccatgattgtgaggcctccccagccatgtggaattgtgagtccattaaacctctttcctttgtaaattacccagcctcaagtatgcctttattagtggcatgagaacagactaatacggcccctgtgccaggaacctccctgggagacaag

SEQ ID NO: 10925 - DNA, 530 bp, Homo sapiens
ctgggattacaggtaggcactactgggctcagcctgtcagattttagtaatacaaatcctgcatcctaggaacccctccgtcccaggcaaactgggatggtagtcgccctgcattgctccccctgatatggtttggctgtgtcttcacccaaatctcatcttgaattgtagctcccataattcacacgtgctgtgggagggacctggtgggagataattgaatcatgggggatagtttcccccatactgttctcgtggtagtgaataagtctcacargatctgatggttttataaggaatttcccctttcgcttggctctcactctgtcttacctgccaccatgtaagatgtgcctctttgcttctcctttgccttcagccatgattgtgaggcctccccagccatgtggaattgtgagtccattaaacctctttcctttgtaaattacccagcctcaagtatgcctttattagtggcatgagaacagactaatacggcccctgtgccaggaacctccctgggagacaag

SEQ ID NO: 10926 - DNA, 502 bp, Homo sapiens
cctcagcctctcaaagtacgggattacaggcgtgaggcactgcgcccggcccaccatcattttataggatccaccttctatgtaatatgttcctgcactttacatgtgttgtctccgttgaacctgcctgacgggtgaacacaggggcaccgttatcccccattttgcagaagagaaaacaggctcagagagcttaagccttttgtttaaagtcacacggccaggattccaactccagtttcyggatgattcctaaatgctggtttttatcctttgcctgggaagagactgaaggttgaggatttctcctctcctggcagtttctgggtacgtgagtccccccacaccgccgaggaaatgagttctgtactgcccgtcccaggagaagggctgtgaagacacagaacataggcagatctcattgtgcgctgctgagccccttcctgggtccctgaacagtggtcattgtcccagcccaggcctggccagggggatatgaagt

SEQ ID NO: 10927 - DNA, 502 bp, Homo sapiens
cctcagcctctcaaagtacgggattacaggcgtgaggcactgcgcccggcccaccatcattttataggatccaccttctatgtaatatgttcctgcactttacatgtgttgtctccgttgaacctgcctgacgggtgaacacaggggcaccgttatcccccattttgcagaagagaaaacaggctcagagagcttaagccttttgtttaaagtcacacggccaggattccaactccagtttctggatgattcctaaatgctggtttttatcctttgcctgggaagagactgaaggttgaggatttctcctctcctggcagtttctgggtacgtgagtccccccacaccgccgaggaaatgagttctgtactgcccgtcccaggagaagggctgtgaagacacagaacataggcagatctcattgtgygctgctgagccccttcctgggtccctgaacagtggtcattgtcccagcccaggcctggccagggggatatgaagt

SEQ ID NO: 10928 - DNA, 983 bp, Homo sapiens
gtctacggtacaaatacaaaaataagtgtttgagcaggtcacaacatgcccacacaccgtcaactgcatcttttctttggcagaggagtctggaattcacggctccaaggaaacaactgtttgtcaatccaaaccttggatgccgatactggtgggcggctcagtgatgacgttcctgtgtgactcaagtggtttctaaaaggcaagaagccatccccgtgaggcatacggtgaccagtgctgaatcttccaacaccatttcccacagggatcagttgcagtcaagagaatctgtttttttcagaggaggatgccctgtgtgagggaagagaggggtgagcagctgaaggaaggtgaatggacagaaaagctggacacactggccagactggggaggggggtgggggctcatgcctgtaatcccagcactttgggaggcccgggggacagatcgcttgagcccaggagtccaaggccagcctgggcaacatagtgagaccctgtctctacaaaaaaaatacaaaaagtagttgggtgtggtggtgcacacctgtagtcacagctactcaggaggctgagaggtgggaggatcacttgagcccaggatgtcaaggctgcaatgagctgagatcacgccactgcattccagcctgggcagcaaagggagacctggacttaaaaaaaaaagaaaaagaaaaagaaaaagttggacacggcaggccaaaagactgagttctacttgatcattgttgttgaatctgggagaagtggtatttggacccgaatgcctgagagcaagtataatactgccaacaggggctatgacttggctacaaatggctttaaactgaagttgccagtgtgtgccccctactctgtgtgtgccccctactctgaaacctctggcagcacctcatctttctgaggatgggcagggagcagggccgcygctaactccgtatctcagttgcccaacttgttcc

SEQ ID NO: 10929 - DNA, 529 bp, Homo sapiens
gaaaatggtaattgaaaaattgtggaccaggggaggtagctcatgcctgtaatcctagcactttaaaaggccgaggtgggtgcatcacttgacctcagctgttcgaaaccagcctgggcaacatggtgaaaccctattgctacaaaaaatacaaaaattagccaagcatggtggcgcatgccttgtagtcccagttgcttgggaggctgaggtgggaggatcacctgagcccaggaggtccaggctgcagtgagccatgctygccccactgcactccagcataggtgacagaaagaaaaattgtgtaattaccaaacgcctgtctgcctggctgtaagtgtaagttccatgtgggcagtgactgtgtgtttgtcttgctcattgctgaatctccaacacttagcctacggcttagtacatagttggcaccaaatgcatacttgtaaactgagtagaagaaaaactaccagctaccagctgaaaagaaaataaatacccgagtgtcctgggcactgactagacttgctgg

SEQ ID NO: 10930 - DNA, 561 bp, Homo sapiens
ctttgatccccttttacttggttaatcttcactttaagagctatttatatggttaaagaacttactaaacaaaacattcttggagttattttgattatctccaagtttctctttcttacattttcaccagtttgtaggttcagtgaatactcttttcaggccaaagggcttacctttaaaacctcacctaccacacacgttcagcctagtaccttgcaagatgagtcaggcagaggtgaaaragcccttccctgttcctgtatctttggatacggaaacaggcgtgaacgttgctgaacgtggaccctgtagtgagtaagagctgtttgttagtgactgaaggtcgtggtgtgttgtctgtaggaaagtgtcttactattccacatccctcatttgcatgtggggaacagacagccatggaagaaaagagatttgcccaaactaaaatagggggagccacagccaagacaagaactggcctggtcactggtctctaccgctttggatcattgctatctctgagcatggacaagttgactgtagagagctttaaaggctaaa

SEQ ID NO: 10931 - DNA, 535 bp, Homo sapiens
gttctgtcgcccaggctggagtgcagtggtgcgatcttggctcactgcaacctccgcctcccggttccagcgattctcctgcctcagcctcccatgtaactggaattacagatgcccgccaccacacccagctaattttttgtatttttagtagmgatggggtttcaccatgttggccagactggtctcaaactcctgaccttgtgaccctcccgcctcggcctcccaaagtgctgggactacaggtatgagccaccgcgccggacgtaatttttggattttgtaatagagacagggtttcaccatgttggccaggctcgtcttgaactcctgacctcaggggatcctcccgccttggcctcccaaagtgctgggattataggcgtgagccaccatgcccggctgtttttgtaactattgatagccatgaagtgcatggacactttcctcaaatcaggtacaattctaaactgtttcactctcaaaccttgacccactcattctgggaggacagaaataaaattgttcctccccc

SEQ ID NO: 10932 - DNA, 519 bp, Homo sapiens
gatccgaccacctcggcctcccaaagtgctgggattacaagcgtaagccaccgcgccyggccatttttctttttaatcaatcctgccacttgaagattatatggtaagggaaatctgcagtctatacacaatactgagttgctccaagcccttgaggattgtgagggacccagtgttctaattcttgctagagtgtctacctccatgttaccagaggcgagtctgaccgggtactgacatgtgatataccattaagtgtgcagtgggttcttttagcctttcccaaatgtctttccacatggcagcgccccacagcattttctttttcttcttttttcttttgctttttttttttttgttctttttttgtcctgggcaacagagtctcactctgttgcccgggctagagtgcagatggcgtgatctcggctcacgtgccaaggctctgtcctcctgggttcaagcgattccagtgcctcagcctcccaagtagctgggattacaggtgcacaccaccat

SEQ ID NO: 10933 - DNA, 571 bp, Homo sapiens
attacccagtctaaggtattttagcagccctaacagactaagacagaagtgcagagggaggtgttgaagaaggaggggctcctaacagctctacagaacaccctggtctaccctgggattctgtagtcttcagacccagtatgtttccctcacctcatgtttctctgcttctgttgatttcaggttgagtctgagacttgctaatattggtcttaattgatatttcctacattaaaacagtcaggttcttaaagcccaagacatacagccccaggcatttgcttttaaagctcagtcctataaatatttaacctggtagaatcagaatccgtgtcagggacagatcaacagataggacatgggtgyggccttacccacagagaccagaagcctgaaggtgtccagcattacatcacggtacagggtcctctgggcaggcttcagctgcccccactcctcctggctgaagcccactaccacgtcctcaaacgtcacttgctcctgaaacatcacacgagtgtcctcagccaagccaaccctggcactggctgctggtggggtagctggtaaa

SEQ ID NO: 10934 - DNA, 571 bp, Homo sapiens
attacccagtctaaggtattttagcagccctaacagactaagacagaagtgcagagggaggtgttgaagaaggaggggctcctaacagctctacagaacaccctggtctaccctgggattctgtagtcttcagacccagtatgtttccctcacctcatgtttctctgcttctgttgatttcaggttgagtctgagacttgctaatattggtcttaattgatatttcctacattaaaacagtcaggttcttaaagcccaagacatacagccccaggcatttgcttttaaagctcagtcctataaatatttaacctggtagaatcagaatccgtgtcagggacagatcaacagataggacatgggtgtggccttacccacagagaccagaagcctgaaggtgtccagcattacatcacggtacagggtcctctgggcaggcttcagctgcccccactcctcctggctgaagyccactaccacgtcctcaaacgtcacttgctcctgaaacatcacacgagtgtcctcagccaagccaaccctggcactggctgctggtggggtagctggtaaa

SEQ ID NO: 10935 - DNA, 622 bp, Homo sapiens
tgatcttggctcactgcaacttccacctcccrggttcaagcgattcttttgcctcagcctcccgagtagctggtattataggcacccaccaccatgcccagctaattttttttggatttttagtacagatggcgtttccccatgttggccgggctggtctcactaaactcctgacctcaagtgatccacccaccttggcctcccaaaattctgagattacaggtttgagccactgcgcccagcctttagttgagtttcttaagcttgtttagggtttagcctgtatggccagcagggtgtaggtgggggtggtttgtaagcagggctgtttgcttcagaagcagctgtggaaacaggactgaatgcagacatataaagaatattgggtaaataactttttaaaaaatttagagataggatcccactatgttgcccaatctggtcttgaaacctaaacaatctcttatcccaaagtgctgggattgcagaaagcttaaggcacagttttacgtggtaatggtgggccatttttagtttcttttttgtagacgatcatgtcatctaggctggaatgtagcggttctgtcgagctaggtgtagcctccacttcctggactcaagc

SEQ ID NO: 10936 - DNA, 520 bp, Homo sapiens
attcctgcaagagatgtgtgtgcaggggagaatgaagactcagggccacgcctgcgtcacttcaccagctgtggctgtccaatcacgtcctctgtcccatgggaaatgagcaggttaggcaggcacaccctcacttccaaggcttccggacggacgtgggtttgaatctcgcctctggaacgcaacagctatggcacctcgggttacgacttcacctggctgggccccggtttccacatctggagaatggggagagcggccgtgcctgtctcgtaggatgattgtgctgatggtggaggtatttcgagggacacatggggaactgtgccacgtgtgtcagcscccatcacaggcagaggctgtcctttgtaactaggaaaactgaggctcagaaaccagtgtgagtcccttggggttctcagttttccagatctctgtcccctccaccccccagagagagagaccaccaaggcagagtgtggatcgctcccctgtttggctctgtctctctccctctggt

SEQ ID NO: 10937 - DNA, 548 bp, Homo sapiens
tcgaccacctgggctcctgcsatcctcccacttcagccttcccccagtagctgagattacaggcacacaccactgcactccagcatctgattcttgttgctgttgttttgagacagggtttcactctgttgtcccagactggaatgcagtggtatgatcatagctcactgcagccttggattcccagaatcaaatcatgatcccgcatcaccctcccaaagtgccgtgattacaggtgtgagccactgtgcacggcaccatgggccattatcttaaaggtttagcatatgctaaaagatatcatctcctatctaggttacaggcatcttcagactgcagacctcagtcatgtgtgccccgcctgctgctcacccccacatcctgttgactcttttacaaaatttcttaagtccagtccctcctctcccttccttccttgggtccctgtcccttctgccacctcaccccatccttccccagattgcactagcctcccctgcacacacgcacacacacacacacacatccttaccctgcattaaaatgat

SEQ ID NO: 10938 - DNA, 548 bp, Homo sapiens
tcgaccacctgggctcctgcgatcctcccacttcagccttcccccagtagctgagattacaggcacacaccactgcactccagcatctgattcttgttgctgttgttttgagacagggtttcactctgttgtcccagactggaatgcagtggtatgatcatagctcactgcagccttggattcccagaatcaaatcatgatcccgcatcaccctcccaaagtgccgtgattacaggtgtgagccactgtgcacggcaccatgggccattatcttaaasgtttagcatatgctaaaagatatcatctcctatctaggttacaggcatcttcagactgcagacctcagtcatgtgtgccccgcctgctgctcacccccacatcctgttgactcttttacaaaatttcttaagtccagtccctcctctcccttccttccttgggtccctgtcccttctgccacctcaccccatccttccccagattgcactagcctcccctgcacacacgcacacacacacacacacatccttaccctgcattaaaatgat

SEQ ID NO: 10939 - DNA, 539 bp, Homo sapiens
gaacgtcaatctctcggccactcagcttcatgccattcatcatccggcaggctctctcggccacctctggcgactcgaacttaaccacaccacaccccttggacttcccattctccatcttgatgtcggcgtacagcacgtggcctaggacagggagggaagaagagacgacactcagtcccgattttgttagattttggtggacagagtcaaaaaggagaggccctgaagcctagagcacaaaggctcagaatacaatggcgagaaccaatgactacggccccctcagccacactgccattcttctgctaacagagcytgcccctgccccatgaaaagccttcctggcggattcaatgcacgcctttacgcttcaggaagttcaaaaaagaaggcacagtgtaaagccagctttataggcagaaagttcccatacattttacaaagtcttcatttttgatatgccaccgcccctggttacaaagccatccgcaatccaatggacacgtctgtactgtccaaatgaaagccagcaggtt

SEQ ID NO: 10940 - DNA, 561 bp, Homo sapiens
cactgggcgatggggtttcagaccatactttcttcatattttcctaatgagtacatttatctattttacaagcatttattacatgttgggtggtgtgctttcagtcttatcatcaagtctaaggaaaatatatttacttttaggaatttataatgtggaaaacaaaacccccaaaagagaggtactctaacaatgaagatggtcggcctgtgcacagcacgtgcggaagcactctttcacatgcattcactctccacagcatccctgaggcaggtactattacacccccattttacaaatgagtgctatgagaaacagagaggttcagtgacttgccaaacgtcacacagctagaaaaaggcagagctgctcccaccccgggcagtctgtgtcagaacccgcacktctcaccactaagctctacagtccccagcgataacagcctgttctaaaaaaacaaaacatcaaactaagcggttcctacctcctccctgctttgcaatgatctctcctctcttcagtgcattacttaggatttctaaggaaatcaggaagaaaaaa

SEQ ID NO: 10941 - DNA, 659 bp, Homo sapiens
tgttaagccgtttatttaacagatacatatttagaatccggtatatgttaggtattgtactgagcccttgagaataaagtagtgacaagacaaatagcatctctgttttcgtgggacatatagtttagtgacagagtcaaatcataaatatgcagataaaaataaatatgttatcataattatgctaaatattaagaagaaaatatttagtgtgctatgatagaacaggaagctaattaagacttgggagtcaggcaagaccttcttgaggctgtgacatttaactcgagaaggttcagtaggagtcagccaagtgaagggttttattccagaaaatgcaaagtctttataaggtttaaagcaataaaaggatatgataaaatttttatctttaagagattactctgtggtgggcatggtggctcacacctgtagtcccagccctttggaatgccaagatgggtgaattgcttgagcccaggagtttgagaccagcctgggcaacatggcaaaatcctgtcgctacaaaaaatacaaaaaaattagctggttagatrgcacttgcctgtagtcccagttacttggaaagctgaggtggaagaatcacttgagccccagaggtggaggtttcagtgagctgagatcatgtcactacactc

SEQ ID NO: 10942 - DNA, 637 bp, Homo sapiens
gttacataacttgctcaatatcacatagctgttaagtggcttgggatggtggtggtcagggcaggttggtggggaggcacagtagggtttaaacccaaatctactactctagacttgattctcctggctttcatccctcttgaacacagtaaggccgaggagacgtacacttttaagctgtgatcagcttaatgtgaatgacttgcagatccttttctgaaggttataaaaagcaaaaacgatcactaagagatcaataaagtgaggaatatatgatgtagaaaagaaaaaaaaaggctggaagttcagaatgtggttggtcctgggtagggattctcaaaggcaaactgctagctttgtaatttttctcaaggccaattcttagtggatgcctttctgaattcatttggtggttcaccagaatcttaaataaataagataaaataaagttactattacatgtttaagttatatctgtttgttcttagtaatcatcaggtattctagcgtctaaaaaatgcctatttgtrgagcaaatagcagataagaaactgtagaggcattgtggtgatttgattgagtgctaatttttaaagtccacgttgggggtaacttgctttcaggattctataatgca

SEQ ID NO: 10943 - DNA, 603 bp, Homo sapiens
gacacaaggaaaagcagtttccagaatgtgtgtgagctttatttctacattttttttttttttgagacagagtctcactctgttgcccaggctggagtgcggtggtacagtctctgctcactgtaacctttgcctcctgggttcaagtgattcctgctcctcagcctcccgagtagctgggactacaggcacgtaccaccatgcccagctaattttttgtatttttagtagagatgggtttcaccatgttgcccaggctggtctcgaactcctgacctcaagcaatccacctgccttggcctcccaaagtgctgggattacaggtgtgagccaccgtgcccagcctatttttaatcatatccatacattctatctatctrtctgtctgtctgtctgtctatctatctatctatctatctatctatctatctatctatctatctacctgcctacctacctacctaccaggttgctaaaattgaaactcagaaatgtaagagaagtgacctggtgtggcctgcttgggtatacccactggctccctaggtcctggtctcctggggaaggagagacacccaggttgtttgtgattgaccttgcatg

SEQ ID NO: 10944 - DNA, 561 bp, Homo sapiens
ggagtgcaatggcacagtcttggctcgctgcaacctccacctcctgggttcaaaagattctcctgcctcagcctctggagtagctgggattacaggcgcaygccaccatgcccagctaatttttttttttttttttgtatttttagtagagatggggtttcatcatgttggccaggctggtcttgaactcctgacctcttgatctgcccagcttggcctcccaaaatgctgggattacaggtgtgagcctctgcacccggccttctcttcccttctttatattccttcaaattgagtcaaacttgaaagtcctccttctgtacccgttggtaaatgaatgttgttttagtcagtttgggctgctataacagaaaaccatagactgagtggcttaaacaacaaatgtttatttctcacagttgtgaaggctggaattctaagatgagggtgtctgcaggtcctgtgtctggtgggagtacttttcgtggtttgcagatggtcatctttttgctgtgtctttagatgttggacagcagagagggcaagctcatgtctcttcta

SEQ ID NO: 10945 - DNA, 521 bp, Homo sapiens
ttctcttgctgttgtcgtcagtgatccttatccttctggaaaggagtttttgtggggagtttctgggatcctcaagggcttaagccactgcagccctgctcctccacctcccctgggggtcctctgatcttcccactgagaacctcgttccacgtgcgccctctctcctgggaacacatggtgctggagtccagtggggcatccacttagagtctggagttggtggtaagacttcatttccttgatttgtgttgacaatgttggctgaagtgttttcctttggtatcctagaggctctgtctgtttctatgagggattttgtgcagattacaagtctatgctacygtcataattttgcctgcaatgacttaaccaaggtggatctgccagactccaggcaggctgtgccatgactcagctgatgccagagacttgtccatagtcaagacacagggccagaaagaccactggatgtatctctgaaaacaaagtcctaaagctaaagacattgtccttattct

SEQ ID NO: 10946 - DNA, 520 bp, Homo sapiens
ccatgaaatcttcacaatttatgttcagagattgcagtaaagacaggtataagaaattataaaagtattaattttgggaactgataaatgtccattgaatcttcacaatttatgttcttctgccgtggcttcagccggtctctcagttcagggtccctgacttcccgcaacaatggtgaaaccccatctctactacaaataaaaaattaggtaggtgtggtggcatgcacctgtagtcccagctactcgggaggctgaggcaggctaattgcttgaacctgggaggcagaggttgaagtgagccaagatcacgccactgcaatccagcctgggcgacagagtgagactcagtctccaaaaaaaaaaaataataaagcatctatttwaacagattaaaggctctgggacacagtacaataactttatttaatctagggtttcacaaacttttttgtcatagaatattctttccccttaatacatattaacatctatgaaggttttggaaatatttcattaa

SEQ ID NO: 10947 - DNA, 616 bp, Homo sapiens
tctatcagaactcaagaaaagtacttggcaaggctgaactctaggaatattttcagaaatattgaaggtgactgtgaattgtctatttcccaagagtttcatatgctgatacagaagagcttattcaaagaaaacctgtgtgagggtttttttttataggaagtgttttatacctttagaaaaatatctgagaacattgagagaaaatcaagcatcttgggaaaatctcaaattttattttcatttccttaactaaattttgtaaatcaaaggcaacgtcataaaatgcatgattgctgggtrttaagattaggaaaaccaagggaaataagtaaaatcatatatctcatcacacaattttcctgctatattatgcttatggaaataacagtcccccattattctattctaagtggaatgacatgctttccatctgggaaataagagtgggttaacatttctcactactccaaactgttgttttataattctgagtgtttacatcaagatccaagctacaaaaaatgaggccttgcaatgtaaaaaaaagtccaagattattgctaatatacataaattattagagaaaaaagcagcttctcagattacagtatca

SEQ ID NO: 10948 - DNA, 961 bp, Homo sapiens
tgcaatacatatatatatattgctatgcaatacatatatatagatgtctcttctcaacagcttagatgaaaacaccacgatatatatatatcatgtgtgtgtataatatatacacattaaagctacttaggtgattctggtgcagccaggtttgtaagctaataatctacgttctagattcayattttctcttctgcttctccaaggcctgccctcccacttctctttttcagtgctaatacttgcaatcaccctaggtgatagacactcaaaatacttctgctaagaatagaagcctgcttgcattttccctaggcaagttgtcattggggcaactgattcagaatacatctcaacaattccaacaacctcaagtaacctgtataaaagataggactctctgaagtccagttttgcaactaataccaatgagggaaacacaaatttgacttctcaggattggagagaaacatttctcatgatgtagacatgtgtatcataggaaacatcctacagacagttttcttaaaatcttgtatagatcttgttcttgtcttcaacatttcacattcacattcacagaagcttctgaaatccctccatctttcacctcactatgtcgcttgtttgtctatcctctgccctcatgttgacttcctgttgggtgacaactggcacttcaggttctggattctggctgagctgagacactccaaggtggctggtggtggtctgggcaactccaggtactcaggcatttccttgcttcacttttttttttttttaaacagagtcttactctgttacccaggctggagtgcagtggtgcgatcttggctcattgcaacctccgcctcctggattcaagcgactctcctgcctcagcctcctgagtggttgggattacaggcacctgccacaatgccctgctcctttttttgtatttttagtaagagatggg

SEQ ID NO: 10949 - DNA, 501 bp, Homo sapiens
tgattcaaaattacataaataggttcatacaattcttacacatgaaatttgtttataacttgttagaaaacattgcaaaatatttgtagtcccaaagtaaaggcacttaagggattagagaaatgcttggtcatgtgatctgggtgctccttaactaacaatgtgaaatatggaacagatataatcaagaggcatgtattcatcaagaattgagcaatttaaggctgctcaggtgaaggcaaatgaatatattcacaaaatctattttatcaatgagcttagcaattcatatgaaatatgttgtgatcatgcattgtgttaaataacatcagtctgttttcaagcagaaaataaatttcacttccatttatcttgttaggctcattttaccccaaattaactatttctgaccataactattaacaaataaagaatattaytattctcctttcagatgtatttaaacatacttaaatggttagaattcttaagttttaaaca

SEQ ID NO: 10950 - DNA, 501 bp, Homo sapiens
tgattcaaaattacataaataggttcatacaattcttacacatgaaatttgtttataacttgttagaaaacattgcaaaatatttgtagtcccaaagtaaaggcacttaagggattagagaaatgcttggtcatgtgatctgggtgctccttaactaacaatgtgaaatatggaacagatataatcaagaggcatgtattcatcaagaattgagcaatttaaggctgctcaggtgaaggcaaatgaatatattcacaaaatctattttatcaatgagcttagcaattcatatgaaatatgttgtgatcatgcattgtgttaaataacatcagtctgttttcaagcagaaaataaatttcacttccatttatcttgttaggctcattttaccccaaattaactatttctgaccataactattaacaaataaagaatattatyattctcctttcagatgtatttaaacatacttaaatggttagaattcttaagttttaaaca

SEQ ID NO: 10951 - DNA, 501 bp, Homo sapiens
tgattcaaaattacataaataggttcatacaattcttacacatgaaatttgtttataacttgttagaaaacattgcaaaatatttgtagtcccaaagtaaaggcacttaagggattagagaaatgcttggtcatgtgatctgggtgctccttaactaacaatgtgaaatatggaacagatataatcaagaggcatgtattcatcaagaattgagcaatttaaggctgctcaggtgaaggcaaatgaatatattcacaaaatctattttatcaatgagcttagcaattcatatgaaatatgttgtgatcatgcattgtgttaaataacatcagtctgttttcaagcagaaaataaatttcacttccatttatcttgttaggctcattttaccccaaattaactatttctgaccataactattaacaaataaagaatattattwttctcctttcagatgtatttaaacatacttaaatggttagaattcttaagttttaaaca

SEQ ID NO: 10952 - DNA, 552 bp, Homo sapiens
attcaaaaagagggaacaatatgtaacatttccctttttttctggatcttggagccatttttggtgtagyacactgaatgctatattgcattctaatggccgcagatactaggataaggtccctgttggagttttaggaaggtcaataatgccgctcagattggaatccactgagagatagatctagatcagttgcatgcagatagatatatcacatttgttattgccaatgctatgtaaggaatgtggcctaggtggttcagtaattctaatattctacccagatgtaggcagacctgtttacccagctcccagctgtgctggaaaaccacaggcctccccaccttggaggagcaggtaatgtgtgctacctacacgctagtaggctccagggaacaagagagaggagggaaggactcaaatgttcacagcagattattcttccatgttcatcaaccaggttagtcaggccaggagcactactctgatggacacccctcaatagacatgaagccatgaagactggggagtaagtgttcctccctaacaccc

SEQ ID NO: 10953 - DNA, 525 bp, Homo sapiens
gccctcagcctgggtgacagaacaagacccttttattttctaaaaggaaaaaaaaaaagcaagcttcccaggaacccaggaagtgttacttgtccaaataataccttagtgtatacattctgacccaaagttttaaatgaaacttaaaaagtgcaatgtgaagttgtgtcagttaagattactgacttcagttttctgttcttcaaatgttgcctttgtctgaatgcctctgcagaaaggcttgttgagaagatgcatatacatatgtatgtagagtattatgtatgtgtctctgcatatgtgtatacatatgtgcatgaagatgcagcgttttacaacatataagacttaagctaaattattattggaagtaattacctacaggtgaggaacctgagaggaaaggaaagtgtagtggtatgtccaagacttgagaataartccctgtgaaatcaaaggcaggtcaccaattcacagtcccccaaggcttgttcacatccacccactcctggcgcctacccttta

SEQ ID NO: 10954 - DNA, 578 bp, Homo sapiens
tgcctctgtatacatagaaaaaatactggaaatatatacatcaaagtattaacagtggtttataggtttttttgtttccttctttttgcttatctgcctatcacatgatcatctaaaaaaaacctatctgctttcttcacactcgtaaagttttactgaattcagtagcctttctatgatttctatctctrtaataccaatgtcaactgggaatctcagatggtccctgatgtttgacggtttgacctaatgatttttcaactttacatgataagaaagcaatacacatttagtagaaactacttgaatttttgaattttaaccttttcctaccctagcaatatgaggtacaatagtatctctagatgttgggcagcaacagcaatctgcagctcccagtcagctacgctatcatgagcgtaaatgaccaatactctacagtgtactgtgttgccagatgattttgcccaatggtagtgttctgagcacatttacggtgcactgggctatgctatgatgttcagtaggttaggtgaagtaaatgcatttcaacttgcaatgttttcaactttgtatag

SEQ ID NO: 10955 - DNA, 374 bp, Homo sapiens
tgatttccaacactagggtcttcacttatttttcacaacatgtggtaccacaaaaatatacattgcttaccgtgtaaatcccaattctacaaacagcaaatgagatctggatgcattcagacattctctataagattaaaataagaataagagaataagaaatgtttgtaccaaagaactgtcttcattccccttgctcttgtttccctctttaaagaaaatctgctgtattccaacatctgttttatgaggaagtggctgaatttcttccgtctgttttctagrctagctcaaagacagggataataaagtctggggcatgtggctttatcttgggactgtaaggcagatactttgtcctctaatacaagagc

SEQ ID NO: 10956 - DNA, 373 bp, Homo sapiens
ttcataatrtcatattttaatccaatcaatgcacattagctacaactaatgtaaatgtcattgctattctttcctcaaaccattttttaaaatttgctaaaactcagtacagcacaatctttccacctcagattaataaatattggacagcttttctatatttttcttctcagtggaatattattgaacaaaactctaggacattttaggccaacaaatgaaacagattctacttgtatccaagtgagttcttgggagtgtcaaccttcttcatcctaggcccattactctccttaaatattgctactagagccaaacagatttggtcccacgtggtcctcaatctccacattttctccctttgtttatgttg

SEQ ID NO: 10957 - DNA, 524 bp, Homo sapiens
tgacagaagagagaagagaagctcgaggcagggcctgtatccagaggctagagacccagtgcaagagcttttgtagctggtatataactatgtcttacagctttgagtgcatgtatattatttgtaactgctttcatatgtgataatctggtctaaatttagtgcaaaatcacaggaagcaaatatatatatatataaaataaataataaatatatatatatttatatttatatctctgaaaagaagcagtccaagttggggagtawactgaaccaaaattctgattcaattaatatattaaattggaatcattccctgaagctctgggattactctctgcacagatattggtttactacaaagagaactatttggatattgtagtcatctgaaacaatgctaactgaaggattagagaaacccataaatccatctgtcttggaagaattagtaaggtaagaatacatacatattagatagaaggaattcagacatttaaagtaacatttctcaaactattttg

SEQ ID NO: 10958 - DNA, 520 bp, Homo sapiens
cagttttgtgaactagtaagtcctccttccttttttattttttctttttttagcttaagttaatttcatttgaatttytgtcatcttagaacaaaacagtttgtattaacacactattctcatgaacaccctgggtcactggatcagatatgatgacttttaaactttagaatacatacaatttaaacagaggacagagtgcggtgactcacacctgtaatcccggtactttgagaggcggaggtgggcagatcacttgaggccaggagttcaagaccagcttggccaacatggtgaaaacccttctctactaaaaatacaaaaaaattagccggacatggtggagcacaactgtagtcccagctactggggagggtgaggcaggagaatcacttgaatccgggaggtggaggttgcagtgagccgagatcgcaccctgcactccaccccaccctgggtgacagagcaagactctgtttccaaaaaaaaaaaaaagttaaaaacataaacagagggcatt

SEQ ID NO: 10959 - DNA, 520 bp, Homo sapiens
cagttttgtgaactagtaagtcctccttccttttttattttttctttttttagcttaagttaatttcatttgaatttttgtcatcttagaacaaaacagtttgtattaacacactattctcatgaacaccctgggtcactggatcagatatgatgacttttaaactttagaatacatacaatttaaacagaggacagagtgcggtgactcacacctgtaatccyggtactttgagaggcggaggtgggcagatcacttgaggccaggagttcaagaccagcttggccaacatggtgaaaacccttctctactaaaaatacaaaaaaattagccggacatggtggagcacaactgtagtcccagctactggggagggtgaggcaggagaatcacttgaatccgggaggtggaggttgcagtgagccgagatcgcaccctgcactccaccccaccctgggtgacagagcaagactctgtttccaaaaaaaaaaaaaagttaaaaacataaacagagggcatt

SEQ ID NO: 10960 - DNA, 569 bp, Homo sapiens
gaaaatgagctaatctgtaaaataaatggttttcaagatcagtttgctatcttatccttatgtcttccttttgcatgacgaagcttagtgggtattggaggaaattttattttttaaattaaggaataaaatgcttcactggtttttgatgtattaccaggataatacctattttaatgatgaaatttttagtcttttgtggaattttattaaaataagtaaaaagaattttatgatttatttaaaggaggtycatttcaactcctaatccacaaccattctggttgaaaaatacgtcattaaatggagagaaagtgatttttaaatgttctatggaattaatatagcaatgcaagatggttaaatacagaaatgtaagaatttattgcatagtaccttagcatagtactaaatagataatactaagagtacaccattttttttcctattttgtcatataattgctgctttttatgatttctaccaacagtgatctctatgagtaaagcactgataggtaatttttttttttttttaagacggagtctccttctgttgcccaggatgga

SEQ ID NO: 10961 - DNA, 532 bp, Homo sapiens
ttttacccatgtttcagagaattgcagagagctggactctgcattacagatatctccttgtaaatgcgtacatcaggatccctagatacattagctgggaattgagagcacaaattagattaaagacagagcgcgtctccccctatgaaattacgtgtcagcctgttcactgaaccactgctgacttgtattttttttaaatgaaaattgccaggacttctccaaagctcaggaaaagaaaaaaagactcctgaaaaaaaaattaaaggaaataattraatttacatagcttggagtcattggatttcttattcaggtgtcagcaatatcctttcaatcttccacattttcagtggaggaagccaaaactcctggacatgtcagcatgttgacgataaatactctctttgcagcaaggagaaaagataattattaagagtagctctgtctttaaacaggaaagacttgtgaagaagtgtctagaaggggttccaaggtaactggtatgagcgagtttccgacctgtgagcat

SEQ ID NO: 10962 - DNA, 549 bp, Homo sapiens
acatatcaaaagcctcttttatcagtgttatttctactttgaacayattcctttaatttaagtcagtatggctggtttgtattaaaatattggaaaggttcttaggtttcagactgatagtaaatccataaaaaaacaaatggcttttccatttccgggaaatctaattaaatgttgtgaaaacaaatgtgctctggtgtggcatataatggaataatatcgaagaataaatcttgggtttctgttgtttggtaagctctttgaactctggagaatgtgagaaaaataccttcccaagctagggatctgggaacagggagataaggaatgacaaatactctctcaaaactactccagattctccacaccatagaaacctaaatcaaattaacggaagacctctaacatagctctcctgccgggtggcaaattttgtatccaagaggttttctccttatagtccctaccagaatcctcaagtgaaaaaaaaaaaagaaagaaaaaagaaaatgtgtctcagcccctcccccactaccaccacctcacact

SEQ ID NO: 10963 - DNA, 584 bp, Homo sapiens
atgtgtatttgtaaataaatgatgagtgaaaaaataaaaaaattttaaaaagccaatggtttcaattcctgatgatgcaaagaagttatttggacttttgagtaaaaatgtgtatgatacctttgctgaggaatgtagctatctctgaaattacatggccagggcagtacagatcacttcactggagtttgaaagataaagggatctgaggtccagcaaccccactgtaggagtggcatatacctgtcactaaccacagaaggaacagactgtagatgtgggttctttcctgcaatatgccaaggctaatatttcctctttaaaaacaccatcgttttagctgtccttgttgcaagctcatcaccatagccagggacacgcttcatcttactttcccataaatccagtgcagtttcagtcttttaaaaaacaacacacatcacaaggaaagctgacaacagatataatatttgacaaacacattctagaaatcagaataycagctgcagaagtagacattatagtgttggaatgctagggacttgatgaggtgaggatggggtggaggtgaatttccacaatga

SEQ ID NO: 10964 - DNA, 549 bp, Homo sapiens
cgtaatttgagtgacttaaacagaaattaatttttcttgataacaagaaataaaaagaagtaaaaggtggctgggcacggtggctcacgcctataattccagcactttgggaggctgaggcaggcagatcacctgaggtcrggagttcaagacaagcctggccaacatggcaaaaccccgtctctactaaaaatacaaaaattagctgggcatggtggtgcgtgcctgtaatcccagctactctggaggctgaggcaggagaattgcttgaacccaggaggcagaggttgcagtgaacccagatagcgccactgcactccagcctgggtgacagagtgagactccatctcaaaaaaaaaaaaaaaaaaatagtggtggctacaggcactgatttagtggctggttggagtcaggccctgtgatttgaaacttagccccatgtgctggaggcctcatcgtggcaggtgactcttgcaactgcaggtgctgcatctgcattcagggaaaaagggagcagagaaggtagagcagcaattctgtcccttctat

SEQ ID NO: 10965 - DNA, 535 bp, Homo sapiens
  misc_feature (1)...(535): n = A,T,C or G
tttctcctgggctgtaggtctgcatttcgggggcatccagcacactgcttcagattctagcagttaccttgtaggcactcagctgataaagatacaagcctcgtaaattgccctaaagaacaagctcctttaatgtgatggttcttttatttacctcaattgagtacatccatctttgttgtagttcagtgttctccgagtgtgatgcctggaccatcagtatcagcatactttgaggaattgttagaaatgaacattgtggggctccaccccagagctacctaatctgaaattctggaagtgcggcccagtgatctgtgtttcaaaagcaccttcccaccttaggggattctgatgcaaattgaagtttgaggtctaatccggctcagtygttgccagccctcattacaataccaggaaagcttcttaaactactggttactagcttctgcatccagaggctctttttccaatgagagagaatgttaactcaccatggtcaagcaaantatttacagattatggcactttgaat

SEQ ID NO: 10966 - DNA, 537 bp, Homo sapiens
tactttaactctggtttattttatttaaattctcattgtgtcccaaataatctaaaccaagagtattattaggtcttaaaataattcacttgtatttttcttaaggaggctattcacagtagattttgtgggaaaataaaaattagaattcacggctgattgactaaataaaagcaactaaagaaccaaagggtatgttgattttaaaaaggaacttctgaaggtatctggctcataattacccagagataataattttggttctatagctcagattgagaaagctatacataatataatgcaggatctataacatggattgtctttctcaatttctcactattcctcactctcacctttccttctctctttcagctacctattcctatctaatctatctatctatctatctatctatctatctatctatctatctatctaactgtctatctatctatctatctatctatctatctatctatctatctatctatctatctgcctatcttgtttttgcyagagaggcagaatggttca

SEQ ID NO: 10967 - DNA, 608 bp, Homo sapiens
caccccgaacaagagtagagtgaaagcaaacctagggagaggaggtaaggaggacagaggcagagaggtccaggaagcatttcagagcaaccagctctagatgtggaatttcttcacgatgtcatattatcttggaaatgcatatacattttgcctctattctataatatatccatatttgtgcatttcaatcaaataaagaaacacattacaggaaagtgtaccatgtttactacccaactttgcttgccaatcccccaaatgcactcaggacytcagttttgaaaatggtgccaggggtctacagaatgttacaagcagactagcagaacaagagctaatagggaattgacccagaaatgctacagaacataatattctctatcaaatgcataattattaagatgcatcaaattgattaaaatagtctctacactacaaatataagcaagcatgtattaccaaacggtattcaagcatcaaacctttgtttctatcttgaagtttaatttgtaagatgttgtgcacatctggagagaaaataacacagtccaagaaaggtggaggtggtaaaaatccaagaataaagtcattgtcattgagtgcaa

SEQ ID NO: 10968 - DNA, 1217 bp, Homo sapiens
atactcagttttataaggtgatactttttaaataagcgctttaatgaaaatggttagactgaaaataattttggtccttaaaaggagtcaggagcttttatatataaggtacatattttaaaagaatacctcctttataacagggttttacagacactaccataatttataatcattattttttacttttgggttcacctagatcatatgagttgatgtgatacttctagaacaaaattattcatagtgcgttttttgtaatttatgattgttaagtaagcttgacttataaattgacattgtaattgtgtacataattggatatatgtgttaaaatttaacatttagatttacttaattgtagaaaatacaaatgtaaaacttacacatggaaagaactgtatgcagttgactttactatgtaaattggagggaaacaaagttttagatccattttctttcaaaattttctttattgtaaagtatgcaaaatatatattcataccatttattaaatcagaatgtttatacaaaattgtcgtgtttgagcttattaaatgacacaggtttgaaacttgccttatctctgtgaacataagcatattttatggatgggaaagggaaattagtatgcttttgaacttggtgaatgtattaataatttaatccagtgatttctygtatctcaacagatgtttttaattcaatacaaaccacatgtattatgaaatatatattagggaaattctcttacacaagtttctacatatgacagattaatatataagatttatataagtaggatacattttacagatggtttatttgtaaactatctgataaaaaagtgtgggatgtgtttaatttatctcagtttattgtaatagtaaaatattttaaggaaataatattagatgttaatttgaaatgtaatgttcttttcccccaggctccttcagcttttttttcagtaaagtccaataaacactaacttttacagcacatatgagtaatcaaaaatagatgaaagataatccactttgaaaaactcaatgggtaagttggattataacattttagtgcttcagctaaaattaatttagcttataaaaattatcaagaattgatcatttttttcttttcaaatttagtgcgtctgactttccatttaaaattttattttgtagtgcttttagactttgtaaaatagtacacat

SEQ ID NO: 10969 - DNA, 528 bp, Homo sapiens
ctcactgcaacctccacctcaagagatcctcccacctcagcctcccaggtagctgggactacagacgtgagccaccatgcctggctaattttttatttttgtattttttgtatagatggggttttgccatgttgcacaggctggtctcgaactcctgagctcaagcaatctgcccacctccgcctctcaaagtgttgggattacagrtgtgagccaccacgcctggccttgataatgaaagtacattttttttttttttttttttttttttggagacagtgtcttgctgtgtcacccaggcttggagtagagtggcacaatcccagctcactgcaacctccaccttctgcgctcaaatgatccatcctgcctcggtgcatgccaccacaccgggctaattttttgtatttttagttgagatggggtttcaccacactgcctaggctggtcttgaactcctgagctcaagtgttccacgagcctgacctagtaaaagtactttttaagtgaaactattttagttttcaa

SEQ ID NO: 10970 - DNA, 528 bp, Homo sapiens
ctcactgcaacctccacctcaagagatcctcccacctcagcctcccaggtagctgggactacagacgtgagccaccatgcctggctaattttttatttttgtattttttgtatagatggggttttgccatgttgcacaggctggtctcgaactcctgagctcaagcaatctgcccacctccgcctctcaaagtgttgggattacagatgtgagccaccacgcctggccttgataatgaaagtacattttttttttttttttttttttttttggagacagtgtcttgctgtgtcacccaggcttggagtagagtggcacaatcccagctcactgcaacctccaccttctgcgctcaaatgatccatcctgcctcggtgcatgccaccacaccgggctaattttttgtatttttagttgagatggggtttcaccacactgcctaggctggtcttgaactcctgagctcaagtgttccasgagcctgacctagtaaaagtactttttaagtgaaactattttagttttcaa

SEQ ID NO: 10971 - DNA, 505 bp, Homo sapiens
ctatttcagatacctgattttttaatttattaggcaagtatgtttcaggtacagcacaggaaactaaagaactgtgtcttaaggaatttgtgtaatcacaatgtaatcaagacaaaagcttaactaagaatatttgaaattctggaaacaaagtgtgtgtgtatatgtgtgtgtatatatttgtttttatttatatatgtataagatataataggaatacatatttggggacactgacatcattaatccatcaaataaatacttatgaaaacctactatgaactaggcaaaggccatattctgaaaatagtaaacaggaaaagcacagtctttttcctcttaaaataaacarttgttcaaaacatactgtgagtgctggtcatgtgtcccctacctatcttcccctgactctctgtattctagtggggctgatgttcctggacagcatctccttcccatgttactaggcttcagtttgggttctgccacaaaaacacactagtgg

SEQ ID NO: 10972 - DNA, 570 bp, Homo sapiens
tgaaaaataacatcagaacaatcattgttctgtcttaaagaaatacagacagcttttttttgcccttatgtctttagtaatatggggcacaatcatatccaaatttccaaaacagtttggagacttgwcttaacaagatgcgtggaaaatgtgctatctcctggaccattacctatagaccatggactggtttccatcaacatttagaataattttgatgattacttgcagaatcaaggctatccttgaatccgaggctatccatatttctttctctcctctttgcaaaataaaccattaagtttggaaacatcagtacaagggctgagtttggaggcaccaaaaacactctgtgtttcttgttatgtctaaatgatggcattctaataaaacaaatccacaatttggaattatttgctgttttaattatccccatctcagatgcctcctattaatgccaaaaatttactaaaggttcaagggtagacagctaaatgagtgacatttccatgtaatatgctgatacaagtaaaaagtcactcaatttgatcatcattacatcatcagcag

SEQ ID NO: 10973 - DNA, 570 bp, Homo sapiens
tgaaaaataacatcagaacaatcattgttctgtcttaaagaaatacagacagcttttttttgcccttatgtctttagtaatatggggcacaatcatatccaaatttccaaaacagtttggagacttgtcttaacaagatgcgtggaaaatgtgctatctcctggaccattacctayagaccatggactggtttccatcaacatttagaataattttgatgattacttgcagaatcaaggctatccttgaatccgaggctatccatatttctttctctcctctttgcaaaataaaccattaagtttggaaacatcagtacaagggctgagtttggaggcaccaaaaacactctgtgtttcttgttatgtctaaatgatggcattctaataaaacaaatccacaatttggaattatttgctgttttaattatccccatctcagatgcctcctattaatgccaaaaatttactaaaggttcaagggtagacagctaaatgagtgacatttccatgtaatatgctgatacaagtaaaaagtcactcaatttgatcatcattacatcatcagcag

SEQ ID NO: 10974 - DNA, 570 bp, Homo sapiens
tgaaaaataacatcagaacaatcattgttctgtcttaaagaaatacagacagcttttttttgcccttatgtctttagtaatatggggcacaatcatatccaaatttccaaaacagtttggagacttgtcttaacaagatgcgtggaaaatgtgctatctcctggaccattacctatagaccatggactggtttccatcaacatttagaataattttgatgattacttgcagaatcaaggctatccttgaatccgaggctatccatatttctttctctcctctttgcaaaataaaccattaagtttggaaacatcagtacaagggctgagtttggaggcaccaaaaacactctgtgtttcttgttatgtctaaatgatggcattctaataaaacaaatccacaatttggaattatttgctgttttaattatccccatctcagatgcctcctattaatgccaaaaatttactaaaggttcaagggtagacagctaaatgagtgacatttccatgtaatatgctgatacaagtaaaaagtcactcaatttgatcatcattacatcakcagcag

SEQ ID NO: 10975 - DNA, 497 bp, Homo sapiens
agaagacttaggcaagaagaacttctttaggctctcatcattgcaagttgaggaacagagcttgctccaagtatgtttaaaaagtgggttatctatgtcctctgcaattccttctaaggcatttacaagtattagaccatatattattttactgagatagaatagtaaatattgaaataatcacattatgataattattgttacagctacgtatacaattattatttaaaagacccttagatagactagggtttacttaatttgctgtaaaatttgcaaayatataactttttccactaacacaagggtaaaaccgtagtcaatctcacagcgtattaagacaatttttcttcttgtccttctcttttacttgtattttcttatttaattaacttataagctattctattttaaaattatcagtgctttgttagagttaaaaataagggaaagtcataaatatacttactagtagcttcttaataaagtgattatca

SEQ ID NO: 10976 - DNA, 588 bp, Homo sapiens
ttctcctgcctcagcctcccgagtagctggattacaggcgccctccaccacacccagctaatttagcatggtggcctgaacctgtagtagcagctattcaggggctgaagtaggaggattgcctgagcccaggaggttgtgtctgcagtgagccctgatcaagccactgcactccattctgggtgacagagtgagaccctttctaaaaaaaaaaaaaaaaaaaagccaaagcatataaacttaaacttatgagagtttgggggttttatttttgtcttaaattattatatttcaatagttttggggtacaggtagtatttggttacatggataagttcttttgtggtgatttctgagatttcggtgcaccaatctcccaagtagagtgcgctgtacccaatgtgtactctttcatccctcaycccctctcccacccttcccactgagtgcccagagtccattatgtaattctttttaatttttaatttttttttttttgagacagagtttcacttgcctcggcctcccaaagtgctgagattacaagcgtgagccaccgcgcctggccccattttgtaatttttatgc

SEQ ID NO: 10977 - DNA, 562 bp, Homo sapiens
gtgggaggtgaggagtaactcctgggctctgatgagtattcaaggcaagtacagatctggaaagcctgtatgcaaaggaggaactcactgaaaagtgctggcctgaggagggcagaagggagggctggggaagccagcagcgggagcaaaggagtaggctccaactgggtgaagatgttggtgtggtgcgttatgtaaaatatacaaattattattggraataaccacgtctcagcagtgctagttctcagtttggagaatgggaaatcgaaaggatcagattcagagacggcaacttactcaaggtcacagcattttaaacccaagtgaaatctcctaggcccttcatgccacactcatccatccctacctacttgtgttgcaaccaagggccccactgtagtgcctaggggagcaggtctagggcacagtgccaggcctgattaatgtcttccttaccattttccagtgaggggctgtgattaggcctatttataggggcctggtcccttaatattctgcctggtgcatctcttgccaatcaaatcagtgctgtctgcag

SEQ ID NO: 10978 - DNA, 562 bp, Homo sapiens
gtgggaggtgaggagtaactcctgggctctgatgagtattcaaggcaagtacagatctggaaagcctgtatgcaaaggaggaactcactgaaaagtgctggcctgaggagggcagaagggagggctggggaagccagcagcgggagcaaaggagtaggctccaactgggtgaagatgttggtgtggtgcgttatgtaaaatatacaaattattattggaaataaccacgtctcagcagtgctagttctcagtttggagaatgggaaatcgaaaggatcagattcagagacggcaacttactcaaggtcacagcattttaaacccaartgaaatctcctaggcccttcatgccacactcatccatccctacctacttgtgttgcaaccaagggccccactgtagtgcctaggggagcaggtctagggcacagtgccaggcctgattaatgtcttccttaccattttccagtgaggggctgtgattaggcctatttataggggcctggtcccttaatattctgcctggtgcatctcttgccaatcaaatcagtgctgtctgcag

SEQ ID NO: 10979 - DNA, 1426 bp, Homo sapiens
ttaccaagattacgaatttatttttactgtttagcagtttgtgtacatttttctggaacattctcagccattatcctctcagtttattactttttctaccagaaccctgttctcttcttttaggactccatattagatgaatggggtgctttttaacaattgcgtcagattccagagtgtggatttattcatttaaacatttattatttttaatagtttgtttgactattcttcttctaatggaaatttatacttttctactaaaaacaatgctatagccaatgattttatttctctctttttgctagattctatttttattgtttcatggttaggtaatgactttttttttttttttttttttttgagatggcgtcttgctcctgttgcccaggctggagtgcagtggcacaatctcggctcactgtagcctccgcctcccgggttcaagcgattctcctgcctcagcctcccgagtagctgggattacaggcaagcgccaccacacccggctaattttgtatttttggtagagatggggtttcaccatgttggccaggctgatttcgaactcctaacctcaggtgatccaccttccttagcctcccaaagtgctgggattacaggtgtgagccaccccaaccagccaggtaatgacttctattgagatttttttcctgtagtccaatataagcccattttgctaaataatctgtaagtaaactatattctgtttgctgagcacaaaaatgtgagagggagtgccagattttgtctgttgaatccttaataatctcaattttgtttgcacaatttgttcatttaaaaagtgttcaggccaggcacagtggctcacacctgtaatccctttgggaggccgaggtgggaggcctgcttgagcccaggagttggagagatcttgtctctacaaaaaaattaaaaaaataaccaggaaaggtggcttgtgcctgaaatcccagctactcaagaggctgaggtgggaggatcacctgagcccagggaggtggaggctgcagtgagctgtgatcgcacccctgcactccagcctgggtgacagagcaagaccctgtttaaaaaaaaaataaaaataaagagtgttaaaaactttatgtgtcgrgatttatcaagtccccttcttttgccctaatcatttgttttgtagacttggaagctatgttgtgagacgtacaggtttctgttcatggcagtcactccacggggctgatccctggaatcctcctgaagcttttggggacctcacaactgggccctgggctccaccaggcttcctggcccctgaggggctgcccagccttcctcacaggctgtctgtggtggcctgcagggctccttgctgtgtctgaccagccttcctctgtggatacgggccccacccctcacccca

SEQ ID NO: 10980 - DNA, 515 bp, Homo sapiens
acctccatcccctcggttcaagtgattcttcgacctcagcctactgagtagctgggattacaggtgcataccaccacgcccggctaatttttgtatttttattagagccaggctttcaccatgttggccaggctggtcttgaactcctgacttcaggtaatccgttagcctcggcctcccaaccactttatttattaatctattttgagacagagtcccactttgtcgcttaggctggagtgcagtggcgagatctgggctcactgcaacgtctacctcccaggtttaagtgattctcctgcctcagcctcccaagtagctgggattacaggygcaagccaccatacctggctaatttttgtatttttactagagacggggttttgccatgttggccaggccggtctcgaactcctgacctcaagtgatccgcctggtaccatgaccatcaggattcaacccagatgtaatatgggccccagggagtatcattctgggccctgtgtggggtttca

SEQ ID NO: 10981 - DNA, 534 bp, Homo sapiens
tgcagatgttacaaccactgggcctggcctcactcagtgttttcatctcagttcctctctctcttccccttcaatttttcttttcttttctttctttctttttctttttttaaagacagaatctcactctgtcgcccaggctggagtacagtagcaggatctcagctcattgcaacctctggcttctgggtttaagcgatgctcctgcctcaacttccctagtagctgggatgacaggcacatgccaccacaccaggttaattttttgtatttttagtagagatggggtttcaccatgttggccaggctggtctcaaactcctgacctcaaggaatccgcctgcctcagcctcccaaagtatggggattacaggcatgagccaccgcacctggctttcctctttcaatttatttttgtttttatttttattgagacagagttttgctcttgtcgcccaggctggagtgcagtggcgmaatatcggctctctgcaacctctgcctcccgggttcacgtgattctcctgcctcagc

SEQ ID NO: 10982 - DNA, 521 bp, Homo sapiens
actcaccaaggacctgtaacattttagaaatggtgtcaggatcctagaggaatacaaagatattccccacccatgagaagggcaggatctgattgagaagacacagaaacacataaaaagaatattactacagtgcagaacattgtcccagagaatctgtgagaaagacttggttggtgcttgaaaattcaaaaagaaaaaaaaaagtggccaggctcagtggcttatgcttgtaattctagcattttgggaggctgaggtgcatagatagcttgagcccaggagctcaagaccagcctgggcaaaatgacaaaaacctgtctctaccaaaagtggtgcacacctgtagtcctagctgcccaggaagcagaggttgcagtgagccgagatcatgccacttgcacactagcctgtgcaacagagccctgtctcaaaagaatgaaagaaagaaagaaagaaagaaagaaagaaagaaagaaagaaagaaagaaagaaagaaagaaaagaaaagaraagaaaag

SEQ ID NO: 10983 - DNA, 631 bp, Homo sapiens
cgacaattccctgcatccctttgtaacctgatgcctttgtcatactgaagagttccagccgggaggaaagggactaattgaaggcccaaggtttccattccttcagggaggaaactcatttcatggctttcttcatctctgcctgtcaatcagcttgcatgtattgtcagccarctgagtgtgggacaccagggtggttgtagaaaatatagaaatttgaagaaataaataccccactggcaacattattacaaatcacctccccaaaataacaagatgtggggcaaaagcgatcatttcttccagggaatcctaaaatgtaatattccctgcaccaacacagtaccttactctgtaatgacgagcttatgttctctcctaacttagcccacaatactttggcctttatttcctgcctactgcctacttcctacttcctacctagttaattctgatggagcatgtggggcacgaaacacacaagtgcaccagctcacagttgcacacacctacctaagctaatttccccacattggctgtggtctcagatatctccacaacccctccttccaatcttttcttccattgccacagagcatctagttgagtacttgacatttcctttgaatta

SEQ ID NO: 10984 - DNA, 631 bp, Homo sapiens
cgacaattccctgcatccctttgtaacctgatgcctttgtcatactgaagagttccagccgggaggaaagggactaattgaaggcccaaggtttccattccttcagggaggaaactcatttcatggctttcttcatctctgcctgtcaatcagcttgcatgtattgtcagccagctgagtgtgggrcaccagggtggttgtagaaaatatagaaatttgaagaaataaataccccactggcaacattattacaaatcacctccccaaaataacaagatgtggggcaaaagcgatcatttcttccagggaatcctaaaatgtaatattccctgcaccaacacagtaccttactctgtaatgacgagcttatgttctctcctaacttagcccacaatactttggcctttatttcctgcctactgcctacttcctacttcctacctagttaattctgatggagcatgtggggcacgaaacacacaagtgcaccagctcacagttgcacacacctacctaagctaatttccccacattggctgtggtctcagatatctccacaacccctccttccaatcttttcttccattgccacagagcatctagttgagtacttgacatttcctttgaatta

SEQ ID NO: 10985 - DNA, 631 bp, Homo sapiens
cgacaattccctgcatccctttgtaacctgatgcctttgtcatactgaagagttccagccgggaggaaagggactaattgaaggcccaaggtttccattccttcagggaggaaactcatttcatggctttcttcatctctgcctgtcaatcagcttgcatgtattgtcagccagctgagtgtgggacaccagggtggttgtagaaaatatagaaatttgaagaaataaataccccactggcaacattattacaaatcacctccccaaaataacaagatgtggggcaaaagcgatcatttcttccagggaatcctaaaatgtaatattccctgcaccaacacagtaccttactctgtaatgacgagcttatgttctctcctaacttagcccacaatactttggcctttatttcctgcctactgcctacttcctacttcctacctagttaattctgatggagcatgtggggcacraaacacacaagtgcaccagctcacagttgcacacacctacctaagctaatttccccacattggctgtggtctcagatatctccacaacccctccttccaatcttttcttccattgccacagagcatctagttgagtacttgacatttcctttgaatta

SEQ ID NO: 10986 - DNA, 525 bp, Homo sapiens
ttgagtgggtggttagaaataagagtctggagccaaggggagatgtgggaagctggagagaaagtggaaaaggactatgtctataaatatgcccgatgcaaagcgtggcatagtcacaggcaaaagctatccacttgatctcaagaacaatcttttttcaccttctgggcttcacaaacaaaatagcaccttcagtttccatttcggtatagcaggtacggtaaccacaagaacgtgcaaagcagaaacaaagagcacttggcacccaagtcttatagaggctcatttctgatatcttctagggaacttctttgtataaggacrtcatagagaaggtttgtctttcatttgtctgtagcaaggtcgtaattttttttaatctttaaaaaaaattattgttaatacaaataagtctattgtgatttttaattctaggaagaatgccatacaaatcttttttagtacacgtttctgttttatactgtgatttggaggggtaaaaagggtaatacaaaatatggatag

SEQ ID NO: 10987 - DNA, 553 bp, Homo sapiens
gcttttgcactttttgttgtatttttaraaaacagagaatgcggaatggtttgttttcccccccatatgtttctcaaacccatttttcttgcttgcaggaagagagtatatttcctgtacaatatgttctttgtgccacagggtggggagaagaggaggggaaggtggagattcagcatgccaggaaaataatggcagcatccatatatggggaaagtaaatgtggcagcttttcttagcagaaacatacccatcatagtctcagtaggtgactgcatcccagtcacacagtgagcaggcagtcatgaaggaggcaaagaagctatattttgcattttaggatcagagtagtttcctaataaactaaaactgattcgtataatttgtatatttatgctatgagattacaaactaggtgatctagccctaagtactttatcatacttaacagagtgcctgcagattttactcagtttggttatagctcctacttctttgcacagtatttataagagcaatttcagattaggtggtcattgtgttgtaaaaccag

SEQ ID NO: 10988 - DNA, 529 bp, Homo sapiens
tgctgtgtgtctttgagcagctacgaggctcagtttcctcatctgtaaactgcaaatgatgtgcactttatagttgtcatgctgtgaggtttatggctaacatgctctatgcaaaatgttgagcatggtgctggctcaatcagtgtgcaaacaatggtagctgytctcctcattacatgggaggttgggatttgaacctaggtcctgtccttccccacttcataagccatgtgtttggttcaaccttccattcacaaaggccagcctattcttctcccaccaacagggccagagaactcatattccccagtaccagctgctgatattgtcttgcaaagagaagcataacttacatctgtgacgggttgaattgtgttcttcacaaaattcatatgtggaagtcccaatcccatgtacttaaccctaactctccaaataaagtcactgcagatgtaatgagttaaggtcatagtggagtagggtgggcccctactccagtatgattggtgttcttataaagaggggaaat

SEQ ID NO: 10989 - DNA, 1089 bp, Homo sapiens
aggctagcagctgccctcccagaagcaggatgtggctcactgcaaagcctttgcccctcacgcccaggtaggtttggacccccaggcagagctgagttgccggggacaagaatgctcagcagtaccaaygcagtgactcctcccagccctctccactcagcgttcagtctctccttaagtaaaagttggtgaaatagttaaagaacatgagtttgagggattccaaggagaattctgctaggatccctatatatctttgttgaccttaatggtagatttcggatttcacgaccctgatgcaaccaaataacatatttttgtcatgagaattctatttttccaggcttaatcttttatttttatttatttatttatttatttattttgagacagagtttctctcttgttgcccaagttggagtgcaatagggcaatctcatatcaccacaacctctgcctccccagttcaagagattctcgttcctcagtatgtagctggggtacaggtatgcaccaccaagcccagctaatttttatattattagtaaagacggggtttcttcattgtctgtattcgtcaggctggtctcgaactcccgacctcaggtgatccgccagcgtcagcctcccaaagctgggattacaggcgtgagcccaagactggtgcccagccaatcttttaattctatgaaggaaaatctattgaggaaaccagcaagggctcttaataaaatgtttgttgtgggtgtttgttgactgcttaaccaacacgcatgccctccctgcccgtctcctccggggccctgtggggaatccaccctcccccatcctcagccatgtggcttggtgcggccgaccctgctctcagcaggaggtgcgccccatggacttgaacccaagtcttgtgggtctagcagtagaacacaggctcaggacggaggttgctgtgtggccgtcaggagtgggcagccccagggtaaagctggtatcagaagaggcagagcccaacttgaagggtcttttgaaccctgaaatgaggccctgggaaagcaaggcccatgcgtgcttcagatgaacatgctcacgggt

SEQ ID NO: 10990 - DNA, 1089 bp, Homo sapiens
aggctagcagctgccctcccagaagcaggatgtggctcactgcaaagcctttgcccctcacgcccaggtaggtttggacccccaggcagagctgagttgccggggacaagaatgctcagcagtaccaacgcagtgactcctcccagccctctccactcagcgttcagtctctccttaagtaaaagttggtgaaatagttaaagaacatgagtttragggattccaaggagaattctgctaggatccctatatatctttgttgaccttaatggtagatttcggatttcacgaccctgatgcaaccaaataacatatttttgtcatgagaattctatttttccaggcttaatcttttatttttatttatttatttatttatttattttgagacagagtttctctcttgttgcccaagttggagtgcaatagggcaatctcatatcaccacaacctctgcctccccagttcaagagattctcgttcctcagtatgtagctggggtacaggtatgcaccaccaagcccagctaatttttatattattagtaaagacggggtttcttcattgtctgtattcgtcaggctggtctcgaactcccgacctcaggtgatccgccagcgtcagcctcccaaagctgggattacaggcgtgagcccaagactggtgcccagccaatcttttaattctatgaaggaaaatctattgaggaaaccagcaagggctcttaataaaatgtttgttgtgggtgtttgttgactgcttaaccaacacgcatgccctccctgcccgtctcctccggggccctgtggggaatccaccctcccccatcctcagccatgtggcttggtgcggccgaccctgctctcagcaggaggtgcgccccatggacttgaacccaagtcttgtgggtctagcagtagaacacaggctcaggacggaggttgctgtgtggccgtcaggagtgggcagccccagggtaaagctggtatcagaagaggcagagcccaacttgaagggtcttttgaaccctgaaatgaggccctgggaaagcaaggcccatgcgtgcttcagatgaacatgctcacgggt

SEQ ID NO: 10991 - DNA, 1089 bp, Homo sapiens
aggctagcagctgccctcccagaagcaggatgtggctcactgcaaagcctttgcccctcacgcccaggtaggtttggacccccaggcagagctgagttgccggggacaagaatgctcagcagtaccaacgcagtgactcctcccagccctctccactcagcgttcagtctctccttaagtaaaagttggtgaaatagttaaagaacatgagtttgagggattccaaggagaattctgctaggatccctatatatctttgttgaccttaatggtagatttcggatttcacgaccctgatgcaaccaaataacatatttttgtcatgagaattctatttttccaggcttaatcttttattttyatttatttatttatttatttattttgagacagagtttctctcttgttgcccaagttggagtgcaatagggcaatctcatatcaccacaacctctgcctccccagttcaagagattctcgttcctcagtatgtagctggggtacaggtatgcaccaccaagcccagctaatttttatattattagtaaagacggggtttcttcattgtctgtattcgtcaggctggtctcgaactcccgacctcaggtgatccgccagcgtcagcctcccaaagctgggattacaggcgtgagcccaagactggtgcccagccaatcttttaattctatgaaggaaaatctattgaggaaaccagcaagggctcttaataaaatgtttgttgtgggtgtttgttgactgcttaaccaacacgcatgccctccctgcccgtctcctccggggccctgtggggaatccaccctcccccatcctcagccatgtggcttggtgcggccgaccctgctctcagcaggaggtgcgccccatggacttgaacccaagtcttgtgggtctagcagtagaacacaggctcaggacggaggttgctgtgtggccgtcaggagtgggcagccccagggtaaagctggtatcagaagaggcagagcccaacttgaagggtcttttgaaccctgaaatgaggccctgggaaagcaaggcccatgcgtgcttcagatgaacatgctcacgggt

SEQ ID NO: 10992 - DNA, 1089 bp, Homo sapiens
aggctagcagctgccctcccagaagcaggatgtggctcactgcaaagcctttgcccctcacgcccaggtaggtttggacccccaggcagagctgagttgccggggacaagaatgctcagcagtaccaacgcagtgactcctcccagccctctccactcagcgttcagtctctccttaagtaaaagttggtgaaatagttaaagaacatgagtttgagggattccaaggagaattctgctaggatccctatatatctttgttgaccttaatggtagatttcggatttcacgaccctgatgcaaccaaataacatatttttgtcatgagaattctatttttccaggcttaatcttttatttttatttatttatttatttatttattttgagacagagtttctctcttgttgcccaagttggagtgcaatagggcaatctcatatcaccacmacctctgcctccccagttcaagagattctcgttcctcagtatgtagctggggtacaggtatgcaccaccaagcccagctaatttttatattattagtaaagacggggtttcttcattgtctgtattcgtcaggctggtctcgaactcccgacctcaggtgatccgccagcgtcagcctcccaaagctgggattacaggcgtgagcccaagactggtgcccagccaatcttttaattctatgaaggaaaatctattgaggaaaccagcaagggctcttaataaaatgtttgttgtgggtgtttgttgactgcttaaccaacacgcatgccctccctgcccgtctcctccggggccctgtggggaatccaccctcccccatcctcagccatgtggcttggtgcggccgaccctgctctcagcaggaggtgcgccccatggacttgaacccaagtcttgtgggtctagcagtagaacacaggctcaggacggaggttgctgtgtggccgtcaggagtgggcagccccagggtaaagctggtatcagaagaggcagagcccaacttgaagggtcttttgaaccctgaaatgaggccctgggaaagcaaggcccatgcgtgcttcagatgaacatgctcacgggt

SEQ ID NO: 10993 - DNA, 1089 bp, Homo sapiens
aggctagcagctgccctcccagaagcaggatgtggctcactgcaaagcctttgcccctcacgcccaggtaggtttggacccccaggcagagctgagttgccggggacaagaatgctcagcagtaccaacgcagtgactcctcccagccctctccactcagcgttcagtctctccttaagtaaaagttggtgaaatagttaaagaacatgagtttgagggattccaaggagaattctgctaggatccctatatatctttgttgaccttaatggtagatttcggatttcacgaccctgatgcaaccaaataacatatttttgtcatgagaattctatttttccaggcttaatcttttatttttatttatttatttatttatttattttgagacagagtttctctcttgttgcccaagttggagtgcaatagggcaatctcatatcaccacaacctctgcctccccagttcaagagattctcgttcctcagtatgtagctggggtacaggtatgcaccaccaagcccagctaatttttatattattagtaaagacggggtttcttcattgtctgtattcgtcaggctggtctcgaactcccgacctcaggtgatcygccagcgtcagcctcccaaagctgggattacaggcgtgagcccaagactggtgcccagccaatcttttaattctatgaaggaaaatctattgaggaaaccagcaagggctcttaataaaatgtttgttgtgggtgtttgttgactgcttaaccaacacgcatgccctccctgcccgtctcctccggggccctgtggggaatccaccctcccccatcctcagccatgtggcttggtgcggccgaccctgctctcagcaggaggtgcgccccatggacttgaacccaagtcttgtgggtctagcagtagaacacaggctcaggacggaggttgctgtgtggccgtcaggagtgggcagccccagggtaaagctggtatcagaagaggcagagcccaacttgaagggtcttttgaaccctgaaatgaggccctgggaaagcaaggcccatgcgtgcttcagatgaacatgctcacgggt

SEQ ID NO: 10994 - DNA, 531 bp, Homo sapiens
gtaaatatcatattttacatttggaaataaaataggatacctcttaattatattcttttatgaaattttatatcttcaattttctaaacagatacattcgctgtaatataaaatagatacctgggcttttttctcaaattaacttataggataacccactattcagaataaaactgaaaagtcagttttgccagtaatttgcttatcctttttgccaatcatccacacattttggaatatgtatataaataattttgttattgttgttgtttctagttacccacttaattctactttacttttcagctctgagtttggtacctgacacaggctctcctgaactatgtctcactcaatggtttttggttttcgcaggtgccttaagaacctacatctaaaggccttattagcctcaattctatttgtagattaaaaaaaattaaggataaygcttaggggtagggagagattgaataagcagtgaatagatactacttaaaatactcctttttacttttagcaaaaatgcct

SEQ ID NO: 10995 - DNA, 2030 bp, Homo sapiens
aggcctaatgtctttcagcttgggttagatttggggacaatgcaaatgtggggactgtttttgtattaacagactactatctttaaggatgagtttctcctatatcctcctaaaagtaggaagaccatactttccaaactaatctgattaatgtaaatgaaattacagtgacatgacattgacgatgatcttgaaatccaactcccccacaggcatttccagatgaagttctaagaagtacaccacgcctatatgctcaatgccacatctgcaatgactagctaatccatacctctgtttctgtagttactttgattacctgaatgatcacatttgcctcccaggccatttcaattacatagttctgagttccaaagagttagagatcgtgcttactaaacacgatccacagctgccaaatcttaagaacttacaaaactacacaggtctctctagagaaaaataagtcatagccagccctgctttttaaaagtatgtgttatatacagcaagcaacaaatccctacagagcttcctaaatagccctaataacataaatacatctcaaatatattaatcaaaaaacataccaactcaagaagtgggaaacgggtcagttcatgtggaatatctttaaaatacaccaggcggcatctgcatgctttgggcagtacaaggctgaggccgtaatgttttgtaaagctgtacaataaatcccagttgactgcatgagatctctcgagaggcaagactgaccccaggctggctactagtgctgccactgtgctgggtgaataagttctcatttaacctgccagtgacagtcctggttaggaatgagtgagaaaaatgcccaaagattacaattaacatggtcctagacaggcacatgcagacagattctacaagggtaactacattgagcggcagtcctgtcggtaaagatgtggggcaaccaggcaacttcatagattaatgagggatgggggataggaaatggcttaacatatttgggggcagttgggacatagctatcaaatttgaagtggacatgctctttgacccagccacaaccagaaatttatcctacaaatagacttgcaaatatgtgggaggaatattcagtacggcattatctacgacagactgcaatcaaccaaaatgttttatcaattaggttatataaattatattgcatgaataggacaaaatactgtgttacacctaaaaagaatgaggagaaatgatacggagatgcaaggaaacatttccatgttataattttttttttttttctcttgagacggagtctcgctctgtcgcccaggctggagtgcagtggcgcgatctcggctcacttcaagctccgcctcccgggttcacgccactctcctgcctcagcctcccgagtagctgggactacaggcgcccgccaccacacccggctaattttttgtatttttagtagagacggggtttcaccgtgttagccaggacggtctccatctcctgacctcgtgatctgcccgcctcggcctcccaaagtgctgggattacaggcgtgagccaccgcgcctggcctccatgttataatattaagaaaaaaagtcaaagtaccgaacagcgtgcacgtaagacacaaaagtggttaaacaggtgccaacattgattactgcaggagagagttaccggttgggggcaggaaaacttcttgtgcatttcataatgtcgacgctacttccatttttaacacatgcatacatgcctgctataggaagaaactaaaaataacaaaccaaatgctatctaattgataattcatgrgcctttatgaattttaatacagagcaatcaaggcaagtgagaaaaaaagggaggagcctattcctattccaaacaaggtatttcctgagcatcctgatttatacaaaggatgctgtaatgtccaggtaaggaggagcacttcagagtgttactcttggctgggtaccacgccatgtgctttatgaaacacattaactaattctaag

SEQ ID NO: 10996 - DNA, 616 bp, Homo sapiens
gaagattaagagaataagatctttaaagtttctggctaacttgttaaattgttaaaaagacatttttaagcccttaagtccttttttcttaattattccacaattgtatgggtccatgcattcactgtaacagtacttaatatgatcaacaaaatgtattcttcttagattggggatccagccattgttttaaatattacgccatcagttttgacttcaatgacaattatataaaatttactccaatgcagaagttcagacaagtggattgaacatatttggagcccaggatgaggtatgagagttgatttgaaataaaatcctttcaattcttaaaaaaaaatttccatttgcttctttaccttcataggcaagtacastaaaaaaattctccactcggatggcaacctggtagatttcacaccttgtacaacacaataattgacccttgaacaatgtatttttacctcctgtgcctccctaatcatgctagaaaatatttctgcagcttcaaggaattgttcaaaattaagaaagaagtgcagatggttaatgggtacaaaaaagatagaaagaaagaataagacctactatttgatagcacaacaagttgatt

SEQ ID NO: 10997 - DNA, 514 bp, Homo sapiens
ttatatggctgcccaaaagagaaagcagtgaacccacagcaatgaacacaggcatttataaatataagacaatcttatactttaggmaaaccccatttttcatagaccaaaatgcttattccttaaacctgaaagaactggggcccactgaatctatcttctggcctccagaaggatcacatttgtgccaaaaaaagatagtcatcgaatcctttccttcagaactgcctataacatacgctgtaacatacaataactattgccatgtatccttagatctcaaaaaaggcttcttgagaaggttttgggcttttatgtaattcatgtaaatgtagctataagatctgtcagccactcttttcagtagatttcaattaaatctcttagccctgtgcaagggcctaaagacgtagagaagtagaaaactcaaaatgataaagtcttagttgtaaataagaaacctgccaactaccaaaattctaacgattttcattttaagactctgcactcatac

SEQ ID NO: 10998 - DNA, 527 bp, Homo sapiens
aggctttcaactgattagacaaggcccacctacattataaaggacaatccgctcactcaaaattcaccaattaagggttaatctcatccagaaacactctgcaagttgacataaaattaatcacatatgttcccacctaacttcaaagggggtggaaaagctcaatccacaatttgcctagattattgagagctagaaaaatttgctgaattccatttatgtctactacattaaccaatgcagtcaggaatagaagaaccaaagataatatgcccagaaaaactcttacaggccacctaaaatcaaattccaggatgctagatcacaccaaaaaagtggggctcaagccattagaataaagtgaaagtgtaaatagagaacaattgaaaccmaatgaaaaccagattggatgttgatgactgtcatgcctctaaaatattcctgactcattgcctaaaaattaacctctctataggtacaaagtcaaacctggtaacaaatccttgagagtctctgcatcactaacc

SEQ ID NO: 10999 - DNA, 547 bp, Homo sapiens
ggctagaagtcgtcctgtcgtcctgcctcacagtaacatcgttaccgaattctcagcaggtgaaccaaatgaaatggtcaactgaaagccaaccagggtaaaacagatcttttatttcttgttgttgttattattattwttttttatgtggggacattcaagtgaactgctatatgcatttgcccccagtctctccttgtgagaagtgaatttcttcaacgtttatagaactgaggtattacattattggatgaattaagaaaacaatctaacctgatgtgtgaaaatttctgcttgtgagaatccgtgttatttcaattatccaatcaagagcctaattcgtataaaagaaacacagcagcttgttgctcatctttttatctaaggacggtttgtcttgacagagggtgtctggctgttttggggaaactattcctgaccttattttgactaaaaagttgcctgctgtaccaggtgagagaagctatcatttcttttataaaacttttagcttgctttttgttaagtgtgtttgaaagtcacttaa

SEQ ID NO: 11000 - DNA, 548 bp, Homo sapiens
cacgtgtgtaattgagtaaaatggcaagttgttgagttttttttgatttttgagttggggtctggctctgtcactcaggctggagtgcagtggcacaatctcactcactgcagcctcgacctcctgggcccaagccatcctcccacctcaatctccttagtagctgggactacaggtgtgtgccaccacaccctgctaatttttaaaatttttctttttgtagagatggggttttgctttgtcacccaggctggtcttgaacgcctgagctcaagtcrtcctcctgcctcagcctcccaaagtgctgggattacatgcttgagttacctgcctggcccattgagtagttttgaaaagaagaaaaacacaagctatagatgggttggggtgaccataggaaagtgtggaagaattcacagcagataaaccctgctcagcctccgccagtggggctggaggaaggggtagcagagaaaccaaccaacaaaaatattaaaatgggggcagggagggggacaaaaaatacttatccctataaagagagagga

SEQ ID NO: 11001 - DNA, 572 bp, Homo sapiens
taaaagtgtggaggtataagagagtacaggtgtcaccctgtgtttgagtcctagaatgagaaagatgaggcaaggcggggttgatcggcaggaaagggagcagaatacaatctaagctggccgggcgcagtggctcatgcctgtaatcccagcactttgggaggccgaggcgggcggatcacctgaggccaggagttcgagaccagcctggccaacatggtgaaacaccttgtctactaaaagtacaaaaaattagccgggcatggtggtgggcgcctgtaaccccagctacttgggaggctgaggcatgagaattgcttgaacccaggaggcagaggctgcagtgagccgagctcacgccattgcactccagcctaggcaacaagagcaaaactccatctcaaaaataaataaataaataaaatttaatttaaaaaaaggaatctaacctgcaccccataggtgctgatgactgataagctcttaaaatgttcagccttatcaagtgatatggcttcaatataaatagkaacagctgtctactaaagaaggatttttcaaagcctggaata

SEQ ID NO: 11002 - DNA, 530 bp, Homo sapiens
catccctccctttctttctttccttctttctctttctttctttctctctctctctctctccttccttacttctttcttttcttttctttctctttctctttcttcctcctttcttttctttcttgcctgcctgccttttaaaattgtggctagaaacttccagctaagtgtgaaatccaaccttagcaagtgtatgtgaccttattccattcaaagtaaatgggttccctctgccccaagtcatgttctaggacctaaggaaatcaatgaacaaaaacaaatatagctctcactttcatggtgcttggagtctaggggaggagaggcacattaacccacatattacactcatgaatgtataataacctattgagataagcactgtraaggaaaggaatatagtccaggttaaaacaaagagtcctgatttaaaggaagggcttccctgtggaaatggcacatgatttaactggacaaatagggcattggaaatggtggggcaggggttgtatgtcatatgtttcgtggtg

SEQ ID NO: 11003 - DNA, 751 bp, Homo sapiens
tgaacgtcttaacaggtacccatacattgatggataggttgattgatgaggtctgctctagtctgaaggcaaaggttgagattactgccagtcttgctgctgtcagtgagtatccccaaccaacgttatccctttgtaagacatcagctgtcactggagcccaggcagcagtagacaaaagcagctgataagcatcccccaatcctgataaggttttctagacacccagaaacttcccctcacatactgaagtactttctctagacagatgagaaagctgttttaaaggtccacagtctgacctgtagctcaaattatttgagcccagatttaaaccattttaggaatgcaygagacatttggacccacgggcttcccgggacaatagcctgaagcaaaattagcagtagcacagagtccaggtaaagggattctgctttattgtggggatggagtgagtctgttaagacactcgtttgtcaaataagaataatcacatttcctgcatagggttgctataagaatttcattttaaaaaaattaaaagagaaacatctatacaaatttcttttatatatatatatatatatatataattatattttaagttctagggtacatgtgcacaataaaacatgtagcaaataataagtgttccagaaatatgagccattatttaggcagaagcacaactttggccttgctgagaatagatctaccttttcagaatttcagaaaatttccatggagt

SEQ ID NO: 11004 - DNA, 527 bp, Homo sapiens
gagcactgcctatgtgacatctctgcttgctactgttaccatctcaggagttttagccaagctgatggtagagagtggaggaaagtccttgacaagcacaaaatattcctctttgccaggtccttgtgttagtcgagggtagcaggcacaatgaggacaaggcragtgtcttctctgggggaatcagcagacaaaccctggccgcctgccatacaaaagatgatgcccgatgcccacagacataattaatctgctatcctggggtcaaagatgggcttctgattctcagaacacgttacatagcagctcagttccctaacagcggccactgacgcaatcaccgttcctataaaggaaagtggaaagtcctggacagcaccgaagtgaaccgcttccacaggaggctgacaggatgcagcactcgccaggtgttgagcgtatgggtcactcctccaagcagcagagcaaacgctgggaggggtccactgatagctaacagtggagagttttctgttgctttcactttg

SEQ ID NO: 11005 - DNA, 527 bp, Homo sapiens
gagcactgcctatgtgacatctctgcttgctactgttaccatctcaggagttttagccaagctgatggtagagagtggaggaaagtccttgacaagcacaaaatattcctctttgccaggtccttgtgttagtcgagggtagcaggcacaatgaggacaaggcgagtgtcttctctgggggaatcagcagacaaaccctggccgcctgccatacaaaagatgatgcccgatgcccacagacataattaatctgctatcctggggtcaaagatgggcttctgattctcagaacaygttacatagcagctcagttccctaacagcggccactgacgcaatcaccgttcctataaaggaaagtggaaagtcctggacagcaccgaagtgaaccgcttccacaggaggctgacaggatgcagcactcgccaggtgttgagcgtatgggtcactcctccaagcagcagagcaaacgctgggaggggtccactgatagctaacagtggagagttttctgttgctttcactttg

SEQ ID NO: 11006 - DNA, 527 bp, Homo sapiens
gagcactgcctatgtgacatctctgcttgctactgttaccatctcaggagttttagccaagctgatggtagagagtggaggaaagtccttgacaagcacaaaatattcctctttgccaggtccttgtgttagtcgagggtagcaggcacaatgaggacaaggcgagtgtcttctctgggggaatcagcagacaaaccctggccgcctgccatacaaaagatgatgcccgatgcccacagacataattaatctgctatcctggggtcaaagatgggcttctgattctcagaacacgttacatagcagctcagttccctaacagcggccactgacgcaatcacygttcctataaaggaaagtggaaagtcctggacagcaccgaagtgaaccgcttccacaggaggctgacaggatgcagcactcgccaggtgttgagcgtatgggtcactcctccaagcagcagagcaaacgctgggaggggtccactgatagctaacagtggagagttttctgttgctttcactttg

SEQ ID NO: 11007 - DNA, 572 bp, Homo sapiens
tccaacacctatgaggtctgtgacattgagcaggttctctctcctctctgaaccctgggtttctcatcagcaagctgggtgaacttgcagtcagtctttagggccaatgtgacaactccatgagaaagcatttgtgaaaagagcccttcctttagagtagaggaaccacctggagctgaggaggacattgtggaggagaagagataagagctctgccatgaaggatggatggggcactgggatgccgagaggagaggtgagtgattactgaccaaagcaagaggctggagaaaggtttgcaaactcagtaagatgagtgagatttcagggagagagaaaaatatgcagcttgagatgtaatatggacagttatctgtrgctgatggagcctcaccagaagcttttgaacagggagggacattagagttgtattttagaaaacgtgaaaaagatagaaatagcctagaagccagaagtccagggaggagaatttggcaaaatagtaagaaacacatcagggcagtggggatgcaagatattttagagggacaggaaaacaggcctattcctga

SEQ ID NO: 11008 - DNA, 551 bp, Homo sapiens
taaagtatttgttatttcaaaagaaacaactattggccagttaactttcatgccgctattttcatttcctggtatgcttattgctactttgtttttggtggctaccttattaaaacttttagaaatttcagtttaaaattcaataagcatttagtttatcaggtttctctttttctctttctctactattgataaaggtgtttatgacaatgtatcacaggaatactgctttgactgcttctcaaagactttttcttgtaatatctttgatgttttaaaatagtctattatcaatgtgatctcagtattattaggggaatagttttaagtgtttctttttatatagcatttctgttctattatatcaaagagcatggtacgtacaggagctactcttttacagakgaacactaattatgagccatatgtgatacttctcccccaaatttcttgaaactttccactaaataactattttgattatttggttctcatgatgattagttatttctactttattaactatattgttggcactaatgtttcctttg

SEQ ID NO: 11009 - DNA, 509 bp, Homo sapiens
caggcgagggcacggaacctttgtggatagcacggaggtgaacctactgtcacacacagaacggacagcccacaccccaacaccagtcattcctcactgctgccctgggaccaggacggaacgacggctacctggaggcagagagaggggcaatgccccacgcagctcccatggccagcagagctcgcaccttccacctcataacccaggcgtgtgcctactggtaagcaccccaggtgaccccagaccgcagagcatgcactcaggactcaagctggagctgttaccataaagggcttcccatcctccactgcggggcagtgtttgtcattaccagtagtgrctctgactgtgggaaggtgggcgggccctatagcctgaagccaaatccctccagtggtcatcccctttggcatgcccaaggccagtccccagagacccgggggcaggggcagtatccaaggtgtgtgggcagagctgccaggtaagggacacagcacggatggggg

SEQ ID NO: 11010 - DNA, 527 bp, Homo sapiens
tctaatgccaaaagaatctaagagaaaggagaaaaaaattatttaaattattttattgaaggagataagttactcagatattaactggttgtaggcaaagggaataaacatggtgaagtcaggtttgctggtaaaggggagacagtactaaacgccctgcccaacaaatactcagaatccagggttttcatatttctccatggttcaatctctcacaggtcactttccattcaaaggattatggagaccaaataagacaggattctttcaggtatcaacccagagtctttaggtcttctctcagccaaggcatcgagtgaaaatacaatttatttttcggattcctctggaggattaaaaagtttctttcgcattgcaatgccatgctccctgctcttggtcctgttttctaygtactgaaaaataaaagaagggggggagaaaagaaacagcagattatgtcactatttatagcagtttactatttagaaatatttgcaaaatataaatgtcctttgaggttaaca

SEQ ID NO: 11011 - DNA, 648 bp, Homo sapiens
tacttaaaatagatgcatttccttacatgtaaattacacctcaataaagttaattttttaraatccatctttagttccagtgattcaagaagccacctttattataagaaatccatttgaaagaaaaaaaaaacaacaacgtttaaatagatttcaatttaaaaagagtcatggaccaaaaagcaatatacaaatataaacataaaacaaagattacttaaaagcagggttgaaaaactctgccccttaatttgattaaccatggaaataaatatgatacgataatatccttatttatgtctagtattacaaaaagcacaacataaatctaaagggctatactggcaaaatcctcaataacaagactgaaatgttattccacagagtctctttctctccactgtgcctctctgttgccagaccctctccccttttctgtctctgactataactgaccatatacaaattgaaatattctactttaacacaaataattagttcttgttctttaaacagtgaatattttatatagtttttactttaaaaatcaaaacgttatgttttattgatgtagtctggctcatttgatctatatgtatagtgaaatagcccaaaaaatattgtcatcaacaacattctttgaaccag

SEQ ID NO: 11012 - DNA, 648 bp, Homo sapiens
tacttaaaatagatgcatttccttacatgtaaattacacctcaataaagttaattttttagaatccatctttagttccagtgattcaagaagccacctttattataagaaatccatttgaaagaaaaaaaaaacaacaacgtttaaatagatttcaatttaaaaasagtcatggaccaaaaagcaatatacaaatataaacataaaacaaagattacttaaaagcagggttgaaaaactctgccccttaatttgattaaccatggaaataaatatgatacgataatatccttatttatgtctagtattacaaaaagcacaacataaatctaaagggctatactggcaaaatcctcaataacaagactgaaatgttattccacagagtctctttctctccactgtgcctctctgttgccagaccctctccccttttctgtctctgactataactgaccatatacaaattgaaatattctactttaacacaaataattagttcttgttctttaaacagtgaatattttatatagtttttactttaaaaatcaaaacgttatgttttattgatgtagtctggctcatttgatctatatgtatagtgaaatagcccaaaaaatattgtcatcaacaacattctttgaaccag

SEQ ID NO: 11013 - DNA, 648 bp, Homo sapiens
tacttaaaatagatgcatttccttacatgtaaattacacctcaataaagttaattttttagaatccatctttagttccagtgattcaagaagccacctttattataagaaatccatttgaaagaaaaaaaaaacaacaacgtttaaatagatttcaatttaaaaagagtcatggaccaaaaagcaatatacaaatataaacataaaacaaagattacttaaaagcagggttgaaaaactctgccccttaatttgattaaccatggaaataaatatgatrcgataatatccttatttatgtctagtattacaaaaagcacaacataaatctaaagggctatactggcaaaatcctcaataacaagactgaaatgttattccacagagtctctttctctccactgtgcctctctgttgccagaccctctccccttttctgtctctgactataactgaccatatacaaattgaaatattctactttaacacaaataattagttcttgttctttaaacagtgaatattttatatagtttttactttaaaaatcaaaacgttatgttttattgatgtagtctggctcatttgatctatatgtatagtgaaatagcccaaaaaatattgtcatcaacaacattctttgaaccag

SEQ ID NO: 11014 - DNA, 648 bp, Homo sapiens
tacttaaaatagatgcatttccttacatgtaaattacacctcaataaagttaattttttagaatccatctttagttccagtgattcaagaagccacctttattataagaaatccatttgaaagaaaaaaaaaacaacaacgtttaaatagatttcaatttaaaaagagtcatggaccaaaaagcaatatacaaatataaacataaaacaaagattacttaaaagcagggttgaaaaactctgccccttaatttgattaaccatggaaataaatatgatacgataatatccttatttatgtctagtattacaaaaagcacaacataaatctaaagggctatactggcaaaatcctcaataacaagactgaaatgttattccacagagtctctttctctccrctgtgcctctctgttgccagaccctctccccttttctgtctctgactataactgaccatatacaaattgaaatattctactttaacacaaataattagttcttgttctttaaacagtgaatattttatatagtttttactttaaaaatcaaaacgttatgttttattgatgtagtctggctcatttgatctatatgtatagtgaaatagcccaaaaaatattgtcatcaacaacattctttgaaccag

SEQ ID NO: 11015 - DNA, 614 bp, Homo sapiens
gatctattacaacagattatatatggcagaggaagagatcaatgaactcgaagatagagtgatagaaagtatctatctgaggaagacagagaaaaaaaatgtttgaagtaaaaggaacagaaccataggggccagtgggacaacatcaagccaacagatgtataatgagaaaaccagaagtagaaaataaaaaggaaggagcagaaaacatatggaaaaaccagtggccaaaaactttcagaatttgacttaaaaaaaaattaaatacacatccaaaatgttcaataaacctcaagtaggataaatatgtagagatccacacctagacaaatcataggcaagcagtcagaagacagaaagaaatagaaaaacaagcaagagaaaaatgacttattactacaagaggyaacaatgcagttaacagctggcttcccatataaaacaatagagggcaaaaagcaatcaaatgaaaaaactgttaaccaagagttccattatccagaaaatctttcttcaagaatgaaggtaaaataaagacattaccatataaacaaagacaaaataattcattatttctaaaatcttacaaatatattgcaaaattaataaatcca

SEQ ID NO: 11016 - DNA, 523 bp, Homo sapiens
ccctgcctcagcctcccgagtagctggatctacaagcatgcaccaccacacctggctaattttttttgtatttttaatagagacgggatttcaccatgttggtcaggctggtcttgagctcctgacctcaggtgatccacccacctcagtctcccaaagtgctgggattaaaggtgtgagccactgcacccggccggccttgtacttttgaggcggtgttgactcttgcaatccatagctttgagagctccccatccgaatctcaggcacayttgactttttcactctcgtaggagtgatctccttagtccatcgatcaaactgctgagagcaggccatggcctgcctgctgtcatggcccgtgaagcagaattggagatgagaggggaggacctgggctggagagtgggcaggaggagatcctgcaaacagggaactgagagaggggagggaggaggagggtttgagagtggggaggggagctgggggtgctccctgaagaccaggaggagaggaaggaggg

SEQ ID NO: 11017 - DNA, 404 bp, Homo sapiens
actccagcctggacaacagagcaagactctgtctcaaaaagaaaaatatgtatatatatatcaaatatgtatcagatatgagacagagactgtctcaaaaaaaaaaaaaacagaaaacaaagatacrcttctggaaacgctcttaacctgccttattcgacgttttatctgttagaaggttgagacagccaacagagaaactgctaaatctggtcttaatcctaataaatcagaggaactggtggtgaaatcaattgatgggatccatttcgataggaattttatttagttttactgttatcaaagttacttatatacacagtttttagattcatacagatatatgtatacatatatcacatatatgatatatatgatatatatactttataatatataataca

SEQ ID NO: 11018 - DNA, 404 bp, Homo sapiens
actccagcctggacaacagagcaagactctgtctcaaaaagaaaaatatgtatatatatatcaaatatgtatcagatatgagacagagactgtctcaaaaaaaaaaaaaacagaaaacaaagatacacttctggaaacgctcttaacctgccttattcgacgttttatctgttagaaggttgagacagccaacagagaaactgctaaatctggtcttaatcctaataaatcagaggaactggtggkgaaatcaattgatgggatccatttcgataggaattttatttagttttactgttatcaaagttacttatatacacagtttttagattcatacagatatatgtatacatatatcacatatatgatatatatgatatatatactttataatatataataca

SEQ ID NO: 11019 - DNA, 862 bp, Homo sapiens
tttttcctatgcacttactattttaaaattataattttcatttttacataaatggtaatcagactatgcattcttattctgcaactcgtatttccacttagttgtgaaaatcttactgcattaccgtgtataaatctacctcaccccttttcgtggctgcatggtttaccattgcgtgatacaccacagttgaatcaatctgttattgatagactttggattgttcctcatttttcagtattaccagtattgctgcaataaacaaatgtgcacatacatttttggacaatatgtatgtggaatgaaatcgttaaaaataattatgctatatgatgtttttggaaagggtattcttatgattctagaaagcagcctcccagcccttccctcactggtgcaggctggaactgtgatgactytggccatgggattcttgcaggcctctatcaagcacgtggggcacaggcacggtatctgcagcctctcagctttctagaggactacagaaatgtttgagacctgaataaagaaaaagtgttggctctaacctaagaaagttgaaagtaaatattaataagtggaattaaacgtcttaatgtacaaccttgtgaacgtcactcattaaattcaataattgcttttaaaaatatctttctcataaattagtgagtcacagaattgtcagataatttcaaaagcaaattctaaggattcttctcaaaaatcacagaagaaaaaaacataaatatgaaaaatggttgcattttaatgtatttgaaatgccatgggaaagaattcataagtaagcacaacggcagggcacggtggctcatgcctgtagtcccagcactttgggagtctg

SEQ ID NO: 11020 - DNA, 862 bp, Homo sapiens
tttttcctatgcacttactattttaaaattataattttcatttttacataaatggtaatcagactatgcattcttattctgcaactcgtatttccacttagttgtgaaaatcttactgcattaccgtgtataaatctacctcaccccttttcgtggctgcatggtttaccattgcgtgatacaccacagttgaatcaatctgttattgatagactttggattgttcctcatttttcagtattaccagtattgctgcaataaacaaatgtgcacatacatttttggacaatatgtatgtggaatgaaatcgttaaaaataattatgctatatgatgtttttggaaagggtattcttatgattctagaaagcagcctcccagcccttccctcactggtgcaggctggaactgtgatgactctggccatgggattcttgcaggcctctatcaagcacgtggggcacaggcacggtatctgcagcctctcagctttctagaggactacagaaatgtttgagacctgaataaagaaaaagtgttggctctaacctaagaaagttgaaagtaaatattaataagtggaattaaacgtcttaatgtacaaccttgtgaacgtcactcattaaattcaataattgcttttaaaaatatctttctcataaattagtgagtcacagaattgtcagataatttcaaaagcaaattctaaggattcttctcaaaaatcacagaagaaaaaaacataaatatgaaaaatggttgcattttaatgtatttgaaatgccatggkaaagaattcataagtaagcacaacggcagggcacggtggctcatgcctgtagtcccagcactttgggagtctg

SEQ ID NO: 11021 - DNA, 518 bp, Homo sapiens
gcttaatctttaatgttcaattagttcgaaacaatgagttaaaatgaaaaaattgcttgcacgcctaatttagtttccttggccattttaaactcaattacacgtttaaactgtttgatttgcacacacttccaataactaatatgaaagacctaaaatctgatgaaatcttcctgagcattgaaatactaacctaaatctacattcataaatttaatacgttaaggtcttgtaaacattcattatttatcaacttgttaaaattttcttttttttttttttttgagagtagtctcgctctgttgcccaggctggagtgcagtggcgcaatctcagcgcactgcaagttccacctcccrgggttcacgccatcctgcctcagcctccggagtagctgggactacaggtgcccaccaccacgcccagctaatttttttgtatttttagtagagacggggtttcaccgtgttggccagaatggtctcaatctcctgacctcgtgatccgcccatcttggc

SEQ ID NO: 11022 - DNA, 554 bp, Homo sapiens
gtcttattatatttgggacctgaaagctggtagcttcttgggattataggcatgagtcacacagcctgaccccacttgctcttgcacaatagtttaaggctgccaaagtgagaaatttttaggagctcgataaacctggaggcttatctttctctctttcctagtctgtaaataaacagagcaaggtgaagccagcatcataatgtgacattccaagctttacatagtcacttaggtaacaatctattaaaattttatatttatagctaaaacatcttttttagctccatatgtttgatttgttaaaaytattataccttgcttttgaagaaacaaaatgcctaacctccatgttttggttaaataagcttaaatatttgttgttttgggtgatattttgttggcaatgtttgttgtttctcttagtacaatgtgacaaaaagtaatccacttcaatattcatgactaattcttaaattagatatggttctgtctaatgacttcacaaatactagccttccttagtctggattttaaaaattattatggtaaaa

SEQ ID NO: 11023 - DNA, 526 bp, Homo sapiens
cccaagtgtttctagtgccacagattgtgctttgtgaagcaaggaattaaaagacaataccatattgggaagattcaacataataaaaatgttarttctctttaagttgatctgtgaaatatgatattccaattaaaataccaaggaaggtttttttgtttgtttgttgttaaggatctaaatcaactgactcaaaaattcctttggggggtaaaaaaagagtatccccaaattctgaatgagtaaatgagaggagtagccctatcagataatgaaatatgttataaagctacaatatttaacacacgctcaggaataggctggaagatcaaagaaaaatttataaggtcctataatgagccctgatacagatcacataagtatacaaatatttgataaagctttgatattgatacctttatgataaaagtggcatggcattaatcaagggacagccagattattgaataaatgacatggggtaactggggtaactgggcaaacattaaggaaaaaattaagttgg

SEQ ID NO: 11024 - DNA, 829 bp, Homo sapiens
tatgttgttaacaaaggtgggaattaaagccagaagaatgatgacagatatagacagctaggtaggtaaacagacaaaactacattataaatataatactgctgtgtacttccattagaaggaacataatgtttgcttgtttccatttttttttttgtgatattaacaaccattaatcttttatttgtattttttgagacaggttctcactctgttgcccaagctggagtgcagtggtgcaatcatagctcactgcagcctagaactcctgagctcaagccatcctcctgcctcagcctcttgagtaattagggctacaggmatgagccaccatgcctgactaattttctttactttttgtaaagagaaggtctcactatgttggtgagtctgcttatcatctttttctaggtttgttattatataacttatgaccaacagtaatggttagctgagagaagtcttggaaagatacagtcttggaaagacaacttgatataactttgggttgatgaaaaacagaagttagaccacccataaaccacaaaataacagtccccattgtttgagacacctagaacaatttctacccagctaataactactgtttcacatgtattaagttacatgggcagttataaaccaagaagccatatttcttacaactgaataatttccatttcaatattgggcaaaattgtcatcattataaaattaggcctttaactattctaagattacatagaaatttcttatgttcattcctaaaatttctttttgaaattataacatttatctttcttatttataatgttagaagttacttttt

SEQ ID NO: 11025 - DNA, 829 bp, Homo sapiens
tatgttgttaacaaaggtgggaattaaagccagaagaatgatgacagatatagacagctaggtaggtaaacagacaaaactacattataaatataatactgctgtgtacttccattagaaggaacataatgtttgcttgtttccatttttttttttgtgatattaacaaccattaatcttttatttgtattttttgagacaggttctcactctgttgcccaagctggagtgcagtggtgcaatcatagctcactgcagcctagaactcctgagctcaagccatcctcctgcctcagcctcttgagtaattagggctacaggcatgagccaccatgcctractaattttctttactttttgtaaagagaaggtctcactatgttggtgagtctgcttatcatctttttctaggtttgttattatataacttatgaccaacagtaatggttagctgagagaagtcttggaaagatacagtcttggaaagacaacttgatataactttgggttgatgaaaaacagaagttagaccacccataaaccacaaaataacagtccccattgtttgagacacctagaacaatttctacccagctaataactactgtttcacatgtattaagttacatgggcagttataaaccaagaagccatatttcttacaactgaataatttccatttcaatattgggcaaaattgtcatcattataaaattaggcctttaactattctaagattacatagaaatttcttatgttcattcctaaaatttctttttgaaattataacatttatctttcttatttataatgttagaagttacttttt

SEQ ID NO: 11026 - DNA, 527 bp, Homo sapiens
cctgtggtcccagctacttgggaggctgaggtgggaggatcacttgagtccaggagttcgaggctgctgtgagccatgattgtgccactgcactccagcctagagtttgcttagagcagagccagggtttgttttgaccaagaccctgtctctgaacaaacaaaaaaggtcatttttacactttgggaggctaaggcaggtggatcacctgaggtcaagagttcaagaccaacctgaccaacatggtaaaacctcatttctactaaaaatacaaaaaaaattagccaggcgtggtggcaggtgcctgtaatcccaactacttgggaggatgaagcaggagaatcacttgaacccaggaggcagaggctgcagtgagctgagatcgcgccactgcactccagcctgggcgacagagtaagaatccgtctaaaaaaaaatttatrtatttattgtttctattgtacctcagacttctctgaggtgggcacacatgctctcatattgcaaataagtgaggctttgagtga

SEQ ID NO: 11027 - DNA, 553 bp, Homo sapiens
ggagtcttgctctattgcctaagcttgagtgcagtggcscgatcttggctcactgcaacctccacctccctggttcaagcgattctcctgcctcagcctcccaaagtgctgggattacaggcatgcaacaccacacccagcctgaaacccagatttttaatatgaaatcaaagtcttcagaccttgtaggtgtcataaaaagcacgctgaggaccactagtttgcaactgccaatctaaaatatcatagacattatatcacttcaaccacgaaaaaaaaagtatgtgaggcagaaaatggaagcaaccatgcctaatttattgttgaatactttttccgtataccaagagcttcctttgcactagcatctgaaactatatccagaatgacactggttttcataaaagtgttgatcctcacacctctttatagtcttgcacctagcacagtggagtgaaacactttaaatagcacttgttccttgagtatatatggaaaaaagtgaagtattgataagtgctcagctaatatgagcagcatctcaggagtctcc

SEQ ID NO: 11028 - DNA, 553 bp, Homo sapiens
ggagtcttgctctattgcctaagcttgagtgcagtggcgcgatcttggctcactgcaacctccacctccctggttcaagcgattctcctgcctcagcctcccaaagtgctgggattacaggcatgcaacaccacacccagcctgaaacccagatttttaatatgaaatcaaagtcttcaraccttgtaggtgtcataaaaagcacgctgaggaccactagtttgcaactgccaatctaaaatatcatagacattatatcacttcaaccacgaaaaaaaaagtatgtgaggcagaaaatggaagcaaccatgcctaatttattgttgaatactttttccgtataccaagagcttcctttgcactagcatctgaaactatatccagaatgacactggttttcataaaagtgttgatcctcacacctctttatagtcttgcacctagcacagtggagtgaaacactttaaatagcacttgttccttgagtatatatggaaaaaagtgaagtattgataagtgctcagctaatatgagcagcatctcaggagtctcc

SEQ ID NO: 11029 - DNA, 553 bp, Homo sapiens
ggagtcttgctctattgcctaagcttgagtgcagtggcgcgatcttggctcactgcaacctccacctccctggttcaagcgattctcctgcctcagcctcccaaagtgctgggattacaggcatgcaacaccacacccagcctgaaacccagatttttaatatgaaatcaaagtcttcagaccttgtaggtgtcataaaaagcacgctgaggaccactagtttgcaactgccaatctaaaatatcatagacattatatcacttyaaccacgaaaaaaaaagtatgtgaggcagaaaatggaagcaaccatgcctaatttattgttgaatactttttccgtataccaagagcttcctttgcactagcatctgaaactatatccagaatgacactggttttcataaaagtgttgatcctcacacctctttatagtcttgcacctagcacagtggagtgaaacactttaaatagcacttgttccttgagtatatatggaaaaaagtgaagtattgataagtgctcagctaatatgagcagcatctcaggagtctcc

SEQ ID NO: 11030 - DNA, 553 bp, Homo sapiens
ggagtcttgctctattgcctaagcttgagtgcagtggcgcgatcttggctcactgcaacctccacctccctggttcaagcgattctcctgcctcagcctcccaaagtgctgggattacaggcatgcaacaccacacccagcctgaaacccagatttttaatatgaaatcaaagtcttcagaccttgtaggtgtcataaaaagcacgctgaggaccactagtttgcaactgccaatctaaaatatcatagacattatatcacttcaaccacgaaaaaaaaagtatgtgaggcagaaaatggaagcaaccatgcctaatttattgttgaatactttttccgtataccaagagcttcctttgcactagcatctgaaactatatccagaatgacactggttttcataaaagtgttgatcctcacacctctttatagtcttgcacctagcacagtggagtgaaacactttaaatagcacttgttccttgagtatatatggaaaaaagtgaagtattgataagtgytcagctaatatgagcagcatctcaggagtctcc

SEQ ID NO: 11031 - DNA, 542 bp, Homo sapiens
tggagtaaggagtaccctggtgcaatcttggatcacggtgacctacgcctcctgggttcaagcaattctcgtgcctcagcctccatagtagctgggcctacaggtgcatgctaattttttgtatttttagtagagacagggtttcaccatgttggccaggctggtctygaactcctgacctcaagtaatccacccgccttggccccctaaagtgctgggattacagatgtgagccattgtgcctggcctttatttttttctttctggacatttttttcctacatccaagccactgattctcatggctttttttttttaatatctggggataattcaactatttgtgaagtataagctggcttattcaagcaaacttcatatgtgatttataatcttaagtggaattgtgaaattctttccccagcttgcttgcttctttttcttttcttttcctttttttttttttttttttagacaggttctcactctgtcacccaggctggagtgcagtgctgcgatctaagctcactgcagcttctgcc

SEQ ID NO: 11032 - DNA, 542 bp, Homo sapiens
tggagtaaggagtaccctggtgcaatcttggatcacggtgacctacgcctcctgggttcaagcaattctcgtgcctcagcctccatagtagctgggcctacaggtgcatgctaattttttgtatttttagtagagacagggtttcaccatgttggccaggctggtctcgaactcctgacctcaagtaatccacccgccttggccccctaaagtgctgggattacagrtgtgagccattgtgcctggcctttatttttttctttctggacatttttttcctacatccaagccactgattctcatggctttttttttttaatatctggggataattcaactatttgtgaagtataagctggcttattcaagcaaacttcatatgtgatttataatcttaagtggaattgtgaaattctttccccagcttgcttgcttctttttcttttcttttcctttttttttttttttttttagacaggttctcactctgtcacccaggctggagtgcagtgctgcgatctaagctcactgcagcttctgcc

SEQ ID NO: 11033 - DNA, 1330 bp, Homo sapiens
caagctaaaaaccacaacctgtcttaaagctgaactacaaaataaagacccagtatgacaaaaccagaaaacccatgattttagggagaaagaaatgaaacaaaacaccaaagcctaagttggtatgacagtttcatgcttcccaccacaaaggactcaaggcaggagacgagctggcgcaggcagggctccaggcagctctggccacgcttcactttctgcagggctgtgtccttcaggatctagaaaaggcccaaaacacagtcaagaagaggaacacatttctctgataggttttttttttttttttgagacaaagtctctctttgttgcccaggctggagtgtagtggtacgatctcggctcattgcaacctctgcctcccgtcttcaagtgattcttgtgcctcagcctcccgagtagctgggactacaggcgcccacccccatgcctggctaatttttgtatttttagtagagaaggggtttcaccatgttggccaggctggtctcgaactcctgacctcaagtgatctgcccatctcggcctcccaaagtgctgggattacagacatgagccactgcgcccggccctgattggcttttcttctgcaaagtggtcagacacaagggtgatgctgggagccaggtgcatggttaagtcaaggcttccaacacagtgtaataatctaatttctacctctaccgaggttaaaacaggattcactcctgagccctcctagagaagctctttccttaatcaaggcagcacacgtggattttgagagggcagctttcagtaacagaaggactattacttctttctagtgaactctgcccttttcctcacccccaacaccacttgctccatgagaaacgtcagtaccttagaagtaatactcactggcctggattgaaattgctctcagtgacaagaggmatggatttcacttcagtgaaaattataatgtatattttttgtccttcaaaagtataaatcctaacactttaaacccatttatgcctaatgttccattattggaacactaagcttgtgggagttatttatatcctactgctgagtcatcgccaaggtctgatttttcctttgtttttttgaggagtgtcgctcttactgcccaggctggagtgcaatggcatgatctccgctcactgcagcctccgcctcccaggttcaagccattctcctgcctcagcagtctctgttgcccagactggagtgcagccacgtgatcttggctcactacaacccccacctcctgggttcaagtgattctcctgcctcagcctaccgagtcgctgggaataca

SEQ ID NO: 11034 - DNA, 1330 bp, Homo sapiens
caagctaaaaaccacaacctgtcttaaagctgaactacaaaataaagacccagtatgacaaaaccagaaaacccatgattttagggagaaagaaatgaaacaaaacaccaaagcctaagttggtatgacagtttcatgcttcccaccacaaaggactcaaggcaggagacgagctggcgcaggcagggctccaggcagctctggccacgcttcactttctgcagggctgtgtccttcaggatctagaaaaggcccaaaacacagtcaagaagaggaacacatttctctgataggttttttttttttttttgagacaaagtctctctttgttgcccaggctggagtgtagtggtacgatctcggctcattgcaacctctgcctcccgtcttcaagtgattcttgtgcctcagcctcccgagtagctgggactacaggcgcccacccccatgcctggctaatttttgtatttttagtagagaaggggtttcaccatgttggccaggctggtctcgaactcctgacctcaagtgatctgcccatctcggcctcccaaagtgctgggattacagacatgagccactgcgcccggccctgattggcttttcttctgcaaagtggtcagacacaagggtgatgctgggagccaggtgcatggttaagtcaaggcttccaacacagtgtaataatctaatttctacctctaccgaggttaaaacaggattcactcctgagccctcctagagaagctctttccttaatcaaggcagcacacgtggattttgagagggcagctttcagtaacagaaggactattacttctttctagtgaactctgcccttttcctcacccccaacaccacttgctccatgagaaacgtcagtaccttagaagtaatactcactggcctggattgaaattgctctcagtgacaagaggcatggatttcacttcagtgaaaattataatgtatattttttgtccttcaaaagtataaatcytaacactttaaacccatttatgcctaatgttccattattggaacactaagcttgtgggagttatttatatcctactgctgagtcatcgccaaggtctgatttttcctttgtttttttgaggagtgtcgctcttactgcccaggctggagtgcaatggcatgatctccgctcactgcagcctccgcctcccaggttcaagccattctcctgcctcagcagtctctgttgcccagactggagtgcagccacgtgatcttggctcactacaacccccacctcctgggttcaagtgattctcctgcctcagcctaccgagtcgctgggaataca

SEQ ID NO: 11035 - DNA, 576 bp, Homo sapiens
ggggagtttcattgaacttagggctaataagtggctttgggactggtcaggcagaagtcctcataggttccttggtatatgtgtggtctcaaagaccaccagcctctcacccccttgcagcctctgctggtctcggaaacccaagctcattatttcaactggctgtcggcatctgtgctgttacacataatgatcagcagggggcagtgtagccaacatattacttgtgagtgaggggctgtctgctttccacaggagggtctggggaaaaagttcatgcaacgtaaaactgcgcctagctgtgcaggctctgagtagaagactctaccttttccctttctygcctccaggattctactcttccctctcttgtctcttcttctattttgcttccttgctccctctgctcagccgcctaccttttatctttgcaaagcatgctcatacccattgccttcttgggtcctcccagatattctatgagagatggggccaggttaaatatcgaacattttgcagatgaagaaacagagacccagagaggcgcctggtccctagcccccgttctttcttccc

SEQ ID NO: 11036 - DNA, 519 bp, Homo sapiens
tttcttttacaaattaccccatctcaggtatgtcttcactwgcagtgtgagaatagactaatataggacatatatgttgaagaaatgacagtacatctaacacttcctaagcactgtaacgtgagacggacttattctagaaggggcttcacaagagagctttgggttcatcagtctctttaagtcatcattttgccttcttttccccagttcccttaccttccccccaaatgcagtgtcacggaaagagaactagagtacacacaagccctcgtagccaattggagacagagccaggactacagacaggtttcctgttccccaacgacagtcctcgggtgtttctgttccatcaccccaaatcatattcagatcaggaccctggcggaggtatctgtttccccagagaatgggactgtattatctacaggggttgccataagaaaatgtgacagactaggtggcttaaacaacagaaattgattttctcacagttctgaaggctgcacattcaaggtc

SEQ ID NO: 11037 - DNA, 519 bp, Homo sapiens
tttcttttacaaattaccccatctcaggtatgtcttcactagcagtgtgagaatagactaatataggacatatatgttgaagaaatgacagtacatctaacacttcctaagcactgtaacgtgagacggacttattctagaaggggcttcacaagagagctttgggttcatcagtctctttaagtcatcattttgccttcttttccccagttcccttaccttccccccaaatgcagtgtcacggaaagagaactagagtacacacaagccctcgtagccaattggagacagagccaggactacagacaggtttcctgttccccaacgacastcctcgggtgtttctgttccatcaccccaaatcatattcagatcaggaccctggcggaggtatctgtttccccagagaatgggactgtattatctacaggggttgccataagaaaatgtgacagactaggtggcttaaacaacagaaattgattttctcacagttctgaaggctgcacattcaaggtc

SEQ ID NO: 11038 - DNA, 519 bp, Homo sapiens
tttcttttacaaattaccccatctcaggtatgtcttcactagcagtgtgagaatagactaatataggacatatatgttgaagaaatgacagtacatctaacacttcctaagcactgtaacgtgagacggacttattctagaaggggcttcacaagagagctttgggttcatcagtctctttaagtcatcattttgccttcttttccccagttcccttaccttccccccaaatgcagtgtcacggaaagagaactagagtacacacaagccctcgtagccaattggagacagagccaggactacagacaggtttcctgttccccaacgacagtcctcgggtgtttctgttccatcaccccaaatcatattcagatcaggaccctggcggaggtatctgtttccccagagaatgggactgtattatctacaggggttgccataagaaaatgygacagactaggtggcttaaacaacagaaattgattttctcacagttctgaaggctgcacattcaaggtc

SEQ ID NO: 11039 - DNA, 564 bp, Homo sapiens
cggctgctgttgaagacagtttggcagtttctcaaaaggttaagcacacagatacgaaacgacgcagcaatttcactcctaggtatayatgcagaagaatcgaaagcagagatctgaatagatattggtacaatgttcataggagtattattcaaacacacacacacacacacacacacacagacacacacacactcacacagaaacattattcagccataacaaagaaattttgtggcaggtgtggtggcgcagtcatctcagcgctttgggaagcccaggcgggtggatgaccggagcacaggagttcaagatcagccagggcaacacggcaaaatctgtctctactaaaaataaaaaaataataataaaaataaatttaaaaagccaggcatggtggcatgcacctctagctccttgggaggctgaggtgggaggatcactgaagcccaggaagtcaaggctgcagtgagctttgattgtgccactgcaccccagcctgggcaacagagtgagaccctgtcaaaaatggaaggaaggaaggaaagaaggaaggaaggaagg

SEQ ID NO: 11040 - DNA, 542 bp, Homo sapiens
ccagctctactatgctgacaattatgcttcggctaggtcttaactgaatgctggagaaattaagtcaacatgagatgggtgaaaagaagaatcaaaaggaattgagacaaaactcgtgaataccaaataacaacttcgtggaacaagtatttaatgagtacctaatatgttcagggcactgtactasgtgctgggcatacagtggtgaccaggacagattttgtttcaatgacagcaactcggcagtgaaaaataccttaagaatcaaagaacctgagtttgagagatttggaacagagtttcatactctatgtaaaaaattgcattcatgtttctctcccccaaaaagtgcctctatcccaaagagccaatgtctttttggactataaactacttgaggtcagaagatgtgaccaggccactgcctggtagatagcaggtattcaatgagttctggatgaacagaaacaagtaaatgctgtaataaacatgtgagggtcgaagaagaaatcacatgggaaattggaacatattttgaatta

SEQ ID NO: 11041 - DNA, 542 bp, Homo sapiens
ccagctctactatgctgacaattatgcttcggctaggtcttaactgaatgctggagaaattaagtcaacatgagatgggtgaaaagaagaatcaaaaggaattgagacaaaactcgtgaataccaaataacaacttcgtggaacaagtatttaatgagtacctaatatgttcagggcactgtactaggtgctgggcatacagtggtgaccaggacagattttgtttcaatgacagcaactcggcagtgaaaaataccttaagaatcaaagaacctgagtttgagagatttggaacagagtttcatactctatgtaaaaarttgcattcatgtttctctcccccaaaaagtgcctctatcccaaagagccaatgtctttttggactataaactacttgaggtcagaagatgtgaccaggccactgcctggtagatagcaggtattcaatgagttctggatgaacagaaacaagtaaatgctgtaataaacatgtgagggtcgaagaagaaatcacatgggaaattggaacatattttgaatta

SEQ ID NO: 11042 - DNA, 512 bp, Homo sapiens
gggaaaaaagcaaagactttgtaattacgtatgtgtgcaataataaaacacaccctggcctccccatctagtttctgtcaataaaatagaaaacgcaatccagttgtttcttcctaaaagcgttgagttcatgttttacctctaatattgtgaagaacatgatcaaaagatttcatcctttttgcatggtctttaactaagagcatctaaagggcatctaattactttgctctgtaaccctgttcccacctgcttttgccacctctctgaccctccacccacccccccatcccaacccccaaatacacaaacatactcccagggtccccatgaatcagwgagatcaactgtgtcaatttcagatcgattgcagacatattagtaattatcttcttgccatccacttcttaagcaatatgattgttagaaatgcttgctcctcagtgccataaagaaatagcactcgaacaggaatttaatttcctcagcaaggccatttttactttctgcag

SEQ ID NO: 11043 - DNA, 620 bp, Homo sapiens
taaggtggagtgggaacagagggacatggtgggtgagcagctggccaaggcctttgcaagsatagcagcttgctcaattctaggcatactcaagacccattattcttcctttcgcttctgaagtcctaggatactgaggttcagagaaggtcaatgacttgcccaaggtcacacgttaatagacaaattatcaaatttctctctcaacttgataagttccaaagctcaggtcaggactcactctctccaaccaccttcccagatgaggtcgaagcccccatgataggtacagtcttgtgtgtccccctcctccttcccatgtaccatggttgcaccattccatttcttcctttgaaaatttgatgggtgccaggagcggtggctcacacctgtaatcccagcactttgggaagctgaggtgggtggatcacctgaggtcaggagttcaagacaaggctggccaacatggggaaaccttgtctttaccaaaaatacaaacattagtcaggtgtggtggcatgtgcctatgggctgaggcaggagaatcgcttgaacccaggaggcagaggttactgtgagccgagatcgcaccactacactccagcctaggtgacacagcg

SEQ ID NO: 11044 - DNA, 620 bp, Homo sapiens
taaggtggagtgggaacagagggacatggtgggtgagcagctggccaaggcctttgcaagcatagcagcttgctcaattctaggcatactcaagacccattattcttcctttcgcttctgaagtcctaggatactgaggttcagagaaggtcaatgacttgcccaaggtcacacgttaatagacaaattatcaaatttctctctcaacttgataagttccaaagctcaggtcaggactcactctctccaaccaccttcccasatgaggtcgaagcccccatgataggtacagtcttgtgtgtccccctcctccttcccatgtaccatggttgcaccattccatttcttcctttgaaaatttgatgggtgccaggagcggtggctcacacctgtaatcccagcactttgggaagctgaggtgggtggatcacctgaggtcaggagttcaagacaaggctggccaacatggggaaaccttgtctttaccaaaaatacaaacattagtcaggtgtggtggcatgtgcctatgggctgaggcaggagaatcgcttgaacccaggaggcagaggttactgtgagccgagatcgcaccactacactccagcctaggtgacacagcg

SEQ ID NO: 11045 - DNA, 604 bp, Homo sapiens
ctacggtttcactgtgagtgaactcgcccatcagagtgaaactaggatagaaaaaggggtcctaacccacagaggtgggaggaagcaatctgctttgtcactcaagcacgacaggtcttctgctggagaccagaggcagccaggcaggagcatccagcgtgagacaggagcccccgcaagccatggttcacacttggcatggtctaaattcctgtcactgggctattcctggtcttgggtttctgagaatttcaatccattgatacgggtctcactcaaatataatgcagtgagaaaagtcttgaccaatgaggaagcgaaggctcaaagagagtaaakatttttgttcagggccccacaaagagcagatagcagagttgagaatgtttgattccaaagtacaaggtctgtcctgttataacacatcgccatgaaaatgactgcagaaagcagatggcttaatgaggatagttaggctcatgcctgtaatcccagcgctttgggaggccaaagtggatggatcacctgaggtcaagaattcaagaccagcctggccaacacggcaaaaccccatctctactgaaaatataaaaattagctgggc

SEQ ID NO: 11046 - DNA, 531 bp, Homo sapiens
ctactataatgtaaaaaagcgatagaaagctcttttatgtaccataatgaggatttctagataaaggaaatgaatacacagattctgcaactctcactgaggctagcacacgtctagatatgggtgtgctgatgaacagccacatggaagcacatttcaactaaaaacagtgatgacgtttgtcaatgacccggagtccaaatggggaaaacacttccactwagctgaaagtggcaactaaacttctcatcatctcagcccaaattcaggccagaaaacagctacacacattctggttctaaagacatgcatttgaaaataagaaatcaaagaccaagcatttactaaatactaggattatgttgtatgataaatatacaggcaaagttgaagaattgctggaagatttaagagaaaagaagaggctgttgtggccctgatgatgacgatggtgatggtgatggtgatgatgaagatgacagctaaaacaagtactgctaactttgatcattaataattatagcttcgata

SEQ ID NO: 11047 - DNA, 531 bp, Homo sapiens
ctactataatgtaaaaaagcgatagaaagctcttttatgtaccataatgaggatttctagataaaggaaatgaatacacagattctgcaactctcactgaggctagcacacgtctagatatgggtgtgctgatgaacagccacatggaagcacatttcaactaaaaacagtgatgacgtttgtcaatgacccggagtccaaatggggaaaacacttccacttagctgaaagtggcaactaaacttctcatcatctcagcccaaattcaggccagaaaacagctacacacattctggttctaaagacatgcatttgaaaataagaaatcaaagacyaagcatttactaaatactaggattatgttgtatgataaatatacaggcaaagttgaagaattgctggaagatttaagagaaaagaagaggctgttgtggccctgatgatgacgatggtgatggtgatggtgatgatgaagatgacagctaaaacaagtactgctaactttgatcattaataattatagcttcgata

SEQ ID NO: 11048 - DNA, 621 bp, Homo sapiens
ctgttcttaaaaggaaattcttggtatgtttgaaaataaggaatttcttgcagttattcattttcccgtacagtgtagggtgcgagtaaatccaaggcagtagaatgaatatagctgtttctgtgtgagcaggacggaatgtggtagaggaaggagtactgacatttattgagtgcctgctgtatgtcaggtgtcatttaggtattttgcatacgttaggttattaaatgctcacccccccccsccccaaaaaaaaacacaaaaaatttccaggaaggaagacggtattacacaactgataaaaagttaaaactaaggacacccaactagaaatcgctggtcttatgatggcttgttatgtggcaggaataatggagggatttgtaaatgttaccttactgtcttactgatttctcccaactttgtgggataagacttttgctgtccccaggaggaaactgaagctcaaagaagtgaagctgcttgctcatgaagttcacagagctggggagtagcagaactgagatccaaacccaggcctgcccctttccaaagatgccacctttccgagttgcgttccttttgcatggtttgttgaaaaaccctaaatgcaaccatgca

SEQ ID NO: 11049 - DNA, 621 bp, Homo sapiens
ctgttcttaaaaggaaattcttggtatgtttgaaaataaggaatttcttgcagttattcattttcccgtacagtgtagggtgcgagtaaatccaaggcagtagaatgaatatagctgtttctgtgtgagcaggacggaatgtggtagaggaaggagtactgacatttattgagtgcctgctgtatgtcaggtgtcatttaggtattttgcatacgttaggttattaaatgctcaccccccccccccccmaaaaaaaacacaaaaaatttccaggaaggaagacggtattacacaactgataaaaagttaaaactaaggacacccaactagaaatcgctggtcttatgatggcttgttatgtggcaggaataatggagggatttgtaaatgttaccttactgtcttactgatttctcccaactttgtgggataagacttttgctgtccccaggaggaaactgaagctcaaagaagtgaagctgcttgctcatgaagttcacagagctggggagtagcagaactgagatccaaacccaggcctgcccctttccaaagatgccacctttccgagttgcgttccttttgcatggtttgttgaaaaaccctaaatgcaaccatgca

SEQ ID NO: 11050 - DNA, 575 bp, Homo sapiens
ctgttagcccactaggctctagagggcattcattttcgcctgtaaatatttgcagtctagtgcatgtattgtttcttgacgtttgcctgtcagtcatggatatttaactgatacagttcttgcagagacttgcagactcccatgttgcttccaacttttctcagaaaaagatgtaaatgctttggtctttgtcaacaaatgtcataagtaacattggtaatcattcgatagtaattttcctaccagctaaccacagcattttgtaggtttcccaaattgccaccaataakttttggtataaataacttctatcgtagaatattggaaatctttcatgtttctctcttctggattaccagcttctttcaggataatagaagtttgtggttttttcctttatttccttttgattatggttctctgataaatttgtgatctaacctatgatcccacaggtgctccagtgaaggccctgtgggatcataggttagatgtataaggatcagaggacaaatcagtgacacaacagggttccagttttttaacttggcaaaagggaacgcaaaccagtaagg

SEQ ID NO: 11051 - DNA, 566 bp, Homo sapiens
aaaaatagttgaggaaaatgggaaattataaataccataatcctgttttttgtaattgatatttctgcaagttaaatgaaattgcacakctgcttttaataaagcacagcacacttgacttaataccagtgtctttgcagcaaaattcaaattctagattcttatgacccaattaggtctctaagtgaaaatgttctttatttactcttttccacttaaatctggctttgccgggagcaccaggtttagtaatctgattaacaagtaggcagatgaaagcaaagaggcagccttcatattcatgttgtaaagacctccagggattactgagaacaaagataagcagtccccatcaatgactcaaacagaaaaacctgcagtcaaggtagagaaaccagttggaaaagtatttggcaaatgctcttgagcttggctagtgacaactgtagacaactttattggagtacattgtggtaaataggactgagcaactgaatgtatgaagacactgctcttacctagcacctaagtgactttctttcttccttcttaatttattttaattc

SEQ ID NO: 11052 - DNA, 548 bp, Homo sapiens
taaaaaaaaaaaatggccgaggcaagaggatggcttaacctcaggagtttgagactagcctgggcaatatagtgagaccctgtctctaccaaaaataaaaaaaaattagctgggtgtggtggcacatgcctgtagtcccacctactcaggaggctgaggtaggaggatcccttgtacctgggaggccgaggttgcagtgagctgtgatcacaccactgtgctccagcctgggcaacagaataagattctgtctcaaaataatttttttwaaaaaagaatgatattgtcaaatgaagtgacaagtcagaccaatggaatagtacagaaaatccagaaatagattcaactgtgtacagaaatatgatatatgataagggcagtatctgaaatcattgtaagcatgatgaactttaaaagaagtagtatcaggctgggcacagtggctcacacctgtaatcccagcactttgggaggccgaggttggtggatcacctgaggtcaggagtttgagaccagcctggccaacatagtgaaactccatctctact

SEQ ID NO: 11053 - DNA, 538 bp, Homo sapiens
caatgtgtgtctcaacatgtccagtgactcacgtctcctttcaggttttctagctataagcccaacagcgataatttaccaaaggtgctgggtacatgatggcagcccatgccaagggcagcctccctatcccacggcaggcctgtcccgggacgttgcagggcgtctatctgcccatccctgagaagcagcacttcttagtcactctgggtttgttttctccccacgtctttcaaagcttcgatgggaacagaacacttcgttcaacaggaggccctgaaaagcccctttgtgctgcatccgtcccaggaaccagctcagtgttctctgaaagaaaaaagccttggataaaagctggcattttaagaaccctggaggtcaggcccttggtaatgagcctcattagtatgcaaacacacacagagcaaagcttcagctcctcctgaacctagctctttgcagatgctgattttagaggtgggatkttttttttcccttcagcatctgtggggttgcggcacaggtaggagattttttt

SEQ ID NO: 11054 - DNA, 616 bp, Homo sapiens
acatgggggttggttcaaatattttttttttcttaatggaaggaataatcgtgggattcaactcattgccagggattatgctagaaacctattacattgtaggggtctcactttatcatcatgataatgctgaaagaattttacctcagtggagaaactgaggttcagagaagttattgaacttcattaatatcacacaaatagtgaacagtggagatggaattaaaaacatttcagggcttaatccaaattccacacattgcattaccctgcctttttttttcttttttaaatacctccaggaattttgtttcctagtcacaactctgagtttttccacagtggagaatatagtcagggaagaagttacagtggtaaacaggaaggaagtacagagcacccccgtctctccataggctgggaagacatattggtgggtcagaaattaaacaatatctgctcctcatcaaagagaagagctttaggattgaattagagaaagcagcctgtagactttccttttagagttgtaaaattgaatgttctttatcttaaaaatawaaaatccattcaattacagcacagaaggtaaaatttctttccaagtgtacccaga

SEQ ID NO: 11055 - DNA, 569 bp, Homo sapiens
cagctctttgttcttcccacctttctaatggcttgtaatgctgacttaatgcctggtgttccaccagccatctggaacatgaggccttaatgctatggaactatcattgccagccctggatagaaggagcaatttctatcttgcttaagtaatgattttgtttttaatttttctgtttcatacacctgaatctaatgcaagctgacactgacaaaacacacttatttaagttactctcagagatctctctckacagttcactcaccgtttctagcacctccactagttgcttatactctacattttggaacccctgtttcatggtggaccagctcttcagcgattccacagatatgtttctcaaatgccccttccctttctcgacttgccttggttttctcttgagatgtcagttctttgtgttcactttctccttctctatttgctgtatggagtagaaacagccagggtcagggagagaggaacatttcagccttcctactgccaccactattactcccatgccattttggaaaatttcccattttgaagtacacagtccacctaat

SEQ ID NO: 11056 - DNA, 460 bp, Homo sapiens
aaagtaaaaatatgtcatattccacagggcatgctaatttcccccaaattagtacataatttgaaagtcagtcaacataaatctaaatttcattaagaaaagaaataaaaaaatggccaagaaaaaatagaaagtgtagaagagtgaaggaggacctgtcctaacaggatctattaaaacaagctaccagttaaagtcactaaaaaactctgacactggcacacgaactggcagaaagataaaaaaaataccgagtccagagaaggtcccgtgtacagaagaatcggtctgtgagctggtacctgaaccagtgtggaaggcttgggatgttcaataaatggttttgaggccactggatatttatttaaataataaaattcgagccwtatgtcattatacatataaaatatatattccagatggactaaagataaaaacataaaaatgcaaaattataaaa

SEQ ID NO: 11057 - DNA, 524 bp, Homo sapiens
aaacacttaaggttcttctatagcaatggtctttaactggggaggattttacacccacccattcctcaccccccaataagacaactggcaatgtctggagacaactttgattatcacaaatggggaagggagtgctactggcatctagtggggaaaagccaaggatgctgctaaacatcctataatgcacagcacagcttcccacaacaatcwtccaactcaaaatgtcagcacagccataactgtgcaacctggctatctgggcctatctgcttcaactttccactcccaaagaagttgtggtgtcaatgaaatatgtagtttttgaagaaagacacagtgaatattcagcagattttcttttaaattgtcttgtacccttggtctttttctttttcttttttcttttttttttgtggtggggaatgtgtgtgtgtgaaatagagacattttctctatactctatttctgggcagtttttgtaaagtttaagtgataaaagtatttaaaatatttataagagt

SEQ ID NO: 11058 - DNA, 524 bp, Homo sapiens
aaacacttaaggttcttctatagcaatggtctttaactggggaggattttacacccacccattcctcaccccccaataagacaactggcaatgtctggagacaactttgattatcacaaatggggaagggagtgctactggcatctagtggggaaaagccaaggatgctgctaaacatcctataatgcacagcacagcttcccacaacaatcttccaactcaaaatgkcagcacagccataactgtgcaacctggctatctgggcctatctgcttcaactttccactcccaaagaagttgtggtgtcaatgaaatatgtagtttttgaagaaagacacagtgaatattcagcagattttcttttaaattgtcttgtacccttggtctttttctttttcttttttcttttttttttgtggtggggaatgtgtgtgtgtgaaatagagacattttctctatactctatttctgggcagtttttgtaaagtttaagtgataaaagtatttaaaatatttataagagt

SEQ ID NO: 11059 - DNA, 524 bp, Homo sapiens
aaacacttaaggttcttctatagcaatggtctttaactggggaggattttacacccacccattcctcaccccccaataagacaactggcaatgtctggagacaactttgattatcacaaatggggaagggagtgctactggcatctagtggggaaaagccaaggatgctgctaaacatcctataatgcacagcacagcttcccacaacaatcttccaactcaaaatgtcagcacagccatractgtgcaacctggctatctgggcctatctgcttcaactttccactcccaaagaagttgtggtgtcaatgaaatatgtagtttttgaagaaagacacagtgaatattcagcagattttcttttaaattgtcttgtacccttggtctttttctttttcttttttcttttttttttgtggtggggaatgtgtgtgtgtgaaatagagacattttctctatactctatttctgggcagtttttgtaaagtttaagtgataaaagtatttaaaatatttataagagt

SEQ ID NO: 11060 - DNA, 666 bp, Homo sapiens
gtctatttttttatttttgtgcctgcacctctagggtcaatttttttaaaaaaatcattgcatagatttatatcttatagctttcggcctatgtttttctctagctttatgatttctggtctcatgtttaagtctaatccattttgagtctatttttctatatggtgtaaaataagggtccaaatccattcttctgcacataaatatcagttttcccaacactgtttgttgaagagatcatctttttcccattgcatattcttgggaccttgatcaaaaattaactgatgatacatgaatggattcctttctgggctctctactctgttacactggtccatgtatctgattatatgccagtgtatgctattttgattaccaaatatttgtaatctagttagtcaggacgtgtgatgcctccggtttgttcttttggctcaagattcctttggctattgtgtgtatgtgtgtgggggggttcccctatgaattttaggattgtgtgttctatttctatgaaaraaagccattggaattttgatagggattacatagaatctatagattactttgggtagcatggacattttagtaattttaattagattcataagctactgaaaacccccattaaatgaagaaaaatctcaattaaaattgtattca

SEQ ID NO: 11061 - DNA, 528 bp, Homo sapiens
gctggggaagccattgtccctgtacctgagatggatgcagccacagccctggagccagcctgaagctcctggtgtcttctgggggctacatataggagtgtagtccgaacctcagaggggcaaacctgctctgcagagggaatcaaggttcacataaccagagaggggagtcactcaggaaggtggctccagagccaagagtcagactctgggtcccgacttgacccagccmcaccccctctgaagcttgctgagagtggctgcagtctcgctgctggatgtgcacatggtggtcattccctctgctcacaggggcaggggtccccccttactggactgaggttgccccctgctccaggtcctgggtgggagcccatgtgaactgtcagtggggcaggtctgtgagagctcccctcacactcaagtctctcacagtggccagagaagaggaaggctggagtcagaatgaggcaccagggcgggcatagcctgcccaaaggcccctgggattacaggcaggatggggag

SEQ ID NO: 11062 - DNA, 1260 bp, Homo sapiens
gttcatttttataaccaattgctaaattgctaagttgcctttttattcactttcaaatttacaaacaatttccaagtctgtgctttcatttactaatgcaaagctctttgcatatatatatgtatgtgtgtgtgtcctggtaaattgttatgccttccttattcaatagctttgggtctcttattctgaaaaattcctgccagcagttatcaatttgcatgttatggaacaatgtattgacctgatagactttgccagttttacttgcaaagctaatagcttcccattatatagtagagaaaggctttgttacatagacacagttattaattctctatttactgctcatcagaaaactaaaaaaaattttgttttgaaatttggaatcttgatgtttggaatatttttacacaatgaatcgaagcacttcttgctatttccccttttttgacgttattaacaattttgttttttttaattctaggaaaaggaaaggttttacattaagatatgcaataataaggaaaaccgtggcacatctgaatatttatgtctacatgaaataatctttgagaaaatacatttttgagttatttgtaatatagtgtccttaggtttaattaagctaattatagtcattatttacctttttcatattgaaaatggttctccatattttttcaaacaatttgagaaattgtgcactatgcaggaagtatcagctagaagtatagttaggaagtatcagttgccgtttctgagaacctatgcccaaatggccttcagcttaatttttcacgtttgaatattggtcactgttacctctccattctggggcactgtggttagaatctccctgatagctatagaaactgttggctgtaaacacttgggaataacgatgcatgatttctccttaaatagttgcctcataaataactactttcaggcatgaatcatccaccaaggtatatttgtttttatgttatgttacgttacattackttatttattttttgagagagcatctcactttgttgcccaggctggagtacactggtgtgatcatggctcactgcagcctcaacctcctgggcacaaatgatcctcccatctcagcctcacaagtagctgagactacaggcaggcaccaccatgcgtggctaattttttgtattttttttttgtagacatgggggtcttactatgttgcctagactggtcttcaactcctgggctcaagtatatttgcatattaaa

SEQ ID NO: 11063 - DNA, 632 bp, Homo sapiens
cccagcctggactccaggcagcataaagcccaaaaggggacaccaggagcagagagaaagagctctggcaaaatgcttgtgctccagctctaagaaaagaagggactctgaatgccgaaagaaatggaaaaggatctccctttcttttttcccccctccattttctcccactacactactcaggccttttcactatttctggcagccgcaatgacaaagccttctggcacctaaaattaggagggaagaggggcttcctctctaatcacaagagctgtgacgccaagagagtggcagaaactatcattgcttctttttctttctgttatcattggttggccctggacatgaacacagttacaggcagtatgcagcagagtgaggtaactaaacccttagctttctggcacaaggmccaaacaaaggaagccccaagagaccagaaagtaccagggatgacagcagaaaggaaggaactcagaaaacaactccataaagatgttcatgaactcttgggtgtttatctctaggctgtaaatacatgaatctagccctaaacaccagaccatagactttgggaactgaactacagggtagaactccacccagatcccatactggcaacttagtca

SEQ ID NO: 11064 - DNA, 1882 bp, Homo sapiens
agctaagccagccatgttgttagatgtagcatttctgcctttccccttctcatcttttccattttgtcacatcctaggatattgtcttcctaatataactggagagtttattccagtgggaattgtacttgacatgctggtctccatataaatgatgagtgatttttatttcactctctgtggtgtcttgtggtttcaaaaagtgagcaggtggaaatttggagggggtgggtgtgttggtaaaccctgtgtggtgagttttgttttgcagccgtcgtaatgcttatgttcatcagcagttcaacaaaacacatttattaaatacctattgtgtgccagctattggaaatagaaagatgaatatggccacttttcttcggagacccagccagcctttcactgctggacaggctgcccatctggactgctgggttgttccagtggtagtgctggaattttaggtagtgctctgtttcctttggtaagtgaaagaggaatttaaaaagtataatgcaggggccaggatacttgattttctataaagggccaaatgataaatatgtaagcaaatattgagatttgtggaccaggcactctttgtcacaactattcaactctgccattgtagctgaaattaaacgtatacactaactgcctgaatgaatggatgtggctgtgtttcaatgaaactttattttcaaatgctgaaatctgaatttcataaagttttcacatctccaaatattgttcttttgattttctttcaaaccattaaaaaacacaaaaaccattttcagcttataggctgcacagaaaggccaggttatgtttactgacccctggtataatgcttttgttgagcattggcctttatactaattctgcctccttgtcttccatcgttgtctaaggaatatctgcttgaagacagctgayttagcattgatcaggtactgttttcctgaactctggtttgtgtggtttggcagcatggagataaacatggtattggcccagtgatcttaactcactcccagttttttagggacaaatagtgtcccccatcagagctgcaaagtgtcaaaatttcagtgcctgctcttggataatgaattcctgttaagtgtcttgtttgactcagagtttgatgtagaagagactgggttcaggcagaggtgttttaaattcttactggagtggcttgtgctttggggggatgatctgaatggaaatttttaccaatagcaacaatgataataggaaacagtgtacttttatgtcttgaaaagcagagacagtgcagaatagacccactggagccttggatgctaggaggcagatgttgtttgtaggtgtgtttggcctgaaaattgagatgttgatattttttttctaaacttttttttttttaaatgaaaggcctttcctcttcccctgccaccaaagatgaaatgccagtccccaatcagatccttgcttattctgttcttatggttacataacgcaactgagaccgaagtaagcaagagaggctcctagggtgcctaggtgtgtagtggacctttcatttctgacaaatattttgatactttggcagaaaattcagaatgtgtgaacaaagtaaggtagagcagtctggtgttgtggattttccttccccctttattgtgttcattagagcactgtctattatttcctgccttctttgggctctgaagaatatttttagcactgaaatttgtctttactactgaaccctgcccagctaatacaattttgtaacaattgattaccgctaaaatggttacctctctttgtcaatactacacccatccagatctcagtgaggaagtaagatttcaacacctaaagaaccaaaatg

SEQ ID NO: 11065 - DNA, 495 bp, Homo sapiens
ggaatatcaaaattgtcatggccttttaaagtacttatgtccagtgtcctgatattacagataatgtatgaggcccagtgaggctaacttgtccaaggtatggatcccatcagaaataatttcagcattgttgtatttctgttttctttgacacctaagatttggacttagaatcacctgcytcttcaaagagagcttcctttgtaatttttcttcttgacttaatgaaagcctgtcccagtgttctctgtttagggttttgctcactaatcataatgacgccattgttcttttctcttttgctagaattgcttcagtgccttaacaggcaaattagacaatgagaagaagaaattttttattttagatccctttttatcctatttggtcatttagagcaccaggcagtctatctcctaaagaatgagtttcacagtgcactggggatttagttgcctaaggtgtcctatggctgaaaagtgaattctttatgat

SEQ ID NO: 11066 - DNA, 616 bp, Homo sapiens
ttccaatttaatattagtactagcagtattagaggattttctgatttttttattactaaattaataccaagtttttaaagagtactatggaaaaatattatttggtaacacttcagaccactgcaaagtaagatcttgagttatctcatataaaataaatcctgagagagaaagagcaatccatcttgggtgccaagcataacagaagtgggccagtacagggagcccacttcttaagggcactggcaatcatgactttggacagtcagctccagggrtgccttccacccagggatctggccatcttcaacaaccattacctcacagtgactgctgtctccatgtacccatatggggacagaaacaaagtgcaaaaggctcttctaaaaataacaaaaagacaaactgattcccacatcttcaggttctcaagtccatgtttctttctccagttaggaagacctcagacaattaaagagggctggccctgaccacctaggagtgggtcacagacctgtgacgtggcaaatggcagcagggacaaccaaaaagggctcgattcagcccatgacacaagtctctgtgcacccatacagacatcagcattttcggatcc

SEQ ID NO: 11067 - DNA, 534 bp, Homo sapiens
caagcattgtatttagtatgaatttgccacgcccattttagagacaaagtcaaggatcagagaggtcaaaacattatgagaatacaaacttgggtggatctgggttttacatctgggatctcttttactttaccacaaaccctgtcctgccctttggagctaaacatgggggcatcagctctcgttccagccaggtctcaaggaagataccagagacttggaggatattctgagatttagatttgaaaactcagtgaaattagttttaaaaagaaaatgttaaggaattgttacctgcctcaagagatgggagctatctgtttagggaaggggaacaacttagtaaatatatatatttgcttattcataaacttgttttaagaaagtggttgtwactggagataaaatggtgaatgacacattaggaaaattttcaaactggcaagcaaacaagcaacttcattatgcaagagatacaaataggatgtgatctcataagactactattatacaatagagtgctagagcttttat

SEQ ID NO: 11068 - DNA, 571 bp, Homo sapiens
taaatttctgcccagtctcttgaaagatcaccttggctttcatctcataattctcacctgatccatactgttcagaagtcttaacatacataatccattttagaaatgatgtggccatgaatcctattggattggagccctgccctgagatttcattttttaaattttcctctgaaagactctattttcaaatataatcatattgggggttagtgtttcaacataygaagtttaggtgggggatacaagtcagtctcattgaagataataaggcataattactgagggggatttatatataggtagaaaagtagagtgggaacagatcttgaaggtcttctagactagtctaaggggtttgattttatcctaagagatccaaaaatcattgaacaggtttaaaacaacaaagtctgatatgcgtttttcaaaaaattactctggtggctatgtggaatattagatgtaaagaggaaaaagcataaacaggaaaactagttaagactacttcacagtcaaaaaataacttgggtgaggacagcagtaggagaaatggcataagtgaaatggg

SEQ ID NO: 11069 - DNA, 571 bp, Homo sapiens
taaatttctgcccagtctcttgaaagatcaccttggctttcatctcataattctcacctgatccatactgttcagaagtcttaacatacataatccattttagaaatgatgtggccatgaatcctattggattggagccctgccctgagatttcattttttaaattttcctctgaaagactctattttcaaatataatcatattgggggttagtgtttcaacatatgaagtttaggtgggggatacaagtcagtctcaytgaagataataaggcataattactgagggggatttatatataggtagaaaagtagagtgggaacagatcttgaaggtcttctagactagtctaaggggtttgattttatcctaagagatccaaaaatcattgaacaggtttaaaacaacaaagtctgatatgcgtttttcaaaaaattactctggtggctatgtggaatattagatgtaaagaggaaaaagcataaacaggaaaactagttaagactacttcacagtcaaaaaataacttgggtgaggacagcagtaggagaaatggcataagtgaaatggg

SEQ ID NO: 11070 - DNA, 555 bp, Homo sapiens
tgtcttataactcacattcgattcaatggaaagttccagtggctctaccttcaaaatatatctgaaattggaccttccacccccattgttattctgttaatcaccatcatctcttgctggcatgactacagtggccttcttccttgtttctctgcttccagtctttcctcyctctaatctgctctttgcacagcagccacaataagctactattataccatgcctatgctaaaactctcatgattccttacattacttagtctgggatacctctctaacctgccccttgctcactgcagtggtggtacaaggctagtccattatttcactcagtactgtccaactacagggagcatccatttgctgttcccctgcccaaaatgtccttccatagatgaaaatatggttgctctcctcttcattaaacgtcttttcaagtgtctttattccaactgacctttcctttctaaaatagtaccatctccttcactttatctacccttacttactgtgctttatatttcttcacaggacttcttgattttctgacatatt

SEQ ID NO: 11071 - DNA, 555 bp, Homo sapiens
tgtcttataactcacattcgattcaatggaaagttccagtggctctaccttcaaaatatatctgaaattggaccttccacccccattgttattctgttaatcaccatcatctcttgctggcatgactacagtggccttcttccttgtttctctgcttccagtctttcctccctctaatctgctctttgcacarcagccacaataagctactattataccatgcctatgctaaaactctcatgattccttacattacttagtctgggatacctctctaacctgccccttgctcactgcagtggtggtacaaggctagtccattatttcactcagtactgtccaactacagggagcatccatttgctgttcccctgcccaaaatgtccttccatagatgaaaatatggttgctctcctcttcattaaacgtcttttcaagtgtctttattccaactgacctttcctttctaaaatagtaccatctccttcactttatctacccttacttactgtgctttatatttcttcacaggacttcttgattttctgacatatt

SEQ ID NO: 11072 - DNA, 555 bp, Homo sapiens
tgtcttataactcacattcgattcaatggaaagttccagtggctctaccttcaaaatatatctgaaattggaccttccacccccattgttattctgttaatcaccatcatctcttgctggcatgactacagtggccttcttccttgtttctctgcttccagtctttcctccctctaatctgctctttgcacagcagccacaataagctactattataccatgcctatgctaaaactctcatgattccttacattacttagtctgggatacctctctaacctgccccttgctcactgcagtggtggtacaaggctagtccrttatttcactcagtactgtccaactacagggagcatccatttgctgttcccctgcccaaaatgtccttccatagatgaaaatatggttgctctcctcttcattaaacgtcttttcaagtgtctttattccaactgacctttcctttctaaaatagtaccatctccttcactttatctacccttacttactgtgctttatatttcttcacaggacttcttgattttctgacatatt

SEQ ID NO: 11073 - DNA, 546 bp, Homo sapiens
gtggcatcctgggcctccccatatcaatacatcaccaccacctgttgttaaaacataggctcatgtattcacttgcttttattcgaatgacttaatcttcatggcctagcaacaaatagaaccctccctacagagccctccttatataccttattattgcatactcactctttttatgtcctctctcagtgcttctctcagtgctcattttaaaagaatttcacctctctaaaacagagtggtgcrggactgggtgggtagaagaaattgatttgttttgcctgcccctgtagccacagaatccagttacagccaggtttttgctgcaatcagtaaggatttctcatgttctaacaaagatgaaagcaataggagatagcatccgttatcttctcagggactttcttttcagtatgacaatgggcattttttgttgttgtttttgtttaaagccaacttacatgctgtacagcaagggcctccatcttccaaacactctaaagagtaaaattagtctgaaatccagtagaagaatactgattatac

SEQ ID NO: 11074 - DNA, 1271 bp, Homo sapiens
tgaaggtgtttttctttttcttagcaatgtgttttctgatccttcatctcattttatctttcctattcttttccaattgtgatagtggaactaattcactgmgcttcagtcccatacaatatcatgcccagtatacaactgagcagagagacaaactcagattacttgattaccttgtctttgaaattattactaatgtcctctgcaaagctaattacagcttccattgtattattagagaaatttttcatacctcacttaggaagcttgtattgtaaatctatacttatttgcccaactctctctccagattcctgagtgcattatcttactcatctatgtgccccagtgtctagcacagagcctggcacatactataaatagatacatatatatatatatatatatatatatatatatatatctgtacaaaacagaatagccagatcacttagcccatatactatagtcattactagaacatagcttgtaattatatttatatatatatatatatgtatatatatacacacacacatacatttatatatattttttgagacagtctcgctttgtcatccacgctggagtgtaattgcacgatttcggctcactgcaacctctgcctcctaggtttaagcaagcacgtttcactaattttttgtatttttaatagagatgggatttcaccatgttggccaggctggtcttgaactcctgatttcaagtcatctacctgacttggcctcctgcagtgctgggactacaggcatgagccactccacacctggcccatactagatagttttaatgttgattaacataatgcacacatgcaagtgttaatgcataagcaaatggagcaatttaaacaagatgctctggtaggtgctgaaattaagagaaaatgttcagtctcagacattgttcattgctgctttctactgggctgaaaaatgtcatattctataaaatgtatcaagtcctcagaattaaaatgtcactgaaccccctgacagaccatgctatgctagcttgatatttgaaagcactacaattcattatgccaactgctgatactgttccaggctatggggcatctgctgaaaatgatgggaaataaaaatctgtgggtcccctggaaaggaaagattctatgtttgaaaagctgaattccagacaagaactcaccagatgctttgtggactgaagagctgggttccatttccttggggacctgagcagatgggactccctgaatccactttcaa

SEQ ID NO: 11075 - DNA, 1271 bp, Homo sapiens
tgaaggtgtttttctttttcttagcaatgtgttttctgatccttcatctcattttatctttcctattcttttccaattgtgatagtggaactaattcactgagcttcagtcccatacaatatcatgcccagtatacaactgagcagagagacaaackcagattacttgattaccttgtctttgaaattattactaatgtcctctgcaaagctaattacagcttccattgtattattagagaaatttttcatacctcacttaggaagcttgtattgtaaatctatacttatttgcccaactctctctccagattcctgagtgcattatcttactcatctatgtgccccagtgtctagcacagagcctggcacatactataaatagatacatatatatatatatatatatatatatatatatatatctgtacaaaacagaatagccagatcacttagcccatatactatagtcattactagaacatagcttgtaattatatttatatatatatatatatgtatatatatacacacacacatacatttatatatattttttgagacagtctcgctttgtcatccacgctggagtgtaattgcacgatttcggctcactgcaacctctgcctcctaggtttaagcaagcacgtttcactaattttttgtatttttaatagagatgggatttcaccatgttggccaggctggtcttgaactcctgatttcaagtcatctacctgacttggcctcctgcagtgctgggactacaggcatgagccactccacacctggcccatactagatagttttaatgttgattaacataatgcacacatgcaagtgttaatgcataagcaaatggagcaatttaaacaagatgctctggtaggtgctgaaattaagagaaaatgttcagtctcagacattgttcattgctgctttctactgggctgaaaaatgtcatattctataaaatgtatcaagtcctcagaattaaaatgtcactgaaccccctgacagaccatgctatgctagcttgatatttgaaagcactacaattcattatgccaactgctgatactgttccaggctatggggcatctgctgaaaatgatgggaaataaaaatctgtgggtcccctggaaaggaaagattctatgtttgaaaagctgaattccagacaagaactcaccagatgctttgtggactgaagagctgggttccatttccttggggacctgagcagatgggactccctgaatccactttcaa

SEQ ID NO: 11076 - DNA, 1271 bp, Homo sapiens
tgaaggtgtttttctttttcttagcaatgtgttttctgatccttcatctcattttatctttcctattcttttccaattgtgatagtggaactaattcactgagcttcagtcccatacaatatcatgcccagtatacaactgagcagagagacaaactcagattacttgattaccttgtctttgaaattattactaatgtcctctgcaaagctaattacagcttccattgtattattagagaaatttttcatacctcacttaggaagcttgtattgtaaatctatacttatttgcccaactctctctccagattccygagtgcattatcttactcatctatgtgccccagtgtctagcacagagcctggcacatactataaatagatacatatatatatatatatatatatatatatatatatatctgtacaaaacagaatagccagatcacttagcccatatactatagtcattactagaacatagcttgtaattatatttatatatatatatatatgtatatatatacacacacacatacatttatatatattttttgagacagtctcgctttgtcatccacgctggagtgtaattgcacgatttcggctcactgcaacctctgcctcctaggtttaagcaagcacgtttcactaattttttgtatttttaatagagatgggatttcaccatgttggccaggctggtcttgaactcctgatttcaagtcatctacctgacttggcctcctgcagtgctgggactacaggcatgagccactccacacctggcccatactagatagttttaatgttgattaacataatgcacacatgcaagtgttaatgcataagcaaatggagcaatttaaacaagatgctctggtaggtgctgaaattaagagaaaatgttcagtctcagacattgttcattgctgctttctactgggctgaaaaatgtcatattctataaaatgtatcaagtcctcagaattaaaatgtcactgaaccccctgacagaccatgctatgctagcttgatatttgaaagcactacaattcattatgccaactgctgatactgttccaggctatggggcatctgctgaaaatgatgggaaataaaaatctgtgggtcccctggaaaggaaagattctatgtttgaaaagctgaattccagacaagaactcaccagatgctttgtggactgaagagctgggttccatttccttggggacctgagcagatgggactccctgaatccactttcaa

SEQ ID NO: 11077 - DNA, 611 bp, Homo sapiens
cattctggccaaactgaataacactacctcttgaatatgtagttataattcacaatacttccattcacttctcagagtgagcgttctctggtctcatggataggacgcattccacattcacaggctccaattgctttttttgttgttgttttcttttctacttgtgggtaaaccaaataccatattaaaacaaattatttctccttttaaagatcattttccttgacagtatatggcaaaaatatttgatatattttatagcccatgcttgaaataagttgtctcctccaccattaaccatatgatatgccttccctaccaacaattcacaaaactatacaagttaaagagatcttccattcaagggctttgaaaaatttcttcccagttacccaggacacatatacaatacctcagctttctaccctcaatacactmttctacttgtgataggaatagaaattcttctaaattgatttcataatccaccaatggttcaccatccaaactttggaaaacacaaacgttattcaacctttccattttatacattaaaaaaatgaaggtccagggaagttaatagacttggcaaagaccactcagcttatgaa

SEQ ID NO: 11078 - DNA, 547 bp, Homo sapiens
gagagtgtattagcacagaagcctaatgtgtgggtgtgtgataaagtcatggcagttattcattattcattttatttatatatatttggatagagagatagactgaatttttaaaatggagatagggtctcactatgttccccaggctgaactcatactcctgggctcaagggatgctcctccctcagcctatggagtagtcaggaatataggagctggccaccattcctggcagtttgtttcattttaatttaatttgaggtcatcccccaggccataagagaagagatgggagaatagaagaacaaaatgtagacatatactcccttctttctattctcatttcaccatcatacaatatccccttggtttttgttttaataattgttctgccacagttaattacacattcactagtgtgtttccactatcaaacgtacttcttcggtatactgtggaaattaacaaaygcttgttaacagaaaaaaaacaaaacctaaagcttggtcaacatcactgtcttccataccggggaatgagtgttgct

SEQ ID NO: 11079 - DNA, 619 bp, Homo sapiens
aaatataaaaattaaccgggcatggtggtgcatgcctgtaatcccagctatytgggaggctgaggcaggagaattgcttgaacccaggaggcagaggttgcagtgagccaagatcgcgccgctgccctccagcgtgggcgacagagtcagactctgtctcaacaataaataaataaataaataaataaacttttaaaatatacataccatatagtctaaaaatatttagtctaaagttaatcctcaccacgtttgagtagaggagtatgcccccaaaaatgaacaataaacattatttttattataataatctgagagtaaaacttttcttaaaacaaaaattcttagacaaatgagagcaggtagcagatgatcaaatttaaggaaaggaaatgagtgtccttgccgccgacttgaatttctctccccatgaattttctgtaagaaatggcatttctctccacttcctgccttaaattgcgctgtagcctgtgcagctgctgagcggctgtctcgtcctgctctgacacagaggtggctgtgagtacctactgggtaggctgcgggctttgtatgtcacgtggaaggaacaggatgagtcggggtggcctcgattcca

SEQ ID NO: 11080 - DNA, 571 bp, Homo sapiens
ccatgatagttcttactatgcaagaattggtgacaatctggacattctaaccttgttgaagactgcatcggaaaataccaacaaaggtatcagcagttttctgtaactagaaaagtccacattaacaaagagccactttttaaaagacttaggtagtagaactacagtttataagaagcaaaacattccttactgataaacagtattggttcatctccctctacaacatggatttgcttacttacattatggtcacttgctttgaggcagtgtgtgttgcatatataatctagtttatccagtgaacactaagacactggaataacttcagaactgagaaggaagagtcaagtgttttactaastttttttttttttttgatgaagaggggtgaacctcccaactttttatacttacgaagttttaaagaatcattgtttaaacatgtatgtaaaatagtcagctgatatttaccaaatgcctatgccatgattttttatgttttttttaaaaaaaacaggaacatacagaaaagcacaatgaatagtcactcattaccactgagaagcct

SEQ ID NO: 11081 - DNA, 532 bp, Homo sapiens
acattgtaacttgctaaatgatgaactttagcttggcagatcatagacagtttcccccagtctcccttaataacaggacaaaatattgactgttatgggaaaattcttccagtgtaattaagaaatgaagaaaacagagttctaaactgattatatattgtgatttcaatgccactgttagtgtttttatttcttcttcagtctttttttctgtgtgtatttaattgaggactttacggaataacaacacttgaaataattcatgctttgcactacatttattattaaattactrtttaaccctgttttgatatcctggttgtgaaatgtcttatgttttctgctaatctatttgtgttaaagtaagcagggttggtttacagtaccgtggctcaaaagctagtgtaggcagctttcctctcctgctgactgttcccttccaggctttcagcttttctctagtgagaggaacctaagcatttgcaaaccctgaagagaaagtaatcaggtaccttgagcaattctgatcatc

SEQ ID NO: 11082 - DNA, 603 bp, Homo sapiens
cctttgatcaagtgtcagccttgcttggtataggtagcttttattccattaatagctgaaatttagaaatagttctcttctctggctagggaggtgaagtttctgaaggctaataagtttatagtctattatcttataactttactcaacaaatatttatgaggcatcgggtatatgtgaggtacttttttctctccctccctccttccttcygctagatttatgtggtagggatggggactgtcttataccaaaggcagtcagctggatccctgtatgttaagagacccaacagcctaaggtttgtatccttcatcctagtttttctttcttttttttttttttttttttgagacagagtcttgctctgtcgcccaggctggaatgcagtggcgtaatctcaactcactgcaaactccgcctcccgggttcacgccattcattctcctgcctcagcctctccagtagctgggactacaggcgcccgccactatgcctggctactttttttgtatttttagtagagacggggtttcaccgtgttagccaggatggtctcgatctcctgacctcgtgatccgcccgtctcggcctcccaaagtg

SEQ ID NO: 11083 - DNA, 603 bp, Homo sapiens
cctttgatcaagtgtcagccttgcttggtataggtagcttttattccattaatagctgaaatttagaaatagttctcttctctggctagggaggtgaagtttctgaaggctaataagtttatagtctattatcttataactttactcaacaaatatttatgaggcatcgggtatatgtgaggtacttttttctctccctccctccttccttctgctagatttatgtggtagggatggggactgtcttataccaaaggcagtcagctggatccctgtatgttaagagacccaacagcctaaggtttgtatccttcatcctagtttttctttcttttttttttttttttttttgagacagagtcttgctctgtcgcccaggctggaatgcagtggcgtaatctcaactcactgcaaactccgcctcccgggttcacgccattcattctcctgcctcagcctctccagtagctgggactacaggcgcccgccactatgcctggctactttttttgtatttttagtagagacggggtttcaycgtgttagccaggatggtctcgatctcctgacctcgtgatccgcccgtctcggcctcccaaagtg

SEQ ID NO: 11084 - DNA, 1240 bp, Homo sapiens
ccagcatgcccagctgattttttgattgatagattgaatttttttttttttttaatagagacaaggcctcatttcgttgcctaggctgatctcgaattcctgggctcaagtgatcctcccaccttggcctcccaaagttctgggattacaggtgtgagccactgtgcctggcccaaaagaaagtttttaaattggttcttgtatatatgactttacttggccagtgctatcacagatttgcacatgaatgttagagaatatttggtttataatattcacaaattacaagattacaatttacaatattataagattcacagtatttcttatgtatttaaagtagtttgatttatatagtttcataacaacataagtattgtggaaacaatttagattaacaaatatttcttggttgctttttactctaggttttctaactttttgacttaaaaaagttctctaaggtatattttgatttgttgtacttactaaaaaattaatactttctactgctgttgttttttacagcagttttctgtgctgtgttttacatttgttattgatgataagaatgagaagtggatttgggaggcaaattgccagggtcatgcatgaastgggaagagaagggttggagatgagatagagttgtaagacagaattttatatttggcagttggagagaaacaactctgtttattgcaatctggggcttatatatacaccacatatcaaaatctagagccagtagtattaatttagtttaacatctgacaccattatcttcttttatattgacttcaagagtatggtaatgttttttattaaattatatgaattgagagtggcctaggaattgtcaataaaactttgaatttttaatatgtcagctattgaaaatttggtatatatcatacatgcctgtaaataaagtttgcactttagaatcattttaacagccttttaaagcaattatattcttgccaatataaagccagtttgtaagaccgagttgtctttcccttaattcatccctttattcatccctttataacagtggttctcaactaggggtgattttgttccttaagagacatttggcaatgtctggagatgtttttggttgttaagcttgaggagtattgctagtatctagtggggaggtgccatgggtattgctgcacatcctacaatgtgcaggacaacctcttcacaataaagaattacctggcccaaaatg

SEQ ID NO: 11085 - DNA, 533 bp, Homo sapiens
tatttgtttgcatgtacggtgtcctcattctcctgaataatacttcatctgagtaataatctcaacacattgagttaattccatgcagtgggaggggaaacctgtgctttccttaaaccaggtgccccagggatcactgtggctgacatcattttgtttagtttgagttactgggctactcgaaagtaataacaactatatttctttaagaaaaaagaaatgtacttctcactaattccaaaggaaaacattttattgttttataatttcttttctttgcctaatcatgacctttactcagggctattattacatggctycttgttgagtgtcaaggcatataggagtcattgtcatttaaaagaagagcgtgaaatgaacatggaagcaatgtgtgatgtgatttccttgacctcttttatgcactcacttaattagctgtttgctgttatgttgtgatcaatctgattattgaaataacaaataccatctttggtgtcttgtaatatgagatagatgtgaattgtcattca

SEQ ID NO: 11086 - DNA, 548 bp, Homo sapiens
ttgtccctcccttgtcaaagtgatttgattcttagaaatgagctgcatgtagaattttatgcaaagatattttctttagttcatgaaatgacatccaaactcatttcagtttctttctaataaaattttcacagaacctacttttaatacacatagaagactggcagtagagaacatggaaagtttatacttaccatctttttagttgctttctaatgctataaatgcattaatagtaacatatattcactaaccacatgcatttcatccaaactcgtttgccaagaaaattagtttaatagtccatttaattctgtaggatattgtattttcttattaataattagagtattgtggtrcattctctaaatcattcagtagacatgtaacttttgattaatgataattttaaatgtggctctgaaatttcatatgtaacagtaggttagagtacataatgcaggcactatgttagattttcagattaataaatatcaggtgatgaaatgtgcaaaatagtgcatcagcaggattgtatatgctgtaca

SEQ ID NO: 11087 - DNA, 532 bp, Homo sapiens
cgacctcgttatttaaaaattcataagagagacagctcatcgaatagaccaggacacagggttcaggatatgatactgtaacataattaagtatggagaacaatcttgccatagggcaaaagtaactcctgaaattctgttagcctctgtgcacatttgtcttacaaacatgcttgctcctgatgaaaatctgctttttaattccttctagacagaatcactgatataagcttccatcttatatcaaaatgactcattcataagccacatactcttgcgaatgattctaaaaggcaagtgatgtttgatattaaggttttatgtgacaagctagcattccatgggtgtccataacaacagtaaacttaaatccaatgagtaggcgcccttaagtccagactaagtagccctaaatgccaaatgccacaagactgycacttggtaatgactgtcattagcctccggagtatggatggtgggcactctgaataggagctttattacactgtagaagaaaagctttctccttact

SEQ ID NO: 11088 - DNA, 574 bp, Homo sapiens
tttcaatccctaaatttcccataagtaaaagaaacatcacctcctctcttccaagagtccgctgacacctgtcttcacccgcaggtgtttcttttaagacgttaaacgctttctagaacctcaaacagctaagatgctccccgcacccgaggttttgcaccagcgacgctctagggtgtgtttttctacttccctaggcccaagcctgcccgctggcgtcgaagccaactccttactggttcaggtatgtgctcgtctctagagtraaccaatcagagccccacttcttactcctgggatttggtaaacggaagagacctctcctgttccgggagtaggccgggaccgtggatgagtgacagttcgactttccaataggcagagccctaggacctgcccacgtctggttcaggggctagaaaagagcgtcgatgccggcggcagtgatgagtcctaggaggcgctggctctttggcggctcggaggagcggctgctgctgctgctgctgctgctggtggcccctttgcaggtgagtggctttgttttagaaaatgttgcgaacgtttacatttt

SEQ ID NO: 11089 - DNA, 516 bp, Homo sapiens
ttagtaaaagcctccttcaaatttcagctgggacaacagcaatgacgatattactagactttctgtttctaattttgccctctgccaataatgtttcattcacagccaacataagcttttaaaaagatacatcagaattttatttatatttcccaaacttctcattatattgtaaacaaaatctacaaaagtttccatatcctcactctgtttacctctcaggtatcattttcttctacttcttcattccttcacrtggcttctaatgagctctttgaacctgccaagcatcttcccacattgttatcatctgaatgtttgtgttccttccagattcatatgttgaagccatagaccccggagtaatggtatttggaggtggagtttttgaaaggtgattaaggttacattaggtcccaggttgggactcattttaggaatgagagcccttaataggaaaagaagagaggctgggcacagtggctcaggcctgtaatccaatcactttgggaggct

SEQ ID NO: 11090 - DNA, 544 bp, Homo sapiens
cagaagaaggaaagtgtgtgagagatagggctgggggacagtgtgcatgagcaagcttcagaactttggggtgagagcagcataaagctagagatgacagtgagctgagttcgggacaagttgattaagttctttcccagccatcccttgagaagaaaaatactaagctgtaagggcataaatggaaacactctaagaataattatgggattctgtaaaatgtatttctgatagctagagtgttgattcactctaagagacattgggcaaatcagcactttcgtctgaatttatttttcctcaagttgatctaagagcctartgttttttcccaaaagataatacaatgaattttatggtcttcatctgtattcagttaatcttgtttctgtaatctgatagggtttcttgatacttcttccatctttctcatttccccatatatgtatttttgcacatctagtctcttcatctgaacagctttgggccccttttccctttatttaggcatgcccatgtgttttaccatcaatttcaggctagt

SEQ ID NO: 11091 - DNA, 502 bp, Homo sapiens
tttgttttttgtttgttttgttttgttttgagacacggtcttgctgtgttacgcaagctggagtgcagtggcataatcatggctcattgcagctgtgatctccagggctcaagtgatcctcccacctcagcctccccagtagccagaactacaaacgcaccactgtgcctggtaaattttttttattttratttttttttttttgtagagacagtgtctcactatgttgcccaaactggtctcaaactcctaatctcaagtgatccttctgccttggcctctcaaagctctgggattgcaggtatgagccactgtgcccagcttgtctggatgacttttataaaacaaaataacatctaagtctctaattatacccatatcaatatatcctgcataatctttcaaaagtttagcctccaccaggtcattaccctgttcaaaggcctgcagtgcctctggggtaaaggacagactctctgaggacagactcccaggcgtcctc

SEQ ID NO: 11092 - DNA, 615 bp, Homo sapiens
taagtgtttgacagttccttcttcacaggctctctgcctttcctgctgccttgtgaagaaggtactttcttctccttaaccatctgccatgactgtaagtttcctgaggcctccacagccatgcagaactgtgagccaattaaacctcttttgtttataaattacccagtctcgggtagtatctttacagcagtgtgaaaatggactaacacacagggtgaaggaggaatcggttgaaggagaggtagatttccacgtgcggtagtgggaagaggagagagttcttgtgcgagtttcatcttgtatatgaaagcaacttgaaatgtttttattaacacatgtccctggtttggcttcagaagttatgtttctcctaaggacagtctcatccatgtggcttatccatgagctgctatccatgtatgataattatcttgttggctggaattcccttccaaagtttctgctcacctatacaccattaatacattaatccatctaagcaggagttattccttagctgactaattagggatwgtatccctgatattaaagcccataccgtcacacaaaaaaggtttgcctgaggccaactctatgccaagtatggcattg

SEQ ID NO: 11093 - DNA, 499 bp, Homo sapiens
aggacttactatttcagatctcagcacagggttcattgcctccaggaagccctccctacaactcaaactaaagtagtcaccatgttactatttcattgcctgacctaaagttctctatttagtgctttttctacattactttcaaatacccattgtgtatatgcttatttttctcctccatcagaatataaattccatgaatacagaatcttctgtcttattcaccagtgtgtagaacattgtgggcatataatagatattcaataaataattgtcaaatgatttaatgaattgttgatgactcaatacttactatagtgccttgcacctagatacgtagagagaatgagtgaattgggacaaaggagaaagcagcaaaagttcactgagtccatggaaggtggaaatggacaaaacacccaaacttcatatccagyatggtttggttttgtatcacccctgcctgctactcacagtcattcctttcattcctacatac

SEQ ID NO: 11094 - DNA, 590 bp, Homo sapiens
attggccgtcggggaacggaagccgaagcaaactagtgaacccggaagtgcttcgcggcggaggcccgggcaactcttttgaatggaatcgggctgattcatcgccggtttgcagacwgagccgcgtcgggtgtgcgccgctgctgctgttgcctctgtcttcgcgtcaccacagaggcaagacaagggtccatatcgcggcatccggctcccgcccgtcttcaggtaagacccagaaggcaggcctgggaggtctggggaggcagccgtgctaggccgccgccagccccgtgctttcctgagtcacgttgcccagctgagttgccacaggaggcctgggccgcgagggaggagcccggcctccttcattctcttcgcctgctctcagggctctctggcagggtcaggtctggatgtcgcctcctttctccattcttttctgtttggccgaattcacatcatgggaacctcttccatctatatagagagaatccttgtttatggcctgtttgtctgtgctctatccatagttgttaaccggtctgctttgaagtttttcaaagcagaccgggaaaacaagggagagagag

SEQ ID NO: 11095 - DNA, 1279 bp, Homo sapiens
tgcctttataaaacataacactcttagtcctcagggatatggtattaccttttagtaatatggtcacttggctccaaagtagggaagacatcttgagcgagaccacattatacccccttgcccatgacataataagaaatatatatttggtctctgcccctcattcctgacacagagctcctaaaacttttgaaatttcctgagtgatggatgtgataagagcatcttacacaaagctcctacatgttttggagtttcctgggtgataggaacatcttttgtcctcgagatgactctgggtaggctcctggatagcttcagaatggggctggtcaccagaaacaccaaaccatggttagaagcttggaactttcagtcctaccacccatcctttgggggaggagagaggaactggagattgaattaataaccagtcatgtttttgtgaggaagcctccaaaaaaaatccctaaactatgggattcagagagcttatggagaactaaggaaataatttaagaaagcagtaccactaatagaatttaaaatggcagcagaagcaataacaaaaagcaaaattgaccttatagaaaactaaatcatgatacaataccagcatgataaacttagatgggtaatccatctaaccaagtttatgtccaagaatatatttatcccctggatatttccagttaaggtatggtagttgggaaagtaccaggtatttggaggtaggagtaaatgagagataatcttctctaatgacagaaacattcagagactcagaaacagatgttcagaaagtgaaggttgattctgtctgtgtctattagcaagctccacacaatgaatgccatgcaaataatcatgtaggcaatgtggactgtagttgaaatttttatttagataattcatgtgcagttgaaaggaataatacggagaaacctcatgtgccctttacccagttttccccagttgtaacaatgtgtaaaactgtagtacaatatggtaaccgggatattgacattgatacaatccactgatcttattcagatttcctaaattttacctgtgataatgttgatttaaaggcactggaaccaacacttgaaaacaaggtccacttacttgtactgtttccaaatctaactacctccactaagttgatcaccaaacatcctgtcaatatatcratccatgattgtaaaagtgcttagggcagtgggaacttagagaaggcacttcatgaatttcggctcaatctcaatctgaaattcat

SEQ ID NO: 11096 - DNA, 719 bp, Homo sapiens
gcaatacaaagtaccctgtatcatgtaggttgtattcttgccaaaatgtgaatctaattacaagaaataatcggacaatctaaaatgtaagaaatcctataagacaactggctttgagtctccaaaaaagttggtatcatgaaaaagaattttctacattacaatgttctactttaagacagatcaaagagatgtaacaatcaaaagcaatgtcttttgattgaataaaccttgattgaatccttggtccagaaaatcagcaaaagctcataaatggattaaatggtatttcactattgtttctatgaacatttcttttattattcttatagcttcctgttttcacactcagctattggtatccagttataagatataaagatcwaacgttctgatgactatcggcatggtaactaggacaacatacaagcatctcttgttccccacaccactttgccttttctgatttctgtgaccaccactacccacctaccctgttcagaattctctcaagctcgtagactgcttgtagggccccgacttccagaaccctcagctggcagagtaagaggtgaatcacggcccggggacaagtcagcatgtggcagtttaaacaagagccccgaagcagcaggtacagcttctgaagagagggaataaaaacaaacaggatattagaaagagacacagtagccatggtgattttcggtatactcaca

SEQ ID NO: 11097 - DNA, 547 bp, Homo sapiens
ttcctcccctcccccatcccttccctgcccccactggcttttcacgggcgtggccccttatttaaacctagggccgggcgcagtggcgyaggcctgtaatcccagcactttgagaggccgaggcaggaggatctcttgaacccaggagttcgagaccagcctgggcaacatagtgagaccctgtctctaaaaacaaaacaaaaaacttctcagcctaaattctcacaagaccttcatcttatcaacctgtttatttccttttcagtgttcgccaggatgcgaaagcactgtctatgattgcccctgtgctctttgcctctaccctcttacacgtaaaaccatcacacctggagggaaaaggttcctcgaagtgaagtcagctccggaagtgggggggcaggggcgatgcagtctgggagttgtagtcaaagctgctccgaagccacgcagccgaagaggcggtcgttctatgcaacattcctgtgaaaattacccagctgtgactgtcgaagggaaaaagtcacacttacctatatccgggatccca

SEQ ID NO: 11098 - DNA, 510 bp, Homo sapiens
gaatgagaccccgtctcaaaaaaaaaaaaaaaagaaagaaagaaattatatttcctggctaagcgcggtggctcacgcctgtaatcccaacactttgcaagaaaaaagaaaattctttttcctgacccatccatctagcatcccacctgactattcagtttagttcatctgaaatttattgagctccacagtttggtactctacaactcttggatattcaaatatttacaagttactgaatttgtcctcaagaaactcagcttatccgactttgtggttctatggagaagaaaaaaaaaaactgggaaagatagccctgtaagcaaataaacayaatgcagttcctgagtgctatgatagagatatacacagggtgttgcagaaccatacccagaaggcttgcaaaaggctttccaaaaggaagtcacgcctacgttgtgttcaaaggttaggaatctgggcaaggatgtccgggaagggtgggatttcaagtttaggaacctgagtgca

SEQ ID NO: 11099 - DNA, 510 bp, Homo sapiens
gaatgagaccccgtctcaaaaaaaaaaaaaaaagaaagaaagaaattatatttcctggctaagcgcggtggctcacgcctgtaatcccaacactttgcaagaaaaaagaaaattctttttcctgacccatccatctagcatcccacctgactattcagtttagttcatctgaaatttattgagctccacagtttggtactctacaactcttggatattcaaatatttacaagttactgaatttgtcctcaagaaactcagcttatccgactttgtggttctatggagaagaaaaaaaaaaactgggaaagatagccctgtaagcaaataaacataatgcagtkcctgagtgctatgatagagatatacacagggtgttgcagaaccatacccagaaggcttgcaaaaggctttccaaaaggaagtcacgcctacgttgtgttcaaaggttaggaatctgggcaaggatgtccgggaagggtgggatttcaagtttaggaacctgagtgca

SEQ ID NO: 11100 - DNA, 510 bp, Homo sapiens
gaatgagaccccgtctcaaaaaaaaaaaaaaaagaaagaaagaaattatatttcctggctaagcgcggtggctcacgcctgtaatcccaacactttgcaagaaaaaagaaaattctttttcctgacccatccatctagcatcccacctgactattcagtttagttcatctgaaatttattgagctccacagtttggtactctacaactcttggatattcaaatatttacaagttactgaatttgtcctcaagaaactcagcttatccgactttgtggttctatggagaagaaaaaaaaaaactgggaaagatagccctgtaagcaaataaacataatgcagttcctgagtgctatgatagagatatacacagggtgttgcagaaccatacccagaaggcttgcaraaggctttccaaaaggaagtcacgcctacgttgtgttcaaaggttaggaatctgggcaaggatgtccgggaagggtgggatttcaagtttaggaacctgagtgca

SEQ ID NO: 11101 - DNA, 600 bp, Homo sapiens
taaggaaaagaggtttcattagcccatggttctgcaggttgtacaggaagcatcgcgtyggcatctgctcagcttctggggaggcctcatggagttctactcattgcagaaggcaaaggggaagcagttgtctcacatggcagaatgggagcaagagagagagggtggctggtgccatgcacttttgaacaaccagatcttgtgtgaactcactcatcactaaggggatggcacaaagccatttgtgagggatccacccccatgttccaaacacctcccaccaggccttactggggattacacttcaacacgagattcaggggggacatatatccaaacaatgtcatccatctcttcacatagaaatttaaagggatgtctatggccataccaccctgaacgcacccgatctcgtcagaaatttaaagggatgatcactcctctcttgcttctctctctgtcttcctttcttctcctgatttacatattgctaaatgatgaaattatacactacataattccacagcaactctgcagctcaaaaaaaaaaatgggaatggagtaattaggcagaaaggattctcaattaggcagtggatt

SEQ ID NO: 11102 - DNA, 626 bp, Homo sapiens
tttttgacactacatagaccttcagattttgggggtaacttcacattttaggactctggcaaggcgaatggtcaagactacttgctttaatccgagatgtcttctttagttttctgttttaaggttagcccaggttgaacatccctaatccaaaaatccaaaatctgaaatgctcgaaaatccaaaactttttgagagctgacataatgccacaagtgagaaattccacacctgaactcatgtgatggggctcagtcaaaaagcagtcaaaactttgtttaatgtacaacactaaatatacatacacatacacacacacacacacacacacacacacacayaaattaccttcaggctatgtgtataagttgtatataaaacataactgaattttgtgtttagacttaggtcctatcccccatgatatcttattgcctatatgaaacatttcaaaaccccaagatatttcaaaatctgagatacttctggtcccaagcatttcagataagaaatactcaacctgtattgatttttgactgaactcattgagagtcccatgtttcagaaagctctgttttagacagggctgctgattgcaatattaagagttttctcttctgaagatg

SEQ ID NO: 11103 - DNA, 626 bp, Homo sapiens
tttttgacactacatagaccttcagattttgggggtaacttcacattttaggactctggcaaggcgaatggtcaagactacttgctttaatccgagatgtcttctttagttttctgttttaaggttagcccaggttgaacatccctaatccaaaaatccaaaatctgaaatgctcgaaaatccaaaactttttgagagctgacataatgccacaagtgagaaattccacacctgaactcatgtgatggggctcagtcaaaaagcagtcaaaactttgtttaatgtacaacactaaatatacatacacatacacacacacacacacacacacacacacacataaattaccttcaggctatgtgtataagttgtatataaaacataactgaattttgtgtttagacttaggtcctatcccccatgatatcttattgcctatatgaaacatttcaaaaccccaagatatttcaaaatctgagatacttctggtcccaagcatttcagataagaaatactcaacstgtattgatttttgactgaactcattgagagtcccatgtttcagaaagctctgttttagacagggctgctgattgcaatattaagagttttctcttctgaagatg

SEQ ID NO: 11104 - DNA, 439 bp, Homo sapiens
ttaagatccaactccatgtttgagtctgtgtgcatgtacatgtctctgtctgagttttgtatatgcttagaaataaagaactaaagtaatacagaccttaagtacaagtatcattttctttgtttttgcttctcccaattttctaaattttctttaattaccttgtgctactttgtaatcagaaacaaaatcaattataattttcaaatattttcaacattttaataggttctaatacatttagaattttcttctatattacccttctatgtttctacttgctttcttcactagttgaaaagactctaaattaagatgtctcgatatagctggagactttgtgttattgttctccaataatctgctgwattttagacagaccaaggtcatccatgccttcaaatcttaagatcaaaccatttgtatcaaactagtcaac

SEQ ID NO: 11105 - DNA, 534 bp, Homo sapiens
gtgcccttaggacatcaggcagggatggttgggacacacgtgaatattcagggttggagctcagatgcagggctgggtcggaggtaatgaaactccccactacacttcagaaagccaccaaagagctctgccagggccagtattgaatttctgcctgtggaatcaccacaagcaaagaaggccagatgtggaagacaaaatcatagccccttacagaggcccgcgcccttctccccaaacctgttgttggggtgatcagatccaacaccaggtcatgagggcgacaaagtctggcggagtcaaaagattgagaaaagacagtttgagagagacaagtgggaccaaggggctatcgcaattgtggaagctgtgaaggccccgagctctggggagcccatgctatttattggtaatgcaacaaagaaacaggtggtgagaatgtggaggttgaaagggcacattgtattaagcccatgatttacagctgtgatggtttagcatttgctctgctacttgagataayggagagcaggt

SEQ ID NO: 11106 - DNA, 391 bp, Homo sapiens
gaaagaatagaaaagggtttatagtataatggtttagagttaygaactcagactgcctgcatttaattgccagagttcccatttgccatctgggtgacaatggataagttacacaaatctctacacctcaacctcctttccctgtatgtcaaatcaggataataaagtgtgtactattatctcagaggtatggtgaggtttaaataaaataacccacattcaatacttagcattgttcctgtccagtggctcgagggatctggaacatttgggccagaaaagagaggagaccactcacaaatttttgcacagttttgctgagaagaggaattatacattatttgggtgtgctattgaggaccatgaagagttattgggggacatccagggg

SEQ ID NO: 11107 - DNA, 580 bp, Homo sapiens
tgaaaccccatctctactaaaaatacaaaaattagctgggcgtggtggtgcgygtgcctgtaatcccagctactcaggaggctgaggcaggagaatcgcttcaacccggaaggcagaggttgcagtgagctgagattgcggcattgcactccagccatggtgacaaaaaaaaaaaaaagaaaaaagaaaaagaagaaaaggtaaaaaaaagctctcagtaggcatcttccaactctgcttcatgtatcttaacacaatgagaagttacaactcagagtacttggaagtgctccatagtgtttgtttaaccaaaataaacaacagaacaaaacaaaacttgtacttgtcaacaccagtttgccatgtcccacactaggtttaataaagtgatcagattaatagaggctctgaaaacaagctaactatgccctacatctgtacagtactaccacacacacacattccactctcaacagtgccctgagataggtcagctttaccctctccatctacaggtacagaaagaaaccacatcacaagaagcaaagcagcttgctcagattagcaagattgtcctaga

SEQ ID NO: 11108 - DNA, 686 bp, Homo sapiens
aaggaagccgggaatgaacagagcacatatcatgagacaggtccaaccaactgcctccccaaaaccccttctcccttccttgcctacacacgaggcctgatttaatcctagaaggcttcaaatagggaggtgacactcagggcccatcctaccttccacggggctgcagaggctggaaagcaaagccctacacttccaagactcatttgcagctggagggttctatgggatcagggtcgtgtcattggatgcattcatctgtgatttggaaggcggtggacggagagccagacttctcaccgattctgctgttctctggtaagcatcgtctgctatcatcaggattttctggagaagactacaacatcttctcatgggaatcaggtatggggagggtattgtggtatgaagaggcaggtaaattcctttccatttaaaagagctcaagtgtttctgagatttgcaactggaggctggcaagtattttatttggtgcaaggtttggctgtaggtagtaaaccctccrggatgatattctgggctgggctgtcctcacctggcggggtcagaggcagtggggatccaggtgccatttgaaatgggatgctgtaaatccatggcatgcagtggtgaaacagggacttgcagcattacctgtggttacctggagtgaagtccccagggaa

SEQ ID NO: 11109 - DNA, 1414 bp, Homo sapiens
tcatttatcagctggacattgatttttagagctaatttgagatgtttcaatgaattaaaactacccaagaactttttttttaggttgagttgagctttgtaggaagatccatcctaccttattttttacacaaagttctctgaaatctcctttggaatcaaaagtaacccaaaactaccaggcgcagtggctcacacctgtaatcctagcactttgagaggccgaggtgggcagatcacgaggtcagagatcgagaccatcctggctaacacggtgaaaccccgtctctactaaaaatacaaaaaattagccgggtgtggtggtgggcgcctgtagtcccagctactcgggaggctgagttaggagaacggcgtgaacccgggaggcagagcttgcagtgagccgagatggcaacactgcaatccaacctgggtgacagagcgagacgctgtctcaaaaaaaaaaaaaaaaaaagtaacccaaaacaagtcattaaggtttttctcgggaaaactgatattttagaaatgaggttcgagattttccaacaacagaaagcaaatgtgcacctgcacatccatcgagcacgtgctgatgtgctgagcacatggccaggggtgaaaatagtcaaataagagctcgttcctgccatccagaatcttcaggatcccaggggaagtagacgaacaggagacaactgaagaagtgggtcagaggtgtgaggggctgcacagtggctgtcgggagctgcccaaaggggacagctgagtttgggaagaaactagtaaggaaaatgggtggagagaaggcatttgccacagtgctacaagtgctgtgactttattcttatctctgacccaggttggagtgcagtggtgtgatcatagctcactgcagccttaactcctgggctcaagtgatcctcctgccccagcctccagaggagctgggactataggcacgtatcactacacctggctaattttttatttttattttcatgagagatgagatctcgctatgttgcccaggctaaaaataatttatctaaagaagaaaccaagttatgcgtgatagagatgtgaagaaggagaccctcagctccccttcactatgtcaagtgccctcaaatgctcaggcctcatggcaggacctcgggagcttgcaggagccaagcccaccatcttcagaaggcagtctcaaggccttcctgtttgtcctttaggtggggagggagtggcataaagtacttttcaaaagtagtactcctcttgagtggaattytagtaatagaattttggccatcactttacatttccagagggttttttaaaaagtgccctgcggaaattgagcctcaggaaaccaattgactgcttcacccctaaaggctgccaggttggtcatcgaggca

SEQ ID NO: 11110 - DNA, 540 bp, Homo sapiens
ttgtggctcttcaacattagaaatatgaaagtcctgtctctattattccctctgccttttatatggcagttccttatttctgcatgcagaaaatgcaggaatattgccatggaaaagttatctaactatttattgacctggaagattcccaaaacatcaccaccttgttkccttttccatggccttaggttttcttcttagtgtaaggctctaagaagtaaattctgttaaagcctcagagttgattagatccagggagattgatcaacattaaacaatcccacagaaaactgataaataacaataagatgtggccgggagcagtggcttatgcctgtagccccagcactttgggaggccgaggcgggtggatcacctgaggtgaggaattcaagaggagcctgaccaacatggtgaaaccccgtctctactaaaatacaaaaattagctgggcatggtggcaggtgcctgtaatctcagctacttgggaggctgaggcaggagaatcacttgaacccaggaggcagaggttgcagtgag

SEQ ID NO: 11111 - DNA, 592 bp, Homo sapiens
ctagaattatcacaattatgtgatctcctttcaagttacatttttaatatcttagaaaatagttaaattgttatttatcaaatttcgacatctggtcaacttgtgaaggggtgaaatttctataaatgtttaattctgataatattttccttctgagatacatatttctgtgaatacaatttgggcttcatttaacaggactttattatagttccattccttgttagcacagatatactttctgcattttttattatggcttttcaaatactaataatttcataaagaaccattgtactaacatgtccaggaagactccactatttactttcttaaatatactgagaattttaaagttcaagatatttttaccaagtctttttttttttactcagtgccattaacattgcaacaaatttatgccaactggatgatattttcttgatgctctgtgtaacaggttgcaccctgagctcctgcaaactcatgccagacattagctcagatttggggtggaatttgttaggtaagaaactgaaactaagaaaaatttaatagctgrtttattataacacagtcagtggttggataa

SEQ ID NO: 11112 - DNA, 570 bp, Homo sapiens
tggtgttgggaaaactggctagccatatgcagaaaactgaaactggaccccttccttacaccttatacaaaaattaactcaggatggattaaaggcctaaatgtaagacctaaaaccacaaaaaccttagaagaaaacctaggtaataccattccggacaaaggcatgtgcaaagacttcatgactaaaacactaaaagcaatggcaacaaaagccacaaytgacaaatgggatctaattaaactaaagagcttctgcacagcaaaagaaactatcaccagagtgaacaggcaacctacagaataggaggaaatttttgcaatctatccatctaacaaagggctagtatccagaatctacaaagaacttaaacaaattttcaagaaacaaacaaacaaacccatcaaaaagtgggcaaaggatatgaacagaaaaaaggtgagtctgaagcagaggtggccatggaaaatggaaggaagatgtctttctcatctttctagttctgattcgaaaccacttcctcaagaaagtctgctctttctccaactcagaaagctcaacaacaatagt

SEQ ID NO: 11113 - DNA, 570 bp, Homo sapiens
tggtgttgggaaaactggctagccatatgcagaaaactgaaactggaccccttccttacaccttatacaaaaattaactcaggatggattaaaggcctaaatgtaagacctaaaaccacaaaaaccttagaagaaaacctaggtaataccattccggacaaaggcatgtgcaaagacttcatgactaaaacactaaaagcaatggcaacaaaagccacaactgacaaatgggawctaattaaactaaagagcttctgcacagcaaaagaaactatcaccagagtgaacaggcaacctacagaataggaggaaatttttgcaatctatccatctaacaaagggctagtatccagaatctacaaagaacttaaacaaattttcaagaaacaaacaaacaaacccatcaaaaagtgggcaaaggatatgaacagaaaaaaggtgagtctgaagcagaggtggccatggaaaatggaaggaagatgtctttctcatctttctagttctgattcgaaaccacttcctcaagaaagtctgctctttctccaactcagaaagctcaacaacaatagt

SEQ ID NO: 11114 - DNA, 380 bp, Homo sapiens
aatagacactttatatgttagtacttaatatattatataactaatacataagtactttatatattagttattatcaatattatttcatatatccatatgatgaaatatgatagagacaataaagtataaacaaataaaccggtggctcatgtctgtaatcccagcactttgggaggccgaggcaggtggatcacttgaggtcagaagttcaagaccagccttgccagcatggtgaaaccccatctttactaaaaatacaaaaaaattagctgggcgtggtggagcatgcctgtagtcccagctactgggaggctgaggcaggagaatggcttgaacccgggaggyggagtttgcagtgagccgagattgcaccactgcac

SEQ ID NO: 11115 - DNA, 485 bp, Homo sapiens
acattttagtcactatgtttaaaatgttaaaaatttgagacaaactactcaataaatagatatatttaatttagaggacatgtacatttaatactgtctcatgcaaaatctacagattacaaaaccagaagatatctttagacaaatctggaaaggtttttagcaggtgttccatttagaaccaacacactactcaacaaagagcatggtaattatgaaaattatttttagyaggtgaacttgctaaaactatgtgcacatcaaaatttgtaacttctcaacgtgaaccctacttcaactatgagctcaggttttaaattatgtagaatgcaaaaacatgattttcacagtacaaaaaaaatcctggtaaactaaacttttgaggacatattttgcttagtattacctaatttatataggcctaatataaatacctaatttatataggttcatttattcagtttaattgaacaaataattattag

SEQ ID NO: 11116 - DNA, 486 bp, Homo sapiens
agtacacaacatcctttcaaatattctttctttattctccaattcacttttcaggagaatagataacctcaatcatattgattctcagcctaatggtctcccttacataaattataatgacataagcattttgtatcactttattggtaccatcgacctcctacagtttgggggaacccaatcattctttaaaacattagaatgacaactccagttgatttggcatattgtataggtgagtgggaaagacttgtcaaatcccagaaaggggcrtggcaccagcaccacccaaccagaagaaaaatctctctttggtgctagtgtcatagctccctatctgttccgctaacccattaaatgatgtggtggaagaggatcctttcacaatctttgttcatttttttacagagcaaatggaagtcatacataaccttttacaaaattcattttttgttttaatttttttccaggtatgtgatatttgtg

SEQ ID NO: 11117 - DNA, 548 bp, Homo sapiens
aaatagaaatggcagcagagaatagaactttgttgttgttgaaagtatcagaattggttgggaggttgcctgctatttccctacactctatgcaaccatttcctgcttacccaaagtcttaattaaaaagtgaattgttttttattttatgacttcracaagaaggtcattattctttcattgggtagctctgcagtaagcagctttctcttttaaagctttgactgatttagcttcattttaactctgctccattgctggatagtacctttcttctgtgagtcattgctgatattcccccgtttcacttcccatgtccaattcagtctcattttgtgacacccaactagctcatccacggccacccatctgctcttccatgtcctcatctccacgtcctcaggctgagctgctgtccgatcccatcatgctgcactgatttacccaaatctgctactgtgacctctagtctgttctcatttcggctgcactgaaagaagaaatatcaggcttccaacattctttcaagcgctgcatcacgtggctct

SEQ ID NO: 11118 - DNA, 548 bp, Homo sapiens
aaatagaaatggcagcagagaatagaactttgttgttgttgaaagtatcagaattggttgggaggttgcctgctatttccctacactctatgcaaccatttcctgcttacccaaagtcttaattaaaaagtgaattgttttttattttatgacttcgacaagaaggtcattattctttcattgggtagctctgcagtaagcagctttctcttttaaagctttgactgatttagcttcattttaactctgctccattgctggatagtacctttcttctgtgagtcattgctgatattcccccgtttcacttcccatgtccaattcagtctcattttgtgacacccaactagctcatccacggccacccatctgctcttccatgtcctcatctccacgtcctcaggctgagctgctgtccgatcccatcatgctgcactgatttacccaaatctgctactgtgacctctagtctgttctcatttcggctgcactgaaagaagaaatatcaggcttccaacattctttcaagcsctgcatcacgtggctct

SEQ ID NO: 11119 - DNA, 548 bp, Homo sapiens
aaatagaaatggcagcagagaatagaactttgttgttgttgaaagtatcagaattggttgggaggttgcctgctatttccctacactctatgcaaccatttcctgcttacccaaagtcttaattaaaaagtgaattgttttttattttatgacttcgacaagaaggtcattattctttcattgggtagctctgcagtaagcagctttctcttttaaagctttgactgatttagcttcattttaactctgctccattgctggatagtacctttcttctgtgagtcattgctgatattcccccgtttcacttcccatgtccaattcagtctcattttgtgacacccaactagctcatccacggccacccatctgctcttccatgtcctcatctccacgtcctcaggctgagctgctgtccgatcccatcatgctgcactgatttacccaaatctgctactgtgacctctagtctgttctcatttcggctgcactgaaagaagaaatatcaggcttccaacattctttcaagcgctgcatcacrtggctct

SEQ ID NO: 11120 - DNA, 579 bp, Homo sapiens
ggggtgctgcctaggaccttagctagttatcatccccaggtcatttgtgtggcttagtttatcaagtgagctaacagaagtcctaaaggcagggtccgtgggcaggtgaaagaccacagggacattgtaatcgggcaggaaaccagcctggatgctcaggaatgtgagaatctcagagggtagtaatggagagagaggaacacaaacacgatgagggagrctttagcctgttttactcctgctttagctagttacacttctggtagaaaaagaaggagagagaaaattaaaaaataaaatatgtgactggtgtagcctttcttaactgtttacatcagcccatatttgcattgtttcctttgaaaatactgaattccattctcattctctgcttagaatatttgggttttccatgtttaatataccgtagaccatttgtaaccaaaaagctattcttaggtaaagtggtttttcttatatatttttacattgaaaaaaaaacaaattaggaagcctttttgtatttaaatgatgataggcaatggctcacgcctgtaatcccagcactttgggaggcca

SEQ ID NO: 11121 - DNA, 579 bp, Homo sapiens
ggggtgctgcctaggaccttagctagttatcatccccaggtcatttgtgtggcttagtttatcaagtgagctaacagaagtcctaaaggcagggtccgtgggcaggtgaaagaccacagggacattgtaatcgggcaggaaaccagcctggatgctcaggaatgtgagaatctcagagggtagtaatggagagagaggaacacaaacacgatgagggaggctttagcctgttttactcctgctttagctagttacacttctggtagaaaaagaaggagagagaaaattaaaaaataaaatatgtgactggtgtagcctttcttaactgtttacatcagcccatatttgcattgtttcctttgaaaatactgaattccattctcrttctctgcttagaatatttgggttttccatgtttaatataccgtagaccatttgtaaccaaaaagctattcttaggtaaagtggtttttcttatatatttttacattgaaaaaaaaacaaattaggaagcctttttgtatttaaatgatgataggcaatggctcacgcctgtaatcccagcactttgggaggcca

SEQ ID NO: 11122 - DNA, 579 bp, Homo sapiens
ggggtgctgcctaggaccttagctagttatcatccccaggtcatttgtgtggcttagtttatcaagtgagctaacagaagtcctaaaggcagggtccgtgggcaggtgaaagaccacagggacattgtaatcgggcaggaaaccagcctggatgctcaggaatgtgagaatctcagagggtagtaatggagagagaggaacacaaacacgatgagggaggctttagcctgttttactcctgctttagctagttacacttctggtagaaaaagaaggagagagaaaattaaaaaataaaatatgtgactggtgtagcctttcttaactgtttacatcagcccatatttgcattgtttcctttgaaaatactgaattccattctcattctctgcttagaatatttgggttttccatgtttaatataccgtagaccatttgtaaccaaaaagctattcttaggtaaagtgktttttcttatatatttttacattgaaaaaaaaacaaattaggaagcctttttgtatttaaatgatgataggcaatggctcacgcctgtaatcccagcactttgggaggcca

SEQ ID NO: 11123 - DNA, 579 bp, Homo sapiens
ggggtgctgcctaggaccttagctagttatcatccccaggtcatttgtgtggcttagtttatcaagtgagctaacagaagtcctaaaggcagggtccgtgggcaggtgaaagaccacagggacattgtaatcgggcaggaaaccagcctggatgctcaggaatgtgagaatctcagagggtagtaatggagagagaggaacacaaacacgatgagggaggctttagcctgttttactcctgctttagctagttacacttctggtagaaaaagaaggagagagaaaattaaaaaataaaatatgtgactggtgtagcctttcttaactgtttacatcagcccatatttgcattgtttcctttgaaaatactgaattccattctcattctctgcttagaatatttgggttttccatgtttaatataccgtagaccatttgtaaccaaaaagctattcttaggtaaagtggtttttcttatatatttttacattgaaaaaaaaacaaattaggaagcctttttgtatttaaatgatkataggcaatggctcacgcctgtaatcccagcactttgggaggcca

SEQ ID NO: 11124 - DNA, 553 bp, Homo sapiens
tgaaaacaattaggtaatgggaaagctctmtagttattcgatcttagtagatggaatacatagagaatagaggatgttctcaagggtaaaagcttgtgctcctgaaccaataatagcatccaaagaaaaacagattaatattctttacatctcatttctctaagatctcaggaaaattattgccatttacattctacatttgttgttgaaggctaagagggcctcattaggtttaccaaatccaaataattacagttagagacggtgtttttttctactagctgaagtgatgtgtgaaaatagcaaaaatattttcacagagaaattatgctctttaacagtaaacttcacgccttgctaggaactgcatttctctgcctggtgtgtatcatcgaatgctacttgtagggatggagtggtctaatttcacatttcgagcttggtaggtgcaggtgggctgtaggtgaaagggagttttctttaccagccagcctcaaaaatggctagcagccggtgccactcgcatagtgttgaattatatgtccagataccc

SEQ ID NO: 11125 - DNA, 540 bp, Homo sapiens
ttagattatgaaatttgaagtcagggtcaaggagatagtttttgcttttaataggtaattcccaatctcagtctgtagtaaattggaaaatctgttctggattctttcagcaatcctctctctttccacatctgccacttttctgtgacacttcttttgggtcacattgccatgctggggttatgtttggtggtcgattatgtaagtagcaacggaagttagggttaagttagctataggaaggcagagaatgctgcctaacttgggtatgaccagatgtcagttattagaatgattggagattgagaaccaagtcaggagttcagagtcagaggcagtgtaggaacmggaggctgggttggatgtgttgggggaaaccaagggaaaagtggaaagtctctctccgagggctgggagcattcctaagttgtggtcatttctggaccaggaaatacaaagagctggtttctgtttagaaagctggtgaggcggacagatagccaaagagcagactctgggacagtgggcagcatgggtcct

SEQ ID NO: 11126 - DNA, 553 bp, Homo sapiens
ccccaaaggagactggcccaatatggctgaatgcagcgttatttatttcctgtgctgtcagtggagagcctgctttgcctcctgttccctctgatgtgcaactcactggatttagggcttattcatagccccagagcaagctcaaggtacctggctagtgactgaaaggacatttcttctgttctgagtagaacagtcacagattctagtgcaggggccctgacacttggtgaggaacatccactttgtctttccctgaagcaaatcattaacgtccagcacacagcagttgtgtcagctctgcagacagaggctggcccatgtggctgctgtccccagggcttggtgtgcctgctccgagatccacctacaggtawttagccagggcaggtctggtctcccgccctgactggcaccagccaggattagagactgagtggcctggggctccctcctgtgtcaccttcgttaaagcttcgagttccaggagcagcagccttctccttccacccccttcaggaacaccactggagcctggtggccatctgggtga

SEQ ID NO: 11127 - DNA, 1272 bp, Homo sapiens
gttggtaaagtggtacgaacaatacttacatcacagaactgttgaagggatgaaatggaagaacaatgtattartagaagtatgaatgtcgttggtcttatcctcctgggtctcttatgtatttccagatgatatatttcttatagagcaattcgatagaggtagaaggaaaggaagtcacttctcagatagaagtgggaaggctctcctagtcatccatctctctctgttagagatagtaacagaaaggacagatacttttctgtgtggggtgaatgacagtggagaatgtaagcagggctgagcagatagatagaaggcctgaaaaccagggcaagaacctcaaactttcatcggcaagctgggggttgcgtgaggagagcaaggaagggacacgaggctggggcacatccctgggaatggaacccaagtgtgggtttggatgtgtgaagagctggaaactgggaaggaaaagcatcgacagcagcccacaaataactggatcagaagcacctttccgagaacaattctgaactttgtctaacacatatgcctttgggaggaagaaagcttttcttgtgttttggcaagggtgctgagctaggtagctaataacctaacagtttgattttgtgccaagatgtgtaaggctgcatatgcatgtttaaaattcatatccactgcagtgacaagtcactgaacactagatgggaagacatttcagttgaagctcagccaaaagcccttttgaaacaactctgacaaaataacgccataagtgaataaaaccagagagttcctgggtatctttgaaaatatctcccatgatgacagtctcagacaaaggtgctgtgcacagcttctaagaagcaatcacacacaagcacagccattcaacttgcagctagatttcctcagttccaatttggagtcaggtggattgtgttgtccagggacagactgtgcttttgatagtgacttggaacaatataattctttgctaatgcagcttcatatcatgaagttacatattttcttggtatgattgcacggcccttgaagtaaaacagccacatagttgtatgctttaaaatagcccggtagggaagaattccacattttagaagatggatttttataatttaagtttgtgaatgtaaattatttgtgaacaatgggatgtgacatctcaagactctccttattgggatccctgagtgagtttaaaactggcttctgtgggagtgggaagaagacactgtgtgagtggtt

SEQ ID NO: 11128 - DNA, 602 bp, Homo sapiens
agagcagaggtcagaacaaaatagccaagggtagaaagaactgagcagtgtgggacaacagaaagacaaaagaacaggctgagtttcctggtcttctgcatcctctgggcaggtagtcagagaagaagactgggtctaagaacgtgccctgataattaccctaaagctcctagggctcagaaggaggcaccatgggaggtactgggtacctcatgggtagggcagaggagcaggcaagagcataaccttgggttaggtaggaggtgagagcatggtttgcagctactgcttattctatttgcttagaattccaaatagtggagtgtgtgtgtgcgtttgtgtgtgtataaaattscagatagtggaacatatatatttttatatatacataaatattttagaagggggggcttatttaaatttagaattttagagttcgaagggaatctgccaagagaaaactaggtgccaataggctcatgcagttactgtcttatatggctagagcttttgttctttgaactaagctcttttcataagagcaaacgtatgtaaagcaggtatttgttttctttaatgaccatgcacattttgaactgaag

SEQ ID NO: 11129 - DNA, 602 bp, Homo sapiens
agagcagaggtcagaacaaaatagccaagggtagaaagaactgagcagtgtgggacaacagaaagacaaaagaacaggctgagtttcctggtcttctgcatcctctgggcaggtagtcagagaagaagactgggtctaagaacgtgccctgataattaccctaaagctcctagggctcagaaggaggcaccatgggaggtactgggtacctcatgggtagggcagaggagcaggcaagagcataaccttgggttaggtaggaggtgagagcatggtttgcagctactgcttattctatttgcttagaattccaaatagtggagtgtgtgtgtgcgtttgtgtgtgtataaaattgcagatagtggaacatatatatttttatatatacataaatattttagaagggggggcttatttaaatttagaattttagagttcgaagggaatctgccaagagaaaactaggtgccaataggctcatgcagttactgtcttatatggctagagcttttgttctttgaactaagctcttttcataagagcaaacrtatgtaaagcaggtatttgttttctttaatgaccatgcacattttgaactgaag

SEQ ID NO: 11130 - DNA, 881 bp, Homo sapiens
cctcaactccagaagactagctcattgtcaaattctggatcactctgaaaatatctaggctggttttataatattatttatctttattgctgaaaacacagcaggtgaagaaaaatgaagacaattttgtaaataatggatgcagagatgacttattgtttttctgcaatgagaaataagcacagtttattatgtgaccttttttcaagtgcctgtcaagaactcagaaataataaagccttacttgcaaagagtgactgattaaaaagagatacacacttaaaatgttgtatctttttattaagagctaatcttttatttgtgtgttcatagaattaatgatatttataatcctcccctcagaaaacccgtggctgccccccatataatgcacacactcacctgcacttgctgattacatttttrgatatatttcagtttaaaatgtattaaaaaaagatgttttataacatatgcatgtgttttctcctttatagaaggtcgttttggattttgatcattcttcctcttgctggctttgaagggagaaagatcttttgacttgtaaggatctgcagtgtgcagctccaggcttttatttctatgaataagtgagatgttaccagcttcttttctaatattgattctagaatttcacctaattggaacattttggaactataggtatataactcaacaccttagaatgtccatgaatatcatacgatatcactggagtgcagcttcagtagtgcagcattaaacaaattggcatattgaaaagattttgtttcttttgccttcacggtgttctaaatttttaagattattcacaaagaagacaagatgatttttgtttgaaaggcataaacatttaacac

SEQ ID NO: 11131 - DNA, 537 bp, Homo sapiens
cccagctctttttgggctatgcctcccacagagcacaaaarcaatcatcagcctgtactgctactgctcaaccagttgcctggggccctccagattacacaaagttctagattaaagccatctcttctgctggaatgggtctgaacacaatttcagggtcttaactttggggatacaaaccaggcttactaaaatgcctagtatgtcctggattggctgctcacagggctatatcgtgccacaagcaaggggtactataacgttttttaaaagaaacactcaacaagatttaaaagtaattaattttaattaaaaataatttattaattacttgatggccttaaactaaaataattaaatatgtgcattgcttagaaattattgtgataaataatttttattaattgctttctattaacataaattatgaatcatttcaggcaatttgcatttgtaggtttgttttcttcctgtgtacatattaattttctatctcagctatgttaatgcttctatttaaataaattcttttttgtt

SEQ ID NO: 11132 - DNA, 532 bp, Homo sapiens
actttagatgtattatccctaatgcttactaccttggtaccctgcaagataaatattacctgttgcaggcatagtgagttgctaatagatcttgtggagaagataggcctcaacctcatccccacactaaatcagtggttgatgggcgtggcccagtggagcagatgtaatctagttttgaccaatgagacataatgagaagtctgccagagaactttaggaaaaggtttcttcccacataaaagacagagcctcctcgtgaggagagaatcctattgtctccactccttgactctctgctttggctataactatgtgaggcattattttggacctaaggtggtcatcttggggccatgacttgaccagcctaacaataagaagccaatrttctcagaataacaaaggaaaacacacacacacacacacacacacacacacacacacacacacacacagcctggatccggaatgacattgttgagctgctccatcagtaccaccataacttgccctcagaatactttttttt

SEQ ID NO: 11133 - DNA, 532 bp, Homo sapiens
actttagatgtattatccctaatgcttactaccttggtaccctgcaagataaatattacctgttgcaggcatagtgagttgctaatagatcttgtggagaagataggcctcaacctcatccccacactaaatcagtggttgatgggcgtggcccagtggagcagatgtaatctagttttgaccaatgagacataatgagaagtctgccagagaactttaggaaaaggtttcttcccacataaaagacagagcctcctcgtgaggagagaatcctattgtctccactccttgactctctgctttggctataactatgtgaggcattattttggacctaaggtggtcatcttggggccatgacttgaccagcctaacaataagaagccaatgttctcagaataacaaaggaaaacacacacacacacacacacacacacacacacacacacacacacacagcctggatccggratgacattgttgagctgctccatcagtaccaccataacttgccctcagaatactttttttt

SEQ ID NO: 11134 - DNA, 543 bp, Homo sapiens
caccacccagctaacagaggagaagtagtgcctccccscttctataactgaaccattactcccagaggcctaaataaagcttaccttttgtggctgatatctactgaggaaaatccacaggtggttccctaaatctgcctccttaacctctggtttaacccattttagtaactggcacaatcattcaccttgtgtcctagaaacctgggaagttatctttgacttgtcccttttcctcactcccaacattagttgaaaagcaggtcctgttgactacctccaaaatatatgctaaatgaacacactttccccctctgcatccctcaagcatctctagccagacagtcacaatagcctcctatctggtcacccaacttcaacgcccatttcccagcagctagagtagcatgcacatcaaactgtattggtgtccctggccatccaacggcttcttactgaatggggaataaaacccaagctcctttctgtgtcctacaagttttgtacactgcagccacagctacctttctaacctaatctcat

SEQ ID NO: 11135 - DNA, 543 bp, Homo sapiens
caccacccagctaacagaggagaagtagtgcctccccccttctataactgaaccattactcccagaggcctaaataaagcttaccttttgtggctgatatctactgaggaaaatccacaggtggttccctaaatctgcctccttaacctctggtttaacccattttagtaactggcacaatcattcaccttgtgtcctagaaacctgggaagttatctttgacttgtcccttttcctcactcccaacattagttgaraagcaggtcctgttgactacctccaaaatatatgctaaatgaacacactttccccctctgcatccctcaagcatctctagccagacagtcacaatagcctcctatctggtcacccaacttcaacgcccatttcccagcagctagagtagcatgcacatcaaactgtattggtgtccctggccatccaacggcttcttactgaatggggaataaaacccaagctcctttctgtgtcctacaagttttgtacactgcagccacagctacctttctaacctaatctcat

SEQ ID NO: 11136 - DNA, 543 bp, Homo sapiens
caccacccagctaacagaggagaagtagtgcctccccccttctataactgaaccattactcccagaggcctaaataaagcttaccttttgtggctgatatctactgaggaaaatccacaggtggttccctaaatctgcctccttaacctctggtttaacccattttagtaactggcacaatcattcaccttgtgtcctagaaacctgggaagttatctttgacttgtcccttttcctcactcccaacattagttgaaaagcaggtcctgttgactacctccaaaatatatgctaaatgaayacactttccccctctgcatccctcaagcatctctagccagacagtcacaatagcctcctatctggtcacccaacttcaacgcccatttcccagcagctagagtagcatgcacatcaaactgtattggtgtccctggccatccaacggcttcttactgaatggggaataaaacccaagctcctttctgtgtcctacaagttttgtacactgcagccacagctacctttctaacctaatctcat

SEQ ID NO: 11137 - DNA, 666 bp, Homo sapiens
attagcatgtcccagtgagttaagaaagcagcctggtggtagccgggacctatataaatatggcactagagcaaagtagaagggagcacaatggcagcagagcatggtggtggcccagtgaggttagagaatggatcgcatacaaagaaatcgagtgaaatgtattgaggataaaggaaaaccagacctggcgcaacaaaatgaagtgctaaaaaaacacatgaaagcagtttgaacaggttttaactggtcaaatccggaaacatttgaacaccaaaataaatcacaaaaataatagattataattcattacaygaaatttgaaatccatgagtacatattgatataaattaattaacaaatgaagaaaagaaaaagctttcctttatagtagagtgactattaaatatatagaaggaatgatggaattagaaaagtcactatagtatttaaaaattatcataatgacaattcttgcaagaaatagcatggctgccaaaactattagatgagtgtaggaggaagaacaagatttacatattctatcctcacaaaatccttattaattatggaggaaagaaaaagtaattttctagtctagaaacacagaggacatcatcacaggcaaatcaaagtcactactgcctataatgggacaaactaatg

SEQ ID NO: 11138 - DNA, 666 bp, Homo sapiens
attagcatgtcccagtgagttaagaaagcagcctggtggtagccgggacctatataaatatggcactagagcaaagtagaagggagcacaatggcagcagagcatggtggtggcccagtgaggttagagaatggatcgcatacaaagaaatcgagtgaaatgtattgaggataaaggaaaaccagacctggcgcaacaaaatgaagtgctaaaaaaacacatgaaagcagtttgaacaggttttaactggtcaaatccggaaacatttgaacaccaaaataaatcacaaaaataatagattataattcattacatgaaatttgaaatccatgagtacatattgatataaattaattaacaaatgaagaaaagaaaaagctttcctttatagtagagtgactattaaatatatagaaggaatgatggaattagaaaagtcactatagtatttaaaaattatcataaygacaattcttgcaagaaatagcatggctgccaaaactattagatgagtgtaggaggaagaacaagatttacatattctatcctcacaaaatccttattaattatggaggaaagaaaaagtaattttctagtctagaaacacagaggacatcatcacaggcaaatcaaagtcactactgcctataatgggacaaactaatg

SEQ ID NO: 11139 - DNA, 1064 bp, Homo sapiens
ttcaaagaattcagtaagattcattacagctacaaaggtgagaaacaaagaatctgacacagaatgaagggcctggtagacaggtctttccmaaagcatagtatacataccactggtaattgagataactaagtgatatgtagatacccattttaaaagttttataggtatatattttatgtgaatcagaaataagtctagcacattaaatctttcatgcatttcacagatattaactgaggatgaggatacaatttaaatgatttcatggatattaattgaggatgaggatacactttaaagagtaatatattttaaagtctatttaaagataaataaataatacttcaaatagtatgtggatatggcaaaaaaaaaaaagggggggagtactagaaaaaggacagggtgaatcacggtaagaattttagacttcacacaaagggcaagggaaatcactaaagagttttaagcagggtattttatgataagattagctataaaagaaccctctggctacagtctggggtttgtggggtggcagcgggaactaatgaagagcaaaggggtcaaaactgaatcctaggacactagttacaaagaggttggcagaagcccaggtgagaaacgatggtcatgcctggaaaacatcatggtagggggattgaaagaaagcaggagaattcaaaatatattaaaaggcacaatcagtaaagaacaataacataaaaccaggcaaataaaaatagtgcaaatatatatttatgtgcattcttatttgttttcctaggataaattacccaaaagtaaactactaagcacagaaagatatatgaacattgtacctttatggtaggttgtaacctttcttaaagtacagtaagcctcatttaatgctgtcagcctcatttagtcttcttaggtttgatatctcttctgctctacagactatgtttttctttcattttctcctctctaataatttgggagcttgtttctaattagagtgttccaatttctttattggtaaattgatcacatcttcatgatctttgacattagaa

SEQ ID NO: 11140 - DNA, 523 bp, Homo sapiens
ttcttttagaaaaactcagtgtcaccattcactctgttttcagtgggggaaaaaagtcaggagtggaacaagagccagaaatgatttccatgtctctctaggaaaaaaagcaggtggatttaaaggaaaagtatgtcctcagagaaacaagatatgtatccaggatcaatgtgttctaaatgctcttcagagaagagctaatgaatcccatgataagagggcaaatgtcagattatctactacccaagctattttctaggatcctcaatgactctggcctcacacaaactaattattatctttgttatggctgaagagagataataataccatttaataattttcagttggtacttatttttaattttgtatttacttactaccagagtaagctacttatttttcagcctaatttacaartatattttactatgcttcaatcccttaaaaaactttatatacatgtatctgaccatacttacacatattaactactagtttaaaagaaaaaaacatattatgt

SEQ ID NO: 11141 - DNA, 531 bp, Homo sapiens
tgtgtacatggctgcctagtgtgttggcagtaacaggagtctgaactcacttcctgtaatagttaacaaaaacgtttagaaactttggagggaggaatcgtctcttagagtcccaccagtgctgcatattgggacgctcatgggaagccataatttatatcccaaatggtaaaaaagtatgccacaattcatattaaacacaacacacaaacatgtacacacatgcatacatacacayaaaggggaaaaagatgctaaaagttgacctaccaacctcaaagatctctaatactcaagtgagacgcatacaaatgatctttgacaggtatgataaacaagtttccagggaaaagtgatttttaaaaatcagccaattcagccccagcttatactctttaagtttacaccaaatgattcaaggaacatgtaagggtcctttattcttgtaacagaccttcacactaaaaattaggttaactaaaaacctgaatataagtaatttagtaatgtctttaaattaacattattata

SEQ ID NO: 11142 - DNA, 926 bp, Homo sapiens
cgttttctattcctgagttagcagctttggactttgtttagtaacttgtttaggctctgtctgaaatttgtctgtcttacaagtgcagccatcaatatatctcttcagtcactttttcttcttctgcttctttttgtttttagcctggctttctagaggtttctattttctcagcccagcttagtgctcagccaatgattggcagagttttcctcaaactcctcgggtccagcctccatcctgacctgtgatgcttctgctgatcctgatgatcctccatgttgctggatttgtgtgagggtgggtgagtgtgtgagaattgcagggctttcaagtgtgccctggcttttctttttggtggggcctttcttctctatgtttgcagcctcagtgttgcctgggatacgtggacactgtgaaccctctctgggctctggagtaagactagtaaaatcatcgctgtctccattcagaagacacccatatttgatttccaggctgctaagtgattgcgtttgtcaatgctatattcagctttattattcttcttggcaactttcttcactataggcagaaatcctgatcttgattctattttgacttgacttttgtatttctttttaaattctataaaagactattcatttctgtaaagtgttattaatctatgcatataaatgtgcatgcctttctgatataaagtcattatttgaatgttattatataaaacttayatttaataggttttaaaatctttttctcagtattggttatattttgcagtcttgaggtttgttatcagtatttaaaaaattataatgataataacaaatatcataacaatggaaatatatcaatcatgtgcacctaacgtcaatttaaaaatatgtaatgagaagtgatattacatacagacaacatttgca

SEQ ID NO: 11143 - DNA, 555 bp, Homo sapiens
tttaataagtatgcaaacatgaattcttgtatttttggattagcttttgcaatagcagttgttttcacttggcttcttgggattgagaatggaagagagaaaacaggttactcttctggatacacaaggataatgackgaggtcacctgtcaaattctcctgtgaaaatgttactggcattttgacaaatgttttacatcttacttttcgtttagataatagttacatgataaactcagtgcctatgaatattttagctgttaccatctcatagacaatataaacaggtaaagaaaaaaaggtggctacaaaaccttgggtaaaactgaaggtaattactgaggattctcagcaaatgagtccttctgtagcctcccccagggtttcttaacgcctagattatgcttatttgaactttctaagatttagaaagtcaattttccattcaggaggttccccaatcctgaatatctagtattttgtcattgttttaggaatgaggagcagtggaaattaaaattatatttacccttaaaatagttcccaaggcaagtt

SEQ ID NO: 11144 - DNA, 563 bp, Homo sapiens
ttatgtcctggcattattttggagtatccttactgtaggctcctgccacctcctgaataaggaaatagagaacgagaccagccctgtcctttccattttcctactgggaactacattgggattctcacatttgtttccagtcctcaaaatggaccacacttgggtgtctatggggatacttgttcctgtttgactctttttatgcacatatcaaaagtcaaaacagagaaaactaaaagaaacacgaaacaacaatttaaaaagaaacaaaaagtccatggtgggaagtctacgaatatggcaacactttccagaaagtcagaaagtggcaaatagataccacagatggtgacaccctcagacagcctgtggaactttcttaatgctatattggattactgtcattgttgagaaagtaggaaacttctgaaaccctataccagactgtacrggtcagtgaggattgctgccctgtcttcttccctatgtatcccgcatgcctttcttaatgggacacatagtcggtgctccatatatgtacatgttgaacaaacattcagcaa

SEQ ID NO: 11145 - DNA, 563 bp, Homo sapiens
ttatgtcctggcattattttggagtatccttactgtaggctcctgccacctcctgaataaggaaatagagaacgagaccagccctgtcctttccattttcctactgggaactacattgggattctcacatttgtttccagtcctcaaaatggaccacacttgggtgtctatggggatacttgttcctgtttgactctttttatgcacatatcaaaagtcaaaacagagaaaactaaaagaaacacgaaacaacaatttaaaaagaaacaaaaagtccatggtgggaagtctacgaatatggcaacactttccagaaagtcagaaagtggcaaatagataccacagatggtgacaccctcagacagcctgtggaactttcttaatgctatattggattactgtcattgttgagaaagtaggaaacttctgaaaccctataccagactgtacgggtcagtgaggattgctgccctgtcttcttccctatgtatcccgcatgcctttcttaatgggacacatagtcggtgctccatatatgtacatgttgaacaarcattcagcaa

SEQ ID NO: 11146 - DNA, 531 bp, Homo sapiens
gttttgttttgttttgttttatctgcagtgttttattctacaatctggtatttctggggagaatgcctatgctagtctcagttttatttgtatgttagctgttttacttctttagaagtttacagtatctctatccttggtgttctgaaattttcacaagaatagtttagaaatatatatttcattaggtattgagcactcgttgaatctttagacctagactcctgtcttaagtccgtgaagttctcccctgttattcttctgataattagataatttccttccagctttgctttcaattttattttttaagaaatatttttagtagaatgttactgtttcatcttgactaatattttttctctcacactttttgtctttctgttctacatgttgggacaaacttcttcctcctcttgtttcccctcttgtttctctttatatcatatttacatctctaattatccaagcatactaatttcactctctgatttttttctctttawatcatatttacatctttaattatcc

SEQ ID NO: 11147 - DNA, 539 bp, Homo sapiens
gtgttttttttttgtttttttttttacatttttcagcggtggttaagtggcatgttctataaatgtcaatcaagctctcattcagagattggaaaactttttattaagcagtaaatactttaggctttgcagaccaagaggcaaaattgaggacattatgtagatacttatagaaccgtttaaaaggcaactatttaaaagtatgaaaaacattcttaycttgtagaccataccaaaaatgtggtggtctggatttgattgataagccatagtttgccaacttctgttctaatttgtttacggtattgttataattttttatatccttgcaaatattctctctttgttctatcaattatctatcaattatacagacaagagtgtttaaacctgtggatttttctatttcccctattaattttatctgtttttaatatttcttatattttggagctctctgtgtgcaaatacttttaagagaattgtagttggaatttgttgagcttcttgcatatctatctatctgtctatatctgtct

SEQ ID NO: 11148 - DNA, 1399 bp, Homo sapiens
ttcaactattctcaccttccacccagtgaatgtggcattgcctttgactctcaagctcctttggccataattcaatgctattttccctaggaatggtccataattactcttatcccattgatttattaatgagctccactctagtggcagagacttgaaactggaagccagcagactccctggctcctagaaaatgactgggcatctctcacttgatgatggttgaarcagtttgggagtttaaggacaagctattcaatcagaatttagggcattttcacaatgccaaggctacacacacacacacacgtgcgcacaaacacataaaatccatgactgagatgcccctctgctataatatgggggttgagatcattaaggtaaagattgaatgtaccagatgaataagcctttttaattcatctgaaaaagatctgcactttgaaaggttatatttctttatgttcaaagtcacagattgatttattgatttatttatttgggcatagccctaaacccaagatattttgtctgagcaaagggtaaatgggccacacctttctctgtcagcctcagaggaacccagtccaaataccacagctcatataacaggaatttgtttttttctagttgggattcaggtccctgctaaatcggatgtgatttgctttaacatgtccataaccttctgtcaaagtgcatgctaccttttttggatgtctggccaccttttgaagatcttttaacctttatttgtacttgcaagttaattatttctggggagctaaatgccaagattggcagccgttctagtaggacacgacctgaaaccaatgagaagtaaaaagaattgttttcctctaggagtaaaatgtagcttgaggatttaatctagaggaaaccttatccatatttccaacatggacgtcaacaccattgattgaataatagtttcccttgctgccttaggttaactagcccaagtttggtaaaaaatcatccttttcaccatactttaacttttagcatagacttttctggaactattttccactcctagctcctttctgacattaaggatttaaaagaaaatgagaggaagaaactttcaaatcatattaagaatctttagttctccaaagatattttatcatctttatgctacacacaggtttactttattcacatattccaatgtgtgaacatttgtttttatgtacaaaactcatgttcttacataatttattgctaatatttatgtttgaaatgttcgctaagaaaacatttaaaaatgaatatttgcctagtaaagtttgttcatttgggattttgttttgtttctttaagcagcaaatgaatcattacatgaaactctaatgcttgcctggtagaaggcggg

SEQ ID NO: 11149 - DNA, 1399 bp, Homo sapiens
ttcaactattctcaccttccacccagtgaatgtggcattgcctttgactctcaagctcctttggccataattcaatgctattttccctaggaatggtccataattactcttatcccattgatttattaatgagctccactctagtggcagagacttgaaactggaagccagcagactccctggctcctagaaaatgactgggcatctctcacttgatgatggttgaagcagtttgggagtttaaggacaagctattcaatcagaatttagggcattttcacaatgccraggctacacacacacacacacgtgcgcacaaacacataaaatccatgactgagatgcccctctgctataatatgggggttgagatcattaaggtaaagattgaatgtaccagatgaataagcctttttaattcatctgaaaaagatctgcactttgaaaggttatatttctttatgttcaaagtcacagattgatttattgatttatttatttgggcatagccctaaacccaagatattttgtctgagcaaagggtaaatgggccacacctttctctgtcagcctcagaggaacccagtccaaataccacagctcatataacaggaatttgtttttttctagttgggattcaggtccctgctaaatcggatgtgatttgctttaacatgtccataaccttctgtcaaagtgcatgctaccttttttggatgtctggccaccttttgaagatcttttaacctttatttgtacttgcaagttaattatttctggggagctaaatgccaagattggcagccgttctagtaggacacgacctgaaaccaatgagaagtaaaaagaattgttttcctctaggagtaaaatgtagcttgaggatttaatctagaggaaaccttatccatatttccaacatggacgtcaacaccattgattgaataatagtttcccttgctgccttaggttaactagcccaagtttggtaaaaaatcatccttttcaccatactttaacttttagcatagacttttctggaactattttccactcctagctcctttctgacattaaggatttaaaagaaaatgagaggaagaaactttcaaatcatattaagaatctttagttctccaaagatattttatcatctttatgctacacacaggtttactttattcacatattccaatgtgtgaacatttgtttttatgtacaaaactcatgttcttacataatttattgctaatatttatgtttgaaatgttcgctaagaaaacatttaaaaatgaatatttgcctagtaaagtttgttcatttgggattttgttttgtttctttaagcagcaaatgaatcattacatgaaactctaatgcttgcctggtagaaggcggg

SEQ ID NO: 11150 - DNA, 646 bp, Homo sapiens
tcctgcctcagcctcccaagtagctgggactacaggcggcagccaccaagcttggctaatttttttttgtatttttagtggaaacagggtttcaccgtgttagacaggatggtctcaatctcctgaccttgtgatctgcccgcctcagcctcccaaagtgctgggattacaggcgtgagccactgcgcccggccaaaagtctacttctatgagaaaattttcacctcaagcaactgtatctgaggacaattcaagttttgttttttaaaaacatgattaatatatcaacaccaattttatacaacctcttccagaaacaaaagagacttcccaactcattttatgagaccagtatcatctcgatatcaaaaacaaagcccaaaaagaaaaacacagaccggtatctctcattaacttaggtgcaaaagtcctcaacaaaattttagcaaagagaatccaacaatatattttttaaaagtattayatcacagcaaagtgggatctgctccagacatacatggctgtctcaagattcaaaaatcaatcacacaatctaacaaatcaacagactaaaagtgaaaaatcatatggtcatatcggtggttgcagaaaaagcattagataaaattgaatattattcacaata

SEQ ID NO: 11151 - DNA, 646 bp, Homo sapiens
tcctgcctcagcctcccaagtagctgggactacaggcggcagccaccaagcttggctaatttttttttgtatttttagtggaaacagggtttcaccgtgttagacaggatggtctcaatctcctgaccttgtgatctgcccgcctcagcctcccaaagtgctgggattacaggcgtgagccactgcgcccggccaaaagtctacttctatgagaaaattttcacctcaagcaactgtatctgaggacaattcaagttttgttttttaaaaacatgattaatatatcaacaccaattttatacaacctcttccagaaacaaaagagacttcccaactcattttatgagaccagtatcatctcgatatcaaaaacaaagcccaaaaagaaaaacacagaccggtatctctcattaacttaggtgcaaaagtcctcaacaaaattttagcaaagagaatccaacaatatattttttaaaagtattacatcacagcaaagtgggatctgctccagacatacatggctgtctcaagattcaaaaatcaatcacacaatctaacaaatcaacagactaaaagtgaaaaatcatatggtcatatcggtggttgcagaaaaagcattagataaaattgaataytattcacaata

SEQ ID NO: 11152 - DNA, 533 bp, Homo sapiens
gcaaaataaaatgcactaaaatatacaactaagcaaaaagcaaacaaaactctggattcacaacatagaaaatgtagcttgactattatatactataactgtaggtaacggtgaaaatcgaatctgcacattaatatcaagctattaggtttgtaggtgagaaaaagatttgttgcttctccctgaggtggaaaaaaaactactgccaaatatcagaaaagaatgaagaatagttcattcattcattcattcattcatccaacaaattttactgagtaactagtctgtgccaggcactgactagccaggctctcatgaagcttgcagcagtgcaggacagaaggactaatcaacaattcacactaataaaaagraattcagtaccttcaacatctgtaaagagaaacctgacttataatgacaggtaaagtctgagaagatttccctgtggagaacacccttgaaaaatggagtaagtactagggagaagcagttaaggtgaaaaacagagttgagacatcctagtttcctgg

SEQ ID NO: 11153 - DNA, 533 bp, Homo sapiens
gcaaaataaaatgcactaaaatatacaactaagcaaaaagcaaacaaaactctggattcacaacatagaaaatgtagcttgactattatatactataactgtaggtaacggtgaaaatcgaatctgcacattaatatcaagctattaggtttgtaggtgagaaaaagatttgttgcttctccctgaggtggaaaaaaaactactgccaaatatcagaaaagaatgaagaatagttcattcattcattcattcattcatccaacaaattttactgagtaactagtctgtgccaggcactgactagccaggctctcatgaagcttgcagcagtgcaggacagaaggactaatcaacaattcacactaataaaaaggaattcagtaccttcaacatctgtaaagagaaacctgacttataatgacaggtaaagtctgagaagatttccctgtggagaacacccttgaraaatggagtaagtactagggagaagcagttaaggtgaaaaacagagttgagacatcctagtttcctgg

SEQ ID NO: 11154 - DNA, 533 bp, Homo sapiens
gcaaaataaaatgcactaaaatatacaactaagcaaaaagcaaacaaaactctggattcacaacatagaaaatgtagcttgactattatatactataactgtaggtaacggtgaaaatcgaatctgcacattaatatcaagctattaggtttgtaggtgagaaaaagatttgttgcttctccctgaggtggaaaaaaaactactgccaaatatcagaaaagaatgaagaatagttcattcattcattcattcattcatccaacaaattttactgagtaactagtctgtgccaggcactgactagccaggctctcatgaagcttgcagcagtgcaggacagaaggactaatcaacaattcacactaataaaaaggaattcagtaccttcaacatctgtaaagagaaacctgacttataatgacaggtaaagtctgagaagatttccctgtggagaacacccttgaaaaatggagtaagtactagggrgaagcagttaaggtgaaaaacagagttgagacatcctagtttcctgg

SEQ ID NO: 11155 - DNA, 563 bp, Homo sapiens
tttccttgataagcatgtctgttcccttgctgggatggagctcggccctacatgcggtccacagcctgccttctccttgccatacctacatacaggatacctcttatcctgcatacctctagttctagcctgaaatgcagcccacccttcacagctgacccagagccttgatgctatcagctgtccgattttttgttctttcactgttgctaaatctcttctgcaggtgccacccagcagaaaaacggatcatcctggcctcaatgccatcataagtcaagtctgaatttgctggcctcctgtggcactgtcatttggatcactggccactgtcctcaggggtcagccttayagcttctgtaactaggttttctgggaagcacattctggcttccttgtattctccacaccggacttccctgaggcccaaggacaccgtatatccaacctttaatgttaacacaagccaagagtctcactttccaatgcagattaatctttgatcacacactaaaacagatttctgctgcaaacactttcctatgcggattaatctttggtca

SEQ ID NO: 11156 - DNA, 1114 bp, Homo sapiens
tgggcagaacaggaaatggagctaaggtcttccaattccgaatcctgttctcttttccttacatcagatgcttgctatagaatgaatctgtgtgtcccctcaaaattcgtatgttgaaaccctaatccccaaggtgatgggatttggaagtggggccttggggggtaattggtcaagaaagtgtagccctcatgaatgggattagtgctctctcaggaagatacaggagagagattgcttcccccctctctctcttccatgtgaggacacagcgggaaaacggctgtctatccaccaggaagctggtcctcaaaaaacaccaaatctgccctcattctgatcttagacttcgtggatccagaactgggagaaaccaacgcctgttgtttaagccacctcgtctatgatattttgttacaccacccgagtggactaaaatcatgcttatcmtttaaaaactataacagtctgggtgaagagaagtttctccttgaagaaggaagaagatttaggtgttcaaaggcttctgtccaaatctggttgaattgtgattaagttcaaggaaagttgaaaaattcattcagcttcaatgatattttcatctcctctctattcccttgggtctgggagctccagaaaacattcccagaatgggtgggaagaagagaggaggggttctgttaatagctcccaggttttagtatttgtgtctctttgccgagaggtatcagcgtggaacagctttggggatggtgacaactgggtttaaataaaagattcaccatttattagctgtatggcctccttcgattcgtttaacctctctcaggctcactttactcatttgtgaagcttgctacctttcttgaaagactgatctgtgggttaaatgaatcttggttcctattttgtctttcccttcatctcttaggaaaggtctttgtttcagagtttggttcctacagtggtgtcatatatatggatggggattcaagtgcacagaaatgacacctacctgacaaggggcatttatgggctcagtgagggatgcaggctccaaatttgaattttttggccctcgtttgctgttgggacactggacaattatccaact

SEQ ID NO: 11157 - DNA, 1387 bp, Homo sapiens
tggtgatttggagaatctgtgctctttagcggaagattgaaggacaaaatgaatcgcttattgtgtttttctggctaaatattttttgaactaatgtagttacagtaaattattgcctgaaaagagacaatatagtaagtgagactgaccatgccagggcaattgcacatggagggccaaggatgcagaactgtgtggctcatttattcacggagtaattactgactttgaaattatcactatgccctaagcatttctaaaagctgggaaactactagtttwgcattctgtttacaatgagaaattagttattgcttcaaaaatagtgaccaacgtgcataaaacattgaaaccttagcaagttttataattaaagatgcccagtgattcttgatttacattcatttcaggctactttgttggctgccaaggcggcaaagtcattttttggactaaaatgtgaaaagatgtgtgttatggatttcggctgtcatttaaagatgtaaccccagtgtccatacacacagagtgaaggagagaaatctcaatgacttcagcagggagcaaacaggctatgcccctctggaggcaaagaattcttaaaacatcaaaaatgggagaaaatagaacttgcagaattgtgtacaatcagagccttatactgtacttagaaaagcaccctttctgatcactcctactaagcctcataaccagttctgtattcctgtatcctttaatatctcctgtaaaatttaaaggagagtttttctagagttaaaatctacaggctaaaatggtacatgtgctcagcaatgcagtgtttggttgatgggtgttttctaatcattttctactacactttttgggactcagatacatttcaacgtcttccaatggtttaactacctcttcctatatatatgactttagggagttattaatcctgggttatattcttgtctatattaaaatagaaatgaaaagatagctcttaggggttttgtgaaagtatctggcccaggctcatcccaaagcagatccttaaaaacattttctgtcttactttcttccttcctctttgcctcttgtccttcctgttcacacttgttccttaatttcttcctttccttctttgtaagttcctttacatataaattatgatgattgtagtaatcactccaagccttctcaggtcaagtttcattgtcttcccctaagcaagacgtgactgagctgtgaactgactcctgggaagagatctcaccatgggaccccagccagggggaagcgtgtggggcagagaaggggagctgcctcctgaaactccaccctccaatgggatgggggaccaggaggacaggaagcccaatctagctacagagctcca

SEQ ID NO: 11158 - DNA, 1387 bp, Homo sapiens
tggtgatttggagaatctgtgctctttagcggaagattgaaggacaaaatgaatcgcttattgtgtttttctggctaaatattttttgaactaatgtagttacagtaaattattgcctgaaaagagacaatatagtaagtgagactgaccatgccagggcaattgcacatggagggccaaggatgcagaactgtgtggctcatttattcacggagtaattactgactttgaaattatcactatgccctaagcatttctaaaagctgggaaactactagttttgcattctgtttacaatgagaaattagttattgcttcaaaaatagtgaccaacgtgcataaaacattgaaaccttagcaagttttataattaaagatgcccagtgattcttgatttacattcatttcaggctactttgttggctgccaaggcggcaaagtcattttttggactaaaatgtgaaaagatgtgtgttatggatttcggctgtcatttaaagatgtaaccccagtgtccatacacacagagtgaaggagagaaatctcaatgacttcagcagggagcaaacaggctatgcccctctggaggcaaagaattcttaaaacatcaaaaatgggagaaaatagaacttgcagaattgtgtacaatcagagccttatactgtacttagaaaagcaccctttctgatcactcctactaagcctcataaccagttctgtattcctgtatcctttaatatctcctgtaaaatttaaaggagagtttttctagagttaaaatctacaggctaaaatggtacatgtgctcagcaatgcagtgtttggttgatgggtgttttctaatcattttctactacactttttgggactcagatacatttcaacgtcttccaatggtttaactacctcttcctatatatatgactttagggagttattaatcctgggttatattcttgtctatattaaaatagaaatgaaaagatagctcttaggggttttgtgaaagtatctggcccaggctcatcccaaagcagatccttaaaaacattttctgtcttactttcttccttcctctttgcctcttgtccttcctgttcacrcttgttccttaatttcttcctttccttctttgtaagttcctttacatataaattatgatgattgtagtaatcactccaagccttctcaggtcaagtttcattgtcttcccctaagcaagacgtgactgagctgtgaactgactcctgggaagagatctcaccatgggaccccagccagggggaagcgtgtggggcagagaaggggagctgcctcctgaaactccaccctccaatgggatgggggaccaggaggacaggaagcccaatctagctacagagctcca

SEQ ID NO: 11159 - DNA, 1387 bp, Homo sapiens
tggtgatttggagaatctgtgctctttagcggaagattgaaggacaaaatgaatcgcttattgtgtttttctggctaaatattttttgaactaatgtagttacagtaaattattgcctgaaaagagacaatatagtaagtgagactgaccatgccagggcaattgcacatggagggccaaggatgcagaactgtgtggctcatttattcacggagtaattactgactttgaaattatcactatgccctaagcatttctaaaagctgggaaactactagttttgcattctgtttacaatgagaaattagttattgcttcaaaaatagtgaccaacgtgcataaaacattgaaaccttagcaagttttataattaaagatgcccagtgattcttgatttacattcatttcaggctactttgttggctgccaaggcggcaaagtcattttttggactaaaatgtgaaaagatgtgtgttatggatttcggctgtcatttaaagatgtaaccccagtgtccatacacacagagtgaaggagagaaatctcaatgacttcagcagggagcaaacaggctatgcccctctggaggcaaagaattcttaaaacatcaaaaatgggagaaaatagaacttgcagaattgtgtacaatcagagccttatactgtacttagaaaagcaccctttctgatcactcctactaagcctcataaccagttctgtattcctgtatcctttaatatctcctgtaaaatttaaaggagagtttttctagagttaaaatctacaggctaaaatggtacatgtgctcagcaatgcagtgtttggttgatgggtgttttctaatcattttctactacactttttgggactcagatacatttcaacgtcttccaatggtttaactacctcttcctatatatatgactttagggagttattaatcctgggttatattcttgtctatattaaaatagaaatgaaaagatagctcttaggggttttgtgaaagtatctggcccaggctcatcccaaagcagatccttaaaaacattttctgtcttactttcttccttcctctttgcctcttgtccttcctgttcacacttgttccttaatttcttcctttccttctttstaagttcctttacatataaattatgatgattgtagtaatcactccaagccttctcaggtcaagtttcattgtcttcccctaagcaagacgtgactgagctgtgaactgactcctgggaagagatctcaccatgggaccccagccagggggaagcgtgtggggcagagaaggggagctgcctcctgaaactccaccctccaatgggatgggggaccaggaggacaggaagcccaatctagctacagagctcca

SEQ ID NO: 11160 - DNA, 552 bp, Homo sapiens
cttgtagtctttacttgggaagccaaatcttaatcaaaatatgaaattattaacttataataagaaatatagctatcattagaactggaacaatcaaatctacgtgactggtccatgactttacacacctacatggaaattaaagtcataatgttctttgttaagcattaattagaacaaggggaattagattaattgaatccaagaatgtttttttcagtgggtttggttttggcccaaacagattctcctgtgtacaagtgcttggatgagcattgccaaaatactgctttctaagccttgtttttccrtttgcatttgattggccaattccccttttgattgacacatttaataaagcatggtaatataattaatcaaatagcagccaagtctgtcaggcctttctttcattcatctttaaaggtgactttgctctctactgtggtccattaggcatttaaagttttacacttacgaggcattcttatctttctaatttccaggttcttgtgggaagccttactacttataaatactcagagtacatcg

SEQ ID NO: 11161 - DNA, 626 bp, Homo sapiens
gttctaaacttcgtggttgtaaaggagtcttcgagtatttccaactgtgactgttgataattttttcctcattgttactcttgtctctctcacaggatccttttgcagggtaaaagagtagccagcagcaagcaaaagcaaagaaggggacttgctgtctctgaatgggagggcaagggaccctccctctgctttccggatccctgagaggacccacggggtgactgtgctcacctagacactgtagaatgaaccaggccctttttggttttccagtaaccaccacagtctaagtaaatcccttcctgccagaagaaaatatgagttaaattgaatgatgagtttagatactgcttagtgttcttaatttttttttaaattgtggttttctatcatttcatgtacactctsagaggccgctctatgacggaagtgtcttaaatattaaaagcaaataaataaatagaggattatcttttgagcacctggcagttttgtttagatttaaggaatctaagtagttaaaatttctagttttcctagatcctgtaaatgcaaatgtcaaacagctgccaaagtcatcaagctagctaaggatttaaccagttaggtttgtcacattcatt

SEQ ID NO: 11162 - DNA, 672 bp, Homo sapiens
tcttttccattgtggaactggatgtggacattgccagacacagagaatgggcacatcagagtgcagggcatagctccaaaggtctagagctttaccaggggcctatagtgtgtctgtgttggtagctcctgccagatggaaatacctgcagtgacttctgaacttaaatgaaatgctgttagaaggaaacattagggagtgattgaaggcaaggacaataatgctgaggtcttttcctggcattgcattaataagagaatgtgtaaactcagctggttccctttaactcttccttggctctcctgtggctgcttctaagggtatcaggctggactttgcaaacccgttctctttggggatcactgcacatctcatgttgttttgcaagctgttgggctgtccaaaatgccaagcatttttcctatggaaatgtgctctgtatggttctgattagtgccctctcttctgcttaatgccttcttgggctgcttttcatttcctgctgcttcctayagctctggttattggtccaggcctacctcctcttgtccacttagtattattctccaggtggggcccccgttttcctgctctgtcccatgatgctcccggtcccactgactcttacttacacactcctcctgcacacccactttgcctgtgaaatctgtg

SEQ ID NO: 11163 - DNA, 544 bp, Homo sapiens
agtacccttcagttaggtgctctgagagcctaagcatttattccagtccactcctttcgggacattgagtttagactctgcctcatattttgggggcaattcccagtactaacaaatatttgtctttgggagtgtttttatttttggaaccaaccaaatgctctttagagccctggtgaaggtgggtgatctggcaggacgatggcacatttggtcaaaaagacgaagatgtgactctagtgcttctcagaagaggctacaccctgcaggtgragggaggatgcataggaagatgtgcaatattatacctttatatttgaaaaaaatgcctcttggaaacttaaaataacattaaaaggaggcataagaattttaggtatgtgaaaagggaactatcgtttttaaatgtttgagaaactgctttaagataacaaaggaaatattcctgtgtagtcagaaaaagagctatggacacaagtttctgcaagggctcaagtacattgcagcagcaggtggtggtgaagctgccccactctgaagcctg

SEQ ID NO: 11164 - DNA, 583 bp, Homo sapiens
ttcgtcactgaacragaagacacaattggtttccctatgccatgggcagcagcctctgtgtagctctattaggatgatctgtgctctgcagaaagccaataggatggagtggagcaaccacctcactttccatatggacagctgaaggataggtaacttgaaaggtgtgcgctgggtcagatctgaggtcttttttgagaaatgctgagatgatgcaagctctcaaaaggcactgcagaaaccaagcatttcaaaggtcaaaggaagattttcaagggaaaaccaaagccttggatggctagaggagttctagatttgcaagcggcaacctgaaagcaggttaaatatatatacatacatatatacatctatgtatgtatagatgtatatacacaaaacatttctctcataagaggggctttacataattgatttttgttttcagaggcattgctcagtctatcttgccttggtatctaccaagcagtgtcaaaacttctagagaattgggtgtgtgtgagcatgtgtgcacacgcgaaagtgtctgtgtgtgtgtgtgtaagtgaaggtactcaactaagtg

SEQ ID NO: 11165 - DNA, 583 bp, Homo sapiens
ttcgtcactgaacgagaagacacaattggtttccctatgccatgggcagcagcctctgtgtagctctattaggatgatctgtgctctgcagaaarccaataggatggagtggagcaaccacctcactttccatatggacagctgaaggataggtaacttgaaaggtgtgcgctgggtcagatctgaggtcttttttgagaaatgctgagatgatgcaagctctcaaaaggcactgcagaaaccaagcatttcaaaggtcaaaggaagattttcaagggaaaaccaaagccttggatggctagaggagttctagatttgcaagcggcaacctgaaagcaggttaaatatatatacatacatatatacatctatgtatgtatagatgtatatacacaaaacatttctctcataagaggggctttacataattgatttttgttttcagaggcattgctcagtctatcttgccttggtatctaccaagcagtgtcaaaacttctagagaattgggtgtgtgtgagcatgtgtgcacacgcgaaagtgtctgtgtgtgtgtgtgtaagtgaaggtactcaactaagtg

SEQ ID NO: 11166 - DNA, 583 bp, Homo sapiens
ttcgtcactgaacgagaagacacaattggtttccctatgccatgggcagcagcctctgtgtagctctattaggatgatctgtgctctgcagaaagccaataggatggagtggagsaaccacctcactttccatatggacagctgaaggataggtaacttgaaaggtgtgcgctgggtcagatctgaggtcttttttgagaaatgctgagatgatgcaagctctcaaaaggcactgcagaaaccaagcatttcaaaggtcaaaggaagattttcaagggaaaaccaaagccttggatggctagaggagttctagatttgcaagcggcaacctgaaagcaggttaaatatatatacatacatatatacatctatgtatgtatagatgtatatacacaaaacatttctctcataagaggggctttacataattgatttttgttttcagaggcattgctcagtctatcttgccttggtatctaccaagcagtgtcaaaacttctagagaattgggtgtgtgtgagcatgtgtgcacacgcgaaagtgtctgtgtgtgtgtgtgtaagtgaaggtactcaactaagtg

SEQ ID NO: 11167 - DNA, 683 bp, Homo sapiens
tgagctcctgggttcgagcaatccttccacttcagcctcccaagtagccaggcctacgggtgcatgccaccacacccagctgatttttttttttwaattttgtgtagagaccaagatcttgctatgttgaccaggctgatcttgaactcctagcctcaagtgatcctcccattttgggcctcccaaagtgctgggattacaggtgtgaggcactgcacctggcttgataagtgatttttatttatttccatgggtagctgtaggattatttttagctcacttttaaagtgctgagattataaatatagaaataaacatgtatttttacccatgtacatgtaattaatttagttggtacctgcagtatattaaatgctacttggaacaaataaaatatttgcaaaaataatctatttcacaaaaggtggctcatattaaaatgcaaaaggtcaaattcaaggtactacgtcacagaacacttcattataaaaaaaaaacagctgggcccagtggtgcatgcctgtagtcccagctactcaggaggctaagatgggaggatctcttgtgcccagttcagtccagtctgggcaacagagcaagaccctgtctctaaaaaattaataataataaaaatttaaaaacagtaaacttctggtcacattcaatttagcttttcttcccag

SEQ ID NO: 11168 - DNA, 683 bp, Homo sapiens
tgagctcctgggttcgagcaatccttccacttcagcctcccaagtagccaggcctacgggtgcatgccaccacacccagctgatttttttttttaaattttgtgtagagaccaagatcttgctatgttgaccaggctgatcttgaactcctagcctcaagtgatcctcccattttgggcctcccaaagtgctgggattacaggtgtgaggcactgcacctggcttgataagtgatttttatttatttccatgggtagctgtaggattatttttagctcacttttaaagtgctgagattataaatatagaaataaacatgtatttttacccatgtacatgtaattaatttagttggtacctgcagtatattaaatgctacttggaacaaataaaatatttgcaaaaataatctatttcacaaaaggtggctcatattaaaatgcaaaaggtcaaattcaaggtactaygtcacagaacacttcattataaaaaaaaaacagctgggcccagtggtgcatgcctgtagtcccagctactcaggaggctaagatgggaggatctcttgtgcccagttcagtccagtctgggcaacagagcaagaccctgtctctaaaaaattaataataataaaaatttaaaaacagtaaacttctggtcacattcaatttagcttttcttcccag

SEQ ID NO: 11169 - DNA, 1366 bp, Homo sapiens
atgcctgggagattagagactcatataaatcacattataaagatacaaataataaagttttgtgagaataaagaggatgaggcaactaattctcactgagagactagaaaaggctttatcaaagagatgttatttgaactgcatctcaaatactgagagcttaccaggcaaagaagttcggggtgggaggtggtcttctaagtgaaagaaacaacaagtgtaaatatgcagagatactagatctggtgtccatccactagtgagaaattctgtatgcgggaatattcagtatggggaaggacagagataaaggaatgatagggatgtcatgaccaagatgaaggctgggacctgacagtaaaaggcctaagtaccatggtaaggtggttgaatttatcacaagagccaacaaaggctagcaaaggagtggcatgattgaccttgttttgagggaacartaactgtataggcagtgcaaatgatagactgtagtattaagagattgcttaacagtccgtaagaatgatggtagagacagtggcattggagatttacagccagatatttctgaggtaaaatttcagtttggtgactaactgaaaatagaattaaggaagaggaaggagtgaaagaggactagagaaatttctggcttacagtagttgctgcagtcattaactatgggccagaatacataagggaaaacaaatcataaagtagtctggaattaaaacctggctatgacgctttataggcctcttttaaaaatgggattatcagaatcaactgtagagattgttttaaatatctagaattgtccccagtgtccagaattcactatgtgaattcaaatgtccccaacgtccagaattcaccatgtctgggtggggggtcaagtatttcttttcttcttcaactctaaagacgcttctgataaacatccctgattaagaacacggctgtaagcacaaatttgttaaaaaattcagttggaaaaagaaataagaaaaacacaggaaatcttgaaaaagagagctttgccaggggtggaggggacaatcataacagatactaaagcattataaaacctttaaagcttaatagttggcactggcacatgaataaaaaaccaataaaacataataggaaaatgagaaattgacccaagtacatatggaaatttagtatagataaaagctgtatctcaaagcagtgaggaagagatggactttttgataattggtgttcaaggccacacatggtagttcatgcctgtaatcccagcactttgggaggccaaggcgggaggactgtttgagcttgggaccagcctgggcaacatagctagatcctgtctctacaaaaa

SEQ ID NO: 11170 - DNA, 875 bp, Homo sapiens
tggctggactacattcctactctcatccctgtccaggcttctggtcatactgactgatttacatgaggtgaagggtacctgcacaaaggtagcttttaatgtactagagcctgaaaaagagatggaaaatgcaagggatcttagccaccttaacctcaaccagctctaaggaaagcacttgagccaaatgtaagcagggaccctcttcccacttctgtgatgaatacacaatgatctggagcattgaggaccctatggatacctgctggattggcagatttttaaaaccgtgtgctagcattcaagtcggggggtggggcttaaaaaaagagaagcagcaacagaagacgtggtggataataacagtgagtaatctttatggggctcttaatataggtcagatactttccaagtactccaaatgcattaactcacttaaccctaaaacaatcaccactttccagttaacaagctgaagtttagagaagttaagcaaatagtccaaggtcatgtacctaaatggtggcaccaggattcaatcacaggtagattaagtccagggcttatgctctcaaaaacagagctaattctctctctcatgggagaatggaatcccctggggggtatgggctttttgaacccacataaaaatactctgtaggaattcccaagtrtactttcagaggtagaggaatggcagagatagggagattttctgggaagctggtttcctgcttgagcagatgggacaatgtgtcagcctgatttaagtataattagtaatgagaactcattttttccacaggttgataaggcctggggatactgaagcatacgtattttatatctggggagaagggcatatagacattagc

SEQ ID NO: 11171 - DNA, 875 bp, Homo sapiens
tggctggactacattcctactctcatccctgtccaggcttctggtcatactgactgatttacatgaggtgaagggtacctgcacaaaggtagcttttaatgtactagagcctgaaaaagagatggaaaatgcaagggatcttagccaccttaacctcaaccagctctaaggaaagcacttgagccaaatgtaagcagggaccctcttcccacttctgtgatgaatacacaatgatctggagcattgaggaccctatggatacctgctggattggcagatttttaaaaccgtgtgctagcattcaagtcggggggtggggcttaaaaaaagagaagcagcaacagaagacgtggtggataataacagtgagtaatctttatggggctcttaatataggtcagatactttccaagtactccaaatgcattaactcacttaaccctaaaacaatcaccactttccagttaacaagctgaagtttagagaagttaagcaaatagtccaaggtcatgtacctaaatggtggcaccaggattcaatcacaggtagattaagtccagggcttatgctctcaaaaacagagctaattctctctctcatgggagaatggaatcccctggggggtatgggctttttgaacccacataaaaatactctgtaggaattcccaagtatactttcagaggtagaggaatggcagagatagggagattttctgggaagctggtttcctgcttgagcagatgggacaatgtgtcagcctgatttaagtataaytagtaatgagaactcattttttccacaggttgataaggcctggggatactgaagcatacgtattttatatctggggagaagggcatatagacattagc

SEQ ID NO: 11172 - DNA, 541 bp, Homo sapiens
tttatacctgttaggatagctgttacataaaaaacacacaaaaaataacaagtgttggcaacaatgtggagacaagggaactcttgtaygtttttggtgggaatgtaaattggtgcagccgctatagaaagtagtatggaagttccacaaaaaaattaaaataggactaccatatgaccaaaaaattccatatcttggatgagaatttgaattagccattatcagattggtggtttccaaaagagaagctaattaattcttatcccaagtaactaaaatcagtctctcaaagagacaactgcactctcatgttcattgaagcattattcataataaccaaaatatggaagtaacctaaatgtccattgagagatgaacagataaataaaatgtggtatatacatacatgaaatactattcggtctttaaaatgaacatcctgtaatatgtgacaagtggatgagcctggaagaccttattctaagtgacataagccaggaacataaggacaaatactgcattattcaacttatatgaaata

SEQ ID NO: 11173 - DNA, 541 bp, Homo sapiens
tttatacctgttaggatagctgttacataaaaaacacacaaaaaataacaagtgttggcaacaatgtggagacaagggaactcttgtacgtttttggtgggaatgtaaattggtgcagccgctatagaaagtagtatggaagttccacaaaaaaattaaaataggactaccatatgaccaaaaaattccatatcttggatgagaatttgaattagccattatcagattggtggtttccaaaagagaagctaattaattcttatcccaagtaactaaaatcagtctctcaaagagacaactgcactctcatgttcattgaagcattattcataataaccaaaatatggaagtaacctaaatgtccattgagagatgaacagataaataaaatgtggtatatacatacatgaaatactattcggtctttaaaatgaacatcctgtaatatgtgacaagtggatgagcctggaagaccttattctaagtgasataagccaggaacataaggacaaatactgcattattcaacttatatgaaata

SEQ ID NO: 11174 - DNA, 556 bp, Homo sapiens
atagttttataaaactgcataggtttagctttatgcaaaattcaccacattgtctttctttctcctttcaccccatagtttatctccaaaccagtgaaaaccaccatttgggaactacagagcaaggccaacattctggttttacaaacagagaaacagtaatctgaccctattcaatgattctttcaagacggctagccagtgggcgacagatagggctgcgtggagtcctagttcagctttcttcctattagatttgctaaagcaaatttctgtgatttccctgttgatattaatatttggcaaaacggattcactctcttctagcaactccaaagaagcatacaaatacacagatggatcatgagaagggatccccaaaatcaggtaacagaggctgtgtaacttcagaggtaatttttctccttttgcattctgagaaataaatcctacagaattgtttcaatagcaatcgatgttagactgaaaattccattttgaawtgagaggtatgatttcaagacagcattctgataaagatcgcactgaatctata

SEQ ID NO: 11175 - DNA, 535 bp, Homo sapiens
ggtagagcgctctctctgtgtcttttactgattttcatcaagtcacattgtatctcaatctctggagggtcctgcttgatttctctcttgggctactttccctccatctgctccttgtgtattggtgttccactagtcttgttcctctgcatatttttcactggtaaactgcatagattactcacttaggatttttgtgatagataaccctaagtgggtawtctgtcaaccaggctggagtgcagtggcacaatctcggctcactgtaacctctgcttcctgggttcaagcgattctcctgcctcagcccactgagtagctgggattacaggcgcatgccaccacgcccggctaaattttggatttttagtagacagggtttcactgtgttggtcaggctggtcatgaactcctgacctcatgattcgcctgcctcagcctcccgaagtgctgggattagaggtgtgagccaccatgcccagccgcttatatggattttctaagatcaggagttatggttgacaagatgtttccc

SEQ ID NO: 11176 - DNA, 538 bp, Homo sapiens
taagcagtaataaacaatctctaatcttagaggtcatatggcctcaattcattacatgggccccaggcaagacaagcctaccatgtgcctagaatcctggaacatttataatatttgatgaccagcacaactttagatataaagacctttaatttgttttatcacatttaaaactttacatttgtgagaaaaaaatacactgcttaacatcacaggttgatttttaaaaagcaacttctagatgaatatgaatttgtttgatttttcttctccttccatatcagcatgtgaagccctgactctctgagcctctaaatcttaaacactcaccctgacctccatgcgtcccatcaccaagggaatccttccttcctctccctgctgtccttgccctggccttcatctcttcgtgtctggaatatagcactagcttgctgactcttctgtctcccctccttcattctgctcctacacattgcagccttgaataatcccattaaaatatccttagggtttcagtgttgmaccagaggttgca

SEQ ID NO: 11177 - DNA, 525 bp, Homo sapiens
atgatacccttaaaaaaaaaaactctatttttaattattcaaaaaaacaagaaatccacagaaagaccttcaattcttcagagtctcctaatgactgtaaacagtcactctagcaagcaggtcatrgagtctacaagtgcacttcagtcagccaagttcaccttgagagttagtgctgcagctcttggttattttcaaacactgtcatttatttgttttaaataaagaaaacaacttagaagagacttagttccccgtaagcactgattgggttcaagaggttgggagtgcaggaggccagatcccagggaggtggcagtgctttgcttcgtaggtgcccatttggcttaagatcctaaggtctctgttgccagaagggtcgggcggaggcccgttaaaatcagagcaggaggatcatctgcttttttcttttttctaaaagcagtcggagtaaaccaatctgagacaagaggcttttgtttgtgataattggtttctcctgcaaacaagttggcatgcaacatt

SEQ ID NO: 11178 - DNA, 525 bp, Homo sapiens
atgatacccttaaaaaaaaaaactctatttttaattattcaaaaaaacaagaaatccacagaaagaccttcaattcttcagagtctcctaatgactgtaaacagtcactctagcaagcaggtcatggagtctacaagtgcacttcagtcagccaagttcaccttgagagttagtgctgcagctcttggttattttcaaacactgtcatttatttgttttaaataaagaaaacaacttagaagagacttrgttccccgtaagcactgattgggttcaagaggttgggagtgcaggaggccagatcccagggaggtggcagtgctttgcttcgtaggtgcccatttggcttaagatcctaaggtctctgttgccagaagggtcgggcggaggcccgttaaaatcagagcaggaggatcatctgcttttttcttttttctaaaagcagtcggagtaaaccaatctgagacaagaggcttttgtttgtgataattggtttctcctgcaaacaagttggcatgcaacatt

SEQ ID NO: 11179 - DNA, 516 bp, Homo sapiens
gcattccatcaatttagcaaaaatgtacaagccatttactatggaggagtaggaacccagagaagttaaacaaattattccaggaagtataaccggttggtggcagagccaagactgaaagccaagtctcaggacttttggttcacggtcaaccacgacaccacattgctgagtatttactgcctccctcgtgttgcctttaggtcattttgctttaggaactgagcttttgtatcaagagatgacaggcctattttggtagccaggagaaggggaggacaaaagaacatgcaataaaagtagtatttcttgtgtcagccttcagagctaggtagagagggccagataataaacaacataaagaccaaggatcagagaaatatctaaaacccatttctatcctcatctatacatgactggcctctgtaaccacacatgkagccgccatctgcgccgcctcgcttcctctgggtagttctgccttgtgattcttcctcctgaaggaaaagtgctagt

SEQ ID NO: 11180 - DNA, 558 bp, Homo sapiens
tgatattgtcagcatagaatagaatataaaaaaaaagtataatgtaatactggaagcatttctttcctggtttatatttcatattttaagtataaaggaggaagcagttttaactactttccctcacactcacacatcccaaactgtattttcgactagggttcaagctataactccaagctgatgttgaagcctttggtccattgcaatactttttctatccaatttgcagaaacattygtgcttcaggcccttggcctgcaaaagctaatttaagatgatgtgacaggaatttcgagcttttgctgagaatataagaagtaatgcaatcgaagcaaaaaatggaaaagaataaatatatactgactttccctatgctgtctccatataatacctagtttttttattttcttatattttgctttagctttagtttattatcaataagtttgatttttattatgtgtatgttgtttaaatatttatttttgccagttgcaatcaactgcaaaaatataaaaatactaaagtggcaatgtgacacaataattagcattg

SEQ ID NO: 11181 - DNA, 502 bp, Homo sapiens
gtttyatattttcctgatatttttgtggtctatgtttataagcttaggaaagcctatcatgaaatgaggcataagcaagaaaaaaagtttccatcatacactaaaagccaaaaagagaaaaggtgatggaatagggaagtggaatttagaggaaggttaattctcttggaattcaaaaagcacaatatttcattgtgataaatagctctttccccaataaatggggtgtaatggtaaatctttcagttgtgggcaaaagttacaaatgaatcatgctgttataggggagcctatctggcaattcatacttagattcaaagagcatttactatatgccaagtgctctgcctggcagtgccttatgttaccttacttatttttcacaattacggtatagagaaagtatcatggtcagcttttgtcatatgagaaaacggatgctcagtgaactgaattcacttgtgcttagttgcacagcttaaaatggcagctctggaagtca

SEQ ID NO: 11182 - DNA, 502 bp, Homo sapiens
gttttatattttcctgatatttttgtggtctatgtttataagcttaggaaagcctatcatgaaatgaggcataagcaagaaaaaaagtttccatcatacactaaaagccaaaaagagaaaaggtgatggaatagggaagtggaatttagaggaaggttaattctcttggaattcaaaaagcacaatatttcattgtgataaatagctctttccccaataaatggggtgtaatggtaaatctttcagttgtgggcaaaagttacraatgaatcatgctgttataggggagcctatctggcaattcatacttagattcaaagagcatttactatatgccaagtgctctgcctggcagtgccttatgttaccttacttatttttcacaattacggtatagagaaagtatcatggtcagcttttgtcatatgagaaaacggatgctcagtgaactgaattcacttgtgcttagttgcacagcttaaaatggcagctctggaagtca

SEQ ID NO: 11183 - DNA, 571 bp, Homo sapiens
tctaagctatctttggatttccagtatctaacatagaacttaacacataatgtgtgctccwtaaatacctgaggaatgaggggctgaatttagtgctgaaggcaagaggaagggcccctggaggggagccctacctattgggcacaagagaggccaggagggttgggggccaaggcacctggagtgaggggcaaagacaggacatcctgggcacagtgggccatcccatttggctggagggtggggttcttgaatgagaatagagagaaatcagattggaaaagaggagggctccagaaagggggctggaacatcaggcttgggggtttggatgttattccagcaccccaggacaagcctgcctcctcacaaaagatagctctggccccagcacatcattcttttcatcccccacccccctctttagagcgttttcctgcctttttggcaccgaatgcagtgctggcttctgtcctgagcagcgtgatctgctgcccatgagtcaggggctcggccattcctaagtgactaaagctgtcgcctcccgccagtttcccgtaaccgcctgagt

SEQ ID NO: 11184 - DNA, 533 bp, Homo sapiens
gatccctttaataaactgcaattaaccactaatatagaaattcaatttaagcaagaagttttatatattatactttacagaaaaaaataattttgaaaaagtaatgacaaacagagatcaaacatttagggcattagttactgcattctctttttagaatatacattaagtaacactagtaaaatttaaagttttatgaccaggccttaaaaaacatgaatgatgatgacagaaccactatcacacataaacaaaaatagagcaaaccaagcgtgtccacatctccatgaattcagtgatttgaaataaatgttgttatgttaaacatyatgagcaaatctaaaggttcaaccaaaaaacttacatatttttgagtattttttaaagttttaatagtttatctctgatcaaggatggagaaaggacaaaaaaaaatactgtcctgaattgattctcacagggcctgctccctcacagaacacagtgtcattatatatgccttatttatatataaaacaaccaaagaattttca

SEQ ID NO: 11185 - DNA, 562 bp, Homo sapiens
gtcaccaagggtgcaatggtcaagttagcagaagaagactccacgtagrgaactagctggaaactcaccttgtacttccccactctgccaactctctcttctctcgcagataatgagtgggctcagtttaaaagtcctttatgccaatgccgatgtgagaagagtgtttcctaggttgtcttccaggatttttatagtttgagatcttatatttaaacctttaatcgattttgagctgatctttgtatatggtgaaaagtagagattcaacttaaatcttctgcatatggcccgccagttatcccagcaccatttgttgaatagagagtcctttcctcattgtttgattttgatggccttgtcaaagatcagatggttttaggtgtgtgaatttgcttctgagttttctattccattccactggtctatgtgtctgtttttgtaccactgccaagctgttttagttactgtggctttatagtgtagtttgaagtcgagtagtgtgatgcctctagctttgctctcttgcttaggattgctttggatactcaaagcaaaaata

SEQ ID NO: 11186 - DNA, 530 bp, Homo sapiens
ataaattgtctggtgataactttccacaggcgtgaaatatctgtttatcacctacttcattggtcgtgttactttaatatcataacgatttatagaaacagtgtcattccaagtttctaacttctatttttgccctttcctatgtttctgtcattaaaagacaatgttgcttcccttccttgcatcgagtattamttttattgaaaatgtgaagatatcagacaacaacaaaatctggatttataccttttaaaagttgggaaactggttttttatcttgcagaaataccaaaagttcattttacagtttaaacatcctcaacagaattttcccctcagtaacaatcacatctcagtatgcattcagggttgtttgtgatcagcctttatattataaaacaataaagaaaatccctttgaatttaacacattagcctctacatcattcacaatatttcttacctcactaagcatactgtttagtccagctgacacattttcttcatgcaagactttcttgatgaaggaaa

SEQ ID NO: 11187 - DNA, 536 bp, Homo sapiens
atataaaaaaaagaaaataaagtcattttaattattctcaatcaggtatgatagccagcagatgacttgcacattttttgctatgaattcacagaatattcaagtaaaatttctctttgcacttttacctcaattttttttgctaactcatgagtagaagctaaaagatgaaatcttcccagaaatactcatgtctttataagtgatacacayaattttaaaaagtcgtaaatatgcaaaaatgtcctcaacatcattagattttagggaaatgcaaagtaaaatcattgtaatattacataccaataaagtaactaaaataataagattgataatatacaatctagatttattgtggagaacctgaaactctcaattctgctgataggaatgtaaaatgataaaaaccactttagaacatagtttagcactctcttagagattaaacatataatgaccttataacctagaaatttccctcttaggacaattttttaatgcacttttgtagaaagacatatagaaaaagtataaaa

SEQ ID NO: 11188 - DNA, 536 bp, Homo sapiens
atataaaaaaaagaaaataaagtcattttaattattctcaatcaggtatgatagccagcagatgacttgcacattttttgctatgaattcacagaatattcaagtaaaatttctctttgcacttttacctcaattttttttgctaactcatgagtagaagctaaaagatgaaatcttcccagaaatactcatgtctttataagtgatacacataattttaaaaagtcrtaaatatgcaaaaatgtcctcaacatcattagattttagggaaatgcaaagtaaaatcattgtaatattacataccaataaagtaactaaaataataagattgataatatacaatctagatttattgtggagaacctgaaactctcaattctgctgataggaatgtaaaatgataaaaaccactttagaacatagtttagcactctcttagagattaaacatataatgaccttataacctagaaatttccctcttaggacaattttttaatgcacttttgtagaaagacatatagaaaaagtataaaa

SEQ ID NO: 11189 - DNA, 536 bp, Homo sapiens
atataaaaaaaagaaaataaagtcattttaattattctcaatcaggtatgatagccagcagatgacttgcacattttttgctatgaattcacagaatattcaagtaaaatttctctttgcacttttacctcaattttttttgctaactcatgagtagaagctaaaagatgaaatcttcccagaaatactcatgtctttataagtgatacacataattttaaaaagtcgtaaatatgcaaaaatgtcctcaacatcattagattttagggaaatgcaaagtaaaatcattgtaatattacataccaataaagtaactaaaataataagattgataatatacaatctagatttattgtggagaacctgaaactctcarttctgctgataggaatgtaaaatgataaaaaccactttagaacatagtttagcactctcttagagattaaacatataatgaccttataacctagaaatttccctcttaggacaattttttaatgcacttttgtagaaagacatatagaaaaagtataaaa

SEQ ID NO: 11190 - DNA, 536 bp, Homo sapiens
atataaaaaaaagaaaataaagtcattttaattattctcaatcaggtatgatagccagcagatgacttgcacattttttgctatgaattcacagaatattcaagtaaaatttctctttgcacttttacctcaattttttttgctaactcatgagtagaagctaaaagatgaaatcttcccagaaatactcatgtctttataagtgatacacataattttaaaaagtcgtaaatatgcaaaaatgtcctcaacatcattagattttagggaaatgcaaagtaaaatcattgtaatattacataccaataaagtaactaaaataataagattgataatatacaatctagatttattgtggagaacctgaaactctcaattctgctgataggaatgtaaaatgataaaaaccactttagaacatagtttagcactctcttagagattaaacatataatgaccttataacctagaaatttccctcttaggacaattttttaatgyacttttgtagaaagacatatagaaaaagtataaaa

SEQ ID NO: 11191 - DNA, 525 bp, Homo sapiens
tcactcactagctctgtgattttgggcaagttactttacatctcagtgcctcacaatagtaatactgtttctgttacatgctgtcgaatacatcatagtgttcttatgaggactgagcgagttcatattcgtattagaatagtgtctggcatacagagtaaatacatcatatggacatgttaaaatagcctaatacatacattttaaaaacaacraaaaagtctcattcctataaaaagtatttacacaaatgaagtatgataagcaataaaaaggaagccagataaataatacaacaattaaaaagatgttgcaaagccattcaaggctgattgtcaaatggatatggtagcaatttgagaaatttggaggaaagatgggtctcaatgagctgatctggggatgccacacagggaaagaaagtcttagagtgagtcccaagggacagcagtaatctatactggtgaaacgaagtggataccagcctgaaccacccaggccttgggaagcagagccatcacaaga

SEQ ID NO: 11192 - DNA, 436 bp, Homo sapiens
ttttcttattatttttcacacctcccaatcaaaccactagttattagtgtttgactactaggctctcttcatttatttttttattacctgcttgatcctaggaggctttaaatttgccacctccaattaatctaattctgaagagtctcccaagtatacatctgcgtgtagctactgcaggaaaataaatgcagaaaatattctgaaagaaatggtgtcactatagaaaacttaaagctacatttatatttgaagacaaaatccccagaggtaaactttagttctcttactttaatacattgcatayaatacattttaatcaggatataagatgatgttatcataaataattcaatctagtaatccactgcacagcatttactaccaaaagagaactgataaaacatgcagagtgatcgtttacaatttggacaac

SEQ ID NO: 11193 - DNA, 682 bp, Homo sapiens
gttggagtgctcaaaactagctatttaataaatggttagactattcaaataaatattacagagctgatgatctataatatttttccttcttaattctatgaaaaaggtaattttatggtgtctattaattttttccttttgtattatggttaagacaatttattaactgtataatacacagctatatgttatcatctgtgacattttgtgaacatcccataagttaatgtcacgtatcagagataatgttcaaagctgtttattttctagaaaatactttatgtctagtatttgaccatgccacactgccatcagtattgtaagtctcctgagaactactgctgcacatgatgatatatgcatatgacacaataaacaccagatcatagttgtaattcatggatgaggttgggctttcagtgttttgagcaggaaagacttgatagcttcagacaatttagtgagtaagggaacgatctttyggaggactgggatgtaagtcgtctttgaattactttgtatagaggactgtcatttactcaaagctgatatttttcatttcttttaaaaggcaggacctgtcaattcaattcttccagcaaatgctgtgaattgcaaaataagtccaaggactgttctggcagggatcttgggattaaaacaatgaacacattagccctgg

SEQ ID NO: 11194 - DNA, 568 bp, Homo sapiens
tctccaattgagtaatttttttcccaggtttctaggcactgaggatcaccccaaagatatgctttttctgcaccatgatatgacccagattgttttgatttctgtaactaactttaaagtacatctgcatggagtaatataagtaaggggcaatcagctgttctaagcaaaaacccacactccaggggtggtcagccagcattgtgccagctagcatkgtgtcataaagggcacacagagacaactactgctactgttttgttataccgaccttaaataatattacacattttgctgagtaaaatagtgaaaatcagaaaaggattttgcattggagaaattagaagtttattggcataaggatatgagaagtgtgatctcacaggggaggttacatggacagctaaatgcattctacattcacccctaggtgagccaaggacaagaatactatggtgcccagagcttgctccttaatagttatctggatttctggaagcctaatgctactctaagcagaacagaaggctgctgctgggatatttctgcatttgccttcaatgaaaag

SEQ ID NO: 11195 - DNA, 568 bp, Homo sapiens
tctccaattgagtaatttttttcccaggtttctaggcactgaggatcaccccaaagatatgctttttctgcaccatgatatgacccagattgttttgatttctgtaactaactttaaagtacatctgcatggagtaatataagtaaggggcaatcagctgttctaagcaaaaacccacactccaggggtggtcagccagcattgtgccagctagcattgtgtcataaagggcacacagagacaactactgctactgttttgttataccgaccttaaataatattacacattttgctgagtaaaatagtgaaaatcagaaaaggattttgcattggagaaattagaagtttattggcataaggatatgagaagtgtgatctcacaggggagrttacatggacagctaaatgcattctacattcacccctaggtgagccaaggacaagaatactatggtgcccagagcttgctccttaatagttatctggatttctggaagcctaatgctactctaagcagaacagaaggctgctgctgggatatttctgcatttgccttcaatgaaaag

SEQ ID NO: 11196 - DNA, 1313 bp, Homo sapiens
gagaatttcacctgaagcaggagtggtcaataatgccaagtgccaaagaaagatcaaagaggtgaaaactaaaaagtatcattggatttggccaggatgaagtcatttcaatacactgcttcagcagaacacattgtgtacaaaattttcttgagaccatttttcaaaataaccattttaatcttcctaataaaaaaagcatcctaaagagaaaagaatattctcttcaggaagtctaaaattaacaactcaaatagctactttactatatattattttctttttatttctgtttaaaaataaactacctcatatgttatatgatctgtaacttctttaaaagtattttaaaaagggctttaacgacacaaaaatatctagattaaaatgttaacactttattaagaaacaaaaatatcttaacttttgccttctctgatttatgtcgatacaaaatccactgtcctgtaaataggagaagggtgatgagcatattattacttatttcatgaagatttccaactgaatttgatgccatttggaaaataatccttatgaaaatttctggatttgcagcgagacagctggcaactaattcttacatgctcatgcaagtctagtgcatatatttatgacagtgctttgaaaaatctatatagttttgttctccataaagtttaagtgaaacaaacatctaataaggtactgtgttgtctataaaacagtagaacttagcatatgctactaatagtttcataataaattaggcatttcaagattttctcagaactcgtgtcatacaaaaatatataattcyaaattcatgcaattattctaccattaatttttatcgtcacacacaataactattaagacatctatggaatttaaagttattaatgaaataattttttacacacacacacacacacacacacacacacacacacacacacaccccgttgtcacttcattccatatttcctttcaactggtttgggaatgcatagtgaggatagaaaaagaataatgcattaaatcaggtcgtctgctttaacaacttgatatttttcttattttctgacacaacaccatttgcagaatatgggattcacagcaaaggttggttggctgatatatgctaacatagcccaaacatcaagaagagaatgaagagagaaaacaatgatgaaaaatgtatctgtgggccatagccaaatgaaaagaggatgataaaactaagcaatattgacacataaaagtgaaatcacaaaacacagtcatccttaaattcagaaatctacacatgccca

SEQ ID NO: 11197 - DNA, 532 bp, Homo sapiens
tataagtgtttcttccccccttcactctgcacttttctctcctgccaccacgtgacaagaaagtgtttacttccccttctgccatgcttgtaagtttcctgaggcctccccagccatgcagaactgtgagtcaattaaacttcttttctttataaattacccagtctcaggtatttctttatagcagagtgagaattaatataagtagcttccaacaagaagcgttaatttctcactgaaggatctgtggattgtctggactcagttggatttgccaacacagcatggattggattcaaatctgctgcatgttttcccctggtgatagcagaagtcaaagaaatcaaacccatctgtgcaagcacatttgaagccttaatacacattacaggcacttttttcaccttttgttcaagcaagacatatgacaaagactaaattcaacaagtgggaaaatatactcccrtcgccattaggccgtggcaaaagtacagatgtcaaatattactgtatgaggcagaactgagaccaa

SEQ ID NO: 11198 - DNA, 643 bp, Homo sapiens
ttttctaaccttttctgctgaaagcagctataggattcaaagttaagcaattattttactgactaataatttatgcctaacaaaaatgtagcaacttgataaatcataagtaaataaaagtgtaaaatatgattttattaaatttaatttctcctcatggcaggtatttttcaaggaagcaattgtgctttgttcatattatcaagaccatgaattctaattatagtgacctctaatggagcaaaacttctagaaagagtttcctaattgaataaataaattgcacaagagtgtacatctaattaaactattaatattttaatcaaatttaatcaaaataaacagaaaatcacaaaattaacagaaatttaggaacattagtaattgtattggatcatkgggttgctagaagcaaaatcttttctctgttatatcacatttcaaacaattggaaaaacagtttccaaatcagcagtcaaaaactatgtaggctttgctgtaaatagtaccaaaaaggacacaaaaaaagggtggttgtattaccaatttgagagaataccaagtgttttcttaactgtggtgtgcatgtaaaagcaaaatctatatttttagctgagtggtaatttcattcacagtatttgat

SEQ ID NO: 11199 - DNA, 643 bp, Homo sapiens
ttttctaaccttttctgctgaaagcagctataggattcaaagttaagcaattattttactgactaataatttatgcctaacaaaaatgtagcaacttgataaatcataagtaaataaaagtgtaaaatatgattttattaaatttaatttctcctcatggcaggtatttttcaaggaagcaattgtgctttgttcatattatcaagaccatgaattctaattatagtgacctctaatggagcaaaacttctagaaagagtttcctaattgaataaataaattgcacaagagtgtacatctaattaaactattaatattttaatcaaatttaatcaaaataaacagaaaatcacaaaattaacagaaatttaggaacattagtaattgtattggatcatgkggttgctagaagcaaaatcttttctctgttatatcacatttcaaacaattggaaaaacagtttccaaatcagcagtcaaaaactatgtaggctttgctgtaaatagtaccaaaaaggacacaaaaaaagggtggttgtattaccaatttgagagaataccaagtgttttcttaactgtggtgtgcatgtaaaagcaaaatctatatttttagctgagtggtaatttcattcacagtatttgat

SEQ ID NO: 11200 - DNA, 709 bp, Homo sapiens
gataatattaaatagcaaaacagaaaagatactttctctcccgagaattgtttagcaatcaagatttgccaactaataaaatgcagttttatcttgtgagaaaggtttaaactgcttctttagaactatatgcattatcttgagtctctacatatttctcatttttgttttaaatttgctatacatttataggaaccttgcaattgtaacgctgcctcaacatttatggaaaattttgaaatgtggagaaaagrcattaaactggtaaaaactttgatgtccagccaaggcagtaatatagatgaaagaaacaagaattgtaagaggaaaaaagtggagcagggtctgctctacgcgacatgaaaagagctcatgtaggcaatgcctactctatttaaataaacaccatgaaaaaaagttgtatcactttccacatctcgatagaccctgagtaatattttagtgatattgataattctcattgaatttgattttcatcttcaaatttcacagagaaaatatcacatccataagacacatgaacaaacatcctcttgtcttctgatattttgtactcaaattatccttgtttcaaaacttaagaaagaatagtaatccaatcgactaaaatattataaaaatctcaccaatggtcattataatatacttatgtaggtcaaagcaattctttatagaatatcctaagatt

SEQ ID NO: 11201 - DNA, 562 bp, Homo sapiens
aatatttgaggacagtgaatatgcagtgtcctctcctaaggtaaaaaatatatatatatttgcagactctgaactggttcagctgaaaggaaaagtacacctgcccagtgggagattatgtgggtctgagtcataaaagaaagaatccaacagatcacagaacgcactcagtgttgcrcccacatttggaggtgatgccacctgttacctctgctgaagctgggtcaggcaatgaaccctcagccatccaggcccatcacctcccctgctgaagagactgtggccaccagacctccttaggtggttggatgagggatgatacaagatactaagatgaagtccaaactatatcttcactgtagaggaaaaatcaaaatggctttggtaagaaaatatttggcataatgtgtaccaaaatccttctggccataatatgctaagtctacattattttgcctaataatacctgtaccatctaccatcccttcagagtgggctggagtgaacccacatgctcaagcacattttatatgtagaacctgaagagacaggcctattctgg

SEQ ID NO: 11202 - DNA, 534 bp, Homo sapiens
ggagacacagttgagctcataacattttctatagaacaatcaagtttgagacatgccacatgctatattttcttcttggaaatttgcaaggtatatatgcatatgaatgactgtgcaaagtcctggaaaacatccagtattcatctttcacactctccctgtttgatccattatttattgataaccttccactggcttcctttatgcattggctgagtgcattgagctgccgcatggaaatatgatctgccggctgccgctggcagtcaggaagggaaggtggacatggagagagcaagcaaaagctggagtctcaaggagatgaagtggaacccagggctgtatctcattagagcgcatgttggcctctcatcacttccaggcctccggctttgaagatgctcggggagttgctttggagggctacgtggagagaatgggattggtaagtgggcaasagggttggttcttgctggatggaattgcgtcttccatctcttccaaggggacttctggattgccaggggcctggca

SEQ ID NO: 11203 - DNA, 1082 bp, Homo sapiens
tctagaaaacattaattgtcacgtcccgtatttgcagattgtcacaatcccctgcaggactccactctggctccagtcagtgagcctcggccccatcacatgtccatttattcaggggagagtccctgagcgcctctccggtgggagttgtgagcatgtgtcatgactggacacaaaaagttcatactttggttgaggagagatgccattgaccaactcaaagctccatacgggtatatagcgttaaccagcaacttgaggtcagaagtgtcacaaggtcgcggcccatcgtagtttcggccgagtgacggggacagtgagtgagaggcacccaggggagagaggccagtctgtgctggcgggtcaggaaggggctccagaagtcaggggcatggtgaatgctgcctgttgctcaacccccactcctgtgccactacctcattgaagcctttgattcctcaaactggaaaaaacaccccacttctctagcttccattgtatggcccccttctttttcttttctttcttttcagtgctcacggccttaaactgactctctagatggttagtcgctggcctatagccatgtatatgaacttcttacaaaccggatccttgactgcatcgatcttccgctgctccttctagccctgggaggctgggaggtgcaagcaggtgttccataaatctctgttagttgaataaccgactaggacgtcatggggagaagcagtgagagaaagaattcctggttggaacaaagggatctgactagggggatacttgagctgctgccattgtttgtagtcccagctggcttgccctctttctgttaggagcaacgtgcaaaggagagatgagttttgaaatattggaagttaaaatggcttygacttaagtcacatttatctaagaccttcactgccttagtatgcaaggtatcgctgcgccctccctcctcaaactctcacaccccatttggtttctacctccacccaccagctgcttcttaggacttaggatagggcaggccattatcttgttttcctgccattttattttacttggctggaagaggcaga

SEQ ID NO: 11204 - DNA, 562 bp, Homo sapiens
aaacatgactatttctttttgtaaagatagggatcttgctatgctacccaggctggtctcaaacttttggcctcaaccaatcctcctccctcagattcccaaagtgctgggattacaagtgtgagctaccacacctggctctattttccatattttaagaccatattttaaaagctgctcaaccctgcttttttctcttggtgctacttgtaactcccttacttagccttggaaatactgttagtgaagaaaatctaaagaatagaaaaataaaatattttttttcttccmattgcaaaagaacagatgccctcctgaatcataaagctagttgtgataaattggtgaactgagagcctacacagtagtattaattctgttctaatttctgcctaactgtggagtctcatcacatagtcttaaaagattattgctatgaaatattcttatacatgtaacccataacccctgcagttgccattggttgtcttacctaataatcaattgctccgcttcataatatttaaattggcatctccattttccaaaaggcataaatact

SEQ ID NO: 11205 - DNA, 580 bp, Homo sapiens
ttctgtagttcctttgttttttaaagtttaaaacctaaagttagagataaacaaacttttaatctactttgggctttacattggctaactggaagagatgaattctatagaaaaagggctatggacacataccaccaagcatctgggtagaatcctactttagtgcacaggtgttctgcctgtgtgaccacaaggtaaacatctggatattagacattgtcttcgttagttttcaccagatgtttggtgttacggaataggcatagccatgtaattaaattaactcgcacgtgaaacactgagttaacaaataaccgggcgcggtggctcacgcctggaatccccgcactttgggaggctgaggcgggcggatcacgaggtcaggagatcgagaccatcctggctaacacggtgaaaccccgtctctactaaaaatacaaaaaattagccagtcgtggtggcgggagcctgtagtcccagctactcgggaggctgaggcaggagaatggcatgaacccgggagatggagcttgcggtgagccaaaatggtgccattgcactccagcctgggcracagagt

SEQ ID NO: 11206 - DNA, 574 bp, Homo sapiens
tgcaaaccccttattctggtgtctcccacctgttcaccacatccctgtcctctttctgtcacacaactctgaaatcagtcatttcctgtctgttcccagaatattgccagaccctcttgcttcccagacctctggccccactctttcctctgcttcggtgaagttggtacctgtggagggtcgaattgtgttctcctcctgcaaattcatatgctgaagtcccaactcccagtacctcagaacatggtcttatttggacatasgttagttggagatataattagttaaaatgaggtcctatgggaatagggtgggctccttatccaatacgatcaatataagtgtccttatcaaaaaaggaaatgtgggccgggcgcggtggctcacgcctataattctggcactctgggaggccgaggtggagggatcatgaggtcaggggatcgagaccatccttgctaacacggtgaaaccccgtctctactaaaaatagaaaaaattagctggacgtggtggcgggctcctgtagtcccagctacttgggaggctgaggcaggagaatggcgtgaacctg

SEQ ID NO: 11207 - DNA, 528 bp, Homo sapiens
gttaggaatrgttttgtatatatcatgtatttaacaattcttaaagtaacctgaatcatgagcttgcgaggccagcatggctctcttttttaagagcaaatgcacacaggctgattgatagaatattgtgtaagtcatgaaaattgggcctgaaactaatatgggaagaagatgaaagcaagaaaaaataatttctgaggaaaatctgggagtctgattttgcttttccctactggaagtccaatttcacccttttaaacacaaacaaaagttggaagatttgttatatgactttgaagtgtggtttagaacaaacactcctagtatgtctcaggcagataatgagatattacctgtaaattaaacaatttttgttcctagaatacactgaattggaaagaaaacaaagtcagttgatatgtgattgagcaagcatctcagcctttctgtgaaaatggaactagggacatttcattacatccaccaccaaaatgaaagatgcctccagccccactgagatcaaagtgt

SEQ ID NO: 11208 - DNA, 1259 bp, Homo sapiens
cagtcctttccacaacattatatctttgattagttcttcccattttcaatcctcccatccacaacaactgtcactccataataagtagaaaacatatcaagagagacacagggagcaaatctggcagttagaatttcatcccaattcagagatctttgttcttggaagttctgtctatgaactttgcttttctcttccaygctacttgcaccttgcgaaataaggtgcctaacttgcagcagtgaaaactgcccagatgaatccagcctctttaggcaagctaatggcaaggataatgttcagcttgaaacaagttttccccatcttccagcatccacatagccagtctaggacaagaaaagaaaaaaaccttaaatactttttattagaaaggaaaggtacttgtttaactaactctactgtgattgaaagacaatgagaatggattttcagctactggcactatacataaatgaggaaaactcagaacattgaggaaactcagaacacgatacataaacgaggaatgcaatgcccaggagaataaagaaaagggcaatatggcataggaagttttgacatatctgttgaattttatatctctattccttaggctggggatccaggacaagccatttcagttctgatttgtatattctctttttaaacctttcacaaacacattggtttgtgatttttttttttttcagagtagcattggtagctttgatgtagaagtggaaaaagcatgtgaaggattaatgcagttcctgcccatcccccacccccaccccccacaatctgtgttataattaggactttagagagttaaagattttggcatacagtgcttgaagggatgaaactagtagcagagctcgaatggattggaagacaagaacattgagtgaaatgggagacaatgaaagacaaaagtgggttctcttcgggtttgagaaataggtatagcagaagtaagggggagagctgggagaactaaaattgttggtaaattgcttaggatatatgaaattttttgtgcgttgacaaggtatagattttgactatgagtgggtaggctgaattacactaagacaaattgaagaggtttaaaaaaaaacttgaaaaaaccctgtcttgttttcagatgggttttctatatacttgctaatattactttaagatgagggtagaatttttggtggagaataattttattagtcagggtccaaagcctttgaattttgtccaagtgtgat

SEQ ID NO: 11209 - DNA, 1259 bp, Homo sapiens
cagtcctttccacaacattatatctttgattagttcttcccattttcaatcctcccatccacaacaactgtcactccataataagtagaaaacatatcaagagagacacagggagcaaatctggcagttagaatttcatcccaattcagagatctttgttcttggaagttctgtctatgaactttgcttttctcttccacgctacttgcaccttgcgaaataaggtgcctaacttgcagcagtgaaaactgcccagatgaatccagcctctttaggcaagctaatggcaaggataatgttcagcttgaaacaagttttccccatcttccagcatccacatagccagtctaggacaagaaaagaaaaaaaccttaaatactttttattagaaaggaaaggtacttgtttaactaactctactgtgattgaaagacaatgagaatggattttcagctactgrcactatacataaatgaggaaaactcagaacattgaggaaactcagaacacgatacataaacgaggaatgcaatgcccaggagaataaagaaaagggcaatatggcataggaagttttgacatatctgttgaattttatatctctattccttaggctggggatccaggacaagccatttcagttctgatttgtatattctctttttaaacctttcacaaacacattggtttgtgatttttttttttttcagagtagcattggtagctttgatgtagaagtggaaaaagcatgtgaaggattaatgcagttcctgcccatcccccacccccaccccccacaatctgtgttataattaggactttagagagttaaagattttggcatacagtgcttgaagggatgaaactagtagcagagctcgaatggattggaagacaagaacattgagtgaaatgggagacaatgaaagacaaaagtgggttctcttcgggtttgagaaataggtatagcagaagtaagggggagagctgggagaactaaaattgttggtaaattgcttaggatatatgaaattttttgtgcgttgacaaggtatagattttgactatgagtgggtaggctgaattacactaagacaaattgaagaggtttaaaaaaaaacttgaaaaaaccctgtcttgttttcagatgggttttctatatacttgctaatattactttaagatgagggtagaatttttggtggagaataattttattagtcagggtccaaagcctttgaattttgtccaagtgtgat

SEQ ID NO: 11210 - DNA, 535 bp, Homo sapiens
ccctaataagacaagagttccttttccgaagacctttaaactgcacagattctcattttctcttctgaaagcttttccttttgtctttgggactctcctgtcagtaactggggagaaaaacattatgttctccatacccttaaaggatgtcagtgtttcaagaattwtttttcttttctaaaaattataatacaatatgaatacattttagtagcattaatttataatgcaaaacacttcaccacccttcctcccattttcatttttcattgtaagcagaactatacaagacattatagaggatactaaaataaatgaaaatcataaaccatgccgtcaagaatcttgcagtctaataaagttgtaagtaaagatgaatacaatgtggaatagtaaataactttgagataaagaaactaaagtaaatcataagactgatgcaacttgacacagaattttgattatttttgatgtctccagttttgatagtcaaaggagacactatcaatagatattgcaagggcaacaggcataa

SEQ ID NO: 11211 - DNA, 535 bp, Homo sapiens
ccctaataagacaagagttccttttccgaagacctttaaactgcacagattctcattttctcttctgaaagcttttccttttgtctttgggactctcctgtcagtaactggggagaaaaacattatgttctccatacccttaaaggatgtcagtgtttcaagaattatttttcttttctaaaaattataatacaatatgaatacattttagtagcattaatttataatgcaaaacacttcaccacccttcctcccattttcatttttcattgtaagcagaactatacaagacattatagaggatactaaaataaatgaaaatcataaaccatgccgtcaagaatcttgcagtctaataaagttgtaagtaaagatgaatacaatgtggaatagtaaataactttgagataaagaaactaaagtaaatcataagactgatgcaacttgacacagaattttgattatttttgatgtctccagttttgatagtcaaagragacactatcaatagatattgcaagggcaacaggcataa

SEQ ID NO: 11212 - DNA, 535 bp, Homo sapiens
ccctaataagacaagagttccttttccgaagacctttaaactgcacagattctcattttctcttctgaaagcttttccttttgtctttgggactctcctgtcagtaactggggagaaaaacattatgttctccatacccttaaaggatgtcagtgtttcaagaattatttttcttttctaaaaattataatacaatatgaatacattttagtagcattaatttataatgcaaaacacttcaccacccttcctcccattttcatttttcattgtaagcagaactatacaagacattatagaggatactaaaataaatgaaaatcataaaccatgccgtcaagaatcttgcagtctaataaagttgtaagtaaagatgaatacaatgtggaatagtaaataactttgagataaagaaactaaagtaaatcataagactgatgcaacttgacacagaattttgattatttttgatgtctccagttttgatagtcaaaggagacactatcaatagwtattgcaagggcaacaggcataa

SEQ ID NO: 11213 - DNA, 569 bp, Homo sapiens
ttaaccccaagaaatctttctgtaaaaatctataaaaatctggagtgttccaggatacaatttgcacattctccaatttaactaaaacacaatcgattttttgttttctttttctttggcttagcaaggttttaagatagtctctttctggccacagagggagatgatttgcctctagaataccctttctgtgcttgagagagtcacaagactgcaagctcatggaggatgagagtcaagtagaggtggtgacatctctcccttggccaacatccctctctttctctttccttctgccttcagtggcagtagcaaaagtcctccttctctttaggtagacagtcagccactacaactgtggcttcctgaaatcctcagtggagctrtgtacttggcacagatttgtcttgaagaagggactccatttctgagccagttgttgaatggggatacttagcagtacagtgaggcatttccagtaggattgttcaaccacaattgcccactttccaggcccaaaggaataattgaaggctatgtagacttttttttttttttttttttttttt

SEQ ID NO: 11214 - DNA, 601 bp, Homo sapiens
gaaagtatttctaatctgttaattttatttttgtagaacatatgaatgtggagaaaactgaacaaccctgtatctgttaatattattgaataaaagcaaactgaaacaaaaggggtaaatatttttaaagaaacttgctaaaattccatagatagcaaaagctgaatacatgtcacagggacaataaaatagaataaggatgtttgacaactttgacaaatattttactgtttctaatatcaaatattataaataataatacacatgatcatgcaaaaatgttgatcacaaacaaaaatacttaaaattaaatttattgagaacacttcattttttaaaccattcatctatctgtatgyttatgatttgtccctctcggatatgcatggtttactgcaagaagcattttaaaaagagaaaaatggattagaatgttatgagtatactgaaataaattattttattagtgacattactagaaggagaaaatgataatacttcatattattaacactgtttacttcaaaaaacactttgcactcacagactcacagtaattttgtgaagaggtcatgacaaatgctggcccaatcttaaggat

SEQ ID NO: 11215 - DNA, 533 bp, Homo sapiens
aagaaaattgggttggcatctggcaagttggcagatgtttattattgaatttgaaaatcatttttgacaataagattcttaaaagagaaaagtttaagttagtacattatacatattgttgcttcattaaacatcatcaaagatgttcatctggatacaaaaaacttactggaaccaaccaaaagttatgagacatcctatgggttttgtaagcacatgcacaaatatacacaaaataagtcaaataatgttttgtgccttgatgccaatttgcttataggtaaatgttcttcatattaattgttttaacaatctgtaaatgttaactaaattctggttaaaatatctagcatagtgtaccaaattttgccaygtactgacttggcaagttattcctaaaattgcagattctgattattctctgaataagcaaacaaaaataattgtaacttttccagcatttaaatgtatagattttagatccaaggctttgaggcaatttcgtctcccattactgtgcctaataacgtatg

SEQ ID NO: 11216 - DNA, 529 bp, Homo sapiens
gccaggtagcaggagagaggcaggagagggaaacggatgtaaggtggggaaggacaaacaagtttgtacccaccagcatcaactgcagtcaaagacgacaggcagaagtctgttttagttatttctgcctctgatgttgatggaaggaaaggggggccttcattataaaggaaaacacatacacctggttcaggagtcaaagaagctgaaggaggacccaagggaacgtggagcagtggtatgcccattcactgtttcaccacagagaaacaacaatgtgcagaaagtacaatgtgcagaaagtacaycaatgaggaacagaaagtggctgctgtctcacttttgccctacaactctcagacaagtatctctctcaagtcccataccaactggaaacaaactggaaagaaattccgggaaatgtagtttataagctgacacattgtaaagccctcacaaatactgcatttcctttactatttttctagataaattattttgtgtaccacatttctaggctatgtctaca

SEQ ID NO: 11217 - DNA, 940 bp, Homo sapiens
gggaaggaaaatgcaacataaagccttctagcagaggaaatatgaagaatagtattttctacacgactgcgctaaagggttcatttaaagaaaaaaacacttctaactattagggaaaattccaggttaactatacttaaaaaaaaaaaaaaagcccaaaaatctagtaaatattttgctgggaaattcacacttaaagaaatggtctttcaggcccctggggagaaggcattaagctgacacatttttcaaatcaaaatggctgctctaaaaacataaaccttcaaaatgaacaccacagagagcccctttcttcctgtgctgagcacgctcactacccactcrgagcgccctgtgccaaggcgaagtcaaaccccatagaaacctgatccccactgtggagaaaactgtgcagcgcccttgttttctgtcgtgctttgttttgtatttcagatgtgctggtcacatctgttctttatctcccctcttccactgtgattttgtttacaggatcccagaacaatggggactgcagaatctccacacagatgacaggagacaaggctctcagggggtagtcactgtctgcaaaacgtggagccaaaggcgtggttttcagagtagctgccaacactccaagttactcaggctcatggaccaggaatgactggaaaggagactgccttgtctggggaagatccagacccacagatgcaattttttgaaagtaatctctttacaatggcctgcccatctcctctctctgcttagaagtttttgtgttctgtaaggagccttctaatgggcttctgtctgcctgggcttctgtccctttggttctcccagtctgctctctgtctcttttgtttctttcatccctggattccaggaagtcaaggtcagggcagcttaccagtccctaaacaccattattttggca

SEQ ID NO: 11218 - DNA, 628 bp, Homo sapiens
cataaaagtgtctttattttgaagattaattatcttaactacattatcttgtatttcagaaaatgttagcaaactcaagaaacttgaatatttgaatttagctttaaacaacattgaaaaaatagaaaacttggaaggtaagactgtttcttctattatgctattatgaattaaaattgagattttaagttagaaggccaggtgcagtggctcacgcctgtaatcccagcactttgggaggccaaggcgggcagatcacctgaggtcaggagttcgagaccagcctgaccaatatgattaaaccccgtctctactaaaaatacaaaaattagccaggcgtggtggcatgcacctgtaatcccagctactcaggaggctgagacaggagaatcgcttgaacccaggaggcggaggttgcagtgagctgagattgcgccattgcactccagcctgagcaacaacagcgaaactccgtcctcccmaaaaagaaaaaagttagatttaaacagtcttgtataaaaataggtacgcttttaaaattaacattttacatacatcttatagttattcttcttataaaaattcaagcaataaggtgatacataaattcaaaaatggaagtccattt

SEQ ID NO: 11219 - DNA, 622 bp, Homo sapiens
tggtcatgctggtctcaaactcccgacctcaggtgatccacccacctyggcctcccaaagtgctgggattacaggcatgagccaccgtggctggccgagttgtttcgtttcctttttatgtaccaatagtgcctagcaagtgccttagtcttcttggatgttcaaataaatgtttaatgaatgaacagaaatttggacatttttgataatggtaatatttttaacacctttaagattcaaaatttgattagtgaacatgataaaaattaaaatagagaagaatcttgggtatctgtgttacttaattcttggccttcatcccaactgtacataccaatttctagatatttatgtagagagtacagcatgctatgacttaccctaaagaggatccccaaaacataattttcattttggttgatgcgtcaggcatctcagccagaataatttaaaatattttagaaaaaccgtaagtcgctttaaaatgcaatccagatttaaattatttgaactcacttagatactgattctttactgaattaagtcatgttgtgaaaataaagatgtgtttaactctgttactgtggactattctcactttgagaaatgtttcaaatatata

SEQ ID NO: 11220 - DNA, 649 bp, Homo sapiens
aattccctagcttatttgagaagaccccttttttctttttttttttttttttttagtgccacacatatcagtgttcccaagagatataaatgttcttcagcacccagtttgagtgagaacctgtgcagagatgatgtacagctttaatgagatgagtgctgtcagagcagcaggagccggggagttagggaagtcttcacacaagcagttctgtgtttaaccaagtctgcagtgatttgtatacaaaggaagggaagggtggtttagggctcggacggaaagaatagaakggagaatagcatgaatgcttgacacagagcaacatatatttgaggaaaatccaagagctcaatatcattagatcaaagtggggttgaatgtcaaaagatcgaagaagctctaccggagaatgatccttgaaatatctgaaaaactctgaatagcaagattgagctataaagtaggtagtaatcagttcctacatttcaaagttatataaagtccattgtactttatatttaaagctagtttttcacggggaaaacaaagattctgaatttagcaaaagctaggaagaatatgggataaactgtatggctgaatcatccactgtgtgctgctattgagttctgaatgttatttaatcata

SEQ ID NO: 11221 - DNA, 649 bp, Homo sapiens
aattccctagcttatttgagaagaccccttttttctttttttttttttttttttagtgccacacatatcagtgttcccaagagatataaatgttcttcagcacccagtttgagtgagaacctgtgcagagatgatgtacagctttaatgagatgagtgctgtcagagcagcaggagccggggagttagggaagtcttcacacaagcagttctgtgtttaaccaagtctgcagtgatttgtatacaaaggaagggaagggtggtttagggctcggacggaaagaatagaagggagaatagcatgaatgcttgacacagagcaacatatatttgaggaaaatccaagagctcaatatcattagatcaaagtggggttgaatgtcaaaagatcgaagaagctctaccggagaatgatccttgaaatatctgaaaaactctgaatagcaagattgagctataaagtaggtagtaatcagttcctacatttcaaagttatataaagtccattgtactttatatttaaagctagtttttcacggggaaaacaaagattctgaatttagcaaaagctaggaagaatatgggataaactrtatggctgaatcatccactgtgtgctgctattgagttctgaatgttatttaatcata

SEQ ID NO: 11222 - DNA, 1240 bp, Homo sapiens
cctaactcaatgtgattgctttttaaaactaagacacatatagatttactcaaggaattatgggccttccctggataccaaatcagggaaggtaactgtgtgcccatttgtacagccagcctggagggaaatttgcaaaggccaaaaatgatcattttgactgcatgttcaccgtgtttctggtggctacatagttataatgtgtcactacagtgacaagattaaagatctggcaactggagggctattcaaagtaagagagtagaggggattttgagcttccaccatcccatccaaaaaaatacaatagactaacatcaaacgtaggttaaccatatggtgaggaaagtgattagccatcgtgttttcactgaagtttaaaatagaaagaaacgctaaagtttctgtagttcaacgctgtcataggtgaggagatgaagcccagaacattaagagtgacattcctaatggttgcagaagtaattgacagtcatggatgcaaagatgttattttccttyacagtgatgagacatggtttatttgggactggatgtactgaatagagatttaaagtgcgttatcttttccttcttagtttcacctgtgattccctggatggttaccattcttttgaatgcggctccatagatcccctgacaggctcccactatacctgtcgccgaagtcccagactcctcaccaatggctactatatttggactgaagacagcttcctgtgcgacaaagatggcaacataactctgaacccatcccagaccagcgttatgtataaggagaacttagttaggtaagcagagcatattacagaaagaaatctgaagtccaatccatccattaattgtttattcattcatttattcactcaactatcttttataaggagcccattattgctccagactgtggaaatacaaagggtaagaggggacctgtcaacaggtcaatccatccattaattttgttcactcattcatttattcacccactgtcttttataaggagcccattattgctccagactgtggaaatacaaagggtaagagggaatgggcatagccagcatgaaaacaaatgaaagcaatgaaataatacgggtgccaggatagaaacccgtcagggtgcagtgaagggataaaagaaaggagatccattttacttggggaataggtaaaaataaactcactagtggtggtgatggctgatttaagtcttgaaaaa

SEQ ID NO: 11223 - DNA, 1240 bp, Homo sapiens
cctaactcaatgtgattgctttttaaaactaagacacatatagatttactcaaggaattatgggccttccctggataccaaatcagggaaggtaactgtgtgcccatttgtacagccagcctggagggaaatttgcaaaggccaaaaatgatcattttgactgcatgttcaccgtgtttctggtggctacatagttataatgtgtcactacagtgacaagattaaagatctggcaactggagggctattcaaagtaagagagtagaggggattttgagcttccaccatcccatccaaaaaaatacaatagactaacatcaaacgtaggttaaccatatggtgaggaaagtgattagccatcgtgttttcactgaagtttaaaatagaaagaaacgctaaagtttctgtagttcaacgctgtcataggtgaggagatgaagcccagaacattaagagtgacattcctaatggttgcagaagtaattgacagtcatggatgcaaagatgttattttccttcacagtgatgagacatggtttatttgggactggatgtactgaatagagatttaaagtgcgttatcttttccttcttagtttcacctgtgattccctggatggttaccattcttttgaatgcggctccatagatcccctgacaggctcccactatacctgtcgccgaagtcccagactcctcaccaatggctactatatttggactgaagacagcttcctgtgcgacaaagatggcaacataactctgaacccatcccagaccagcgttatgtataaggagaacttagttaggtaagcagagcatattacagaaagaaatctgaagtccaatccatccattaattgtttattcattcatttattcactcaactatcttttataaggagcccattattgctccagactgtggaaatacaaagggtaagaggggacctgtcaacaggtcaatccatccattaattttgttcactcattcatttattcacccactgtcttttataaggagcccattattgctccagactgtggaaatayaaagggtaagagggaatgggcatagccagcatgaaaacaaatgaaagcaatgaaataatacgggtgccaggatagaaacccgtcagggtgcagtgaagggataaaagaaaggagatccattttacttggggaataggtaaaaataaactcactagtggtggtgatggctgatttaagtcttgaaaaa

SEQ ID NO: 11224 - DNA, 523 bp, Homo sapiens
aataatagctatcaataaggtacatgacataatgaaaaatacgaactgggaaattgtgtgtgtatatatatattgcacagtatatgcaatatgcatatgtgtacatatatgatatatgtatatgtgtatacatagaaatatatatgtatatctgtatgtatatgtgtgtatatatgtctatacatatacgtattccatatactgtgcaactatattgtcaatgtctacctatttggaacctctgaaaaacgccatccttttaacattctctatacagaaatcgggtttaaaatcatcacatggtgtgtatgtggcaaagtgaatagaaagaatgataaatatatgaattaaagttatccaatagctggtccacgtatttaagttagaactctttaaaaaaataataaaatagagtggagagaaatacatcagagcaggctgccawgatcccagccccaatcctctcagtagtaaaaggacaaaaagacacatacagatgagcttgatgaatttaaaatatacc

SEQ ID NO: 11225 - DNA, 1456 bp, Homo sapiens
ccaaaaaatgttgytgttcaccaacacagagaccacagtttcagcagaagcccatcacaggagacagagtagggtgaggtaagggaccccactccatgtggctgagggcaggcacttctgctccctccatcctcctcccatcctcagcttcagacgaaatgtaacaaatgcatttctgggacattcaaacacagtatttgagagcataatgcagggaaaaaatagaatcatttttctgtctctccttggggggttgaatttacatagtgcaccagttaccctaagatgcacagggtactatgggactcattggaaggtgacttgggggctttgaggggattggatggaaggcattgtaggcagatggtgactgagctccaggaggacttggctcaggccatctggatgggtctatcaaatgaccatttttgtttctgttcatctgaaccctctttgttcagaccctgatgccttgagctggtgggttgggagctggacatatgggttgcacccctcattctctctgcatgggacttctctataccctgtgctgaggcataaagctgatcatccccaccccacgaccgtggctccttagtcttaagcactctgcagtaagcagaattttcccctctcacaatttctctctgttggttccttgccatgtcccagaaaccagggttacacaggagtcataacccctccataccctctcctctcttccagcccaagctaattttcttcactatgttcacgaatacacataaatcttaactcttgaaccagtaaaaggggctctcttaaaatgcttgtggatccttttcagctcttgggacatgcacatatataataaaatatagcgtcttgtgataattgaccaaattatttattgcaactggggagagtgtgagctcatttgaatgagatctcgaaggatagtagtagcagtcatcatagcagtagtaatagtaatactgatagctcttctttattgagagcttaaatgtggcagtcatggtgctaagtattttcaatatatcacctcttatttctcagaacaattcgctccctaacagacacacctaggcaaatgactaccaggtatttgttcacaacactcacatatattctttcctagcctaatattaagtatttttagtaacctctttttattgatggggaaatttagacttaaagtgactgaataacttggccagattatccaattgaattaagtgacttctcttcaattacaaggcattcatgtatcacagcattttggctgaaaaatgaagtaatttatgtcctaaaatttaaattttaccatctaaaccccaaatttaatagcattaattgaggaagacattttcacttatttgcataaccaaaaatcctacaaagttttctaacagattctctgggaaatgaatttgcaaccctttgctttaattttgaa

SEQ ID NO: 11226 - DNA, 551 bp, Homo sapiens
tagaagtctatttatattttttgaatgaaagagtaagttgattaatttctgaagccagcacaaatttcctttatgggtatatagtcctgttttcttacgagacttctttactaaatagaagacaattaaggtcacaaagtttctgccctaatgctatttatagtattaggagtacacacaacaagatatgttatgttatatatataacagaatcagtaaatataaaactctgataaaattacaaagagaaataacaaggctttgtgagggagtatagcagacttgggataacttttctgaggaggtgacatttatactgaggtttaaggtggcttggagttgcccggaagagtgggtgtaagagccttctaatcagagagcatagcatgttcaaaggctctagaataggagagaggatggtgtgttctaggcactgaaaggaggcttgtgtggctatgatgcagtgatcagggcaagagtatatgaggtkagagttgagaaaaaatagccaggggctgggtcatgggaacctcgaagattaagttacagga

SEQ ID NO: 11227 - DNA, 542 bp, Homo sapiens
agacctcactccccagctacatgccatcacctctggtgctccttgatggctgaactcaactggagcccagtgaccaaggaagaacagtccatacagggcagcatcctggggcataacatagaaaagagtagaacgtgaatctggaagaaagatatccagcacatcaycttaacatttaatcactccctgatctatcctcaaatgacatttctactttactgcaaatcccctttacactttctttaatcaagccaaactagaattctctctaaatattcagagattttttctttttgcctttttttccacatgttcaaattaaaattttaaattccataggcttctagcaaaaacttaagatgacactaggtgtgaatttcatcccttctaacatctctgtttccaaacttgtctgtcattctggtaggttgcattaataactttagtccttcactgctcaccatatctttgtggtgcccttgcactctgatattgagctagacatatgaccaatttggggcaatggaatgaggcagaggtgg

SEQ ID NO: 11228 - DNA, 542 bp, Homo sapiens
agacctcactccccagctacatgccatcacctctggtgctccttgatggctgaactcaactggagcccagtgaccaaggaagaacagtccatacagggcagcatcctggggcataacatagaaaagagtagaacgtgaatctggaagaaagatatccagcacatcaccttaacatttaatcactccctgatctatcctcaaatgacatttctactttactgcaaatcccctttacactttctttaatcaagccaaactagaattctctctaaatattcagagattttttctttttgcctttttttccacatgttcaaattaaaattttaaattccataggcttctagcaaaaacttaagatgmcactaggtgtgaatttcatcccttctaacatctctgtttccaaacttgtctgtcattctggtaggttgcattaataactttagtccttcactgctcaccatatctttgtggtgcccttgcactctgatattgagctagacatatgaccaatttggggcaatggaatgaggcagaggtgg

SEQ ID NO: 11229 - DNA, 541 bp, Homo sapiens
tacatttgttaaccgtagaagcctaactagatacatttcttgccaactttaactgggcttgaatgtgtgggtgatctgttgtctgattactttctttctgttactgtttctctgtagagattggattcgtagattaaacttgagaaacaaaccataaaagtrgaaggccctctttaacagtaggtatttgaagtgttataaaaaaaaaaaaaggtgaatttttcttttatttctcagtttgaaagaacagctttattcttggttattcctaatgtccacctagtcctcttttacttttcttggtagggttagggtggcatggggaaatgggacggtatcattttgtctttttaactttttttttttccacctacagcagctgtttttaccctgtggtcagtcaggtactatatttagtttgcagttgcactgctgatcgacccttgatggccccagttggaagttgtttggggggaaggaactaggagaggccagggcctccatttaaaccagtgtctgtaagtgtctccttggaaagaaa

SEQ ID NO: 11230 - DNA, 542 bp, Homo sapiens
attgtttctgttaagattaaatcaatagaggaataaatagctatcttcaaacataagacccaaaggaaaaagatttatagtgatgttctgtcaccttattttttacctgtgactttgtaccattaactttgtcactgagatgttttgattaaaatttttagcttgcttttcttgttttgttaggacactctttttttcttgaattgtttttatcagctttcgtttgcaaggctagtgatgattctcttgtyctgtataaagtattgttgactcatttctgaagggagttttagtaatttaagaggttataagtttttaaataaaaggtttattaatttatatatattaaagaggcattttaaaataaaattttttttaaatgacatttttacacctttcaattctaggtttaaaaaataagtggttcacagtagttcttgcagaagaatattttcttttacatagaatttttaagctgaagagaagtagtagtaggtccatgagatttatgatctgtgcttggcaggtaaacctgcttccaa

SEQ ID NO: 11231 - DNA, 542 bp, Homo sapiens
attgtttctgttaagattaaatcaatagaggaataaatagctatcttcaaacataagacccaaaggaaaaagatttatagtgatgttctgtcaccttattttttacctgtgactttgtaccattaactttgtcactgagatgttttgattaaaatttttagcttgcttttcttgttttgttaggacactctttttttcttgaattgtttttatcagctttcgtttgcaaggctagtgatgattctcttgttctgtataaagtattgttgactcatttctgaagggagttttagtaatttaagaggttataagtttttaaataraaggtttattaatttatatatattaaagaggcattttaaaataaaattttttttaaatgacatttttacacctttcaattctaggtttaaaaaataagtggttcacagtagttcttgcagaagaatattttcttttacatagaatttttaagctgaagagaagtagtagtaggtccatgagatttatgatctgtgcttggcaggtaaacctgcttccaa

SEQ ID NO: 11232 - DNA, 542 bp, Homo sapiens
attgtttctgttaagattaaatcaatagaggaataaatagctatcttcaaacataagacccaaaggaaaaagatttatagtgatgttctgtcaccttattttttacctgtgactttgtaccattaactttgtcactgagatgttttgattaaaatttttagcttgcttttcttgttttgttaggacactctttttttcttgaattgtttttatcagctttcgtttgcaaggctagtgatgattctcttgttctgtataaagtattgttgactcatttctgaagggagttttagtaatttaagaggttataagtttttaaataaaaggtttattaatttatatatattaaagaggcattttaaaataaaattttttttaaatgacatttttacacctttcaaytctaggtttaaaaaataagtggttcacagtagttcttgcagaagaatattttcttttacatagaatttttaagctgaagagaagtagtagtaggtccatgagatttatgatctgtgcttggcaggtaaacctgcttccaa

SEQ ID NO: 11233 - DNA, 527 bp, Homo sapiens
gagattatgtcactgcactccaccctgggtgacagagcaagactccatctacaaaacaaacaaaaagaacaaatgacaacaacaacaacaaaactaacaactaagattgatccctttttcttcactgttcctagaagttctaggggtaagaggggaagacagggatctcacattccatggatgacgttgttgcccttgggaagcctccaaggtcaccagatgaaggcaagatctccttagatgattttatggctttggcataattactgtaaaactatcaacaaaagcaagcttgaccctcctcagggtgcagtgtgcatttgcctttgggatgaaccaggtgaggcagtatcggggagggaggacggggtacaggtgccgcccttcttccctggtcccagtcaacaacagacccctgactgcagacgatgactccatcctctcgggagggacctgggggactcagcttgagaaaccagaaaagccamaaggaggctcctaccacatgggtgagacagctcacatcc

SEQ ID NO: 11234 - DNA, 632 bp, Homo sapiens
tatcatcagggaatgaaaagcctaggtagacatgcaatggttctgaaattctcccatctggctgaagtcacgctagttcatgagttaaatccatattcttgttagtagacacagaagacagctggagtgactgttccatgatgccmtggtgtccctccaaatatctcttcttcaggggaattcagtatcaattcctttagcctttaatctgccatccagaattttagttattgatctcttctccccaggttccttttcacgatttctacaacttccaggactcagactggcatgatgctctcgtgacgatgaggtggcctctgttttcagttttcagatgaactctgttttcaatgggatatgacttcacagtctttcttgttctcttgtttatgtttcatattttatgcctcataatcccttccatacactatttttgtgacagtactttctcctatttcatgtttcaaagtacagaattaaactttgtcatttcatattttatatagcacatttcctttaaaggccttcttttttgagacctgaaatggcagcactagggccctcatagaggcagaggaaaaggtataattaatgattttctctgaaatttgttgagtccagggtctact

SEQ ID NO: 11235 - DNA, 549 bp, Homo sapiens
atgaatcaaatgcaatgaggcattacattataattcagatttttctaccagcaggagcttatgtgttccagagttccaagcccccagcagagggcaggatgccctttcccatagaagctgaaggcatctttgagttataattaaagtgatcatacctgggtttgcccaggacagttgttttggtacaattagtcactgcaacccctttcactcacctaagtgtcatgyttgtatggtacatgggcagcctaagtgataatggaaatcaaccacagtatagaacatcttttctatggagaaaaaaaaaatgctccagtttacatatgaacttggacacaaagtgtataattagagattgtccatgtgtgctaatatctatctgggtccagtaacattgctttctagccctccccctctttattttgttttactgttctgcctctgaaaggattctgaaacatccctagagttattatgcctttcaataaacaatatgctataattcttcaattttgacactattttggaagtgtcacagtgaaaacaaga

SEQ ID NO: 11236 - DNA, 536 bp, Homo sapiens
atgggcttattgtctcacttggtttagaaatctaggactacgattagcttgtgcaaaaaattcacgcaacaagtatttactgagtgcttactatgcatgatgtacgcatggtaagggactttggggaatacaaagaaaaaccaaatatgttccatgctctaaaagtgcttccagacaaaaacagtcaataacacaggggcatgtattattctaaaacgaaggaggcagtgayatatgttctacaggggaaatgacataattacaatgctagggaggctaggccaacagaaggctagatctggtactgggacaaggtggtggtggtggcagatattaagaaagacttcatgaaggagatgccatttcacttacgctcagggtaaatgaggaatggaacatgtagaggtgatgaggagggcaattaggtgatggtacagcataaacgaagacacaagacatgaactgtgtaggcacatacaaggtagatactggaaacataactagtaaaggtaccaagtcacccttctttcgagcag

SEQ ID NO: 11237 - DNA, 536 bp, Homo sapiens
atgggcttattgtctcacttggtttagaaatctaggactacgattagcttgtgcaaaaaattcacgcaacaagtatttactgagtgcttactatgcatgatgtacgcatggtaagggactttggggaatacaaagaaaaaccaaatatgttccatgctctaaaagtgcttccagacaaaaacagtcaataacacaggggcatgtattattctaaaacgaaggaggcagtgacatatgttctacaggggaaatgacataattacaatgctagggaggctaggccaacagaaggctagatctggtactgggacaaggtggtggtggtggcagatattaagaaagacttcatgaaggagatgccatttcacttacgctcagggtaaatgaggaatggaacatgtagaggtgatgaggagggcaattaggtgatggtacagcrtaaacgaagacacaagacatgaactgtgtaggcacatacaaggtagatactggaaacataactagtaaaggtaccaagtcacccttctttcgagcag

SEQ ID NO: 11238 - DNA, 566 bp, Homo sapiens
actgatgttaactatctctgtttaaataaagtgcatcttaaacaaaatctatgccacaccaaaggttttattttttttcttaagaattctattttgtgtttatatctagaaaaggaatttaatgaagtattgtgctttctaagcccacacgtattattacacagagaaaatctgatcattcttgtatcttcagaaagggtggcatcgtgtcaaattaaaattttggatttcttaatcagccagtgatttataagacaatttggggacaatttactttatgagtgcctcaatttaccttttcaacagcaatgaaaacttcgtgagactcttttgtatttmgtgaaatacactggaacaaagagatgaaaacagcgagtgaactataaacttctcttctattcttattatagaaaaaattactccaagccagcaatgggcaaaatatgtaaatataatgcccttaggtatacatgtagtgcctgttgatttcaagggaagccatgcaaatgtatatgaatagaatttgattctgagtctcttcagttggctcaacaatttaggttttc

SEQ ID NO: 11239 - DNA, 900 bp, Homo sapiens
ttaatagcttagtccccttttttttctgaattgttaggaatcttttctgtgctggcctgtagaaggcagaaggagagcagtttgggcagataagaaagaaatccatattgccaggaggaaaagttaataagcccttggtctctttttaattattttctgttgtttaagaggaaaactgatctttgctcctgctaacattttttttaacrtctcttgcccaaggtcatgtacagaggccaccttgggagattctaactatgagccatttcttgcacactggcaaggcagaaatactttttatttaaggttattttattccctttaatttatcattttgaaatctacctctttgaaatgaagcctcagatcataagaaaaatgagcaaaggcttatgattgctatgtggctaattgagatggacccacccaaatgaacctaccctgtccttgcctaggcaggatcctgtcagctggtgactggaaatcagccactacctgtggaacctggtagcagcaaagtgaaaaacacacatcctggggaaatcctaccaaggcgttccagatttctcaggtagatccctgtcatgttttccaacctgggggatggtccctgccttgatgccatttgaaagataatacggccgggtgcagtggctcacgactgtaatttcagcactttgggaggccaaggccggtggatcaccaggtcaggagaccaagaccatcctggctaacacggtgaaacccagtctctactaaaaatacaaaaaattagccgggcatggtggcgggcacctgtagtcccagctactcgcgaggctgaggcaggagaatgatgtgaacctgggaggcagagctttcagtgagccgagattgggccactgcattccagcctggggg

SEQ ID NO: 11240 - DNA, 594 bp, Homo sapiens
gtataaagacaaacggtatcccatcccacttctaccagggagagcaaaggttaaccactgaagacaattttagacccttatcagccagcaatgccaacagagaaacctacatgaacaagcctcactaaccagcccttatctgccatctatttcccttgccacaagctgccacccctgaagactcaaagttgtttttctttgccttatcacttctctagaaatttattttttgttgttgaagatgctatataagctggaattcaaagccatgtatttaagaactactgactccctgggtgtgacccatgtatgtatgaaacatacagttttaataagctgctgtttgtttttctcctgttaatgtgttacagggktctgttccaactaagagcttaggagagttggaagaaaaactgtttttcttcctctacactggcattaggcccaaacaatggtagcgttcctgccatggcccagctaacctgctgacgtcctgacagctccctggatgccccagtcccccaaaattcagtgagctgagccagcaggaaggtggactccagggagaccgcagcaacatggcaccccagctca

SEQ ID NO: 11241 - DNA, 525 bp, Homo sapiens
atgagccaggctatttgagaatgggtgtcagcttttatgtccattcaaatccagaaagggttgaagcccccttcaaaacacagctcagccctctactcacagagccctccggttcctttgggtccaggaacacggagtggaggaggtcaatcctgacatctgttctttgaacctgtcaacgttcctaccatagtagcaccagatatactgattggagagattggatgtgagcagcaaacctgcctagcagtcctccaggttaaatgtacacagtgtttccacaaaacacagtcaaatgcccttggaaggatgtcaaaatatgttgcttgatcccaaraatactctcccaaagatgctcccaaggattgtttcagactggccttgtgttccatgaagaccagggcagctcagattaatatcaacatttcacatactctaacaacaaaatgctccacaaaaaaatgctgtctatcaaaaaagtacatgaaacacagactttcaaatattaagaccagatgtcggaaa

SEQ ID NO: 11242 - DNA, 525 bp, Homo sapiens
atgagccaggctatttgagaatgggtgtcagcttttatgtccattcaaatccagaaagggttgaagcccccttcaaaacacagctcagccctctactcacagagccctccggttcctttgggtccaggaacacggagtggaggaggtcaatcctgacatctgttctttgaacctgtcaacgttcctaccatagtagcaccagatatactgattggagagattggatgtgagcagcaaacctgcctagcagtcctccaggttaaatgtacacagtgtttccacaaaacacagtcaaatgcccttggaaggatgtcaaaatatgttgcttgatcccaaaaatactctcccaaagatgctcccaaggattgtttcagactggccttgtgttccatgaagaccagggcagctcagattaatatcaacatttcacatactctaayaacaaaatgctccacaaaaaaatgctgtctatcaaaaaagtacatgaaacacagactttcaaatattaagaccagatgtcggaaa

SEQ ID NO: 11243 - DNA, 623 bp, Homo sapiens
cactgtatccataaatatgtatgtacaattatgtgtcaattaaaataataaaaaagtgtgaagttttgagggccaagaaaaaaagaaaatgagtaattataagatgaaagaatggaagaagtgatcaatggaatagttcagaaggaatgctggatgagatgaagaatagactggaagaggtgccattgttggggaggagaggaggaygttaaattggaaaaagaatgacggtgtatccttggaaattagaaatcatggacaaatcatggaaaatgttcagagaaattttgaaagatatggatagtaacatttttaaagttttaattaacttgttttattatttgtaaatttggaggcagttaactcactctaataatgagacagaatggctgtagggtcttcagaaaagtgaaaaacctgcaattaagaaatgtttgggaatgtatttatgtactgagatttatttacatatgaataaaaagcactgtttagcgcaaaatattcaagtgagattaggtaatatgatactatgaattttactgaaacaagaaacatgactaatgaatttctccaatatctagtgacaaaacatctccaccattttcatgctgtaagagggaaag

SEQ ID NO: 11244 - DNA, 549 bp, Homo sapiens
tcacaacacatccattagaataaatcacccatttcaatgataaaatggataacagtatttaccttatagaaactcactatggaggaatagaggaaaactgttttccctttaataaaatgaaatatatgcaacaagaacaacttagaagttatttctttaaggtggaaaacagtgacaactgtgacgtcggaggtcagtcatatatgatgaatagaatatcttctaataagaaaaaatttaatctgttccccaataatttcctcagggtttctataaacgcatggcttttctcatataacatcatctaagcttgtaaacaaccctgtgaagcatcagtcacaactgcacacatcatgtgtgccatgtgagtgacatcgtgtgtgccatgtgacatgtgtgtcccatgtgagtgccatgtgcgtgccatgtgmgtgacgtgtgtgccatgtgggccatgtgcatgccatgtgagtgacatgtgcatgccatgtacatgctgtgtgtgccatgtgggtgacatgtgtgtgccatgtgagtgacatctgcatg

SEQ ID NO: 11245 - DNA, 549 bp, Homo sapiens
tcacaacacatccattagaataaatcacccatttcaatgataaaatggataacagtatttaccttatagaaactcactatggaggaatagaggaaaactgttttccctttaataaaatgaaatatatgcaacaagaacaacttagaagttatttctttaaggtggaaaacagtgacaactgtgacgtcggaggtcagtcatatatgatgaatagaatatcttctaataagaaaaaatttaatctgttccccaataatttcctcagggtttctataaacgcatggcttttctcatataacatcatctaagcttgtaaacaaccctgtgaagcatcagtcacaactgcacacatcatgtgtgccatgtgagtgacatcgtgtgtgccatgtgacatgtgtgtcccatgtgagtgccatgtgcgtgccatgtgagtgacgtgtgtgccatgtgggccatgtgcatgccatgtgagtgacatgtgcatgccatgtacatgctgtgtgtgccatgtgggtgacatgtgtgtgccatrtgagtgacatctgcatg

SEQ ID NO: 11246 - DNA, 1209 bp, Homo sapiens
aaattattaatcaaactagtccaatttctttaagaaaacattctttcttctctctgaagatttcaaagaagtgaactaatatcgcatattaatctaacacgctgtagtggcaacaacactgaccgcatcagccagacctgcggccaacgtgaaaccacgcgtctcaatttgacacgtgaccttggaactgttctttaccttctgcatctcacttagaaggaggagtaaaaaataaaatgtatctaaaacacctggcacataaaaggtacctgatagaaactaatttcctgcctccctatgttcactatcttataagtgagtgagtattaggaaagggaaaaacttcctcaaagcaagatcactatgagaaaatcgaagaccaatccaccactgtttggctctcgagtcctctagaagctctgtggcatattcaagttaaaaatgaagcactaattttctgctccagccccagcaggctcttgcatcagagctcgccttcatactttcctctgagcaacttaacagtataagcacagcataagtccttcacaaatgttcctttcagctctttcacaggaactataattttgtgaccaaccatagtgcacagtaaatcaaaaaaaaattccattacttgaagaaaaagacagtggagtgtaaatctgctaataaagaacccccckgcactggaaaatgcatagtaagctacaggacctactaaggtgtttttctatttccaccacaggatgcaaatattatatatgaaataaaatccatgaaaacaatttaaaatatttacctgcctaagctttcttcagaggccttatagagcacatcaaataatcttaacttgagtcagtctctagatcactgctgttggccacaagcacttatgggtgcttaactccttcaaacgaccacgcagctcaggagtgactacagtagggaaataggtctagctaagcacacagtgtcccagaagcacacaggggacgggaacgatgacgcctatttactagcaagaaacagaccaaaagagtggttaaggcccacccatccaggcccagatgcagctggcgaggaacctaagtctctatctctcagcctattgtccacctctctttgtggaagttatatatcaccagcaatgccccacaaaggtgaggaaacacatttcctatccctaatacaccatgtctaatatgtttc

SEQ ID NO: 11247 - DNA, 540 bp, Homo sapiens
gagcatgggaagagggcaaagcaaatggagacggtggtgagggacctttggaagctgaggggctcacagactcacattaccttttcattcttttctccttcaaaaattcaaagatgaacaattttttttctctgagcaaattatcccatttaaacattcatgaattaaccacattaacctactttcaatgcaaagaagaaaaatggtttctgtctcatacatttcagctgtcttgtcagtgggttgtcaagttgaaggatttcttttacattccyatgaatcccttattctctatgaaagaaactttacttcgaaatggaaagtaggtttgggttcatctctgatttttgactcacattatacaacctctgtggttaagctgtgagaatgtataaaattcctgtcagccattgctggggcttcagagcatgactgggtagtgcccaggtgggcagagcactgtctgataatctttgctccctaataactgaaatccagaatagataatattctccattcattcaaaatgtctgtcctgtg

SEQ ID NO: 11248 - DNA, 538 bp, Homo sapiens
tggaaaaagaaataaaaacggaagtcccaactaaagaaactttgcagagctggtacagctgtacagattgaagggactcagtgtgatgtaagctaaattaagaaaaaatgtattcacatcattccaacaaaacttttatattataaagacaaaggcaattattcagggatccaggccaaaaacccaataaaactaaaccaaagcaaataaagagaaaattaattacaaatgaccaaaaatcagactgacatcagacttctgcaaaaataaatgtcagaagacactayagctgtgtccatggaactgcgaagaccacaaaaatgtaaatgaagtcaagttacattacgttcgaatagatttggagtcagggcataaatccctgctgtcccattgatccatgtgcctttggacaagtcacttacatgccccataagatggttgtctcaattaaatgagataatgcacaaaaagtactcagaatgttcactccatgccattttaacttgaaaaactcagttaaagtgggattcgaaatcag

SEQ ID NO: 11249 - DNA, 1170 bp, Homo sapiens
actgaggtgcttcccttgggagcaggtaaaatgaacacacagctgaattcttttttcataggtctccaaaatcagaaaaggatatcagatgaggtaggagtcttggtggtaaggtgggacctctttggcctcagacagaaggtatcaggagtagctccagcacatgagggagatgaaacctgtgtgtcttctcggttgagctcgtgtggcctttcttttctgtttttctgagccgctcctctgagtgaacttggatagtaaccagagctgcattttttaatatctcagcctgagatgctgacaaccactgcaggcaccatgaatttttaatgtggtggtgattagaaggctggctagggcctcatttcgtttcattggactgctgtgacacttgtttccttcatggtatttagacttcctgggttatttcccaatccagactcatgttctgtttcatgagtgcccattgcacccatgcacttattgaggtgtgtttgaaagcagaatttaaaaatttgatctcagttattgaacatcctacgctatttcagaaagggatgcttcttaaattcctgaaaaggaattcaataaatccaggtcaacaaatattaaccaagccgcagctttgaaagtccagctcactgaaagaactacagcagtgtccattgggtagggatgcagaagtgaaccataggtaatccctgcctyttgcggtctggtggtaggaaaagatctgtgtgtgtgtgtgtgtgtgtgtgtgtgtgtacatatatacacacatatatacacatatatacacatataatatacatatatacgtgtgtatatatacgtgtatatatacatatatacacatataggatgtggtagaaaatactgcagtagaggtacagagaattgtgggcaaggaaggattgtttccaactaaaggaagactttataaagaaaagtaatttattgtaaagcctttaaaaatatgaccaaaaaaaaccaaaaaaaaagatatgactttgataaatatctatttattcatttattcattatgtaaatactatgcatctactgtgggcctccctacaaattcatgcttctctgtgcgccacaacagaggagggaggtggagagttgagtacaggcatctgaaatgcttccaagagaacgtggtatgca

SEQ ID NO: 11250 - DNA, 638 bp, Homo sapiens
gtgtactcctaacctaacctttgggacatgtgcaataaataattgatacagtttatgcttccattttgagaattcgtagtgatyggtgttcaaagtaacttttcattgtggcaaataatagttcagactcctttcttcttcttttttgtttttagatcatgtacaaaatgaagaaaactatgcacaagttcttgataagtttgggagtaattttttaagtcgagacaaccccgaccttggcaccgcgtttgtcaagttttctactcttacaaaggaactgtccacactgctgaaaaatctggtaagacatttcatatgtgagtaaaaagaattacagcctttccaaaatattacgtcatatagagaacatttcaataatccttccccctcaatccttggtcctaggggtgagaaagaaaaaacaaaaagctttttagtcctaggtaacttccacacctcaactaaaaagctttttagtcgcctaggatttgcttaaagaaaatcccattgtgaaattcctggaatttgtacctttggcccagctgatagagtagatttatcgaagctgagagagaaactgcttaacctgaattctcttccacatctctaccattgatttttttttaaagataaccttt

SEQ ID NO: 11251 - DNA, 638 bp, Homo sapiens
gtgtactcctaacctaacctttgggacatgtgcaataaataattgatacagtttatgcttccattttgagaattcgtagtgatcggtgttcaaagtaacttttcattgtggcaaataatagttcagactcctttcttcttcttttttgtttttagatcatgtacaaaatgaagaaaactatgcacaagttcttgataagtttgggagtaattttttaagtcgagacaaccccgaccttggcaccgcgtttgtcaagttttctactcttacaaaggaactgtccacactgctgaaaaatctggtaagacatttcatatgtgagtaaaaagaattacagcctttccaaaatattaygtcatatagagaacatttcaataatccttccccctcaatccttggtcctaggggtgagaaagaaaaaacaaaaagctttttagtcctaggtaacttccacacctcaactaaaaagctttttagtcgcctaggatttgcttaaagaaaatcccattgtgaaattcctggaatttgtacctttggcccagctgatagagtagatttatcgaagctgagagagaaactgcttaacctgaattctcttccacatctctaccattgatttttttttaaagataaccttt

SEQ ID NO: 11252 - DNA, 638 bp, Homo sapiens
gtgtactcctaacctaacctttgggacatgtgcaataaataattgatacagtttatgcttccattttgagaattcgtagtgatcggtgttcaaagtaacttttcattgtggcaaataatagttcagactcctttcttcttcttttttgtttttagatcatgtacaaaatgaagaaaactatgcacaagttcttgataagtttgggagtaattttttaagtcgagacaaccccgaccttggcaccgcgtttgtcaagttttctactcttacaaaggaactgtccacactgctgaaaaatctggtaagacatttcatatgtgagtaaaaagaattacagcctttccaaaatattacgtcatatagagaacatttcaataatccttccccctcaatccttggtcctaggggtgagaaagaaaaaacaaaaagctttttagtcctaggtaacttycacacctcaactaaaaagctttttagtcgcctaggatttgcttaaagaaaatcccattgtgaaattcctggaatttgtacctttggcccagctgatagagtagatttatcgaagctgagagagaaactgcttaacctgaattctcttccacatctctaccattgatttttttttaaagataaccttt

SEQ ID NO: 11253 - DNA, 479 bp, Homo sapiens
gttaagtaacatttttggttttatggctgactttgaggaaaaggggttctggtttctatgaccttctttggttaagagggmttctcatttctgtaactcgcctcaaggaagaatgggactgaggacaggagagcaggaaaaggtcagagaaatgcttttccttctgaggctgcttctgaggtcttcatttgggagtattgctttctaatcccaacaatattatatccaaatagatcatattcaaacacctcaattgtcccatagatttttttcaactttttatttttgtttttgatccaagatccaaacagcttcatgcattatatttgcttgtacagtctcttaaattccttttgatttagattagaacattctccctgcttttccacctcattcctcatcacattttcttttaaacatctaggagcatgctgggtgcggtggctcacacctgtaatcccagcattttgggaggccga

SEQ ID NO: 11254 - DNA, 479 bp, Homo sapiens
gttaagtaacatttttggttttatggctgactttgaggaaaaggggttctggtttctatgaccttctttggttaagagggcttctcatttctgtaactcgcctcaaggaagaatgggactgaggacaggagagcaggaaaaggtcagagaaatgcttttccttctgaggctgcttctgaggtcttcatttgggagtattgctttctaatcccaacaatattatatccaaatagatcatattcaaacacctcaattgtcccatagatttttttcaactttttatttttgtttttgatccaagatccaaacagcttcatgcattatatttgcttgtacagtctcttaaattccttttgatttagattagaacattctccctgcttttccacctcattcctcatcacattttcttttaaacatctaggagcatgctgggtgyggtggctcacacctgtaatcccagcattttgggaggccga

SEQ ID NO: 11255 - DNA, 667 bp, Homo sapiens
cttcagcatgaaattcaaggaaataatcttcataacctgaccctaggcaccgttttctgtgtcacgttggttctcctacattctagctcagtggttctcacatataaacttgtaactaaaacaacagccacaacaacaacacaaaacaaagaaccacttatggagcatgtttgaaatgcagattatcaaatcctacycctgagactcctgccttactctcataataccttcacttgagcctgagctcatggaaatgtgtacatatttattatcatttatctctgtacattattgtaatttattgcctaccaacttcatggagtccagtgaattccatgagggcaagaagagtctcagtcatctttgtactgaaggcacagtgccttgcacatagttaacttgaggtgaatattgaattatatgtgtgaatgaataaaacaattatttgaaataggttttatttgaaatagattttacgtgaaactattcacataaattttatgacattgtacatgttgctaacttaactagataagctcttttacatttgttatataaaatacatttagtcctaaaaaagattcagtgtcaaaagacaccattaaaagagtgaaaagagaaaccacagactgtgaaaatctattcctgattacatatatctgacaaa

SEQ ID NO: 11256 - DNA, 549 bp, Homo sapiens
gaatagtttgcagtgtattactgttcaaattcagttatagttacttgagatgaatatatgctgcaatttgagctatttattttggataacgaatacctttttaaggaagcccaggtcaagcatcatatgtaacatgtagttaatattctcatattgaaagcttgagcttgtatttgttgttacatattaaatgagatagttcagatggttgtcacaattgagattatgtgcaggttaggtagtattttgatctcagattttatagagcaggactagaaccttgstggctgttcatttcagccctcttaaggatggaggttaatttttcacaagaaaccccctactgctatttacctctcccttccaaaaatgttttcttaagggtagtttcagttctggatcattatctcattacactacttgggaattctggtacaaaatttcagaggaccgtatttacacctctttagtgtaaacacagttattgtgataatgcacacagaaggtatttctaccccttctctaataggtgagctgcttctttacaca

SEQ ID NO: 11257 - DNA, 799 bp, Homo sapiens
aggttaatttgtgctgacacatatgttctctctctttgtatattaattatctattgttgtataaccaattagtcaacacttagtggcttaaatcaagaaacacttattatctcatggtttgcatgagtaagacatgcagaagctgcttagctgggtagttatggctcaaggtctctccagaggttgcagtcaagataacaggcagagatgtaaccttctgaaagctcaacgggggctgggccatctgcttccaaaatggcrcactcacagctattgccagaagccttggtttctcactaactcttagcagaaggcctcagttcctcaccacatgtatctctccatagggctgcttacatgtcctccagaatgagtgttccacgagagggcaacaaggaagatgcaatgccttttatgaccttcagagtcacacaccatcatttttgcctcatcctgttcattagaaacaagtcactaaatgtggctcacattcgaagggaatagaattactctctaccttttaaagaaaagagtgtggacagaattttaaatcaccacacctggtttttctagttgctaagaatatatatttacaagatagattgctagggttatagtctacaagcttgaaatagagttgctaatgattctacaaaaaaaaaaaaaaaaaaactgaactcatggccaccactaacactttgcagagttctaactagctgtcttgctgtactgcactaacataagtgattcaaaattctttcaggatgtaatatgtgatgtcagcatcccaaaatcattt

SEQ ID NO: 11258 - DNA, 1187 bp, Homo sapiens
gttaaacctcttaacacatgtaccttcatttctttggaaagcagttttatcagtggaccctgttttaaatgtatcttatttctgccagctttatatcttttcctaggtcagaaagattattcaaaatattgttaaatcaaaaggctaagttttactttatttgcaacataagaattctgaaggactaaataatgaccaatggatcatatattgcctaacttcactgaataatcttcaygatgttttatttttattgattatatttacattgttctaaggattagattctgtagaagaggaaaattccaaccacctaatgattttcttgatgtgaatagaatataaatgtaaataaaaacatttatctaaaaatatgagattagataaaaaatgagattagatgaaaaatatgagattagaaaaatataaaattagattcaaataaaacacatttaattcaaataaattactttttaatttatttgaaactttttatcaaaaatattgtgattaaaaactaataaaatatttctatgcatagctgttaaagaaaaaaattagcttattttgtgtgttaaaaactgatttgaaaaccttgatcaaagaatattattataattgacacttcaagtatttttccagatatctcaaccaaaacagtggattgaatgtctttatgcttaagacagagctacatattgagggggaaaaatgccctgattaaagaagaaaaatctttcacattttttggaggaacattctaaatatatagagaattaagatggctgctgtagcattcatttgtaggcagtattacgtttgaattggattaacgtgtctgtattggaagctttgtatgtagcaagggactcccatgcaagctgccatcttggatattgaatgtattaaaatccacactgctgactgtcaaatcatacaactttgatcttctgtgaaatgtgtgcatcaatagtaaaattgccagatgccatcattgttttggattttgagttctttctggataccagattaagtgggtggatactaaataagcagaaattctaataaatgtgaccattctttagtgagcttgtttgaagaaacaggcagttgtataagcaattggcttatgcaaattctagtttgaatttgttcgcagccactttatgaagacaaactttctcttt

SEQ ID NO: 11259 - DNA, 1187 bp, Homo sapiens
gttaaacctcttaacacatgtaccttcatttctttggaaagcagttttatcagtggaccctgttttaaatgtatcttatttctgccagctttatatcttttcctaggtcagaaagattattcaaaatattgttaaatcaaaaggctaagttttactttatttgcaacataagaattctgaaggactaaataatgaccaatggatcatatattgcctaacttcactgaataatcttcatgatgttttatttttattgattatatttacattgttctaaggattagattctgtagaagaggaaaattccaaccacmtaatgattttcttgatgtgaatagaatataaatgtaaataaaaacatttatctaaaaatatgagattagataaaaaatgagattagatgaaaaatatgagattagaaaaatataaaattagattcaaataaaacacatttaattcaaataaattactttttaatttatttgaaactttttatcaaaaatattgtgattaaaaactaataaaatatttctatgcatagctgttaaagaaaaaaattagcttattttgtgtgttaaaaactgatttgaaaaccttgatcaaagaatattattataattgacacttcaagtatttttccagatatctcaaccaaaacagtggattgaatgtctttatgcttaagacagagctacatattgagggggaaaaatgccctgattaaagaagaaaaatctttcacattttttggaggaacattctaaatatatagagaattaagatggctgctgtagcattcatttgtaggcagtattacgtttgaattggattaacgtgtctgtattggaagctttgtatgtagcaagggactcccatgcaagctgccatcttggatattgaatgtattaaaatccacactgctgactgtcaaatcatacaactttgatcttctgtgaaatgtgtgcatcaatagtaaaattgccagatgccatcattgttttggattttgagttctttctggataccagattaagtgggtggatactaaataagcagaaattctaataaatgtgaccattctttagtgagcttgtttgaagaaacaggcagttgtataagcaattggcttatgcaaattctagtttgaatttgttcgcagccactttatgaagacaaactttctcttt

SEQ ID NO: 11260 - DNA, 1553 bp, Homo sapiens
ctctctgtggttttagcctgtcaccccacttttttggtccttggtttccttgaaacttcagaaacaaagacaatcaaaggagtctgtctgaagaacgacgtcmgtcccaggagacatgctcggcttaattagctggtacccacaggatgttctgaaaatgagaaatggccaggattattatctatcaaatgtcaaatacaaatgcgctcatgttcccattatggatgtgtgtgttgcaaacttgctgaaccgagtgtgacccgttgggtggttttaattacaaatatcaataaaattggttgatatttatgggcacagacccttcagatcagggcgaaggaagctaattgcgtaagacagtgccgtgattgaactccaagggaggcgtggactcctgttagctgggtgcgaagctgagacagctccagtctccctgtgttaattaaatgtgatgaaatgaatattaacttgtaaaaagagtcagagacttggactgggtttacttggtgggtggggctgaggctagggatgggggttgtggttgatgagactcaagggctattgtcttagagagaagcaaacattagcacagagtttcccaaccttggctgcaaatagaatcacccaaggggcttctgtagcttaccagttcctgcactgcactaccagcaatttgcctggggtgggactttcccacgttattctaataaccagccaggactgagaatcattgatgtagtgaaaacaattcatgttttggagtcagacaaatgagactttgaactagctgcgtgtccttgagcttcagagattttttttttttgtctgtaaaaatgaggttaatcaaagctgcatggtgcgtctgtgatgttaaaatgagatcatgtgggtgacggggcttggtatctagtcagggctcagaaaaagttagattcccttttttccttagatgtgagtgcctgtgggcctgagaatctggaagactgcaggggtctggtggtttaagccaaagtgaattcttctctgagcactgataggattgcccataagaagaaatcatctcttcagccttctcatcctccacaggaacagaaggacacgtcccaagtggcgagctgtgcaaggccacagacacagtgagtgggctaggaggggcggggctgagggtggaggtcctgaccgcttgatttccaaccacacctcggttcactccactcgggagaaacttgccatttctgtcccactgtgaggagccttgtcgcttttgctcatttcctagggcacctgagccacagtttcttgggagacatgatgtccctagaagcagggaacagtggtgtgacatggagcttttttaattttttttttctggagatggagtctcactctgtcgcccaggctggagtgcagtggtgtaatcttggctcactgcaacctctgcctcctgagttcaagagattctactgtatcagcctcctgagtagctgggattataggcatgcaccaccatgcctggctaatttttgtatttttagtagagaaggggtttcacc

SEQ ID NO: 11261 - DNA, 1553 bp, Homo sapiens
ctctctgtggttttagcctgtcaccccacttttttggtccttggtttccttgaaacttcagaaacaaagacaatcaaaggagtctgtctgaagaacgacgtcagtcccaggagacatgctcggcttaattagctggtacccacaggatgttctgaaaatgagaaatggccaggattattatctatcaaatgtcaaatacaaatgcgctcatgttcccattatggatgtgtgtgttgcaaacttgctgaaccgagtgtgacccgttgggtggttttaattacaaatatcaataaaattggttgatatttatggrcacagacccttcagatcagggcgaaggaagctaattgcgtaagacagtgccgtgattgaactccaagggaggcgtggactcctgttagctgggtgcgaagctgagacagctccagtctccctgtgttaattaaatgtgatgaaatgaatattaacttgtaaaaagagtcagagacttggactgggtttacttggtgggtggggctgaggctagggatgggggttgtggttgatgagactcaagggctattgtcttagagagaagcaaacattagcacagagtttcccaaccttggctgcaaatagaatcacccaaggggcttctgtagcttaccagttcctgcactgcactaccagcaatttgcctggggtgggactttcccacgttattctaataaccagccaggactgagaatcattgatgtagtgaaaacaattcatgttttggagtcagacaaatgagactttgaactagctgcgtgtccttgagcttcagagattttttttttttgtctgtaaaaatgaggttaatcaaagctgcatggtgcgtctgtgatgttaaaatgagatcatgtgggtgacggggcttggtatctagtcagggctcagaaaaagttagattcccttttttccttagatgtgagtgcctgtgggcctgagaatctggaagactgcaggggtctggtggtttaagccaaagtgaattcttctctgagcactgataggattgcccataagaagaaatcatctcttcagccttctcatcctccacaggaacagaaggacacgtcccaagtggcgagctgtgcaaggccacagacacagtgagtgggctaggaggggcggggctgagggtggaggtcctgaccgcttgatttccaaccacacctcggttcactccactcgggagaaacttgccatttctgtcccactgtgaggagccttgtcgcttttgctcatttcctagggcacctgagccacagtttcttgggagacatgatgtccctagaagcagggaacagtggtgtgacatggagcttttttaattttttttttctggagatggagtctcactctgtcgcccaggctggagtgcagtggtgtaatcttggctcactgcaacctctgcctcctgagttcaagagattctactgtatcagcctcctgagtagctgggattataggcatgcaccaccatgcctggctaatttttgtatttttagtagagaaggggtttcacc

SEQ ID NO: 11262 - DNA, 524 bp, Homo sapiens
aaaattcactgtgcaatatgctcaagatgcaaatctcattaagtctagatcagactgtcttattttataaattatactgtcctcaaaatttactctcytcccaagaatcatttctcaacagactgtattgctgtattgacaggtgaattaccaaatgctgggagactcaagtaaggttttctactggttaagcttccaaggtaacctctcaagttctagccagccgctggcagactcatttgttttggtctggatttattctaggaccatataaacaacatacacaaataccctacaaataaaggacaagtaatgtgaaagttgagaaagtactaataatcgtataagaagtagggtttccaaaagtatacctttaggatgtattctcagattaaaatatcactggcttcttttttttttttttttttttttggggagacggagtctcgctctgtcgcccagggtggagtgcagtggtgcgatctcagctcacggcaacctctgcctcccgggttcaagcaatt

SEQ ID NO: 11263 - DNA, 563 bp, Homo sapiens
gggatagatagatgctgggtagacagacagatataaaaatgacttacacactgtgcttggcttgctgaatagaaaaggaagcattgtcagttacagtattacattatccataagataaaatcttaccaattacacagaagaactgtcttggtattaagagcagatggaaccaccttctggggattctcatgaaaaatacaatgagaaagtcaattagcagcatcaccaacaatttacattgtatcccattttgtgaggctgctttcatgtcaattcctgggataartgaatggaattacaccaaagtacaaataaaagccagttttgggagaatcacaagcaagttagtgtcttctttcatgcttttcctgcattgctgtatgcctcgatcacacatttacctcactcaatcacctcccctaaccatcaacccagtgccttgcacattgcacataatccattaaaattctatgagtgggtgaataaatgaatgaatgaggcacttgatacccaaaagacagtaaaaaagaaatggcataaaaagaaaaatatcaaaaggacca

SEQ ID NO: 11264 - DNA, 565 bp, Homo sapiens
cctgggtccttgggcctggggttgctggaggcctgcatccccttcccatcccagtgacttctacttactccaacttaggctgttctccaagaaggagattgaagaaatccgaaataccaccctgcaggacgtgctggtcgctgttatcaacattgaccccagtgctctgcagcccaatgtctttgtctggcataaaggtgagtggccaaggggtggctggaggagtggtgggtckggagcctcgtccctcttcagctctgggcttggctcaatgtggctgaacgtcaatctctgtgctccaagaggggagtgagctgtggttctgcccttgggaactccaggtgccagggccaccacttgcagctgtgtagggtcccctctgcagaactccaggaagtgctgagtgagggcagaactgagactcagagagagctggtgaggaggttcacattcggctgagatggagctcgggctaggtataatattaggagggctcagtgcagtgaggatatcccaaccctacagcagtgagggaagcgtgtgtgtgtgtgtgtgtgtgtgtgtg

SEQ ID NO: 11265 - DNA, 512 bp, Homo sapiens
tcacactgagactcaaaccaactggattccaccatctctgacaccactattttgaatagcataatccaggtttaatgcagtggaagagagagtgggatactggcacattttcagctaagtgctttgacctggaggccacatatatcacttctgatcacaactgagtcaccagaattaaccacctggcccsacttaaccacatggagactgggatacatagcagaaaaggtgaagtatatgaggagcaatattatctctgtcacaggcatcctttccaggagccgattccaacaggaaaattccatggaaataattttcttctaatttttactaggccaatttactgatatttcttagaatgttcatatgtacttatgtgacattgtattccctctctaagtttctgaaagtattcttttgattaacaatatctttgatgtaaagttccttaaactaattttgaaaatagcttaaatttcctcttggctctactactttataccatatgattt

SEQ ID NO: 11266 - DNA, 638 bp, Homo sapiens
agatagtctatgtggctattggcaaccatactgagtagcctggcacaagggtagtgctttcaaacttttaggaggaaatatatgggcctgttactccagagaacaatcccacagtgaacatgcaggaagctcaaggatgcaggatgtggtctcggggtgggctcagacttaccagagacatcgaggctttagcgagttctactcttgtcacacattgcaccagccctttttgagattgaagaagagtgccatctcaagacaaatctagcttattctaagaaatatagactctaggcatcaagaatactactggctactaggaggcccaggagtgtacacttcagtcattatgttgggaaattggggtcccagagyatcaactggtgagttcctaaaagaagaagtgcccatgtgggattaagtaacattctactgtatggctgtgaggtgtgccctggagcctacctacctgtaactatagctctcagagtactcttagctcaattctcttttctgtgtgagttggagtacaaaagaagtcacttctgaggttagtttatctattcccttcacttcataaatgtataaatgagaaccagagtgggaaataaaatcaaggaactgattacccaagggaa

SEQ ID NO: 11267 - DNA, 529 bp, Homo sapiens
tcaggctattcctctttaagttgtatccaaattaaagcaaatggtgctttattcatgtccagtccttcatcaggattccattgccacagtttaccttgacaaattgtagttaaaacttcatttgatgaaaagaaagaattccataattgtatactccattggcttacagctgacaaaccttaatacacgtggkttgtatagaaatcgtaggtggctcaggagacaagttcgtggatacctagactggtcaatgagtcagttggccaatgtcaactggcaatgtcacataacatcacaaacgtttacaaacactgccaatattgctaaaccctcctctcaattctcatctcacatgagacaaattaaagctaacagttcagagacatgctgcctcctagaagtccaccaggcttagcctcccatgcatcctgccccatactaaggcccagcctgctcagcccttccagagtacctatgatgaacatccaggacattaccttaaattactggaagaataactcttttaaat

SEQ ID NO: 11268 - DNA, 612 bp, Homo sapiens
aattttcaacacaagccgagagactgatggctggcatcggagagtcgtggaaatgccacagatgacgtgggccctatacagcgatgggaaaagggtctgggagctagccctccaggaaggtggctgacrtggttggtgggacactaaggtgttttccattttgcacttgaagccaacatggattcttagcacttcttgtccctagaatcaactgtgcagagagacgtttggtcgtgaaactctcaggcaaagacagttctgaggaaactcttattagtaaatagtgagtcggagaacactattgacatttaggattttcagttgagatacatatgtactgtcatgcatcacatgacattgttttggtgaatgatagcatatatgacagaggtcccataagaatatcatggggctcaaaaattcctattgcctagtgacattgttgtaaagttgtagtgcagttactttattttaaaaaaatatataaaatatttaaaaaataaaaatatatttttttaaaatgtagcctaggtatacaatgtctataaagtctgcactagtgtacggactgactcacccgagcaacttccattcatggaaggtccattcatg

SEQ ID NO: 11269 - DNA, 612 bp, Homo sapiens
aattttcaacacaagccgagagactgatggctggcatcggagagtcgtggaaatgccacagatgacgtgggccctatacagcgatgggaaaagggtctgggagctagccctccaggaaggtggctgacgtggttggtgggacactaaggtgttytccattttgcacttgaagccaacatggattcttagcacttcttgtccctagaatcaactgtgcagagagacgtttggtcgtgaaactctcaggcaaagacagttctgaggaaactcttattagtaaatagtgagtcggagaacactattgacatttaggattttcagttgagatacatatgtactgtcatgcatcacatgacattgttttggtgaatgatagcatatatgacagaggtcccataagaatatcatggggctcaaaaattcctattgcctagtgacattgttgtaaagttgtagtgcagttactttattttaaaaaaatatataaaatatttaaaaaataaaaatatatttttttaaaatgtagcctaggtatacaatgtctataaagtctgcactagtgtacggactgactcacccgagcaacttccattcatggaaggtccattcatg

SEQ ID NO: 11270 - DNA, 612 bp, Homo sapiens
aattttcaacacaagccgagagactgatggctggcatcggagagtcgtggaaatgccacagatgacgtgggccctatacagcgatgggaaaagggtctgggagctagccctccaggaaggtggctgacgtggttggtgggacactaaggtgttttccattttgcacttgaagccaacatggattcttagcacttcttgtccctagaatcaacygtgcagagagacgtttggtcgtgaaactctcaggcaaagacagttctgaggaaactcttattagtaaatagtgagtcggagaacactattgacatttaggattttcagttgagatacatatgtactgtcatgcatcacatgacattgttttggtgaatgatagcatatatgacagaggtcccataagaatatcatggggctcaaaaattcctattgcctagtgacattgttgtaaagttgtagtgcagttactttattttaaaaaaatatataaaatatttaaaaaataaaaatatatttttttaaaatgtagcctaggtatacaatgtctataaagtctgcactagtgtacggactgactcacccgagcaacttccattcatggaaggtccattcatg

SEQ ID NO: 11271 - DNA, 612 bp, Homo sapiens
aattttcaacacaagccgagagactgatggctggcatcggagagtcgtggaaatgccacagatgacgtgggccctatacagcgatgggaaaagggtctgggagctagccctccaggaaggtggctgacgtggttggtgggacactaaggtgttttccattttgcacttgaagccaacatggattcttagcacttcttgtccctagaatcaactgtgcagagagacgyttggtcgtgaaactctcaggcaaagacagttctgaggaaactcttattagtaaatagtgagtcggagaacactattgacatttaggattttcagttgagatacatatgtactgtcatgcatcacatgacattgttttggtgaatgatagcatatatgacagaggtcccataagaatatcatggggctcaaaaattcctattgcctagtgacattgttgtaaagttgtagtgcagttactttattttaaaaaaatatataaaatatttaaaaaataaaaatatatttttttaaaatgtagcctaggtatacaatgtctataaagtctgcactagtgtacggactgactcacccgagcaacttccattcatggaaggtccattcatg

SEQ ID NO: 11272 - DNA, 612 bp, Homo sapiens
aattttcaacacaagccgagagactgatggctggcatcggagagtcgtggaaatgccacagatgacgtgggccctatacagcgatgggaaaagggtctgggagctagccctccaggaaggtggctgacgtggttggtgggacactaaggtgttttccattttgcacttgaagccaacatggattcttagcacttcttgtccctagaatcaactgtgcagagagacgtttggtcgtgaaactctcaggcaaagacagttctgaggaaactcttattagtaaatagtgagtcggagaacactattgacatttaggattttcagttgagatayatatgtactgtcatgcatcacatgacattgttttggtgaatgatagcatatatgacagaggtcccataagaatatcatggggctcaaaaattcctattgcctagtgacattgttgtaaagttgtagtgcagttactttattttaaaaaaatatataaaatatttaaaaaataaaaatatatttttttaaaatgtagcctaggtatacaatgtctataaagtctgcactagtgtacggactgactcacccgagcaacttccattcatggaaggtccattcatg

SEQ ID NO: 11273 - DNA, 542 bp, Homo sapiens
gccatgcactgaattgtatcctccaaaattcatatgctgaagccttaacccacaacatgattgtgtttggagamaggctctacaaggagataattatgttaagtgtggtcataagggtgggaccctggtcctacaggattagtgtccttataaaaaagaggaagagagagatgaaagtccatgtgaagacacaacaagaaggctgctgtctgcaagccataaagagagccctcaccagacatgggctctgctggcaccttaatcttcaacttctggcctccagaactatgagaaaattactgtctgtggtttaagatgcccagtctttggcagtctgagtggtaaggaggctccttgctgcccctctggtttggggtcagagtgctggtgtcattcaaggctgtgaacggagcagatgcccggctttccagacccttctggacaggaaagtatcagcagaggcttgtgggaaggcagaaaccacctccaccacagtaatgaccagccccaccctgggtgtcagtggagtgcagctgaggctc

SEQ ID NO: 11274 - DNA, 542 bp, Homo sapiens
gccatgcactgaattgtatcctccaaaattcatatgctgaagccttaacccacaacatgattgtgtttggagaaaggctctacaaggagataattatgttaartgtggtcataagggtgggaccctggtcctacaggattagtgtccttataaaaaagaggaagagagagatgaaagtccatgtgaagacacaacaagaaggctgctgtctgcaagccataaagagagccctcaccagacatgggctctgctggcaccttaatcttcaacttctggcctccagaactatgagaaaattactgtctgtggtttaagatgcccagtctttggcagtctgagtggtaaggaggctccttgctgcccctctggtttggggtcagagtgctggtgtcattcaaggctgtgaacggagcagatgcccggctttccagacccttctggacaggaaagtatcagcagaggcttgtgggaaggcagaaaccacctccaccacagtaatgaccagccccaccctgggtgtcagtggagtgcagctgaggctc

SEQ ID NO: 11275 - DNA, 542 bp, Homo sapiens
gccatgcactgaattgtatcctccaaaattcatatgctgaagccttaacccacaacatgattgtgtttggagaaaggctctacaaggagataattatgttaagtgtggtcataagggtgggaccctggtcctacaggattagtgtccttataaaaaagaggaagagagagatgaaagtccatgtgaagacacaacaagaaggctgctgtctgcaagccataaagagagccctcaccagacatgggctctgctggcaccttaatcttcaacttctggcctccagaactatgagaaaattactgtctgtggtttaagatgcccagtctttggcagtctgagtggtaaggaggcyccttgctgcccctctggtttggggtcagagtgctggtgtcattcaaggctgtgaacggagcagatgcccggctttccagacccttctggacaggaaagtatcagcagaggcttgtgggaaggcagaaaccacctccaccacagtaatgaccagccccaccctgggtgtcagtggagtgcagctgaggctc

SEQ ID NO: 11276 - DNA, 542 bp, Homo sapiens
gccatgcactgaattgtatcctccaaaattcatatgctgaagccttaacccacaacatgattgtgtttggagaaaggctctacaaggagataattatgttaagtgtggtcataagggtgggaccctggtcctacaggattagtgtccttataaaaaagaggaagagagagatgaaagtccatgtgaagacacaacaagaaggctgctgtctgcaagccataaagagagccctcaccagacatgggctctgctggcaccttaatcttcaacttctggcctccagaactatgagaaaattactgtctgtggtttaagatgcccagtctttggcagtctgagtggtaaggaggctccttgctgcccctctggtttggggtcagagtgctggtgtcattcaaggctgtgaacggagcagatgcccggctttccagmcccttctggacaggaaagtatcagcagaggcttgtgggaaggcagaaaccacctccaccacagtaatgaccagccccaccctgggtgtcagtggagtgcagctgaggctc

SEQ ID NO: 11277 - DNA, 553 bp, Homo sapiens
agagttgttttgctcttgttgcccaggctggagtgcaatggcgtgatctcatgagccagttttttcaccaacctttttatttcatgttcctcattatattaaataggtattaactaactcattggattcttctgaggatgaaatatcataatgtatgtaaatttcttaactgagtattgagcacatagtaaatgcaccccccaaatcagacatttttaatataaagcttgatcaakattttatctatccattattaatgatttaatataattgcattaaaacaatattttattgaagaaataaagaaataatgtacatttacatgtgcaataaactaaactatataacatgtaactctaaaacatctgagcccatgattcagaatcattagctggttatcagcactttagaatctgtaaaatatatgtaaatatgtttgctatctttatagtttctatgcacattttcacttggagtagaaaggttaatacaatgtgtacaactgtagtattttgtattatctttttgttttctttcacttttgattactttt

SEQ ID NO: 11278 - DNA, 553 bp, Homo sapiens
agagttgttttgctcttgttgcccaggctggagtgcaatggcgtgatctcatgagccagttttttcaccaacctttttatttcatgttcctcattatattaaataggtattaactaactcattggattcttctgaggatgaaatatcataatgtatgtaaatttcttaactgagtattgagcacatagtaaatgcaccccccaaatcagacatttttaatataaagcttgatcaatattttatctatccattattaatgatttaatataattgcattaaaacaatattttattgaagaaataaagaaataatgtacatttacatgtgcaataaactaarctatataacatgtaactctaaaacatctgagcccatgattcagaatcattagctggttatcagcactttagaatctgtaaaatatatgtaaatatgtttgctatctttatagtttctatgcacattttcacttggagtagaaaggttaatacaatgtgtacaactgtagtattttgtattatctttttgttttctttcacttttgattactttt

SEQ ID NO: 11279 - DNA, 553 bp, Homo sapiens
agagttgttttgctcttgttgcccaggctggagtgcaatggcgtgatctcatgagccagttttttcaccaacctttttatttcatgttcctcattatattaaataggtattaactaactcattggattcttctgaggatgaaatatcataatgtatgtaaatttcttaactgagtattgagcacatagtaaatgcaccccccaaatcagacatttttaatataaagcttgatcaatattttatctatccattattaatgatttaatataattgcattaaaacaatattttattgaagaaataaagaaataatgtacatttacatgtgcaataaactaaactatataacatgtaactctaaaacatctgagcccatgattcagaatcattagctggttatcagcactttagaatctgtaaaatatatgtaaayatgtttgctatctttatagtttctatgcacattttcacttggagtagaaaggttaatacaatgtgtacaactgtagtattttgtattatctttttgttttctttcacttttgattactttt

SEQ ID NO: 11280 - DNA, 549 bp, Homo sapiens
tgaagagttaattgtttgtttcttaactacttaacattttggttaacttaatccttttcttcttcctcccaaataccctttgtcactctctccccatgatcttatcaggcatcagattgttcatccactaaagaatgctggtgagtgtgctaaagaacggcgaggtgtgctggaggcatgcggtccttacctaagtagattcgaagtgactacccccttccactaaataatttcataattacatgccttagctattcaatttacattgctgtggtatccaaaagaataatgatggcaatttacaattacaatcagctttatttgcatttctaaarctttgatatacttcctcaattatttaaataatgtacatacacaaaaagaatgaataaactatgggaattgtaagcactgttgaagctacttttttttttttaacaagtattcattttaggattcattacttataaatagaattaccctgctgtcattgattaataaccttaaaatactcttagtcactaacttaagttcaccaatgtagagata

SEQ ID NO: 11281 - DNA, 1898 bp, Homo sapiens
tctatcctttccgccactccaatctccccctttacttggtaatccttatccttcagagaatagcttaaaggtcattcccaccagcgaaccttccctacctgcaaccatgaagtgtgggtctggggttcctggtgtgtgctcccagggcacattcccctttccctgccctggcgctcctcacacatggcagtgtgtttacttatctgtctgcaccacaagtgccctgttcctgagggcagaggtcacaactctcctattcgttattgtatcccctctcctgtttatcattgtatcaggcctaacacagtgcctggcacacagcagggcaggctttctacaaatatttgttgaatgagaaaatatatgcataaaagtattattttccaatttgtgaagccagcttctcagaaagaaaatggagtttatgagcagagctttccagtaaatttgtatttagtcataatactacaaacaagcatatcattatttctttatttcttggttttgaatggtaattatttttgcaagttctgagtatttgcaccaatttatgaaatacaagcagtaatgaaatacaagcaatttatgaaacacaagcaatattaaacatgacagtagatggctcctgtttataggtgatgccggtaacattctagaaataaatggcttgattggaaacttctgtttaaaaaaaatgtgggaagtgaagggaatgagttggcctttaacaaagagaaagagaatacgatcattttctaaatataataaatagaatatcatatttaatctatgtatgcttacatgtagaaataatttttacgacatcatgaaactggtaaaatatgaggcagataaacttaggggaagtgatttttctggttatgaaatacacttttccccaaggtactcataattttagttatttgtaaataattttacttcataaaagcatatttctaagtgaatgtttctgaaatattaagttcttgcaatatctgaggtttgttaagcaggtatttagttaagcaggtatttagttaagttaagcaggtatttagttaagttaagcaggtatttagttaagttaagcaggtatttagtctcatttctgtcttacaactcagcaaccagaggtgttcagtgcatcagaaaggaggaatataagcatgttcgatagagtgattctgtccaaggtgtttgcatactcattttatcctttcagcaaccccgcacagggtgctctgcttattttccgcgttatagaaaaaaacatcaaaatgcagagcaggtaagcagcttgctcaagaccaccgagtgagtttgaggccatccttatgaaagaagagaaaggaagaaaaaaaaaaaacagttaaggcaagtcctcagcagaggatttaaacagagaaacwgcctggaaaatcaagctgcagctgcacagataagggagcaaagctcaacatagaaacacctttattctttgtgtaatcagcgggcgcctaggaaaaagtttcttttcctttcatggacctgtacatggtgggctccctgggaacttacatggggcggggggcttgcctaaaacatgcctacagttgctcagacaacagaagtgttactccctgtgcttgcgtaagacacgcccgcagctgcacagaaaagggcagttacacaagcagctatatagacaggggaagttacacagctatacagataaagaaagtttcttatacaaacttttgcattcaactgtaaaaatggaaaccctcttgggacccctctctgctgtggagagctttcttctgttgcttattaaacttttgctccaacctcatccttggtgtccttgctttttaatttccttggttgtgagaccaagagctcagataacacctcagaca

SEQ ID NO: 11282 - DNA, 553 bp, Homo sapiens
tcccagcactttgggaggccgaggcgggcggatcacgaggtcaggagatcgagaccatcccggctaaaacagtgaaaccccgtctctactaaaaatacaaaaaattagccgggcgtagtggcgggcgcctgtagtcccagctacttgggaggctgaggcaggagaatggcatgaacccgggaggcggagcttgcagtgagccgagatcccgccactacactccagcctgggcgacagagygagactccgtctcaaaaaaaaaaaaaaaaaaaaagaatctgatgtgatggtgagggctcaattcctgccacagagggacacaggagctggcctctgggaaccactactcaatctgagggtggagacccagcccctgttctgaagatgcttccagactcccgaaggacacaagatgaaaccaggacacagacgctcgtctcctctgtgctggtcagtggctaagatgccccagcaggctttccagataggggccactcccctagttcaatgttttcctcagggcagctgtgtctggtagtctcactgcagtctc

SEQ ID NO: 11283 - DNA, 596 bp, Homo sapiens
  misc_feature (1)...(596): n = A,T,C or G
gnnnnnnnnnnnnnnnnnnnnnnnnnnnnnnnnnnnnnnnnnnnnnnnnnnnnnnnnnnnnnnnnnnnnnnnnnnnnnnnnnnnnnnnnnnnnnnnnnnnntttgggggagccgaggcgggggcgatcatgaggtcaggagatcccgccccccggtgaaaccctgtctctccttaaaaaatacaaaaaaattacccgggcgcagtggcaggcaccctgtagtcccagctactcgggaggctgaggcaggagaatggtgtgaacccaggaggcggagcttgcagtgagccgagattgccccmctgcactccagcctgggtgacagagcaagactccatttcaggaaaaaaaaaaaaaaaaaaaaaaaaaatttgttctcatgaacttcctggcttagccaaccacatccacccttccatgtgtaggttaatattcccaatctgccacctgctcctccttctatgtgatttctcgagcagatgcaaagagacttgtctggggcaactcacaccccacaccatcttgatttttgtctctggggtcttcaaagccctctccttgccacagccgagtgagtgcccctgtcttggcatccac

SEQ ID NO: 11284 - DNA, 550 bp, Homo sapiens
ggaccatgacttatccccctccagcacccagcacagtgccagacccacatgcctgagggtgatagtaatactaggtcacaaaggactaaaaagctctttcccaagacaatataaagtgttggctctcctgcctttaaataaaagtcttaattttatatgcttaattttatgtatttgttttgatttttaaaaagcacagaccctcaccatccctgccatgactcacaaggagtcaggtaaaagaagggacgcttcctaacatgtattaggttgatgcaaaagtaattgtggtttttaccattgatagctaccacttactgaacactcactaagtgccaggcaccaccatgcacatttcatttgtattttcatacttaaattttacaacatcccatgtggtacacattattacctccattttataataaaggaaactattagcaygattgaatattctatcaaaaatcccacagccagcagggacagagttaggagtcagccctcttctgcccaagcccaaagcatgtgttcttaagtaagctatcatgcc

SEQ ID NO: 11285 - DNA, 574 bp, Homo sapiens
tgctattgataattttatgtcttcaccacagtttgattaacaatcatgacacttgtacttggccagtcatggcaagaaagaatcaacggggaccatctactatcattagaacattttacaagagaaaaggagttttgaattgataaaaagttccctccttgtagagaatgtgcttttcgattcatattctgacatagtgacttctgagcctggaaacattgcataatacaaccggacctctgatgtgtcatctgcaaaacaggctgggttaaatcagcagctcaggacttcgggtgattttacccctccacccctccccagaggacaggaagaagtgtctggagatagttttcgttgtcacagctaaggagggggaggtgctacagacatctcstgaggtgaggcaaggaacactgactgctgcttaccatcctaccaggcatggggcagcatgcgaaacaacaaattcctgttaactgtaccgagattgagaaaccctggatgagattatttttaaactccctaaaattcaaaaaatgctgaatccaaatgtgtaactacgaaaaaaaagcct

SEQ ID NO: 11286 - DNA, 592 bp, Homo sapiens
ttgagaagtgctgcttttggatgccctcggtgacagaatgtgaagatcaccctgtaagagccaaggtcacctagctattgagtgtgtccaccccaccatgcccttgtcaccctcccaattacagctcagtccagactcctagaaccaccacccccactctgcttttggttccatagagttaattttacaatctccctagagtgagttcacagcaaaattttatgtgatatgattatacaaggtgaattgtcctggatctgtttaatgaaacagatactgtgtttaatcattccatggggaattaagtacagttaaactattaatcaggccccagttctttccatcaacaagaagatggaggggaggctggccagcctgtgccccgccaggcacacctgtatgacagttcckgtggaaccagaactcattaccaatgttccatggctttattgcccagtttgcagacagcaatcaatgatcaggaatcctgagttaaacgagggctttggtttttaatttttcttcttcttctttccaatgaagtaatttgagagtttcaagagaggaagcattgccataggagggggccagg

SEQ ID NO: 11287 - DNA, 697 bp, Homo sapiens
tttgctttgaacatgccttggctgaaggttaatcacattaatttctgygagtcaatgttttgccctgtcctggaaaaaaaaaacaaaaactatcagccatttcaatagttagatccccatgtgacgattttcaaaatttcctgaaccaccagaatcctggcaactttgtaggtatgttttgggttcttttttctatgcaacaaatatcgggctgttgagagtctagaaactattgcctttgcaaatcagggtttcttaattgaattatagggaggacaagagaaaatgggtattcgaattgtgaattagaattgtgaatgaatgcttttgccaaccagcagtcactgaagtccaaaataaaatgagaccctaagcctttctcccattttcctctcaaactaactttttacctaaaaaaaaatctgggctcacatgtggtcagctcatcactagaccaaaaacataaaaacaaatgcatgctttacatgagataaaattttaactcattacaatgcttaattactaaaatgatgacagagacaagtacttcttaaattgtaatgtccatacaaatcactggagatcttcttaaattgcatatgctgtttcagtaaacttggaatggggcccaatattctgattttaaacaactaattctattacctttggattcaagttttgtacattgcattaatta

SEQ ID NO: 11288 - DNA, 697 bp, Homo sapiens
tttgctttgaacatgccttggctgaaggttaatcacattaatttctgtgagtcaatgttttgccctgtcctggaaaaaaaaaacaaaaactatcagccatttcaatagttagatccccatgtgacgattttcaaaatttcctgaaccaccagaatcctggcaactttgtaggtatgttttgggttcttttttctatgcaacaaatatcgggctgttgagagtctagaaactattgcctttgcaaatcagggtttcttaattgaattatagggaggacaagagaaaatgggtattcgaattgtgaattagaattgtgaatgaatgcttttgccaaccagcagtcactgaagtccaaaataaaatgagaccctaagcctttctcccattttcctctcaaactaactttttacctaaaaaaaaatctgggctcacatgtggtcagctcatcactagaccaaaaacataaaaacaaatgcatgctttacatgagataaaattttaactcattacaatgcttaattactaaaatgatgacagagacaagtacttcttaaattgtaatgtccatacaaatcactggagatcttcttaaattgcatatgctgwttcagtaaacttggaatggggcccaatattctgattttaaacaactaattctattacctttggattcaagttttgtacattgcattaatta

SEQ ID NO: 11289 - DNA, 652 bp, Homo sapiens
aatcttccaaaataatacttgcaatcaagaaaagttactattacctgtattctaattatattttcacaggaaaaatagaagtcaccaggtagaaattcccttaactgtccaaccccataccaacaaatccatcttcacctaactttccttcttcccatcttttatattatgcttcccttggggaaaagtccacctcttcacttgtgctctagagcaggagttggcaaactatgatccagggaccaaatcccacctgtttttgcatgacccaagagctaagaatgattttgatatctctaaatacttgaagaaaattcaaaagaagaatattttttgacacgtaaaaatgatatgaaattcaaagttcattatctacaaataaagttttactggaacatagttatactggttccttcacatactgtctatggctgctctatgtcagagttgagtcatggggacagacactgaaatgacagctgagtttaagatatttacttatctgacgctttaaggaaaaagtatgcygacccctggcttagagcccattccttcccactatggctcaaccacttcttatctactggatctttcctataagcattcaaagatgtccaaatttgtccaatcctaaaataaaacaaaacaaaag

SEQ ID NO: 11290 - DNA, 1020 bp, Homo sapiens
ttagctagctcaaggccatattgctagtattacattagtgcaaaagtaactgtggtatttgccatttaaaaaaaaagtaatggcaaaaaccacaattacttttgcaccaatgtaatacatgcggaagcagagcttcaaatgctaggagctgtcttcagagttagcaccaacgtaatatttttaactggtggttctcaatcagagacaattttgtcccagaagacattagcaaagtctgcaagctttttgtttgtcaaagggagagttagagggtgtgygtgctattggcattgtgtgggtagaggccatggatgctgctaaacacgctgtagtacacagaacagcctccacaacaagtaattatccagcccaacatatcaatagtaccaacacttaaaaaacctggcacattggaaaataaagccttttgaggttattttatgaagtatacattatatatacatatatgtatatattatatagagtttcctgagaattgttcatgccgttaaagaggaaaagctatactgtcgatttcaagctctacgtagtaatagaaacctggagagaacactgaaaaactaaattcctgtggaacattaaaaatctttaatttagttaagtatttcatcaaacagctttccagaaccgttgattagaaaggtgtctgtttccacagagaatctctgagtcaactctaccagatgttttatttcatgttttccccaaagatatttttatttcagagcaagactcattgaaatgttaatttcggtaaaattgagctaacttaggtaacatatcttcagtgttatattcctttagagctaagattctatataatttcaattaagatgactcccctgatttagaattaaataggtaaaagtaagcaattcgaatagggcaaaatcttaagatgttattaaaatcaacataattttatatttccttgcttgatttttttttgaagtcatgaattgaaatatattctaattggaaaagcaataagagtgaatg

SEQ ID NO: 11291 - DNA, 1020 bp, Homo sapiens
ttagctagctcaaggccatattgctagtattacattagtgcaaaagtaactgtggtatttgccatttaaaaaaaaagtaatggcaaaaaccacaattacttttgcaccaatgtaatacatgcggaagcagagcttcaaatgctaggagctgtcttcagagttagcaccaacgtaatatttttaactggtggttctcaatcagagacaattttgtcccagaagacattagcaaagtctgcaagctttttgtttgtcaaagggagagttagagggtgtgcgtgctattggcattgtgtgggtagaggccatggatgctgctaaacacgctgtagtacacagaacagcctccacaacaagtaattatccagcccaacatatcaatagtaccaacacttaaaaaacctggcacattggaaaataaagccttttgaggttattttatgaagtatacattatatatacatatatgtatatattatatagagtttcctgagaattgttcatgccgttaaagaggaaaagctrtactgtcgatttcaagctctacgtagtaatagaaacctggagagaacactgaaaaactaaattcctgtggaacattaaaaatctttaatttagttaagtatttcatcaaacagctttccagaaccgttgattagaaaggtgtctgtttccacagagaatctctgagtcaactctaccagatgttttatttcatgttttccccaaagatatttttatttcagagcaagactcattgaaatgttaatttcggtaaaattgagctaacttaggtaacatatcttcagtgttatattcctttagagctaagattctatataatttcaattaagatgactcccctgatttagaattaaataggtaaaagtaagcaattcgaatagggcaaaatcttaagatgttattaaaatcaacataattttatatttccttgcttgatttttttttgaagtcatgaattgaaatatattctaattggaaaagcaataagagtgaatg

SEQ ID NO: 11292 - DNA, 609 bp, Homo sapiens
cactcagggctattgagatcctgtgatgctgtgatttatcagagtcagccagaggactcatgtcatctcttggtgtatatccaaaaygctggcgtttgctggactactagactgctagaatgctgacgaaatgattgtaatggcttcctccctaacttctctccaatctctaattgtctgtattttttccataatgaatatcatcatctgaacttgcattatttgttcacttttctccctcacttaaaatataagcttcatgagagcagagctttgttttattattgttgttgttcactgctgtatccctagtgcctaagaccatgtctggtacatagtagactctcaataaatactggtgtatttatgaataagtaataacagtaactgtcacctagtaagggcttaatctatttcagaagtaggctctttaattgcattacctgattctttgtagccttaatgtccttataagtttttgcacagtaatggagtgacattaacaatagaaatctaaatatcccctgcctccactcttggatttccatagggtgcctcccatctcagcacaaactgaccgcaagctcaaatcaccctgaggcaaacttt

SEQ ID NO: 11293 - DNA, 609 bp, Homo sapiens
cactcagggctattgagatcctgtgatgctgtgatttatcagagtcagccagaggactcatgtcatctcttggtgtatatccaaaatgctggcgtttgctggactactagactgctagaatgctgacgaaatgattgtaatggcttcctccctaacttctctccaatctctaattgtctgtattttttccataatgaatatcatcayctgaacttgcattatttgttcacttttctccctcacttaaaatataagcttcatgagagcagagctttgttttattattgttgttgttcactgctgtatccctagtgcctaagaccatgtctggtacatagtagactctcaataaatactggtgtatttatgaataagtaataacagtaactgtcacctagtaagggcttaatctatttcagaagtaggctctttaattgcattacctgattctttgtagccttaatgtccttataagtttttgcacagtaatggagtgacattaacaatagaaatctaaatatcccctgcctccactcttggatttccatagggtgcctcccatctcagcacaaactgaccgcaagctcaaatcaccctgaggcaaacttt

SEQ ID NO: 11294 - DNA, 589 bp, Homo sapiens
ccgccttcccaagcataacagccaggaattccccgacgtgagtgaccccaagcacataaaaggtgcacaaaggcaaaaaaataatagctttcctttatttcacacaccgcccgcaacgcaacgccataaagcatttgatttaggatattaaatgccgctggtgatgagaacgtcatgtaagatttgctttgcgacttctttcttctcaaactgtcattaaaaatgatttataggtgaacccaagtctgagaaacaacatgattagaatcargggtttgggaaggggatggtgtggggatcagatttccagggcagccccactatccagtctcagagacggaaaaggctgagtgtgagacccaaccgctaacgatttcaaaggtaagtgcacatgcacggaaggaacacgtgttccttgctgagatgaaaacaatgaggccttgtcagacatttaaactgctggtttcaaaaggtggattctggaggagggccgggctggagaacgcttcttctgcagtagctgactttgtccagtagcagtctggctgctttcaaactagactggaaatcaggggtgttgtcggacttt

SEQ ID NO: 11295 - DNA, 589 bp, Homo sapiens
ccgccttcccaagcataacagccaggaattccccgacgtgagtgaccccaagcacataaaaggtgcacaaaggcaaaaaaataatagctttcctttatttcacacaccgcccgcaacgcaacgccataaagcatttgatttaggatattaaatgccgctggtgatgagaacgtcatgtaagatttgctttgcgacttctttcttctcaaactgtcattaaaaatgatttataggtgaacccaagtctgagaaacaacatgattagaatcaagggtttgggaaggggatggtgtggggatcagatttccagggcagccccactatccagtctcagagacggaaaaggctgagtgtgagacccaaccgctaacgatttcaaaggtaagtgcacatgcacggaaggaacacgtgttccttgctgagatgaaaacaatgaggccttgtcrgacatttaaactgctggtttcaaaaggtggattctggaggagggccgggctggagaacgcttcttctgcagtagctgactttgtccagtagcagtctggctgctttcaaactagactggaaatcaggggtgttgtcggacttt

SEQ ID NO: 11296 - DNA, 543 bp, Homo sapiens
aggctggaatgcagtggcacgatctcagctcactgcaacctccacctcctgggttcaagtgattctcctgcctcagcctccctactagggaggctactagctgggattacaggtgcacgccaccatgctgggctaatttttagtagagacaggatttcaccatgttggccaagctggtctccaatttctgacctcgagtgatctgcccacttggtcctcccaaagtgccaggattacaggtgtgagccaccatgcccacctaacactttgaaagcaagaatcatattttccccatccttgtattcctctcatctccaccttataccccctaatcaatactctatgtctagaatgatgcttctatatacatttttagaatttcagaaatgcaaaggaaactcttctttacaacgcttattggtttgatcctgattctacaagtaacacatccttattayagaacagttgaaaaataaagacaagtataaggagaaaaaataagataaactacctttccatagcctaaagacgaccacgctaaac

SEQ ID NO: 11297 - DNA, 543 bp, Homo sapiens
aggctggaatgcagtggcacgatctcagctcactgcaacctccacctcctgggttcaagtgattctcctgcctcagcctccctactagggaggctactagctgggattacaggtgcacgccaccatgctgggctaatttttagtagagacaggatttcaccatgttggccaagctggtctccaatttctgacctcgagtgatctgcccacttggtcctcccaaagtgccaggattacaggtgtgagccaccatgcccacctaacactttgaaagcaagaatcatattttccccatccttgtattcctctcatctccaccttataccccctaatcaatactctatgtctagaatgatgcttctatatacatttttagaatttcagaaatgcaaaggaaactcttctttacaacgcttattggtttgatcctgattctacaagtaacacatccttattatagaacagttgaaaaataaagacaagtataaggagaaaaaataasataaactacctttccatagcctaaagacgaccacgctaaac

SEQ ID NO: 11298 - DNA, 1008 bp, Homo sapiens
atctccctttcttaagggtgaaacttttaattatatctgcaaaattcccttttgccatgtattacacgttctggagaataagatggggcaatgatagaatttactacagcaacacaataagctgactcaagttggtagtgagctcgcatttctggatggcaataagcattcattcgttcaccaaacatccactggacacttaccctttttaatgtcattctccttaaattccattgtgtatgttattaatatggctgtatatcagcttgtttttgttagtatttgccttgtacctcattttacccttttagttgtaagctttctgtcatttctttaaacaatatatagctaattttgtattttaactgacttgagaatctcaatcttttaatggataaatttagaccctttacatttattgtaagttatgtggttataattatttctgtcattttatttcttattttttgattactatactttattatactgtggtgtatgtgtgtgtgtttctgattactatactttttattttctcttccccttttcccttctctgctttctgttgaattgattgagatcattgatttccttttactgttttggaagttatatattggatttttttttccttctagtgattctacatttaaaaaattcttatttgcttatamttatttaacatctattcagtgccagcctagttgcagttatgccttcagttggcaattccattttgggatcctggagaagtaactgctacatttggaagaaagacagaatgagctctagagtcctcttgagtttaacatcttggggatttacaagtctgtaattctaagattttaaaattcggtaattctcacactctgtacattttattctaatattccattagtttaatattctaaaattctgtggttccctgttcttaatataattctgaaatttcaaggacatgaggcaccctatatctagtacttacaaaattaattagcttactattct

SEQ ID NO: 11299 - DNA, 1008 bp, Homo sapiens
atctccctttcttaagggtgaaacttttaattatatctgcaaaattcccttttgccatgtattacacgttctggagaataagatggggcaatgatagaatttactacagcaacacaataagctgactcaagttggtagtgagctcgcatttctggatggcaataagcattcattcgttcaccaaacatccactggacacttaccctttttaatgtcattctccttaaattccattgtgtatgttattaatatggctgtatatcagcttgtttttgttagtatttgccttgtacctcattttacccttttagttgtaagctttctgtcatttctttaaacaatatatagctaattttgtattttaactgacttgagaatctcaatcttttaatggataaatttagaccctttacatttattgtaagttatgtggttataattatttctgtcattttatttcttattttttgattactatactttattatactgtggtgtatgtgtgtgtgtttctgattactatactttttattttctcttccccttttcccttctctgctttctgttgaattgattgagatcattgatttccttttactgttttggaagttatatattggatttttttttccttctagtgattctacatttaaaaaattcttatttgcttatacttatttaacatctattcagtgccagcctagttgcagttatgccttcagttggcaattccattttgggatcctggagaagtaactgctacmtttggaagaaagacagaatgagctctagagtcctcttgagtttaacatcttggggatttacaagtctgtaattctaagattttaaaattcggtaattctcacactctgtacattttattctaatattccattagtttaatattctaaaattctgtggttccctgttcttaatataattctgaaatttcaaggacatgaggcaccctatatctagtacttacaaaattaattagcttactattct

SEQ ID NO: 11300 - DNA, 701 bp, Homo sapiens
agaacatggctgctgctatgctataaatgtcatgtcctccccaaattcctatgttgaaatcctaactccaaaatgatggtgttaggagatggggccctttgggaggtaattaggtcatgaggatggagccctcatgaaggggattagtgctgttataaaataggactgaaagagaccccttgccccttgcaccataggggacacagcaagaaggtgcgctctatggaccagraagccggccttcaccagacactgaatctgctggtgccttgatcctggacttcagaattgtgagaaataaacattgtttctaagccacccagtttatgctattttgttacagcagtctgagtggactaagacagctgccctgggaatggagcacaccaagtctgggaaagaagattccaggaggcaagcaggccaagtctccccacaaccccctttcctcctcgaagctccttacttaagagtccccctgggcctccaggaagcacaattatctaacaggattttcatgctttaagcttttcagaagtcccttaccactaatcctggaaccattactaactggaagggaaagaaaggaaaaatggaggaaaggaaagagccccacaagcctctttacttacatctctgtttcctaacattttggagcctggtgaggaaaagccatccgatgtcaagatattctgccaaat

SEQ ID NO: 11301 - DNA, 701 bp, Homo sapiens
agaacatggctgctgctatgctataaatgtcatgtcctccccaaattcctatgttgaaatcctaactccaaaatgatggtgttaggagatggggccctttgggaggtaattaggtcatgaggatggagccctcatgaaggggattagtgctgttataaaataggactgaaagagaccccttgccccttgcaccataggggacacagcaagaaggtgcgctctatggaccaggaagccggccttcaccagacactgaatctgctggtgcctwgatcctggacttcagaattgtgagaaataaacattgtttctaagccacccagtttatgctattttgttacagcagtctgagtggactaagacagctgccctgggaatggagcacaccaagtctgggaaagaagattccaggaggcaagcaggccaagtctccccacaaccccctttcctcctcgaagctccttacttaagagtccccctgggcctccaggaagcacaattatctaacaggattttcatgctttaagcttttcagaagtcccttaccactaatcctggaaccattactaactggaagggaaagaaaggaaaaatggaggaaaggaaagagccccacaagcctctttacttacatctctgtttcctaacattttggagcctggtgaggaaaagccatccgatgtcaagatattctgccaaat

SEQ ID NO: 11302 - DNA, 517 bp, Homo sapiens
ttgtgattttctttgaccaacagaaaagtctaagaaagtgatattgcaacttctaagcaaggcctgtagaagcttagagataaatgtgcttgaggaaagcctatttagcttctttgaggttgaaagcccaatcccarttaaccccagccttcccattccccactccagttaagcccagtcccctagccaatccatcagcttaatacaactacatgaatgaatccagcagctaccaatggaaaagctgtctagcaaacccacagaatcatgagaaatcatgaaccactgttgttttaagacactggagtgatttattacataacctcagatatacatagatataaaatctggacttttctagtctcatttttgtacttcctgtttctttgccagttctttccatcacagtaaatgatatcaccacttaccctgttattgaagtcagaaactatgtcatcatccttaatgcctccctctttttcccctgcatccaatctgtcaccaaatcccatcaatt

SEQ ID NO: 11303 - DNA, 915 bp, Homo sapiens
atgtgcctgtagttccagctacttgggaggctgatgctggaggatcacttgaccccctgaggtcaaggctgcagtgagttgtgattgttccactatgctccagcctgggtgacacagtgagactttatctcaaaaaaaaaaagagaaagttatgtatacttcttaaaaacctgaaagacaaatgcaaatgcattggcctaatcagggtaatagcaagtttaaagtgatgacacaaataaatgataattttatatgattttttcccaaatcatagtagttccatggaaagtagcaggaaaattgtaaatgcttagggatgggtgaactattcatcccatgtttcttcattgtcattagcactagcataaaaaattataaatgcccagataagttctatggagtgcgaggtgaatgcagagtgagatatacagccctggccttcatggtgctatacagatatgggactgctgagatcatcccttctctaggcgagaaaaagcatagtagcatattttaattttttaaaattagtcagtttgtaggtatgttgttcttggaatgaaggtctccaaagtcctctgaattaaagagcataatttctcattaatgcaatcttacacattcaaagaaaatgcaacaccaaatttaaaacaatatttttttaaaagacaagacattctggccgggcacgttgtctcatgcctgtaaacccagcactttgggaggctgaggcgggctgattgcttgagctcaggagttcaagaccatcctgggcaatatggcaaggcccccgtctctattaaaagtacaaaaaaatagcccrgagtggtggtgcacaccttacctactccagaggctaagatgggaggattacttaatcctggggagccgaggttgcagtgagacgagattatg

SEQ ID NO: 11304 - DNA, 557 bp, Homo sapiens
aaatgtccgggccaggtgtggtggctcacgcctgtaatcccagcactgtgggaggctgaggctggcggatcacctgaggtcgggagttcgagcctgaccaacacggagaaaccccatctttactaaaaatacaaaattagccaggtgtggtgttgcatgcctggaatcctagctactcgggaagctgaggcaggagaatcacttgaacctgggaggcagaggttgtggtgagccgagatcacaccacttctctccagcctgggcaacaggagtgaaactccagctcaaaagaaaaaaaaaagataaatgtccttaattatctcttccacgaacccttctttgactctccccagtgctctctgtctgctttgtttcatgtatacttttatgcttctcatatttatctggtggtttggtggaaagggaaaaagtttaaaattctggttaattatatgccaatccccataatcttgcatggctgccyacttaatattctccctcagaataatgagtggaagagcagagctatttttacatctataaattgtgatttttct

SEQ ID NO: 11305 - DNA, 612 bp, Homo sapiens
aggaacccatcctgtgctgcaggcacccaatgacacccaggcttcctactcctcagagcccaggcttcttgtgggggcaggatcctctgtaaggagactggttctagaccctactctgggttctcctgtccttcctagagggcgcaaatggaaccattccactagagagacacctcactcaagtattagtttgacctgaaattcatccttttttctctgtggagatttaagcctcagctctattccaggcaaattggattgaatcatggttctcattcaattgccaagcgtttggggggcactcactgtatgttctgtgctaggtcctgtgagaacagacacaagccattgtccaagaggagctcccagtctcagggagagagagccatgagtcacaatgaggatctagataaatcatgtcagccgtgaaatgctcagggtcaagagtacagaggaaaggagcagccaaagagatggggagaggagctgcaggcagggattctggattgggtgatccacatgtgtgrcttgaggttgccccagtctcaactcagcatccttcatccttcctcagagggggaccaagtcccagacccagccctcacaccttca

SEQ ID NO: 11306 - DNA, 509 bp, Homo sapiens
tacatatttatttagatattcaagtaatatctaatatgcaaataataatgataatgtaaatgttaaattaaacatttatataaataatgcataaatattattaaaatgaaaactatgtatgagtatttagagtaagaaaatggaaatacctcttgacttaccaactctatacagaaagaagaatttcagcagaaaatacaaacaattggaaacaatcacatgaatatcttaacttgaaaaatgtaataactgaatttagaattcactgaaattgattagcagttgtttagacatacctaaaaagagtatgaataaactgaaaaaaaaatgattaaataaataatccagacaagcttgtaatgggaaatttaaaaaggatagtagacaaaagtgcataagaaacaaagagggtattataaaaggcctaaaaatatgtgcagttgtagtcctagaaagagggcaagaatggaatagaagaaatatttagtgatgaggaaawcaaattccag

SEQ ID NO: 11307 - DNA, 583 bp, Homo sapiens
tgctgcaaaagaaattgtatcattcctttttatggctgagtaatattctatgttgtacatataccacattttaaaaatccatttatttgtcaatggacacttaggtagcttctatatctttgcaattgtgaattgcactacaataaacatacgtgtgcatgtgtcttttttatataaagacttcttgtcctttgggtagatacccagtagtgggattgctgaatcaaatggtagatctactttttgttrggaataagaatttaactttttatgtggtcagttcatagttttgtcacaatgtaatattagaaaccactgaaagaagagaatctacaaaaaccaaaaagcatcagaagaatattatctgatgaaagacctgtcataaaattctttaggtttggctgttaaaattaatttactctaaagcagttttgaatacaaattataaacagagaactgggataatatgacaagaacaagtctttagtacgcatctactatgtactatttgctcactgtgtatacccatgttatctcattatttaatctccctgaaccccaattttgttaattttaaaagagg

SEQ ID NO: 11308 - DNA, 681 bp, Homo sapiens
ataccttcaggagccatcttcactcacaagtctgttggttgatgctgttgtaagctggagctgtctgccagaaacctatgaagcctctgtaaatgtcctgagattcttcacaacatgatggctgggttccaagattgagtcagaaccagccataagttgtatcatcttttatgacttagctcaaaagtcactgagtgtcagttctgccttaaccacagaccctcttagtttcaagggaaggggatatagaccctacctcttgatagaaaagttgtcaaagtcatatttaagaagagaatcagggatgggagatattgttgcaaccatttttggaaaatctatctggcaaattagttatcaggaaaaggcatattaaatacctagaaaccacttacttaccacgtatcagactgataattcttcccaggttcattcattcatygggaaaaagagccagaggagtgacagaaaagaaagaaaaaaaaatcatttgaaattttagcactatttttccctattaaataaaaaacaccttggtctggggggaattttttttgttcaaaatattattaaactggccattttactagaatgtgaaaaaagtatttattttgtacactctgcttaaatagcaatccattttcacatttaagtaaaccaaagcaaagaaattccctgtta

SEQ ID NO: 11309 - DNA, 519 bp, Homo sapiens
ctccactatgtgcgtttctggcccctaaactctctctctctctctctctctttttttttttttttttgagatggagtctcactctgttgcccaggctggagtgcagtggcacgatgtcarctcactgcaacctctgcctcctgggttcaagcaattctccggcctcaatctcccaagtagctgggattacaggtgcatgccaccatgcctggctaatttttgtatttttagtagagacggggtttcaccatgtttggccagcctggtcttgatctcctgacttcaagtgatctgcccgcctctgcctcccaaagtgctgggattacaggtgtgagccactgcgcctggcccctaaactcttttccaagccatcgttgcatttagcctttgcagcaaaagtgtgcatcggagaggagacatgaccctccttgcaatacagggaaactaagtctcccacaggtgaaaggacatacccaaggtctttacagctagaatttagaagggcccagaatagatccc

SEQ ID NO: 11310 - DNA, 735 bp, Homo sapiens
atgtaatttaagatagaggaattcagtttattcatttagagttcttggcatatcctcctgtattgactgcaggtatgtgggccgagggtaatttttgcctgaagatggaaagaatacctcttacttgctgacgtataaattgatgataaaaacaggatgaaaaaagggatttgtagaacgtagagctaaacatatttagatgtggtttctattgcagttatttctaggcatgtaactttgagcagattactcaycctctttgacttttgtctccccgtatagcaaatgcagaaaataatgtgaaacttacagtgttgtagcaattaaatatgctttttatataaggaaacaaatataattcctggcatttgccagtgcctttttccctaaatatctaaaatgctatgggtgaacatgcttgttgaaaataaatcttgcagaaattgccagtgtcaaaccttgttgtattttaccaaggaatgtacaaccttttgcttgtctggtgttattttaaatctagctatggaaacttaaacctgctcatccacagtgttcttggacacttctatttttataatttcgctcttttgcttccatgacctctccttcctcatcttgtgcttaggtccgagtcttttgaactttttaagtctgattcttcctatctacaatatgggaataataacacattacttaatggcaattatgaaatttaagtgagataatctacatctg

SEQ ID NO: 11311 - DNA, 735 bp, Homo sapiens
atgtaatttaagatagaggaattcagtttattcatttagagttcttggcatatcctcctgtattgactgcaggtatgtgggccgagggtaatttttgcctgaagatggaaagaatacctcttacttgctgacgtataaattgatgataaaaacaggatgaaaaaagggatttgtagaacgtagagctaaacatatttagatgtggtttctattgcagttatttctaggcatgtaactttgagcagattactcaccctctttgacttttgtctccccgtatagcaaatgcagaaaataatgtgaaacttacagtgttgtagcaattaaatatgctttttatataaggaaacaaatataattcctggcatttgccagtgcctttttccctaaatatctaaaatgctatgggtgaacatgcttgttgaaaataaatcttgcagaaattgccagtgtcaaaccttgttgtattttaccaaggaatgtacmaccttttgcttgtctggtgttattttaaatctagctatggaaacttaaacctgctcatccacagtgttcttggacacttctatttttataatttcgctcttttgcttccatgacctctccttcctcatcttgtgcttaggtccgagtcttttgaactttttaagtctgattcttcctatctacaatatgggaataataacacattacttaatggcaattatgaaatttaagtgagataatctacatctg

SEQ ID NO: 11312 - DNA, 532 bp, Homo sapiens
attatcagaatctaggattgcatcttagtttagtaacttttaaagtaattcttatactctttccaccatccctatgtcccagatacttgcctcactggagtggtacagaaaagggaggctaatgctttcctaaacaagtcagagtgttaagtggcttgcaaactttctccttaaaccagcaggatagtagctgatacttacaaagtatccttatgtcagctagggttcaaccactgaaacagaaccagtaaaaaatatacatgttaagagatttattaaaaaaaactggcttacatttgtgaaggctggcawggcaacttgtatttatttgtagaccaactgaaattgtagagaagactgtcagggcaggctagaactctaaagcaagggcttgacatgctgtctatcctcagaatctaatcctcataaaagccttggttctgctcttagcgtatttcaacctgattgaattaggtctaccgagattatttagtataatattcttagagtcaattaactatggatttgaatc

SEQ ID NO: 11313 - DNA, 570 bp, Homo sapiens
caagaaatacctactasctctactagctctgggtggctgctggagaggtccacagataggtaagtctctgccttcacagaattcacaatctactttcaaaagctataatacgaggtcaaatagtaagggccacacagtcgtttacgatgtgatagggattcaaagattggagagcgccctctggtggaaggggaagagatgatcaacagagacttcaaggcatttaaattttacacagaatttccataggaagaactgaaggaagacaggcattctggggaaaaggcattacgcaggaaactagtggcaagggggtgttcacggaaaaatgagttgttcagatctatcagagttgagagaacatgttatgaagggctttgaatattaggctgggaggtcctatagataactcgatattaaatgagtcatcaaagtttttaggcaggagagttaggtgataagaactttactttgggaagattcatctgatagaaagtgtgtaagaagagtccaaggggagactttggagttggaggccactgagagggttactacaatattttagacgaa

SEQ ID NO: 11314 - DNA, 572 bp, Homo sapiens
tattcagttatttttggacttctattcttttattagtgttttctgtttggcaagtcattgtcatcacacttctctttatttaaatgtggttcccaataattctttggtcatatttataatagttgctttgagatctttgtctttaagttcaatatctgwgtcctttagaatcattttctattgactttttcttgtatgcatcaccctttcagtttctttgcatatcttagaatactttcaatgaaaagtagacattttatataacagtttcagattctgtttcatctcttcaggattattattatttctgcttttttgtttaatggtttgcctggattaattctgtgaagtctacttatcccagagcctacagccaacagtgcatctattgttttttttcattttcacttttaagtctggattgctaggtgtaatgcatgagtcagcacagattagtggccagccaattattgatgtgaggctgtgttcaaacacattgagctattaagacttctattctttgtctgtaaatctgtgtggtgtttgagaagttgaatgtcatttctattttt

SEQ ID NO: 11315 - DNA, 572 bp, Homo sapiens
tattcagttatttttggacttctattcttttattagtgttttctgtttggcaagtcattgtcatcacacttctctttatttaaatgtggttcccaataattctttggtcatatttataatagttgctttgagatctttgtctttaagttcaatatctgagtcctttagaatcattttctattgactttttcttgtatgcatcaccctttcagtttctttgcatatcttagaatactttcaatgaaaagtagacattttatataacagtttcagattctgtttcatctcttcaggattattattatttctgcttttttgtttaatggtttgcctggattaattctgtgaagtctacttatcccagagcctayagccaacagtgcatctattgttttttttcattttcacttttaagtctggattgctaggtgtaatgcatgagtcagcacagattagtggccagccaattattgatgtgaggctgtgttcaaacacattgagctattaagacttctattctttgtctgtaaatctgtgtggtgtttgagaagttgaatgtcatttctattttt

SEQ ID NO: 11316 - DNA, 1870 bp, Homo sapiens
agctgatctcatgagagctctaaagctgcagtggctcttcagagctgccccaattaaggcaaaaggattaggcccttattccctcaaagtgaccagtcactgaatgtaggctgttttcaggaaggagccataaccttgggtgaggtagttcctttcagctgagggcaattcctgcagagggactcagccaggagctatcagcaggcaatgctatcagtagttggggggattcccaagaggggagttgggcagtgcaccacaccatcctctacagagtagacataaacacagctttgtcatatatctttggggagatcaatttggccagagtgaaaagtttgtgcagagtaatggtagcaaacagaagaatttaaggaattcttcaatatgtcttccattgtctacagaataaagtcttaactcttagccccacagccaagactcttcagagtccagcaccaacttgactttctagtcttattttccttgattccttttcatatactctacagatgaataaaaataaagaatctgaaaagttattcagagtttataaactgttaagaatatcaccctcagattcagtgtgtatatttcttattgagaccttagtaacaatactcggtaatagtctttacagcattgtaccattatgatcatttctgtgtaagaatgacattaaaggtctgaggaaggaatctggatggttctctgcttcagattcagcaaggtgaagttccacgttcagcctttgagaaggatggattgcttcatagttctatagcactgatttctaaaagagcttgccttctaggagatatttgctaatgtctggagagattttagattgtcataaatcaggcaaggaagtgcctaggagttacctatctaatgcgtagatatcaaagatatgctaagattctataacgcccaggacagccccacctcctccccaataaagaattatctgcctcaaaatgccaatagcaccaatattgattaatcttgcaccatagtttggcctacaagcccaagaaatggccccaaagaaatatggagatagactgttaggaaaagcagttcttatcactaaaggggaaagggagggagcatgcttttggcaaagagcccaagagaataaacggacagaactgcacctgcctacatttcttcagcccccacactctatccacactctttcccatatgtcccaaaaggctctccagatcctgaagggcatggcacacagaagccagatggctttgcctctcaccctctgcttgtccactcctctctgaactcatcaatttaacacaaataatcctaattactatgsctattttcagcttgaggacagatattgcttgattgagcagtgcattcttactgaacaaaaaaataaagaaagaaaaaaaagaaaaacacttgtaaaatccccaaactttaagtgcttggcagtgagttcctcaattttatatcagggagcctgggcttggcctgaaggggaaatgcaacagagcatgccatcaaaataactaggtcaatgttcagcttcttcttggaaggctttctgcttcttctcttccctccatgctgggccctcagcctgtctgtgccagccacctttatttcagataagtagctctctcagcctacaaattccaaagtccgaatgcctctggaattggacaaactgtccacacaccttaaatcaaagaatacagtcctgcccattcaatttgagcatctggaattggtgataccaacagtgttcgagcactggaccacctagtgaagaataaaattttatgcaatgcctgctggcactctgggcttcatcaattggctccaccacagcaaatatatcact

SEQ ID NO: 11317 - DNA, 593 bp, Homo sapiens
ctgtggctttcgacagagaaatgcagctaagttgcagcaatatagcaggacaggttctggaggaaaaaatactttgacctcactcttctccctttcttttgattttttttttttttttttttttaaccagtatcttctgtgggtcaaacttcatggaaatccagagggagaggggcccattaatgtcatagtgatagttgtccttgggcacaggataggatggagamgggtaaagagtaaactggagagagtacatagaaaatatctagatgttgtccctgaacatattccactattctttgcataaaaatgtgttccaacacagaggcacacaaagttccatcaagtatatattatctgtattatgtcaattcagctgtacttccacctaaaatctaaaatattggcaattacccaagcttcatggcaggtagcagaggaggaacataaacatagtggccacatatcctggatctggtcataaggtctaatttgacaatctcataccttctgttttctgcaagcttttccttgttctcctaaatttctgccaataccttggctagcctttatcctttcctagaggttggcca

SEQ ID NO: 11318 - DNA, 606 bp, Homo sapiens
tattgttgcaaaaattgttgaaatatgcagyccttccatcctaagggctattaattttgagacgatgagtacccacagtcttgagtttatgattgcctacttcattgtttaataaaacattaacaattgtcaattaagctttaatgatagtattaaaatgcaaaacaggataattcatacacttttctattacttggaaacagaatttttgttctacagaacaaaatctgttaaaatagcctttatgtataaattgaaacagaataatttgcttaaaacagataataattaactcatgtggctttaaaatttacaaagtgttgtagcgtacatttccttatctaattctcattaatatgttgtgatgtgggctgtagactgaatattcaagttttccattataaaatctaaaacaaaaacataatgcaaatagcaatggctctgagtgaactgagtgctaccttaaatttacaaaagaaatcttcacaatttttttcttgataaaaccagcaataatttccttgggactagaactatagtgttgaaatgattcttgggcctaagtcacatgtttgtgccattcaacattacattatgtgggcaagt

SEQ ID NO: 11319 - DNA, 576 bp, Homo sapiens
ggtaaaggtaattaacatttcctgatcatctactaaatgccagaggtgcttctttcttggttatagactttaatctgcataataaaactttcaaggtaggtctctcactcccatcatttaggcaagaaaacagaggatcaaaacgcctaagtgccttactctggccaacctgctgaactcaatgtagaatgaaaacccacacataaagcaaaacccaaatgtgtctggctctgaaggccattttctttttactatgttgcaatgactttcaataataaagtctacaacacctccaagttgttgtgctttaattcaccagcaattattgtgctccttgtttctataaagcgagttcatatattaaaactcggaaaaacaaatcccagaatggggatgtgggagtagtacagcaactcttaggcttacaaatcctctctaagtggtgctttgcattgtgaagaacacaattkttccaaaatatttcaatatacttatttattggcaaaaagtgaggaggtagtgggagcattctgatgtgtgttcaagtcaaatataacatggtgagcatagagagaa

SEQ ID NO: 11320 - DNA, 558 bp, Homo sapiens
gccaccaagcctgctcagaataattttttttttttttttkggatggagtttcgatcttgttgcccgggctggagtgcaatggtgcaatcttggctcaacacaacctccgcctcccaggttcaagcgattctcctgcctcagcctcccctgtagctgggataacaggcatgtgccaccatgcccggcatgtatttttgtattttcagtagagacagggtttctccatgttagtcaggatggtcttgaactcccgacctcaggtgaaccaccccaccttggcctcccaaagtgctgggattacaggcgtgagccaccgcgtccagccagaataatttttataagcattaattaacccagagaaaattacaaaaccctaaatgttgtaatagttgttttcagtatggcatcaccactctctaaatacttcaattaatcccagatcatgataaaagcttttaattactctatactattctttaactacctccttttgcacacatcaaagaatggggatttatatttcaaatatttaatacccattaggcattctatatgttc

SEQ ID NO: 11321 - DNA, 444 bp, Homo sapiens
tgaaaagatacacaatgtgaatatgtgttgctactatttgttgctttgctgacaaatcattggaagaaagagattagcctatttaaaagtcagttttcagtcagaattgaaagacaatatatagattccagaatttaggacctaaagggaaggggaaagatgattaattctagacttgaaacagtaaaagataagattataaayaggctttgagcaacaatggccaaatagtgtgtattattgctacaaactatttcaaatggtttccagttaactatcattattgtgaatggcagatatgcggatgataaatcaaaaataaaaatgaatcaggctttagaactatatctagaaataaactttattctggagaatgctccatgtacccttgagaacaatgtatactctgctgatgtttggtggaatgttctgtatacatctgtc

SEQ ID NO: 11322 - DNA, 461 bp, Homo sapiens
gaatgagatcatgtcctttgagggggatggatgaagctggaggccattatccttagcaaaccaatgcaggaacagaaaaccaaatattgcatggtcttgcttataagtggaagataaatgatgagaacacatggacacatagaggggaacaacactttctggggtctaatggaaggcggagggaagaggatcgggaaaaaataactaataggtactaggcttaatacctgggtgatgaaataatctgtacaacaaaccccatgatacaagtttacccacgtaacaaacctgcacatgtacccctgcacttaaaagttagaaaaaaaatagtaaaaaaaaawatatatatacacattaaaaaaaaaagtcacccatctaatactttgctgtaggaatcagttagctttcccctttttgacatatctatatccctgtacataatatgttatgccttcctttct

SEQ ID NO: 11323 - DNA, 1510 bp, Homo sapiens
gagagcagcacaggaaagacctgcccccatgattcaattacttcccacctggcgcctcccacaacacatgggaattcaagatgagatttggatggggacacagccaaaccatatcaggggatgaagacaggaatgaaaagaaggggaagaaagagaagcaggatagggtatccttaacaatacttaagtttgtaaagakcatatgctgttctatttacaattcttactttatgaacttctaagtttgaaattatttttaaataatattttaaaagagtttaatatcttcatgagcatggtcctcttatttccattttgaaaatgtgttattctatgatgtcaaatacaatatttaaatatcagttcaaattattctggtatccaccttagacatttagaattaagcttgacattgattcacttttctctacctcttttgacttttttcccactttttggatttgttacttctgttcctctgttctgggagagattttatagttgttttccatttaacccttctgaattgcctcactggcaattttgctttttacattatcccttatgttgttcacctttactgttgcagtttagttatttatgaattttacttttttatataatgcctttatctgagcttcatcattattccctttaaaacctattctattttcatctctttatgtgcctttctttttccttagaaatcagacctcttcgatctgaagatttatgtcaactggatactttacatcttaattaaaatatatttatttagagtatttcctgatatttttgttaattttatattaattttaagtattaacgtataaatgaaaatatatttttgtagaagactaagggtatacttttgtcttgcttccacacattatccagttggaagcttataggatttcctgccagtactataggttacaggacactttgatacctgaaaatgttgaatctccaaatttccctgaaatattttcttctcccttgttgtgggagaacagtgactctttgactatgaaccataaaataatctcactagaagcaagtgccttataaatgatgtttttctccaaaagatccatcagttttcctcccttcttgttgcaatccagtgcctgtagctcagtttagccagagaataaaaaataaactcttctctaggaagaaattaccaagtcaacaaataaatctctgggcctatttagtatatacagacaggatctagggaaacatatgtaggagaggatgttaaaaatgtagaatataagggctgcctacatggtaaactactgacaataaggtactcactcatgacttaaatattgtggcaaagatacctgaagttggtactattcgtttatagatggttactcaaagcatggacttaattaagatccctattaaactaaatggagaaaccaagtcttctatatatcagtgttgaataaaagattatacagcttctagaagtgataatgttaggctttattcatta

SEQ ID NO: 11324 - DNA, 516 bp, Homo sapiens
ttgccggagcattcttgcctgagtgtcctgggttttatgagtgagtttccctgagtacacaccccagggtgggactgcaggacatggggaatgtcaagataaaaataaactgacaaaaacacatgttttacagagtgatgaccccaaaactgccagcaaccgttgtcagattctgttgtttttyccacttctcagaaaatacctgattacagatgacagaggatgaacttgatgttaacatttacttaaatatattctacaatagaaaaatatgttgaataaatgctgtgatacaaatatctgtacctgtaagcaaatgtatcacctatgagaaataatttttacaaatcaatggtgccatttattaaacattgtgctatgtttcataaaatgtgttataattgattgacttggaagtgagatttgcaaagttcaagacctcagtagtggacagtcaccctgcaagcaaacacacgggacaaatacccacttaaaaatatgacgcatgcattggtt

SEQ ID NO: 11325 - DNA, 573 bp, Homo sapiens
aattgatgaataacatgaccatcctacatatgcacacacaagaaattgagaagtttaagaaaataagcagaaataatgattaaaaaaataaattagtgtttttattttaaaaatttggagattcataataaaacaataagtgcatttgctaagagggctaacatgagcactataccccaaaataatgtcaataacatagaagcacttttttcccrtaacacaggggttggcaaacttttctttagatggccagagagcaaataatttagggttacaggccatatttggtctccactccacactagttcttttcttttcttttcttttcttttttaaaagaatttttcagtttaaaaatgtttcctagctgggtgtacagcatacaaaaatagaccaagggtcttacttgtccaaaaaattgtagtttgcctactcctaatttgtattcttgaaataaatatgtctataccctacacaggatgatgcagtcggtaagatgtaagacgggacaaatgaagtctcttgataagacagttagtccaaatgagtccaaaagaacagaaaacccaatca

SEQ ID NO: 11326 - DNA, 573 bp, Homo sapiens
aattgatgaataacatgaccatcctacatatgcacacacaagaaattgagaagtttaagaaaataagcagaaataatgattaaaaaaataaattagtgtttttattttaaaaatttggagattcataataaaacaataagtgcatttgctaagagggctaacatgagcactataccccaaaataatgtcaataacatagaagcacttttttcccataacacaggggttggcaaacttttctktagatggccagagagcaaataatttagggttacaggccatatttggtctccactccacactagttcttttcttttcttttcttttcttttttaaaagaatttttcagtttaaaaatgtttcctagctgggtgtacagcatacaaaaatagaccaagggtcttacttgtccaaaaaattgtagtttgcctactcctaatttgtattcttgaaataaatatgtctataccctacacaggatgatgcagtcggtaagatgtaagacgggacaaatgaagtctcttgataagacagttagtccaaatgagtccaaaagaacagaaaacccaatca

SEQ ID NO: 11327 - DNA, 539 bp, Homo sapiens
tcttcccatgttgctaacactcttatactttcaaaaagccaattttgtcagtatccaaggaaaatatgaccaaaaatgcttttcatactctaaaccaatactctggttagttatgatccaattacagcaacagttttattgttttacaagcattcccttaatgtgtcctgttccatcttctttgcttctataacagcctatttttcttttattcacgtatttattgcaacacattacagttcactggtttgctgaatactctatccctgtggtcttattttaataagggaagagataatgtcttccttgtctttttatctccagaatttatcgaaatgacctttatgtacaagcacaagtacttgtaagtacttgacaaacgttcactgaggttgaaaaaatgagtttatagaatgttcaaaagtaactagagagcctatgacacagtagcttatagcagactaatgcatccactgataatagctagaaaatctctgataaataataaagtgcaaaaccaattcttttyggaggtaaca

SEQ ID NO: 11328 - DNA, 563 bp, Homo sapiens
gtacttgcgcctgacaaggagaacaaagccacagcttgaaaagatggtctcatcttttcctatggagtaaattaagtcgtgaatcagaagtccaggtctacctcatctgacactggcccattcacctgctattgcagtggggccttctttctcaggtaatcaggagttgtttgggcccctacccatcccccagccctcaaaattcctcactgatgcatttgacatatattctcaggttacactttccctggaataatactgtgtccacatttacagatatatcagtatacacttttccacatttacagatatgtaggtgtaaatacatagaaaacttaatggaaagattcatataaaatgttcacagtagttacctctggggaaagggtttgagttcagaaaagggagatcaaatagagtttttyatatatctgtacagttttaatatttggaagaacaatgctttcagaacttacttgtgcaatggaaattaattgtgtaaaaaaacaaaaaacactaccagcatctgggtagaaatgaatcagatagactacaagataaaa

SEQ ID NO: 11329 - DNA, 563 bp, Homo sapiens
gtacttgcgcctgacaaggagaacaaagccacagcttgaaaagatggtctcatcttttcctatggagtaaattaagtcgtgaatcagaagtccaggtctacctcatctgacactggcccattcacctgctattgcagtggggccttctttctcaggtaatcaggagttgtttgggcccctacccatcccccagccctcaaaattcctcactgatgcatttgacatatattctcaggttacactttccctggaataatactgtgtccacatttacagatatatcagtatacacttttccacatttacagatatgtaggtgtaaatacatagaaaacttaatggaaagattcatataaaatgttcacagtagttacctctggggaaagggtttgagttcagaaaagggagatcaaatagagttttttatatatctgtacagttttaatatttggaagaacaatgctttcagaacttacttgtgcaatggaaattaattgtgtaaaaaaacaaaaaacactaccagcatctgggtagaaatgaatcagatagactacaagayaaaa

SEQ ID NO: 11330 - DNA, 423 bp, Homo sapiens
ggttatggttttgagggtagggaaggggagcaaagggaaagactttgagagagagagagacaagaaaattaaaagacacacgaaactatgattttcctcttctcctctgaaggtgccagggaaggacataccaaggagggggtgatgggagccactcactctgccaggagacatattttagccactgacattgtttagaattgcagcacatggtgacaataaaagtaggattttaatcagttttattatcgacagtgtactcccttcctgcctgtgcctggtgtaccrcccctggcgtgccccttagcacagcactgctgcctggtatggcgtgtgtgcactgcaggtgttagtgtaactgtgggagggaagtcatggggctgcttgtgtgtgcagaaaggctgaaagtggagccttcagctg

SEQ ID NO: 11331 - DNA, 509 bp, Homo sapiens
tcataattacactctttaaatttaaaacaatagctagcctttcccttaggttttactctgcttttgaatttagagaaactcaatcaaaatgtttatataaattaaaaacctttgaaaaatctctaaaacacaacttgtttataagtatttttaataaaagcaacaatataagaacaaaattaacttgacaagcaagtaaccatgatttaaaaatatgcaacatcaaactgaagccactgtcayaaaatagcataatctcagccgatagaatgattaaaaattaaaaatgactttgtattttaaaatatttaatgtgtcaattcagctccacattgttagaaaagaaactgaaccgtggtctctttgacaataatgtcagagtcaactagaacttggcagatttccaagccaggagctatggttttattcagcagtttctatgaatgctctgcttcacagagttccgaagctaatcaaagtagatgttcaacttgcctccacaccaaaaa

SEQ ID NO: 11332 - DNA, 616 bp, Homo sapiens
aataaaaatgaatcttatatctcctttaaacaaatataaaagattcaaggattggatctatttcaaaaacatccacatagcaggaaaagagagttctattcttgtttctatcattaagttcrcttgctttccccagtagatatggttacataaagttttcactacatttttgtagaaataaaagttctaaaagactctactcaagatattaaatagtatagaaagatgttttattataaaggcaagtaaggagttgattccagattatctcatttggaacatgactggctgtagcatgttataattctgttgcaatgtgttttattggggaaaggaaataaactgaaaatcgaaaagccaaaaatataaaataggtaaaataaattactatttacatacctaagattctgtaatgaatggttaaacaaaatattttatcaaaaagatttttgagaggaataactgtcaaaaagcaaaggataatgtaaatgtatatttttgcttcttaaaaatgtggttctaatgagaacacctggacacagggaggggaacatcacaccttggggcctgtcagaggtggggtagaaggggaggaacagcattaagacaaacacct

SEQ ID NO: 11333 - DNA, 524 bp, Homo sapiens
gcatgtatctacatattactagtataaaagttctatgagcatttgggctttagtccaatctaaatcatcatgactcttacttccattcaaaaarcttctctctcagagtacacagtaaagtgataaaattacctggtactaactgctgacactttctctttctttagctatttcctgatgctaattttagaactgatttgaggatacataaaaatatacataaggttaaaattatgacttacaataaatgatcagatattaaggaatttctttttaatttggaattgagggcctaagtaattgcactgccaatctggtttactgtgccaagagtccagcgttccttacacaagggagggggatgaaaatccaagagaaaagacatgagacactgaatgcaaaggtcctctttacctccgcctcactgataaccaggtatacacattatcatcgtcactaccaccattaccacctctgccacatgcattatttcatttacatcagcctgggaagcagtgttaaca

SEQ ID NO: 11334 - DNA, 607 bp, Homo sapiens
tggaatattattccaaaagaagaacagagtattaatacaagatgcatcatggatgaaccctgaaaacattatgctaaataaaagaagccagtcataaaagattgtattatgattcgatttacataaaatctccagaataagcaaatctatatatgtagagagaaagcagattaatgattgcctatgatttcaggcaattgattagtcaattgattactataggcaatggttgtctatgaccatacaagtagttgcatgtggtaaggaaaggkcaatgataaagagttactgctaatgaatatgtagttttttgtttttgttttttgagtgttgaaaatgttctagaattagaatgtggggatgatattacaactctgtgaaaatatttttaaaaacattgacatgtacactttaaatagataaattatatgctatatgaattctttatcaataaataggtttaaaaagttcctaatgggaaaatataatattcattcaaatatttatagccacatgcaaaatacattacctggatttacttttaaaagtcttcaattacaatttatttccttaataatttagcgtatttccttctttcattttgttt

SEQ ID NO: 11335 - DNA, 539 bp, Homo sapiens
tgctttgtttacctaagcaagcctgggcaatggcaggcgcccctccccagcctcgctgccaccttgcagtttgatctcagactgctgtgctagcaatcagcgagactccatgggggtaggaccctctgaaccaggtgcaggatataatctcctggtgcgccattttttaagcccgttggaaaagcacagtatttgggtgggagtgaccccattttccaggtgctgtccgtcacccctttctttgactaggaaagggaactccctgaccccttgcgcttcccgactgaggcaatgcctcgccctgcttcrgctcgtgcacggtgcgctgcacccactgacctgcgcccactgtctggcactccctagtgagatgcacccggtacctcagatggaaatgcagaaatcacccgtcttctgcgttgctcacactgggagctgtagaccggagctgttcctattcagccatcttggctcctcacttgcttgctttcttacaattatttttagtggtcagtcataaaacatcattaattttttct

SEQ ID NO: 11336 - DNA, 539 bp, Homo sapiens
tgctttgtttacctaagcaagcctgggcaatggcaggcgcccctccccagcctcgctgccaccttgcagtttgatctcagactgctgtgctagcaatcagcgagactccatgggggtaggaccctctgaaccaggtgcaggatataatctcctggtgcgccattttttaagcccgttggaaaagcacagtatttgggtgggagtgaccccattttccaggtgctgtccgtcacccctttctttgactaggaaagggaactccctgaccccttgcgcttcccgactgaggcaatgcctcgccctgcttcggctcgtgcayggtgcgctgcacccactgacctgcgcccactgtctggcactccctagtgagatgcacccggtacctcagatggaaatgcagaaatcacccgtcttctgcgttgctcacactgggagctgtagaccggagctgttcctattcagccatcttggctcctcacttgcttgctttcttacaattatttttagtggtcagtcataaaacatcattaattttttct

SEQ ID NO: 11337 - DNA, 539 bp, Homo sapiens
tgctttgtttacctaagcaagcctgggcaatggcaggcgcccctccccagcctcgctgccaccttgcagtttgatctcagactgctgtgctagcaatcagcgagactccatgggggtaggaccctctgaaccaggtgcaggatataatctcctggtgcgccattttttaagcccgttggaaaagcacagtatttgggtgggagtgaccccattttccaggtgctgtccgtcacccctttctttgactaggaaagggaactccctgaccccttgcgcttcccgactgaggcaatgcctcgccctgcttcggctcgtgcacggtgcgctgcacccactgacctgcgcccactgtctggcactccctagtgagatgcacccggtacctcagatggaaatgcagaaatcacccgtcttctgcgttgctcacactgggagctgtagaccggagctgttcctattcrgccatcttggctcctcacttgcttgctttcttacaattatttttagtggtcagtcataaaacatcattaattttttct

SEQ ID NO: 11338 - DNA, 597 bp, Homo sapiens
tgcagaaaagttgaagagtggttgtctatatagctaaagtcaagtaaaaatgccaataaaagtttgaaaaatatactttagatgtataagtaaagcaggtacgtgacattctaattgtaactgtgttttttttttgtttgtttttttgtttttttttgagtttaagtgatttatttaagccacctcctgccacaagcaaagggatggaagatcagtataccagtcatcatctgatacaagtaaggaargtgagcttaaggtctcgtatactttttctggtccgtgcgcaaagcaacggtccaaaccagtgctgtggtccccagtgcccggctagtggtctggattctctttattcatcttcgcagccagttgtaagcggattcacgtttagagttacggaatagagtagggttaccatctccccagggaaacggcttggtcctgatgctaagatgggggtaggggatgaactcgtgtccctagtgctctccgtggtgcgacttcaggaacacattcagcatgctgtatgctactccggggagcacgacgaagtaggtgagggccttccacatgcgagctgagcccccttcgccatgg

SEQ ID NO: 11339 - DNA, 597 bp, Homo sapiens
tgcagaaaagttgaagagtggttgtctatatagctaaagtcaagtaaaaatgccaataaaagtttgaaaaatatactttagatgtataagtaaagcaggtacgtgacattctaattgtaactgtgttttttttttgtttgtttttttgtttttttttgagtttaagtgatttatttaagccacctcctgccacaagcaaagggatggaagatcagtataccagtcatcatctgatacaagtaaggaaagtgagcttaaggtctcgtatactttttctggtccgtgcgcaaagcaacggtccaaaccagtgctgtggtccccagtgcccggctagtggtctggattctctttattcatcttcgcagccagttgtaagcggattcacgttkagagttacggaatagagtagggttaccatctccccagggaaacggcttggtcctgatgctaagatgggggtaggggatgaactcgtgtccctagtgctctccgtggtgcgacttcaggaacacattcagcatgctgtatgctactccggggagcacgacgaagtaggtgagggccttccacatgcgagctgagcccccttcgccatgg

SEQ ID NO: 11340 - DNA, 645 bp, Homo sapiens
tttaacaaaaagcagatttttgggccgggtgcggtagctcatgcctgtaatcccagcactttgggaggccgaggcgggcggatcacgaagtcaggagatcgagaccatcctggctaacatggtgaaaccccgtctctactaaaaatacaaaaaattagccaggcgtggtggtgggcgcctgtagtcccagctacttgggaggctgaggcaggagaatggcgtgaacccaggagatggagcttgcagtgagccgagatcgcgccactgcactccagcctgggtgacagagcgagactctgtctcaaaaaaaaaaaaggaaagaaaaaaagcaatttttttttttattaccagctttagcccataccatgttagttttaaagagatggtagagttgataaaaatttataaggatgatgtggagctacttacyacaggctgtgtttctttttttttttttaatcctatagatgatccgaataccacttgagttgaaatattttattttaaatataaagaaggaatactctctattattaaattgaaaataaataaaaccaattctggaagaaaaaaataataacaagtaaatgtttacatttctcttattaggaattaatgtgtgtgtgttcatttatcttttttttt

SEQ ID NO: 11341 - DNA, 649 bp, Homo sapiens
cagcctcctgagtagctgggattacaggcatgcaccgccacgcctggctaatttttgtatttttagtagaaaccccccgtgaaacatggggtttcgccatgttggccaggctggtctcaaattcctgacctcaagtgatctgcccacctcggcctcccaaagtgctaggataacaggtgtgagccatgtgagccactgcgcccagccacaagatgcctctttatgagaggatccagtctacctttccagctgttttttcccactcctatcatttcccttctcctagcaaaactctgtattggcctacacatgccaatgtgttgagcatgccatgcgttcttgtgccctgcatctttgcttttgccattccttgtgctattgyttttccactttcttcctgcaaaactcctattcatcctctaagacctggctgtgatgtcctggctcttgaacggttctacctctcactcactcacacagggaggtcagctgcttctttctctgagccgccttaccctctgggacacgcctccagcacagatttccgcgtagcctaccttcactcatctagatacatcatcttccctggcagatggagtgcttctgaaaggcagagacttagctttgaattcccagtgcctagcatgga

SEQ ID NO: 11342 - DNA, 649 bp, Homo sapiens
cagcctcctgagtagctgggattacaggcatgcaccgccacgcctggctaatttttgtatttttagtagaaaccccccgtgaaacatggggtttcgccatgttggccaggctggtctcaaattcctgacctcaagtgatctgcccacctcggcctcccaaagtgctaggataacaggtgtgagccatgtgagccactgcgcccagccacaagatgcctctttatgagaggatccagtctacctttccagctgttttttcccactcctatcatttcccttctcctagcaaaactctgtattggcctacacatgccaatgtgttgagcatgccatgcgttcttgtgccctgcatctttgcttttgccattccttgtgctattgtttttccactttcttcctgcaaaactcctattcatcctctaagacctggctgtgatgtcctggctcttgaayggttctacctctcactcactcacacagggaggtcagctgcttctttctctgagccgccttaccctctgggacacgcctccagcacagatttccgcgtagcctaccttcactcatctagatacatcatcttccctggcagatggagtgcttctgaaaggcagagacttagctttgaattcccagtgcctagcatgga

SEQ ID NO: 11343 - DNA, 589 bp, Homo sapiens
ggaagtcctcacctactgatatcaatcatgaatatacaccaatgaaatccccctacttaaaaagacacaacctggctgaatgggcctattttaatctcttctccctctgtagcttttaaattacttatgtattcatttatttgtagaaatgggatctcactatgttgcctaggttggtcttgcactcctgctcaagcaaaactcccggctcggcctcccaaacacatgacacatccacctatatgctgcttacaagaaaatcattttacctctaaagacatatatagactaaaagtaaaggaacagaagaagatatttcactcaaccagaaacaaagtaagcaagastagctatacctgtatcagataaaacagattttaagtcaaaaactgtgaaaagagggccaggcacagtggctcattttgtaatgccagcactttgggaggccgaggcgggcagatcacctgaggtcaggagttcaagaccagcctgaccaacatggcaaaaccccgtctctattaaaaatacaaaaattagttgggcatggtggtacatgcctgtagtcccagctactagggaggctgaggca

SEQ ID NO: 11344 - DNA, 527 bp, Homo sapiens
agattcctggcctccaattcctctccctttggtaagccagcctacatacgctgacaggctgatctccctaaaacctaattctgattatgcattactatgcatcatccccctgctgaaatactgtcttcaaagtaagtccaagtttctcttcttggctttcaaggacttgcatatgatacagccccaaattcctgctcccaccttgtccccactattgtcccaccttggttgtcccacctgctcccactttgtcccacctagtccccagtatgtggactctggttccagttgaactgagttgtgggcttttatttatagayacaatttctcctgcattttctccatccaaaaatggccacccatctccacacacctgccctcaaattggcttgctgtcaaatattttcagtgacccagtactacttctctcatgaaacctttcctgccatccccaaagagatgtgagcaacttattcctttgaactcattttgcctttatttttaaaattatagtggtgttatgaaaa

SEQ ID NO: 11345 - DNA, 723 bp, Homo sapiens
ttttctctgggtgtgcttaggggctggaattccagaccaatgagctggctggaaatctgcaagtgttgacctttacaggtggacatgcccttgctagggcagctcctgacagcagggaaggagatgttcttgtcagacagggttggaaaaagctgagcacacaccacactctgcaaaagcaatgccagttaatggagaatctctaggcttctgtgggaaaagcaaagtttctttgatctggaatacatcagacacacctgggttgggaaagggacaggaccaaattaagaagtagtatgaagttctaaaaatcytgctggattgtttagaaggaaataatggaactcctggagcattttctatggctgcaaggagtacaggcaacagggaatgtttttgctgtcacagaagtagttccagttactggagcctggaaaactcagaagcaggagaggcagtgattgaggaagaaccacaggcagggcacccatccaggtgatgggccttcgtgagcttcaccaaaagcagcttcagttcagacttcagtggcgaggggtggggaggggctgtgattcttgaacctgggacccccatgtgggaacccagaggtctatccctgagatgaggtcattggcgttatggaccagagagtttcagggcaggaggcagctgcagcaacagtgccactggggcatgagaatagagaacctggccagcctccaa

SEQ ID NO: 11346 - DNA, 1177 bp, Homo sapiens
aaaagaaaaaaaaattctatcattttattgccaggactggttgcacggccacacctgacttcaaaggaggctgggaaatgtaatctttaatctataagaataaggggctcagaatcaggggctttattactaaagaaaaagggagaccagagaaagaggaacaactagcagtgctcaccctgcccatgtttatggtgggcattatgactgccctcctctagttccaattcttctccccttcccagacacttggaaagctccattatcatcccccttgcaggaggcagctctgctatactagctctggcaaataagccagagagatgggtgtcacttctgggtcacagcatgtaagagcccattgcagctctccacattcttttcccgcctgtggaagtgtgtggaagagggaggcgccagaaggccaaagcagcatgacctaccacatagaggacagcagccctggagggccctacagaggacttccagtcctacagagggtcctattgtcctacagagaacttcatgtgatagagaaatacacttttcaatgttaaaccaccaaaatttggtttcatttgttactgcagcacagcctaccctgtcttgtgtgatacaatattcctaataaaatcttcagtgtagaaaattgtaaatcaggctaggcatggtagctcacacctgtaatcccagcactttgggaggccaacrtgggagaattgcttgagcccaggagtttgaaaccagcttgacaatgtagtaagaccctgtctcaaaacaaagaaaaagaaaattatatggggaaaggattccctatttaataaatggtgctgggaaaactggctagccatatgtagaaagctgaaactggatcccttccttacaccttatacaaaaattaattcaagatggattaaagacttacatgttagacctaaaaccataaaaaccctagaagaaaacctaagcaataccattcaggatataggcatgggcaaggacttcatgtctaaaacaccaaaagcaatggcaacaaaagacaaaattgacaaatgggatctaattaaactaaagagcttctgcacagcaaaagaaactaccatcagagtgaacaggcaacctacaaaatgggagaaaattttcgcaacctactcatctgacaaagggctaatatcca

SEQ ID NO: 11347 - DNA, 1177 bp, Homo sapiens
aaaagaaaaaaaaattctatcattttattgccaggactggttgcacggccacacctgacttcaaaggaggctgggaaatgtaatctttaatctataagaataaggggctcagaatcaggggctttattactaaagaaaaagggagaccagagaaagaggaacaactagcagtgctcaccctgcccatgtttatggtgggcattatgactgccctcctctagttccaattcttctccccttcccagacacttggaaagctccattatcatcccccttgcaggaggcagctctgctatactagctctggcaaataagccagagagatgggtgtcacttctgggtcacagcatgtaagagcccattgcagctctccacattcttttcccgcctgtggaagtgtgtggaagagggaggcgccagaaggccaaagcagcatgacctaccacatagaggacagcagccctggagggccctacagaggacttccagtcctacagagggtcctattgtcctacagagaacttcatgtgatagagaaatacacttttcaatgttaaaccaccaaaatttggtttcatttgttactgcagcacagcctaccctgtcttgtgtgatacaatattcctaataaaatcttcagtgtagaaaattgtaaatcaggctaggcatggtagctcacacctgtaatcccagcactttgggaggccaacatgggagaattgcttgagcccaggagtttgaaaccagcttgacaatgtagtaagaccctgtctcaaaacaaagaaaaagaaaattatatggggaaaggattccctatttaataaatggtgctgggaaaactggctagccatatgtagaaagctgaaactggatcccttccttacaccttatacaaaaattaattcaagatggattaaagacttacatgttagacctaaaaccataaaaaccctagaagaaaacctaagcaataccattcaggatataggcatgggcaaggacttcatgtctaaaacaccaaaagcaatggcaacaaaagmcaaaattgacaaatgggatctaattaaactaaagagcttctgcacagcaaaagaaactaccatcagagtgaacaggcaacctacaaaatgggagaaaattttcgcaacctactcatctgacaaagggctaatatcca

SEQ ID NO: 11348 - DNA, 549 bp, Homo sapiens
tggatgaaactggaaaccatcattctctgcaaactattgcaaggacaaaaaaccaaacactgcatgttctcactcataggtgggaattgaacaatgagagcacatggacacaggaaggggaacatcacactctggggactgttgtggggtgsggggaggagggagggatagcattaggagatatacctaatgctaaatgacgagttaatgggtgcagcataccaacatggcacatgtatacatatgtaacaaacctgcacattgtgcacatgtaccctaaaacttaaaatataataataaaattttaaaaaaaagaaaattataaatcataaagttaaacatctatttaatctgcttcccccactttatttttgtataagtatgcatacatttttctttttatatataagctcatactatatagtctattctataaatcacttttttcattgtgtatcatctctgtatcaatgttatctatttttttaactgcatggcacgttacgtatgattcaccgcaatttgtttaaataatcacctactagtgga

SEQ ID NO: 11349 - DNA, 549 bp, Homo sapiens
tggatgaaactggaaaccatcattctctgcaaactattgcaaggacaaaaaaccaaacactgcatgttctcactcataggtgggaattgaacaatgagagcacatggacacaggaaggggaacatcacactctggggactgttgtggggtgcggggaggagggagggatagcattaggagatatacctaatgctaaatgacgagttaatgggtgcagcataccaacatggcacatgtatacatatgtaacaaacctgcacattgtgcacatgtaccctaaaacttaaaatataataataaaatttwaaaaaaaagaaaattataaatcataaagttaaacatctatttaatctgcttcccccactttatttttgtataagtatgcatacatttttctttttatatataagctcatactatatagtctattctataaatcacttttttcattgtgtatcatctctgtatcaatgttatctatttttttaactgcatggcacgttacgtatgattcaccgcaatttgtttaaataatcacctactagtgga

SEQ ID NO: 11350 - DNA, 549 bp, Homo sapiens
tggatgaaactggaaaccatcattctctgcaaactattgcaaggacaaaaaaccaaacactgcatgttctcactcataggtgggaattgaacaatgagagcacatggacacaggaaggggaacatcacactctggggactgttgtggggtgcggggaggagggagggatagcattaggagatatacctaatgctaaatgacgagttaatgggtgcagcataccaacatggcacatgtatacatatgtaacaaacctgcacattgtgcacatgtaccctaaaacttaaaatataataataaaattttaaaaaaaagaaaattataaatcataaagttaaacatctatttaatctgcttcccccactttatttttrtataagtatgcatacatttttctttttatatataagctcatactatatagtctattctataaatcacttttttcattgtgtatcatctctgtatcaatgttatctatttttttaactgcatggcacgttacgtatgattcaccgcaatttgtttaaataatcacctactagtgga

SEQ ID NO: 11351 - DNA, 628 bp, Homo sapiens
tttaatgcagagagaagcttcccacattcctcaaggttttgcttctattttttttttttttttttttgagatggagtctcactctgtcacccargctggagtgcagtggcacaatcttggcttactgcaacctccacctccccggttcaagcaattttcccgcctcagcctcccaagtagctgggactacaggcgtgcgccaccacacccagctaatttttgtatttttagtagagacagagtttcaccatgttggccaggatggtctcaatctcttgacctcaggtgatccacccacctcggcctcccaaagtgccgggattacaggcatgagccaccgcgcccagcctttgcttctattttttatcatgcctctttccataggatgttcaccatgacaagagccatggaagaggctctttttcagcacttcatgcaccagaagctggggatcgcctatgccatacacaagccatttcccttctttgaaggcctcctagacaactccatcatcactaagagaatgtacatggtgagtcatgttgaacccttccatggcagcccagcccccaccaatatgcctgattattaaagtctcaaaccacaaaccaccagggcttccagagtt

SEQ ID NO: 11352 - DNA, 553 bp, Homo sapiens
ttaaaatagtcatttcacatcatcaagcgaagttcagagcatgctaagaaataactgttccagaaagggttgtgccttcttcacctgcaatttctttaactgaaactggaactatcatctcccttccccaactcactggttcttgttacaccaaagaaacgtagccaactgaaaacaatgagcagttgtcgtgactgtagagattaaaccaattttaagcatttttacataaagcacgtatcacaagatgcactgcacagcattatttgcctgaggtcggattcttaccttttccttttctagattggttaacaagcactacatatttaagaatggaattcttcatcttcaaagttatctgaytgcacgtcataaacaatttgattgaaagtaaaggggagccagttgtggtgcttatgcctgtaatcccagggctttgggaggccaaggcaggaggatcacttggggccaggagtgtgagactagcccaggcaccatagcaagaccccatctccacaaaaaataatcctactactaggtatctacccagagg

SEQ ID NO: 11353 - DNA, 524 bp, Homo sapiens
atttgcaggcaggagagtgaagcaatgtctgtactctatacatagtcttacttttttcttttcttttttaaagtagctgtttcagcattcaactgggggcaagaggggttggggggtggaaaaagatagtgcaggcaaactttctcagtgctattccatccctctatgtctccccactccttcacacctctgaagttatggcaagactaggtaaagagttttgaacaatattgagaccctcttatatttaccttgaacaaataggatctttgacacttcttgaccacactcagctgcctgcaagagtgcttcctcctatagcaagtcatatcgggagaattcgctgaagaaaggttttttccttacaattgcaaatgaaagtataaaatagatcaccaaattttaaagtgtgcatatgtcctcatctcagctgttgacatcatatttataatcatgagcacgccaggtttyctacaacttaagaaattctatgaccatattactttcccacctttatcagtaaa

SEQ ID NO: 11354 - DNA, 568 bp, Homo sapiens
gaatatattgttttttatgatgcttttagacccaaattttctttgtattttaagagagaacgaagaaccaagtacttggcataaaaataattgcccaaataaattatcactgaatgaaccaataaataaagtttacattgctcttcactaaaaccttgcagtttcaagcactcagaaactcagcctgattctcttacccatartagcccccaacactctaaaacaagtaaacaaacaaaagcatggcgtgaaatggaatacatgctgtcttgtgtgcacatgtacacacacacacacacacacacacacacacaaagttgcatctgtccctggacaatgggaatgatctcttagaaatcttcattggaaaatgatttagagctctagttgctatgacacccaccctgtcacagtgattgaaaatgactggcaggtaaatacaacagtgaccatctcaactgctctcttcttaatccatcacaaggtaactgatgctctttcctgcacaaaagctgcttaattcccttctagtaacaagattttattgaaaatgtctattataactaat

SEQ ID NO: 11355 - DNA, 586 bp, Homo sapiens
tcacaaaatagtctttttcatgcggctgtcttcacaaagaactgcagaaacctcagccttctttaaatgattcctttgggttcaaggcaggggaagtttgggagagcggtgatggtatcttgcaaactgatgtctttcttcacattttacatagtgacctgaccattgaagatgccattgatagaacatccacccacgatagcacaatgggtgttcttatttgtctttttcatcttgggggaggggagttcttaatatttcataccaatggcctcattctttttttgtttagtcaacaaacrcttaagttgagtgcttacgatgtgctgagtactgttttatgtaccatgggtatagctattaaaaaaacagatcaagtccctgctcatggtgtttgtaagctagtgagaggaaagagatgttctatgaacaaatcagtacaaattcgatgctgatatgtgctacaacagagagtaaagcaagaaaagggatacagtgcaatggtgggggtgggcgctctttgatatagataaagtgatatttaggtagcggtctcaaggaggtgagggaatgagccaggaggata

SEQ ID NO: 11356 - DNA, 582 bp, Homo sapiens
tcactaccagtgagtaggatgaatggtttgtattagtttcttagctgactacagtaggcagaattttaaaatggtctcccaagatttcctgtcctgccagtttccatggctcacgcctgtaatcccagcactttgggaggccaaggcaggcagaacacccgaggtcaggagttcgagacyggcctggtcaacatggtgaaaccctgtctctactaaaaatacaaaaattagccaggcatggtggcatgcacctgtagtcccagctactcaggaggctgaggcaggagaattgcttgaatctgggaggcagaagttgcagtgagccgagattgcaccactgcactccagcctgggtgatagagtgagactctgtctcaacaacaacaacaaaaagaggatttcctgtcctaatccccaggactgaaaacacaacgagatatcacatccacgattacatcatgtgccaagagagattctgtagatgaaattaaggttgctaatcagttagtagtgagttattaatggggagattatccaggagggcccaatctaatcacaagtgccctttaaaaatagaaagtt

SEQ ID NO: 11357 - DNA, 1212 bp, Homo sapiens
ggtaatgcaacagaattagagcttgcagataagaaattgaggcttaagaaaagttaagtaaacctccaaaggcatagtaaatggctgaactggaattcaaacctaggcaatctgactccagagcttgggcccttcactgctgcaccaaattcctttatcattagagtatgatctctgcaaagaacaatgtagtgtatatttcaagacacatagaagagaaggttttgaatgttatctttacaaagaaaagataaatgtttaaagtgaggaatatggtaattaccctgatcagattgtttatacaacacatgcatgcattgaaacatcacactgcacctgataaattggtacaattattatgagtcaattataaataaggaataattaaaattttttaaaaagcaaaaatgctcctggataagggttctaacattttgtaggtagttcccccaaactttcagrgaaagagaattccccaagctgagtcagaatttcagaacacagaaaagatggaaagctacccagtcattttatgaggctaacatgatcagaaaaaaatatgacaatatagcataagaaattgactctatgaagagagaggaacacattcccaagtaaaattctaacaaatataatgcagaatagtaaaatattaatccactctgagcacccagattttacaacaagaatgtaaaatggtttaatacaatatctactaatatataccacgtacaaataggcctaatggtaaaaaaaaaaaaaaaaaaaactatatggcaatcttaacagatgcggggaacaagttttagaaaacccagtacttattcctgattaaaagttctaaacaagctagttatagaatgctatatcttaaaccaagagtcaacataatgtttaacaacctgttgaggtccagatcaagtctacaatggtggctactactgctcctggtatttgccatggaaattctggaaattctagcatatgtggtgaggcatgaaatgaaaacgagagaggtaactataggaacgagggtcactgttgcttgtatattattattagctacttaggaaacccaagaaaatctaatgaaaaactcagagagaaagagcttttagtgagacagatgcctatgggggaaaaaaaaacccataacaaattcaaacaatagcttccccacaaatcagtaagaaaaattttttaaagctgtca

SEQ ID NO: 11358 - DNA, 1212 bp, Homo sapiens
ggtaatgcaacagaattagagcttgcagataagaaattgaggcttaagaaaagttaagtaaacctccaaaggcatagtaaatggctgaactggaattcaaacctaggcaatctgactccagagcttgggcccttcactgctgcaccaaattcctttatcattagagtatgatctctgcaaagaacaatgtagtgtatatttcaagacacatagaagagaaggttttgaatgttatctttacaaagaaaagataaatgtttaaagtgaggaatatggtaattaccctgatcagattgtttatacaacacatgcatgcattgaaacatcacactgcacctgataaattggtacaattattatgagtcaattataaataaggaataattaaaattttttaaaaagcaaaaatgctcctggataagggttctaacattttgtaggtagttcccccaaactttcagggaaagagaattccccaagctgagtcagaatttcagaacacagaaaagatggaaagctacccagtcattttatgaggctaacatgatcagaaaaaaatatgacaatatagcataagaaattgactctatgaagagagaggaacacattcccaagtaaaattctaacaaatataatgcagaatagtaaaatattaatccactctgagcacccagattttacaacaagaatgtaaaatggtttaatacaatatctactaatatataccacgtacaaataggcctaatggtaaaaaaaaaaaaaaaaaaaactatatggcaatcttaacagatgcggggaacaagttttagaaaacccagtacttattcctgattaaaagttctaaacaagctagttatagaatgctatatcttaaaccaagagtcaacataatgtttaacaacctgttgaggtccagatcaagtctacaatggtggctactactgctcctggtatttgccatggaaattctggaaattctagcatatgtggtgaggcatgaaatgaaaacgagagaggtaactataggaacgagggtcactgttgcttgtatattattattagctacttaggaaacccaagaaaatcyaatgaaaaactcagagagaaagagcttttagtgagacagatgcctatgggggaaaaaaaaacccataacaaattcaaacaatagcttccccacaaatcagtaagaaaaattttttaaagctgtca

SEQ ID NO: 11359 - DNA, 1212 bp, Homo sapiens
ggtaatgcaacagaattagagcttgcagataagaaattgaggcttaagaaaagttaagtaaacctccaaaggcatagtaaatggctgaactggaattcaaacctaggcaatctgactccagagcttgggcccttcactgctgcaccaaattcctttatcattagagtatgatctctgcaaagaacaatgtagtgtatatttcaagacacatagaagagaaggttttgaatgttatctttacaaagaaaagataaatgtttaaagtgaggaatatggtaattaccctgatcagattgtttatacaacacatgcatgcattgaaacatcacactgcacctgataaattggtacaattattatgagtcaattataaataaggaataattaaaattttttaaaaagcaaaaatgctcctggataagggttctaacattttgtaggtagttcccccaaactttcagggaaagagaattccccaagctgagtcagaatttcagaacacagaaaagatggaaagctacccagtcattttatgaggctaacatgatcagaaaaaaatatgacaatatagcataagaaattgactctatgaagagagaggaacacattcccaagtaaaattctaacaaatataatgcagaatagtaaaatattaatccactctgagcacccagattttacaacaagaatgtaaaatggtttaatacaatatctactaatatataccacgtacaaataggcctaatggtaaaaaaaaaaaaaaaaaaaactatatggcaatcttaacagatgcggggaacaagttttagaaaacccagtacttattcctgattaaaagttctaaacaagctagttatagaatgctatatcttaaaccaagagtcaacataatgtttaacaacctgttgaggtccagatcaagtctacaatggtggctactactgctcctggtatttgccatggaaattctggaaattctagcatatgtggtgaggcatgaaatgaaaacgagagaggtaactataggaacgagggtcactgttgcttgtatattattattagctacttaggaaacccaagaaaatctaatgaaaaactcagagagaaagagcttttagtgagacagatgcctatggggraaaaaaaaacccataacaaattcaaacaatagcttccccacaaatcagtaagaaaaattttttaaagctgtca

SEQ ID NO: 11360 - DNA, 556 bp, Homo sapiens
cccttattggatagaagtcctgtattgtgctgaaagggaatcttcaacagtgataatgatggataaagattaaagcttatatagttaccaacaaacacatatatttgcttgaaaggtmataaaatatatagttatatgataaaaattctcaagaaaaaatttgaactcctgagaatacacagcttccttcattttaaagataagaaagaggaaaaagtctacaaaaacaaaaagccttgtccttttccaatattttttctaaattctttaaaagactgaatacaacacaatgatattttgtttcaaacctttgttttaaagaaattcttaatattttgtgtaactatgctttttctaattatatgtagaagacataaaataattaataagccatgaaattaatataagtttttacagtatgttttaaaagaggcaagttatcattcactattttttatagtatcaaagaaggggacagaaaaacccaggagaaaaaaattgctctgtgtcttaagtgctacattttatttctaattttgtatctgtcattaaacat

SEQ ID NO: 11361 - DNA, 564 bp, Homo sapiens
acaaaaagaattccttttatacttggtataaggcctatatagtaaatagattctaattttctcctatttagtgccctagcacatcactgaaccattatctggcatggtgatcctccagaaagacaggagtattatatggatacataaatatatttcatggttcattcctataatatggtattcataaaagagggaagccactaggaatcttcaggatgataaaagaaaagaattgatggtggcaacaagagcaggcggaattaaaatgaggagtctctgataaattcaaagatagcagggatgtccctgaagctgacccagagaaacaatgcatgtttgttttgttttatttttatgagagagagagagagagaaggcactgttggaggcataaasatactaagatttgggctgggctggtggctcatgcctgtaatcccaacactttgggaggctgagaccgggggatcacctgaggtcaggagtttgagaccagcctggccaacatggcaaaaccccatctctactgaaaatacaaaaattagccaggtgtattggtacatg

SEQ ID NO: 11362 - DNA, 564 bp, Homo sapiens
acaaaaagaattccttttatacttggtataaggcctatatagtaaatagattctaattttctcctatttagtgccctagcacatcactgaaccattatctggcatggtgatcctccagaaagacaggagtattatatggatacataaatatatttcatggttcattcctataatatggtattcataaaagagggaagccactaggaatcttcaggatgataaaagaaaagaattgatggtggcaacaagagcaggcggaattaaaatgaggagtctctgataaattcaaagatagcagggatgtccctgaagctgacccagagaaacaatgcatgtttgttttgttttatttttatgagagagagagagagagaaggcactgttggaggcataaagatactaagatttgggctgggctggtggctcatgcctgtaatcccaacactttgggaggctgagacygggggatcacctgaggtcaggagtttgagaccagcctggccaacatggcaaaaccccatctctactgaaaatacaaaaattagccaggtgtattggtacatg

SEQ ID NO: 11363 - DNA, 564 bp, Homo sapiens
acaaaaagaattccttttatacttggtataaggcctatatagtaaatagattctaattttctcctatttagtgccctagcacatcactgaaccattatctggcatggtgatcctccagaaagacaggagtattatatggatacataaatatatttcatggttcattcctataatatggtattcataaaagagggaagccactaggaatcttcaggatgataaaagaaaagaattgatggtggcaacaagagcaggcggaattaaaatgaggagtctctgataaattcaaagatagcagggatgtccctgaagctgacccagagaaacaatgcatgtttgttttgttttatttttatgagagagagagagagagaaggcactgttggaggcataaagatactaagatttgggctgggctggtggctcatgcctgtaatcccaacactttgggaggctgagaccggsggatcacctgaggtcaggagtttgagaccagcctggccaacatggcaaaaccccatctctactgaaaatacaaaaattagccaggtgtattggtacatg

SEQ ID NO: 11364 - DNA, 573 bp, Homo sapiens
catttagaccagctttgggcaacaaaaacacagagttacataatcaatattcaggttaataatgttatatcagtaaaactcatgctacattacttaataatatattaattggtctttacctacaccagacgactgcttcataatagtaacataattttgaatgtaaatacaatgtccagttcaccagtgcttggagttgcattttcttctgtatgaccacagcttattatgtgaaacagcatgtaactccycacatatctctataagtgaaagcagtgggattagtggtttaaacaatttcacagtgccacattttatcctgagttccctgcctgaggcagaaatagagctgacagcatcctgttaaacagaacttctacccttaggagctgattcatgaattgtgaataaatggacctctccaaaatacctcatgttctctcttcactgtacaggctacctattcacatatttatgtagtgcctaaaaccatagtatgaaaaccccttgacgagtacattatttagatttttaaaaatatatatacatgggactgggcatggtggctcacac

SEQ ID NO: 11365 - DNA, 573 bp, Homo sapiens
catttagaccagctttgggcaacaaaaacacagagttacataatcaatattcaggttaataatgttatatcagtaaaactcatgctacattacttaataatatattaattggtctttacctacaccagacgactgcttcataatagtaacataattttgaatgtaaatacaatgtccagttcaccagtgcttggagttgcattttcttctgtatgaccacagcttattatgtgaaacagcatgtaactcctcacatatctctataagtgaaagcagtgggattagtggtttaaacaatttcacagtgccacattttatcctgagttccctgcctgaggcagaaatagagctgacagcatcctgttaaacagaacttctacccttaggagctgattcatgaattgtgaataaatggacctctccaaaatacctcatgttctctcttcactgtacaggctacctattcacatatttatgtagtgcctaaaaccatagtatgaaaaccccttgacragtacattatttagatttttaaaaatatatatacatgggactgggcatggtggctcacac

SEQ ID NO: 11366 - DNA, 587 bp, Homo sapiens
acataatactattatatacttaatatactatagtatagggtaaacataacttttatatgtactgggaaaccaaaaagtttatatgatttgctttattgtgatattcactttrttgagattgtctgaaaccaagattgcctgatacctggagtatctccaaggtatgcctgtattatagccattgaatgaatttatgtatgcaatgttgggaagaggaactgaatcctataaagtattagttattactcctattcttcagcttcttcaaaagactgattcagaggtaaacagaatggtcgaaggtgagccctaagtataactgggtaaatttttaatgaatgaaaagcctgtggaatcaatgattattaagtattgttctacatttatttttagagacctctatgaaaataaaaaataaaaagtccgccaggtgcagtggctcacgcctgtaatcccagcactttgggaggccgaggtgggcggatcatgaggtcaaaagtttgagaccagcctgataaacatggtgaaattccatctgtactaaaaatacaaacattagccagacatggtggcacgcacctgtaatc

SEQ ID NO: 11367 - DNA, 1296 bp, Homo sapiens
tgtatgtatacatatatgtgtatacatatatatgtgtgtatatatatacacatatatacgtatatatgtrtatatatatacacagttgaatcagtgggattaatacctataatctctggttttcaaaggtaatatagaatatttgacacttggtaaaaggtgaactacctttgtagtgaatcttttcctcttggtagcatcaacactggggataaatcagaaccattctgtggaatgaaatgtttctcaagagcctataatatagtagatagtgcatattaagatgtctggctgggcatggtggctcatgcctgtaatcccagcactttgggaggctgaggcgggaggatcacttgagcctagaagttggagactaacctggcgagaccctgtctcaaaaaaaaaaaaaaatcaatttagctagcaggaatttgacatttaaagagggaatcttctctacctctacaaaatcaacccttaacacttttttcaccttcagaattatctagaatgtggatttactttgtctagttttttcctttatagtgtaattattgttactctctatttactgactaccagagatatacaaaatactgtgcaaaagattgttactgttcaaagagcttacaaactaaatttaaaagaatagcaagtctgaaaaatagaagatagtcaaatatttgtttatgctaagaactgtttttaattttcagctttgatgtaaattgctagcttagttgtctttagttcaagcatgttaggaaatcctctttattcttaaatatagatacatgtctgcatatatgattgaattttagagccagaaagcatgtagagcagttgtgattagtagaaaatacactgacaagaagatatttgcatttatttcccaaagctgccagtaactagattttgtgacttaagtcatttaacctctccttgattagagcttcctgagccatgcacactggcactgcaaatcacagacaggcctagatacagatcccctcaccccttgctacatccaaaggtggcctgggtggctggagcctctgggccagaaccacctttgtccattttcctcagtgtgcctacagcatcgctttccatgtgtgccataacttgggaatagttgggatgtgttgcttaactcctttacaccattagttatctgtgagaccatctattccacactcttcattttttaaaaagagacaataattatttttaactcactgaagtttaaaactacctagcatttctgattaaaaaaaatttagaaggaaaatttta

SEQ ID NO: 11368 - DNA, 1108 bp, Homo sapiens
gtcactgtgatgcagaggtcccaggaaagcagtgtggagactggagcagcactggaaggcctttggcacttactctaaaggctaagctgccaccatactttgaggtagcacctcctactgggaggaaagccttaatccatacattggtaagcattactgactgcaattagtaggaaaatcccagaggaaataattctaccctcatcactcaaaaacagaaatgaagcaatacgctaacttgaaaaagccatgggaattttgagagaatcaggggtccaaaaataaaccattcatagactttggaaagaattcttttttcttttttttttggaaacggagtttcgctcttgttgcccaggctagagtgcaatggcgcaatcttggctcaccacaacctccgtctccccggttcaagcaattctcctgcctcagcctcccgagtagctgggattacagacacgtgccaccacgcccggtgaatttttttgtgtttttagtagagatggggtttctccatgttggtcaggctggtctcgaactcctggcctcaggtgatccactcgcctcagcctcccaaagtgttgggattacaggcgtgagccactgtgcctggcctggaaagaattcttaaggggagagctcagagggttgcaagctttttggtttcgagtttggattttttttttcttgcttgttttctttttattatagaaattttcaagcatayttcaaaagtaaaaagtgtaatataaatagtataataaccctctgaatagccatcatccaccttccacatgcatcagcatatgtgcagtcttattttatctacatgccaaaccacttcccaaagccctcataagattattttagagcaaatgacagacatattgatttaatctacaaagtcttatctacgtatctttaagaataaggactctttttaaaaatatataaccatatttaccattatcatacccaacaaattaacaaaattactcagtcatcaaatatccagtcagtatttaaattttttattgtcttataaatattttttaagttgcattacgcaaatcaggatccaaatgctattcacatgttgcattgtgat

SEQ ID NO: 11369 - DNA, 1108 bp, Homo sapiens
gtcactgtgatgcagaggtcccaggaaagcagtgtggagactggagcagcactggaaggcctttggcacttactctaaaggctaagctgccaccatactttgaggtagcacctcctactgggaggaaagccttaatccatacattggtaagcattactgactgcaattagtaggaaaatcccagaggaaataattctaccctcatcactcaaaaacagaaatgaagcaatacgctaacttgaaaaagccatgggaattttgagagaatcaggggtccaaaaataaaccattcatagactttggaaagaattcttttttcttttttttttggaaacggagtttcgctcttgttgcccaggctagagtgcaatggcgcaatcttggctcaccacaacctccgtctccccggttcaagcaattctcctgcctcagcctcccgagtagctgggattacagacacgtgccaccacgcccggtgaatttttttgtgtttttagtagagatggggtttctccatgttggtcaggctggtctcgaactcctggcctcaggtgatccactcgcctcagcctcccaaagtgttgggattacaggcgtgagccactgtgcctggcctggaaagaattcttaaggggagagctcagagggttgcaagctttttggtttcgagtttggattttttttttcttgcttgttttctttttattatagaaattttcaagcatacttcaaaagtaaaaagtgtaatataaatagtataataaccctctgaatagccatcatccaccttccacatgcatcagcatatgtgcagtcttattttatctacatgccaaaccacttcccaaagccctcataagattattttagagcaaatgacagacatattgatttaatctacaaagtcttatctaygtatctttaagaataaggactctttttaaaaatatataaccatatttaccattatcatacccaacaaattaacaaaattactcagtcatcaaatatccagtcagtatttaaattttttattgtcttataaatattttttaagttgcattacgcaaatcaggatccaaatgctattcacatgttgcattgtgat

SEQ ID NO: 11370 - DNA, 516 bp, Homo sapiens
ataccatcgacacgctcaacatgcaggtggaccagtttgagagtgaagtggagtcactgtcagtgcagacacgcaagaagaagggcgacaaggatgtgagtgagggagacccracacctttgggatggggatgggcatgggaatgggctggccagcaggaggccagtcatttatgctcctgggagttggggcctggattcctcaggcggacagggccaacagccgggattagggatttgagagacaggattgggagggcttagcagctgcacgcgtggggcaggaaggaggtcagacagaatctcagggtcccctgggtgtctgggtagaccgtggggcctttgtgaagaggagcgacttgggggaaggtgagtgcaggttgagcttgggccacagagtaaaagtgagacctgaaggacacccatggcaagaggcctcctggcacccagagggccctggtcctagggagagcacagtgggtagagacaaggcagaacatggagaaggcagagaacc

SEQ ID NO: 11371 - DNA, 511 bp, Homo sapiens
tctctgactgagaacctaacccttctcgtccttgattggcagactgcccagagcttggtaaagaggaaaacgtaggttaaagtagaaataatcatatcagctaatgtttattgagaatttactatgttctaggcacagtgataaggattttccaagcatgttcttttttttttttttgagatggagttttgctattgttgcccaggctggagtccaatggcatgatctcagctcactgcaacctccgcctcccggattcaagcaattctcctacctcagcctccagagtagctgggattataggcacgtgccaccacgcccagctaatttttatatttttagtagagacgggctttcactatgttgrttagactggtctcgaactcctgacctcaggtgatccacccaccttggcctcccaaagtgctgggattacagacgtgagccaccgtgcctggcctccatgcatgttcttatttcttcttcctgatcatcgtgtggtataggtact

SEQ ID NO: 11372 - DNA, 548 bp, Homo sapiens
tatggagggcttgtttctgtatctccttctagtgggctggacctccccaggccatttttctaggtaactaggaaggcctgactctgtcagcaacttggctttctttggaggaggtgtcactctgggattagttaaaaggggatcagtggtattcacattggctcgtgggtgtattttctcctcctcaaattataaccttttggagggcaggagtcatgttttattttttgtgccttcttggtgcctaacataatgctggttcatatgtagtatttaatctgtactttgctcacgctgcttgattgaacagagaaagaccgggctttgaatggatccccagctccctgtccagggaargtgtgaggctgggcaagtttatttcccccttcctccctggggagaaagtgaaaaagtgaaagtgctggggttgggatagctggtggtgtctttgtggctttcaccccatggtcaagcagtgaactctgcttgcagattctgtctcgctcacctggaagccagtgttggggaaggagcacgtgggggaggat

SEQ ID NO: 11373 - DNA, 575 bp, Homo sapiens
atttaaaaaatctttaggggcaagcacgtataaaaattattaaaataacactatgtcctgcgygctttatgtccaaacctagctaagcccaaaggagacatcaagaagacagccttgctataaaaacctgttgggtagtgggggagggaaacctactcatttgtttcttctgtatgtctctattgagctcctttacgtcatttaagagcaagttggtgggtggtagaagagtggcaggatgcaaagaataaataaaaataaataagagatatttttattatcatagtggaaaaacatataattatcataataatagctaagatttagcgagcatattttcagttgccggacaccactctaagtgctttgaattgtaaactaatttaatacccacaacaacctgtgcctcttctcagatccacttaaacaagctataaattttcaatggtttccatgggaacaaattggcaaaatggacagtgcacttaaaagaactaaagggagagaatgcagaagacaaaaaagaccttgtcaaaaataaaattggtttcatttctagaatcacacataattca

SEQ ID NO: 11374 - DNA, 575 bp, Homo sapiens
atttaaaaaatctttaggggcaagcacgtataaaaattattaaaataacactatgtcctgcgcgctttatgtccaaacctagctaagcccaaaggagacatcaagaagacagccttgctataaaaacctgttgggtagtgggggagggaaacctactcatttgtttcttctgtatgtctctattgagctcctttacgtcatttaagagcaagttggtrggtggtagaagagtggcaggatgcaaagaataaataaaaataaataagagatatttttattatcatagtggaaaaacatataattatcataataatagctaagatttagcgagcatattttcagttgccggacaccactctaagtgctttgaattgtaaactaatttaatacccacaacaacctgtgcctcttctcagatccacttaaacaagctataaattttcaatggtttccatgggaacaaattggcaaaatggacagtgcacttaaaagaactaaagggagagaatgcagaagacaaaaaagaccttgtcaaaaataaaattggtttcatttctagaatcacacataattca

SEQ ID NO: 11375 - DNA, 530 bp, Homo sapiens
agtggatctaagcccgtgcagattatgttggaataatgatagataggtagataggccagtagatggtatataacaaaaaatagttaatacatatatatatatatatatatatatgtatatataaagcagatataaaaaaatagttaatacatatgtatgacctaaaaatccagcataatctgacatgtccactaccttaactaaaacaatatatactataaggctgggcgcagtggctaacacttctaaccccagcactttgggaggccaaggtgggtggatcacttgaggtcaggagttcgagaccagcctggccaacatgatgaaaccccctttctactcaaaaactcaaaaattagcctgccatggtggcatgcacctctatgtagtaccagctgatcaggaggctgaggtaggagattcacttgaacccacgaggtagagattgcagttgagataatgccactgcactccagcctgggtgacagagtgagatcctgtctcaaaaaaamaaaaaaaaacaccataat

SEQ ID NO: 11376 - DNA, 516 bp, Homo sapiens
gggaacaaatgaagagaactggacatagtaaataagattaatgtaacaaagtctataaatatatcctttctttcctttcttttctcagcttattkagtagccacaaaactatacaaagtacttataacaatgtattttggggtttgtaacaggtatagatattatatccttaacaatattagcataaagaaataaaaatggaagagaaatagaactgtataggagcagtgtttctttatttcactggaaatattttcttgacagtttaagtctgattttgccaccatgcagacaaggtagtttggttttgctgctgcataagttatgaaaaagcgctcagttttcagaaatatttaaattttgggtttgtgaataaagtactgtagtctgtataatagaattttaataaatgtaaaaaatactgaaacatgttgaataccagagatacacttagaaagtgtgaaaatacaaggatagaaaaagtataccaggcatatcagaaataaaatatttctg

SEQ ID NO: 11377 - DNA, 1192 bp, Homo sapiens
tattaggcatttctcctaatgctctccctcccctagccccccaagcccccgatgggccccagtgtgtgatgttcccctccctgtgtccatgtgttctcattgttaaactcccactaatgagtgagaacatggggtaacactcctatttctatttaacccagtgaggctctaatactcatgaatttacctaaagccaccttgtgggaaaattagttatgccagggtgaatactcacaatatgaagcaaaactgactcttacttgtattctgtagtatatttcataatatacatggaatcaaaacatcgaggtgaagaaaagtmgacttggatttctttctcttcctcagagattccatctctgtggcagagaggctacagaaagaagcttatactggattatactttgttagagtgagagacattgaacatttctagagggttgattgatgtttatgacaagggcctttaggtgctgatttatcaaatatatattgtgtcattggttgcatttctcatatatagccacaacatcatgctccatcttacatgcttttcttctatgtgatctcatcacatcccattaagagagattgaacttgatagactcagttactgttttgaccaataatatgtggaggaagcaatcagtgccagttctagggctagcccttaagtggcctggcagtgcccacttcctgcctgtgggagaccagccaccaggtaagaagtataactactcagaaatcatcatgtgagaactccaggctctgttaagaggcctggaggatgagatgtcacgtggagagatagaaagaagccaagcagcaccaaaatgcccatgtgtaaggagatcctacgctccaactatagagaccaaccatccagtaaaattctccctgaattcttgacctacaacattttaaataaaacaataaataaaaaattaataaataaaataatgaatttttattttaagcatctaggctctaggatggcttgttaagaaaaaatagattatcagaacaattgtccatatcatataaatctgaagttctatggactaacaaaaaagcttgaattttgtgatttacttttgagtttcaatagtttgatttctcagtaacaaaatgaatctgggtaatgtaattatctaagttaaaatatgaattgtgtattcaaaagacagttatg

SEQ ID NO: 11378 - DNA, 528 bp, Homo sapiens
ggccgttgcatcactaagggactcacgctcagttgtgatttgcttcaaagcctgatctctttattacatggcagaaaacaaagtgaatgttattcataataaaaagtatatgccacatgcaacagggactcatatctccagttttcttagttcaactgtgaggtaaaaattatgtaaaaattagaagaaaaggccgtctagcaaaggaagactcttcatctaatgaaaacttgaaaaarttaaaacaatagtgtaatgaaatggattatttattttttaaaattcaaaattaaatgaatattgattttaaaaactttagaaattagtggaatatgaaacaattcaaactacattagaaacaagtgccagtcaaggttttaaaatatgtccatctttagattaactaattaaaaatgttttagcttaagtaaattgtaaaatttctctgtcaaggatgtctacctactaaaatttcatttaaaggcattcattagttttagctaccaactaaataggaaagttttcatc

SEQ ID NO: 11379 - DNA, 529 bp, Homo sapiens
tgcagacatcacctaattcaggaaatacttttgaaacactgttcatgtgcmgtttgtgaaaacaatccaggaaaacaatctttagtgccattgaaaataaaacttacctccctcctctgtgaaatagatgccaggtgaaagaagctgcaaaggaaactgtcttcttatcatcagctctggaaaaaagactcctacaggggcaaataagttaatgtctggatttttgaaaattatttacctagttcatatttccatgttgggccaacagcagtagggacagaaacagcaagctcacctaaacaacatggtgcatggacagttgccacatgtgcccaggccaagggggcacagttgctggtgtaagacatggcacacatcatttataacttcacaggatacttaaggatgggggaagattaaagtcagccctccgtatccaggggctggatccaaacatccgtggattcaaccaactatggatcaaaaatatttagagaaaaataacaatataacagtacaaatagtacag

SEQ ID NO: 11380 - DNA, 536 bp, Homo sapiens
gaatagaggtattgatttggaagaggcacaagggagcctcccagagggctgaaatgttctatatcttgcatatcttgatcagtagtatgtgtacccccgacacacacacatatgtatctccaccaaatgaatacttaagatacgtgaactacactgaaaagtgtaaaaagaaaagaaatagaggaaaagataaaataattgtgataaaagacaaaatagtcttgcatatataactgttggagaaactggttatctcttgtgaagaaactagagcttctctcaggataatggataataatggtgataagatgtattcaaagtcctagagcgttagtagagtagtacataaccaattatatagtgagaaaatatgcctctggtaatagtcgtattgycataataaagagatttgtaggaacgaacccatactatgaaaacataacatttatatagcaccaaattacctgaaagtctatttgtctctctccttgcatattcacctccattcactcttttgctgctttttttaattttta

SEQ ID NO: 11381 - DNA, 1255 bp, Homo sapiens
gaacttgtatttgagaggttatgcattatgcaggcatatcaagctgatattttgcatgccaaatgtgtccttaaaaatatactgtctctgtgtcattcagcataaaacactgctggctgtccttaacaacaatataattttaaaagattgatttcagacgctccaaaaattcacgagccaagaaaaactatcatagttgttcactttctccctaatgttaactgccgaaaagagcttctttttaaatatttttttcttccttgagactgaagagacataaaaataagtctggttttgttattagtacatggataaaatatgtattgaagaaaacacatctttaattttttaagagtctgtttttcattagcttatcttgatagtttaagttaatcattattttcagccatatatgatttagatattatgtcattaattcatgtacagtccatctgagtaatgattgtggttttctactttacaaattcatctacttcaccaagaaaccaagagagtcaaattccatgcaacatctggtttccattgaatgtaattgccatttgcagagttataatcatgtgttattgtaagggccacmgtgtcaatcactctcctaatggggaaaattcaatgcctaaatacctgggagaacaagaagctgacttaaacaggtgcattcagacactaggttttaagtagaattctaacctacccatttaaataaatcattttaaggagaaacaatattctttccatcccctgtagcaagggaaagcataaaatccaggacttcaatctcccatgctcagttccagtactatatcatgtttaatctttttaaaaatgttcaaatatgcctatatcatagtgattccttatgttccatactctcatgggaactcccaaaggccaggcaggatttttgaaaactttctgggggaagggaccatcttctgattcttcctgccttacatcttctgattcttcctgtctttttttcttacgatgaaaataagccacacttgatttaagaaaatattaaaccattcaaactactaaagtcattatagctttttctagcccatggggttttttggggggataatcacataagaggttgaaaaaatcatgaagcaccgtggtagagagtgcaatatgtaagcactttatggcaaaagtgaaccacatttccttgacctcattctccattgtgtttacaagccaagccttgtttgaactggtaaatgtttggcca

SEQ ID NO: 11382 - DNA, 551 bp, Homo sapiens
atcttgtaggaattttattgttttgtgttttatatgtaagtctgtgatccatttttagttaatttttgtgaagagtgtaagggctttatctagatgggtcttttttaaattttatttttatttttatttttgcatgtagatgttccagttgttctagcaacatttgttgaaaaaacaaacaaaacaaaacaaaaaagcaccacattttctccattgaattgcctttgytactttgccaaaaatcaggtgaccaatcatgcaggtccgtttctggactctctattctgtttcatttgtctctttgtctgtttttttcaccagatgccacactgccttgattactgtagctttacagtaagacaatagatttttaagaatacagtactcacctggctggttctcttaaagacagtccagacagcacggtgcagcaacaaaacaggggagacgatggggccaaagagggctttcacatttgtctaactctcctgcacacacacagaagggaagtttgccttacttctggatatatcaagggagtgatataaagg

SEQ ID NO: 11383 - DNA, 570 bp, Homo sapiens
agagcatcattatatcaggaaaagaaattcttccaatctaaacaattttttgaaaggatatttttagttgcatgtttgtgtttgtaacattttaaaaaaaattgacaatttttaaaaatcaaagatacacatgcactgttaaatgtgtcaaagcttatgataaaacacagtaatttcaagctcaatttagtcatttcacaatgtatacaatatctcaaaacaacattgttgtacacaataaatatatatatttgtaaattwaaaaataaatttaaaaaaccccagtaatttctagctccaatcctcatcaccttctcagaggccacaattttcaaatcttttagctatttcttctggtatctctatatttctagataatatgcttctactgtgatttcaggatttatgcattttttatgtatctgttgacttcctatgataaagatttaccactaccaatctccctttcctccataattccaaatataattacagctatgagagggggtaggtgaggataaagacagtatgtggtcatgctctaccacatattgtgaagtgcacgcatat

SEQ ID NO: 11384 - DNA, 590 bp, Homo sapiens
acaatgtatctgaagttacatactctttgaaggtaagattattgtatttcagaaattaattttttaaatgtgtggctgggcacggtggctcacgcctgtaaacccagcactttgggaggccaaggcaggcggatcactaggtcaggagatccagaccatcctgactaacacggtgaaaccccgtctctactaaaaatacaaaaaattagccaggcatggtggtgggcgcctgtagtcccagctacycgagaggctgaggcagaagaatggcgtgaacctgggaggcgtagcatgcagtgagcagagatcgcgccgtggcactccagcctgggcgacagagcaggactccgtctcaaacaaaacaaaacaaaacaaaaaaaaacagtgattctggtcctagagattttcataactggctgttaggagaaatctatttaacagcccacgtcttcatttcattttctagaaaacaaatgtgaacaagatgtttaaaagcttgattcactctagagactttgtagagagaatgaaggaatttcagaatttgtaggacaattatttttcttaaattttttttaatggtgctcatt

SEQ ID NO: 11385 - DNA, 573 bp, Homo sapiens
taatctttccttgtgtatgaagctctctgatggtctatatttttatgctagtccacactcagtccttattagctcattaaatatttagttgggttgtccttactaacttgcatgttggcacccttttgtcctgtgctctccctcagtggagaaatgacgtttgttgatttccttcakggatgattttgtacatccttgggatgcatactactagaattctctgtgacctgagctttcatatattttttgcttcaagaaagtttcttaaccttccattgggagtggtactctttttagcttttcctatttgagtaagaaaggaaatatcttcagttttttgactgttacattcaactccttttttaaatttagtcttctcttatagattatgtatttacatgattcgaatttaaaactatgtaaagtatacacaaggagattttccctctgtcctccatctatttgttctcatagctaacatttccttagtttatttttatccttatagtgtttcattttgcaaatataagcaatcgtgtatatgaattttatctttacttttctattataaaa

SEQ ID NO: 11386 - DNA, 811 bp, Homo sapiens
tgtcttatattctacttttgagaaatatgtatggtaattatgactgcctgaggaaagaactgttagaaatcttggtaccaaaaaaaaagccttaaaagaaatcaagaaaggtctttggaagaagagaggaagaaatgtctccttattatccaatataagaacaattttattcaaatcaagatattaatatttctctatatttaattttttcttgctgtataagtattgttggagatctctcaatacttcttttttacttgtggcaaagaagtgtatgtagaagattcaattagtgatttcattacagatatggcctcactgaaggagcatctctaaccctagtgcttgtagtcagagattacaaatgcaattatacagttcttacatacatgtaatttcctatttgacacagaggaaagaaggaatartagtttggagattcaaagcactgcttcaaatcctcaaatgctttctatcaatgaaatgtactgagtcccccaccagatcactttgttgtgaaatttggatattaagggtaaaacacaattatgtgatcaaactgactgcacgtttcatctatttgaaagttcacgtattaaactaacttttacatagtcatttctataccttaatcatatttcaatcttaacagataccattataaagttgtatccacaatgtatttcttcctgattttattttcttatctctaactacaaggttcataactgtcatacatttacaggtttctaaaagatatatagcatagtttccatttaaaaaatataaaattaataatctgttttgtaaa

SEQ ID NO: 11387 - DNA, 600 bp, Homo sapiens
aggattttcaaatccactgaatttcttagattgaaatatgtatgtgacagaattctcttagctttctttcctctatgaatatgtaattggaaactctgagatccggtttctcatctttattggattttttctttaatcttaaaattatgaatatttgctttacaataatctagataaggagtccccaacctttttggcaccagggactggttttgtggaagacagttgttccacggacattgtggggagtgggggctggcattagaatctcataaggagcacacaacctagatcctgtgcatgcacagttcacaatagggtttgtgctcctatgagaatctaatgccgccactgatctgacaggaggcggagctcaggctgtaatgctccctggcccactgctcacctcctactgtgcgacccagttcctaacaggccagggaccagtactggtycgtggcccagggtttggggacccttaatctgatgttactaagttacatcattaataatctatttctcctcacacagatttctttcctcacatcctcaacacatataatttcacatctccaaatgcagcattccctaataattacc

SEQ ID NO: 11388 - DNA, 600 bp, Homo sapiens
aggattttcaaatccactgaatttcttagattgaaatatgtatgtgacagaattctcttagctttctttcctctatgaatatgtaattggaaactctgagatccggtttctcatctttattggattttttctttaatcttaaaattatgaatatttgctttacaataatctagataaggagtccccaacctttttggcaccagggactggttttgtggaagacagttgttccacggacattgtggggagtgggggctggcattagaatctcataaggagcacacaacctagatcctgtgcatgcacagttcacaatagggtttgtgctcctatgagaatctaatgccgccactgatctgacaggaggcggagctcaggctgtaatgctccctggcccactgctcacctcctactgtgcgacccagttcctaacaggccagggaccagtactggtccgtggcccagggtttggggacccytaatctgatgttactaagttacatcattaataatctatttctcctcacacagatttctttcctcacatcctcaacacatataatttcacatctccaaatgcagcattccctaataattacc

SEQ ID NO: 11389 - DNA, 876 bp, Homo sapiens
tattctgaatagcttcttttgttaatatgtttctgagacctagccacatggatgtatagactgggttgtatattcatttttttctctctatacactattctgttttatgacaaatgtggccttacagaggactggtacagttgacttagtgataaatatcaacatcagtattatgttggctcttcaaaggagaatgattgcatcagtcattgtaaataaacacaaatactagcctttcttatttgcttttagcacttggggtcaggctaagaaaacgtggtgtcarttattctattcaattaaggatccaaaaaatgtaccacattgtaaacaaacattccattatggaaatctgatgagagaaaatagatcacatttatatcttcactagtctcttgccccacctagtttcaaaacactaggcacatcaagtttcagaactctccatatggataggaatgagctgaaaatcaggccacgtgtaaagccatgatttcaggaaagaaaaaaatggaagcaggcatgttacatcgtaagagtgggagcaaggctggggaagatgcctcatatttttaaacaaccagatcttgtgagaactcactcactatcccaaagacagcaccaagtcatgagagatccatccccatgtcccactcccatcctcctaagaggctgcacctccaatattgggaattacaattcaatatgagaactgaatggggcgtccagactgtatcatgtgtgcattgggcatttgaatgtccaaggtgtgaagtgctggttaaaatcctttgcccatttcttaattgggttgttagcctctcacttattgatttacaggagcacattgtatatacagaacatgtgtgccttttg

SEQ ID NO: 11390 - DNA, 582 bp, Homo sapiens
gttttttctgggaagataagttccaaaatctatttttctactttttaccatatatttttgttggggaggaagaaatagagaagatgacagaaataaaagctcagtttgtgtttgcaaactctttggaaatcatgtttagctacaatgttgagtcttctggagtttctcaactcaaaattaagtgcccacttttgtctcctttctatttctaggatttcttttctccttgagaagtagatagaggatctgaggacagcagccataagccatggcctgctttgaagaccagcagatgggagagataggcatcctgagacattctttctttggtatcctcaacactactatcactatgtttgttggaaggggcatgatgatgctgcaaaaaaatcaggtgaggacatgcacagtgcacrtaaccctgtttacattgaacagactgaacagtcaaatgtaaatatgtgtgcagagtttgcttgagacagaagtattaatccacttcttctttctccatattttctgcatctcactaaacccaaagaataatattagtcatatgtaccttcacaataattatatttg

SEQ ID NO: 11391 - DNA, 524 bp, Homo sapiens
ggccctaagcagtttctagcttgacttttcccctttcacaaaaatgtaaagcattattttctgatattgcttaatccaagaatatatttaaaagcatataaatctgggatcagaaaacactttctttaaatagtgaatagtttaaatattgygagccatatggtctcaaactcatattctttgctttttttgttttctgtttattttatattagtttgttttacagcccttaaaaactgtaaaagactttcttagctcccaggccatacaaaaacagatccataagtttgccaacctctgatatggaaatttgattgactaaggattctttaaacaattttgcatagatattgcctctttctactgaaatttgctaagacagcaatgctaaatttcaagtcgtgcttactaataagtacctgatttataacccttcttatttaccagttaattatgaaagctatattatttcccagcaagtcaagttagggatataattgctattgtcttgaaaaagtttagaa

SEQ ID NO: 11392 - DNA, 524 bp, Homo sapiens
ggccctaagcagtttctagcttgacttttcccctttcacaaaaatgtaaagcattattttctgatattgcttaatccaagaatatatttaaaagcatataaatctgggatcagaaaacactttctttaaatagtgaatagtttaaatattgcgagccatatggtctcaaactcatattctttgctttttttgttttctgtttrttttatattagtttgttttacagcccttaaaaactgtaaaagactttcttagctcccaggccatacaaaaacagatccataagtttgccaacctctgatatggaaatttgattgactaaggattctttaaacaattttgcatagatattgcctctttctactgaaatttgctaagacagcaatgctaaatttcaagtcgtgcttactaataagtacctgatttataacccttcttatttaccagttaattatgaaagctatattatttcccagcaagtcaagttagggatataattgctattgtcttgaaaaagtttagaa

SEQ ID NO: 11393 - DNA, 562 bp, Homo sapiens
accatctctacgtcttggacacatctggcggtgagtggtggtacgcacacaacaccaccgaaatgggctacatcccctcctcctatgtgcagcccttgaactaccggaactcaacactgagtgacagcggtatgattgataatcttccagacagcccagacgaggtagccaaggagctggagctgctcgggggatggacagatgacaaaaaagtaccaggcagaatgtacagtaataaccctttctggaatggggtccagaccaatccatttctgaatgggaacgtgcccgtcatgcccagcctggatgagctgaatcccaaaagtactgtggatttgctcctttttgacgcaggtacatcctccttcaccgaatccagctcagccaccacgaatagcactggcaacatcttcgatgagcttccagtcacaaacggactccacgcagagccgccggtcaggcgggcaaccccttcttcagaagcaagcgctcctacagtctctcggaactctccgtcctccaagccaagtccgaygctcccacatcgtcgagtttcttcacc

SEQ ID NO: 11394 - DNA, 564 bp, Homo sapiens
tcagtcctgttccccaacccagcttctggtctgctgctccagcagacagccctgtgcgtcccgctcctcccacctctcagctttcagggtcaggattggtgcagggaagcacatgctttataacatgtgattattcagacatagggtatataagacaccatttgtattcttgtactgagtcctgcaaatgttaaatttgggcttttggatattaattgggccctttcaaaatggtgattatcctttagttctgggacatgtattttattgtttcattgctaatgtctttctcaacatattctcagatttcttggtttgaaattcatgatagttgatatttaaaaaaaaatttgcatctatggaacatctttttgccttttttcctactttacatgagagtttcttaactttatattttattgaatttgtcagctatgtttacaattccacatatttcatttgttttctggtcarttttttaatttaattgcttcctattctatatgagcatggtgtctatttttatctctcaggatatattaattatcatctcttaaaggtttc

SEQ ID NO: 11395 - DNA, 813 bp, Homo sapiens
gcctcatcgtgctagtcagtgcctggcacagagtagatgctcactagtggtagaaactgtgacagaatcctacaggctatcttttgataggaaatatttgctgggtggatctgggcagccgcagacatctaaccttgattgctgccttggtagcacttcctgagctgcagacagaatccatggcttgtttgcagcttctctggtactgaycccaccggcctgtatcttcactcctgctggaccatctatcccttctctatatagaatcatctatctctcctctctccccaaaccctccataaactccctttctgtccattgaaaatggagaaagcagttttgtgctgggagtgggagcttggtgtgcacccctgcggcaccagtcttgaggttctcctgtttctgctagtgtaggagagccctcccacaatacctcccctctggtcatggtctctggaggccttttctctggagaaacccaagacaccctcctcattgattccctttattcagcagaggctgcaggcatccctttctcgtctagatattttggtggttatctatgatgagaaattccacctcaaatcttttttaaaaggagttcaaataaacaagcaagtaaatcgtgaagggaaaagccaggaagcacaatcctgtagggtcttcatcctctcactcaccccctagctggcagggcagggccctctctggccgccagggagaaatcaggtataaaagagttttaggaacatcacaattgccagttgctttggtgacctcaagaggcttgtttttgagggtttatgaggagca

SEQ ID NO: 11396 - DNA, 813 bp, Homo sapiens
gcctcatcgtgctagtcagtgcctggcacagagtagatgctcactagtggtagaaactgtgacagaatcctacaggctatcttttgataggaaatatttgctgggtggatctgggcagccgcagacatctaaccttgattgctgccttggtagcacttcctgagctgcagacagaatccatggcttgtttgcagcttctctggtactgatcccaccggcctgtatcttcactcctgctgraccatctatcccttctctatatagaatcatctatctctcctctctccccaaaccctccataaactccctttctgtccattgaaaatggagaaagcagttttgtgctgggagtgggagcttggtgtgcacccctgcggcaccagtcttgaggttctcctgtttctgctagtgtaggagagccctcccacaatacctcccctctggtcatggtctctggaggccttttctctggagaaacccaagacaccctcctcattgattccctttattcagcagaggctgcaggcatccctttctcgtctagatattttggtggttatctatgatgagaaattccacctcaaatcttttttaaaaggagttcaaataaacaagcaagtaaatcgtgaagggaaaagccaggaagcacaatcctgtagggtcttcatcctctcactcaccccctagctggcagggcagggccctctctggccgccagggagaaatcaggtataaaagagttttaggaacatcacaattgccagttgctttggtgacctcaagaggcttgtttttgagggtttatgaggagca

SEQ ID NO: 11397 - DNA, 527 bp, Homo sapiens
ctcttgtcacccaggctggagtgcaatggcacaatctcagcccaccgtaacctccacctcttgggttcaagaaattctcctgcctcagcctccctagcacctgggactacaggcacctgccaccacgcccagccaatttttgtatttttagtagagacgggatttcaccatgttggccaggctggtctcgaactcctgaccttaggtgagccacccacatcagccttccaaagtgctagaattacaggccacatagcttttttacaaaactcctccactattctgaggatttgccagaactgagacaactataatttttacagattcatgtttaacgttcaatttatgctgatatttaaaattaaaagagtgataatcccaatgttggcaaaagatcaagaagtattgtcagttttatcagtgtctgaccttgagggcagcttatgggggctggaggtttgctttgacactgaagactgcagaaatccaggctggaatctcaactctgccaaatgygagtcatgtga

SEQ ID NO: 11398 - DNA, 754 bp, Homo sapiens
gagagaaagaagagggtgtcgggaagttactcagtttgtaccccaagttggtctgtttgtgagaaaggctgatcatctttcaactgttgcctattacccatgcatgccagtttaagaagccaggttaatctccccatctaaacacatttactgaacttcctaggctagctgccatgctgggygctggggatccacagatgagtaagacacagccagccctagggtccttccagacactgggaagagggacaacaagaccacttatcataataccgtgtcacagtgaactggtattgcggtctgcacaaaatttcaactaattttctgtgtgtctttagatgggtatatttgtatcaaggtcaggtttagaaagaaaatgtgaggggacaacagaatcacaaaaaccagaaaccacacagaaggttctgcaatgcttcctctgtcttgcttagctcttgccctagtttatcagtacctatcttgggactaacaggatgacttcctctctacatttaactatgtgactcacttccagtctcagaagcctaatccgttccagggagagcttgacgagaataaagcagtcatcaggaagaaacacttcttcaatatactcggaaatctggagtgtcaaaagatcagactgttaatcagccgctttcccctttcctaagagcacacgactgcttgcttttttgaagagcttgagtagtgtggacgccacaggctggtcaatagatggcagctgattttt

SEQ ID NO: 11399 - DNA, 754 bp, Homo sapiens
gagagaaagaagagggtgtcgggaagttactcagtttgtaccccaagttggtctgtttgtgagaaaggctgatcatctttcaactgttgcctattacccatgcatgccagtttaagaagccaggttaatctccccatctaaacacatttactgaacttcctaggctagctgccatgctgggtgctggggatccacagatgagtaagacacagccagccctagggtccttccagacactgggaagagggacaacaagaccacttatcataataccgtgtcacagtgaactggtattgcggtctgcacaaaatttcaactaattttctgtgtgtctttagatgggtatatttgtatcaaggtcaggtttagaaagaaaatgtgaggggacaacagaatcacaaaaaccagaaaccacacagaaggttctgcaatgcttcctctgtcttgcttagctcttgccctagtttatcagtacctatcttgggactaacaggatgacttcctctctacatttaaytatgtgactcacttccagtctcagaagcctaatccgttccagggagagcttgacgagaataaagcagtcatcaggaagaaacacttcttcaatatactcggaaatctggagtgtcaaaagatcagactgttaatcagccgctttcccctttcctaagagcacacgactgcttgcttttttgaagagcttgagtagtgtggacgccacaggctggtcaatagatggcagctgattttt

SEQ ID NO: 11400 - DNA, 529 bp, Homo sapiens
cgtatgttgaagggcagtgccaaatgatgtgtaattatctaggttgtaaaaataaaacatactcccccttcccttgaggataaaaaagcattgtggtrttagcacttttttcttggatcattgttcagaagatgtttaagcccctagacacccaaacttttactgtcatgaacagcaagagaaaacgtagagctcgatttactcaatggacaaaaatgctcaaaagccaaattatggcacaatttagcagccacattcttaaccagtacagacttttgacataccgatccctctccagtggcaaccgagaatgtgtactttgaatgatgccatttgaaatgaccactcattactctgcccagacacacttttcattgattcttcggagggcagttccaagagattctctggggctttctctgcatcatgagacacagtgcagttctgcccttgaccttcctgcagtttgtcgcctcttcctcatgatctcagaggaactttgtctcaggccagctgtttgttccttggg

SEQ ID NO: 11401 - DNA, 529 bp, Homo sapiens
cgtatgttgaagggcagtgccaaatgatgtgtaattatctaggttgtaaaaataaaacatactcccccttcccttgaggataaaaaagcattgtggtattagcacttttttcttggatcattgttcagaagatgtttaagcccctagacacccaaacttttactgtcatgaacagcaagagaaaacgtagagctcgatttactcaatggacaaaaatgctcaaaagccaaattatggcacaatttagcagccacattcttaaccagtacagacttttgacataccgatccctctccagtggcaaccgagaaygtgtactttgaatgatgccatttgaaatgaccactcattactctgcccagacacacttttcattgattcttcggagggcagttccaagagattctctggggctttctctgcatcatgagacacagtgcagttctgcccttgaccttcctgcagtttgtcgcctcttcctcatgatctcagaggaactttgtctcaggccagctgtttgttccttggg

SEQ ID NO: 11402 - DNA, 529 bp, Homo sapiens
cgtatgttgaagggcagtgccaaatgatgtgtaattatctaggttgtaaaaataaaacatactcccccttcccttgaggataaaaaagcattgtggtattagcacttttttcttggatcattgttcagaagatgtttaagcccctagacacccaaacttttactgtcatgaacagcaagagaaaacgtagagctcgatttactcaatggacaaaaatgctcaaaagccaaattatggcacaatttagcagccacattcttaaccagtacagacttttgacataccgatccctctccagtggcaaccgagaatrtgtactttgaatgatgccatttgaaatgaccactcattactctgcccagacacacttttcattgattcttcggagggcagttccaagagattctctggggctttctctgcatcatgagacacagtgcagttctgcccttgaccttcctgcagtttgtcgcctcttcctcatgatctcagaggaactttgtctcaggccagctgtttgttccttggg

SEQ ID NO: 11403 - DNA, 551 bp, Homo sapiens
atttggctttttccttttcctttctttttgttttctttacatttttttcctttataaatatcaacacaactgtgactacagtgatggtaatatagaaagaacccaagctatcaaggggagactgtaggtcttcttacccataaactttttaaccatagctctctgacttccccagagggtgtactaactcatttaagaatgtttacccaagaaacttcacccttagagagccagtttattctacccagggctatgaatcaccatgcagatgtcactcttgatttattgagatgatgttgcttcctgacagcttacatcattcactcattgtatgagaaattgcttttaaaattcatggtctacatatggataaggcatgcatgttatggtttkctataaatcagaaaaagatggtatatagaatgtcccaactaggaacaaaccctccctgtgctacataagggctgaccctgctaagagtataaatggaattaaacatcctaactgacagaagccaagggaataaaagggtaccgttaaatattagtgtc

SEQ ID NO: 11404 - DNA, 975 bp, Homo sapiens
gttgttggccttttttatattgatttgtaggagttctttatatatcatatgccatttgttcttttacttaactatacaaatttatcgagcacctacagyaggcttagtgctgtttgctgttccaggactaaggatacagagattaaaaaaaaaaacaaaaaaaacaaacaataacacagtatttaccttcaaagaacttgcaaactagtgaagaagacaggtaaaaaaattaacattcacaataaagaataaaaaataatttgagagggtgagcatggggtgctttgagagcacagaggagagagaaaactcacatgaaccatgtctgattagggaattctgcaaagggtgttcaaagcctttgagtggaagatgcttgataaacccttgttctgtgtgtaaagactgattggctcctgtggttaagtacttggttggctcctctgtttcagactcatttctaaggaggccagtattctgattgtcatcatatctgactttgctccatatttacgacctattcccagcccctgaagcacacaaagaatagtgtaaacatgttattaccatcactgggaaagctctaacttcacacgtttttgatgataagtagctttatctctgttgaagaaagatagtttactattgagctatcagctagatttcacaaatagatgggggcttttccaaatataaaacaggccatatccccaaatgtggtattttgatctacctattaatcatttagcaacctttgggttttcaatgctggttggacataatatagcactcaggcccaacagtgaccttcatctttctattgtatcttttattgaggacctgctgtgaatgtttcacatccaattaacccatatagcagcacatggtattaagtgggccatcctattttaagacttttttttataagagttgaatgcagtttggacgatctattccagctgggactgaagcaat

SEQ ID NO: 11405 - DNA, 1143 bp, Homo sapiens
gcattttttattcaaaagataatgacaattatacactaagtgtacctattcggatagttaaaattgcaaaaaggtctacttgaatgggagaacaacatggaaggatcctaggctggcgtacagcagttctaactcggcaggaacagaattgaggaggcacatggcctcctcccatgtcccagacatcctatgcttcttcccagatcccactaaggcctccaccaagacctccaaattacccccacagctcccagcctaaacttgtgtcccttagagtagccaagctcagccaaacagtcctgctgatctaagccacacaagaagtgcatgactgataagctcatgaaaactgttgcttattaatagcaggactctctaattggcttaattttagacaacagggcagtataatggaaactttcagaaagcagagagaggattagggacagggtggggaggacccaggcagagtaatctcacccaggctaactttagggcagcaccctgagctatttctgcttcaaggttctaagaggaatcaggcaacctgtgtttggattttctttgtgtggcaacagtcaccttggcaatgacagttgagggctgaggattagggaagggggtaatgttgggctggtgaaacaggctcagtgagaagcatttattgctacctgtactcagaaagatctgctctctctggaggtggagattcgttgagaaaggatggaggcagagagacagggcatgcagtcactttgatgacagtctgaactayggacaatctcttaaaactctgtgctgtaacttggccccatataactcatcttgctacagaatgtctcctaaagcgagtatgaatcccatgaatgtacagattacacataccgctgagaaggtaaagacaccaacaagcagacagcactgccatataaacacagggcacaggtagggccttcaaaccaattttctaaaaagtactgactcccacatgatcacatctctcaaataaaaaatagtcacttataccaagaacctcacctttttacctgatgcttgaaagatcttaattaaggtgcctgatcttcggtcagctctgaaaatataaacctatggaatgaaaaaaaaaaaatctagttaggatga

SEQ ID NO: 11406 - DNA, 515 bp, Homo sapiens
tgaattgtaactataaacctcacagtattacagctttactttttgttttcctttgggggcagatgcttcatggaaaacatgtcatggttcgcgttggtggaggctgggatactcttcaaggatttttgcttaaatatgacccctgtcgaatattacagtttgccacaytagaacaaaaaattttagcatttcaaaaaggagtttctaatgaaagtgtacctgattcgcctgccagaacacctcagcctcctgaaatgaatcctttgtcagcagttaacatgtttcagaaacaaaattcaaaacccagcgtgccagttagtattccaaaaagcaaagaaaaacagggacgtccaccaggtgcattggtgccagcatcttcactgaaaggaggtaatctgggctctatgtcagtccgttctaaattgccaaattctccagcagcatcttctcatcccaagctcaagtcttcaaaaggcataacgaagaaaccgcaggctccttcaaacaatgcatca

SEQ ID NO: 11407 - DNA, 582 bp, Homo sapiens
ttatccctgaagcatagcaatcctatttattgagactgacaatgctaaacaagttttagttttgtttttcagaccaaatctcttcaaataactgactgaccttcggagtgatggtcctcccagcttaactgaatgtactgtgctctctgcttctaaaagacaagttaggtagggaggttcctttttccagaaactgcacaaacttgttattatgcactgctaggctgccatttgatcacaagggaccactgaatttcaattatttcatccttggagactaagagttacttacaataataataagcaatttttctttgagtttcctggcytttgggtcagacattcaacttctattggcctcagtttcttcatctgttatactaagatatcagacttaaacacctgtaagatttcttccaagttattccaagataatcagtagctgtcaatgtattttgaagcctaaaggaacttactcacctagagaagtgcaacccaggacattttccaaacacctggccaacgcttcgatatcactgtcctgtcaaaataagggagaaatgtttattttccctgtatggt

SEQ ID NO: 11408 - DNA, 632 bp, Homo sapiens
aattgaaaataattattgtcccaacatatccgataaggaatagtcaacctatattccgaagtcttcatcaggacagagcagtcaagtgataactttatgtatcctaaagcagtgagtctaaaatccaaggccatttaatttttgtaaccacttgaattttttccttatttttataataagtaaatacttcccagttttacccaaggagatgtccacatttttgctatgacaatgtacaatccatattctggttctcagtttcttttttttttaataatggaaaatagcaaggtgcattttacagcaacttctagttctggaataatgtaatctgaaattctggaattaaattataccaatctaaattatcactccgctttggagaaaagtaatatktcttataatctcccattcagaaatttattatcctaatgatttaataaagccaatggggggaagaaaaccctagaaagggtgtgtccttcagtgtgagacagaaaaccccagtaaagtaaaatctctcttttaacagttacagtaggcagaattctaaaaggatccacaatgacccatgcccttttataatctcttctccttaagtgtgagtagaatctaagaatatgaatcatggg

SEQ ID NO: 11409 - DNA, 632 bp, Homo sapiens
aattgaaaataattattgtcccaacatatccgataaggaatagtcaacctatattccgaagtcttcatcaggacagagcagtcaagtgataactttatgtatcctaaagcagtgagtctaaaatccaaggccatttaatttttgtaaccacttgaattttttccttatttttataataagtaaatacttcccagttttacccaaggagatgtccacatttttgctatgacaatgtacaatccatattctggttctcagtttcttttttttttaataatggaaaatagcaaggtgcattttacagcaacttctagttctggaataatgtaatctgaaattctggaattaaattataccaatctaaattatcactccgctttggagaaaagtaatatgtcttataatctcccattcagaaatttattatcctaatgatttaataaagccaatggggggaagaaaaccctagaaagggtgtgtccttcagtgtgaracagaaaaccccagtaaagtaaaatctctcttttaacagttacagtaggcagaattctaaaaggatccacaatgacccatgcccttttataatctcttctccttaagtgtgagtagaatctaagaatatgaatcatggg

SEQ ID NO: 11410 - DNA, 532 bp, Homo sapiens
tggagattcttaagaaggatttgatmgtctttttcaaaaccctcagataccagatgctcctaacgcatctgcctttagtctgcccaggaatctcaggaagtcatccattcctcgagtacagtttcagtgatacaaggagatagcagcccacattttatacgctattctgagttataccagaggttcgtcgtttgggaaaatacggttattttaacctagatgcaaatcctatctgggttactctgcagtttcagcattgagagacttcttcatgacagaaaagtggtttcctttttcttatcagcaacatacactcaggccattttccccggaagaatccagcttatcttactactacaacatatatctggtcatttatgacactagaatctagaaactaaaatgttagtttaacaaagtgaaaagccaggcacggtggctcatacctgtaatcccagcactttgggaggctgaggtgggaggattgcttgagcccaggagttcaacactagcctgggcaacatagcaatag

SEQ ID NO: 11411 - DNA, 564 bp, Homo sapiens
atcaatgcgctcgttgacgaagagcgctccactcgtcaggtccarctccaggtagcgcggactgggcgcacccagatggttgatgcgcaagcaacccggccccaagcgccgcagctcaagccccagcgcgcgagccacgttgcccacgagcgcgccgggtgcctgctcctctggcacagagtatcgcagctgggaggccgcagggccaggtagcagcagcagcaacagcagcaggagaggcagtagcagcagccagggcatgggccgccggagccgtggatgctctgtcgccgcaggtctggtgcccgcctgctccatagccactggccgcggcggaggcagccgggcagggccggaggcggcagcttccccagccgtgccccacgcccgggccccgcctccgctcgtgccaccctgcgcctgctcccccaccgctcacgctctagaaagcgcctggggccgctccctccgtaggccctcccaagggctcctggccccaccgtcctcgctgactccccatattccagctcctccgctcgcctccgagtcgctcaacccggctcg

SEQ ID NO: 11412 - DNA, 520 bp, Homo sapiens
agagagaatatgaaagctcaaattccatcccagatcgcctaactcaaagctccacatttttgcaatacaaactatcgttctcattatgtggaacccacccaaagaaggccagatattaaagctgtaagagcatttagcccaactttcttacttgcaggagaaactgaatttcagagtttgccgcaagtcaaggaatgcagttctggaagctagtaaaggaaaggaaacagaytcttccccagagtctccagagggagcacagctttgctgacaccttcattttggtgcagggaacctgatttcagacttctgccctccagggctgtaagagggtaaaagtgcgtttccttcagccaccatgtttgtgatgataatttattacagcagctgtagtaaactaatacaatcctggacctagccccttctcctaactcactattttgtttgaacatctactaagtacctactctccctcaaaacaatgttctgagtgctggaagtatagaatgatgaagtcatc

SEQ ID NO: 11413 - DNA, 562 bp, Homo sapiens
tccttccctcaccaccctcaccacctttgtccccaaggtcctgttattatcctcattttataggtgatggatccggagcctgcggatgctatgcaccttgttcaagggcatccagtgagtgacagagccaggcacgttccactgtgattctagacttcctcctgattctagaattcctcctgtttcctgttctggcatcccagagtcagataagttgagcctgcctgctgcccggctatcccaagaggagaaaggtggctcaaactctttctctcattctctctttccctctttctctttttmttttcctgtaactttaaaaaataataggttttattttacagagcagttctaggtttacagagaattgtgcagatagcacagatttctcattccctccatctcccctcctaggctccactgtttttaacatcctgcatgagtgatgtacatttgtgacaagggatgaaacgatattgacatgttgttactgagacccacagtttacaccaggttcactctctgtggtgtggttctaggggctttgtcagatgcacggtgt

SEQ ID NO: 11414 - DNA, 562 bp, Homo sapiens
tccttccctcaccaccctcaccacctttgtccccaaggtcctgttattatcctcattttataggtgatggatccggagcctgcggatgctatgcaccttgttcaagggcatccagtgagtgacagagccaggcacgttccactgtgattctagacttcctcctgattctagaattcctcctgtttcctgttctggcatcccagagtcagataagttgagcctgcctgctgcccggctatcccaagaggagaaaggtggctcaaactctttctctcattctctctttccctctttctctttttattttcctgtaactttaaaaaataataggttttattttacagagcagttctaggtttacagagaattgtgcagatagcacagatttctcattccctccatctcccctcctaggctccactgtttttaacatcctgcatgagtgatgtacatttgtgacaagggatgaaaygatattgacatgttgttactgagacccacagtttacaccaggttcactctctgtggtgtggttctaggggctttgtcagatgcacggtgt

SEQ ID NO: 11415 - DNA, 520 bp, Homo sapiens
tccttgcatstgggattttaaaagacttctctatgaatgttatgcaacaggcccaggagttagagagcccgggttttaggcccagctttgctactaaattgctgagtgaccttgggcgaatcacccctgccccctaggccttgtcttccgcggagacaatcagtgatctagagtgtcacgtgatccgagggccctcccagcctcagctctcagagaaaaggtttctcttccacttatgctttcctgccgcggaactggcttccctgtttgggaacctcccggcttcacagacgccctcaaccttttttcttgctaattgcaacctcccaggtctaagccgagttcgcaacctgctgtctgggtcgccccctcccccctgccttctctgccgtctgggatttctctggaggtgggggcggaacccggggagtgagggagagagggagcctggagctgtcccgttcgtgaggcttccccgcggcttctcagccccctccccctacggaaactcagcctcaca

SEQ ID NO: 11416 - DNA, 520 bp, Homo sapiens
tccttgcatctgggattttaaaagacttctctatgaatgttatgcaacaggcccaggagttagagagcccgggttttaggcccagctttgctactaaattgctgagtgaccttgggcgaatcacccctgccccctaggccttgtcttccgcggagacaatcagtgatctagagtgtcacgtgatccgagggccctcccagcctcagctctcagagaaaaggtttctcttccacktatgctttcctgccgcggaactggcttccctgtttgggaacctcccggcttcacagacgccctcaaccttttttcttgctaattgcaacctcccaggtctaagccgagttcgcaacctgctgtctgggtcgccccctcccccctgccttctctgccgtctgggatttctctggaggtgggggcggaacccggggagtgagggagagagggagcctggagctgtcccgttcgtgaggcttccccgcggcttctcagccccctccccctacggaaactcagcctcaca

SEQ ID NO: 11417 - DNA, 520 bp, Homo sapiens
tccttgcatctgggattttaaaagacttctctatgaatgttatgcaacaggcccaggagttagagagcccgggttttaggcccagctttgctactaaattgctgagtgaccttgggcgaatcacccctgccccctaggccttgtcttccgcggagacaatcagtgatctagagtgtcacgtgatccgagggccctcccagcctcagctctcagagaaaaggtttctcttccacttatgctttcctgccgcggaactggcttccctgtttgggaacctcccggcttcacagacgccctcaaccttttttcttgctaattgcaacctcccaggtctaagccgagttcgcaacctgctgtctgggtcgccccctccccsctgccttctctgccgtctgggatttctctggaggtgggggcggaacccggggagtgagggagagagggagcctggagctgtcccgttcgtgaggcttccccgcggcttctcagccccctccccctacggaaactcagcctcaca

SEQ ID NO: 11418 - DNA, 750 bp, Homo sapiens
tcatagttccaatttgtatttccctccttttcaccctagccatccttgccccctttctgttcctgctacaccrtaagaatattcctgccttcgaaactttgctcttcccctagatgtccatatggacaaattcctcacttcctggtcttttctcaaatgtcagattcttaatgaggcctaccccggccagctatctaataattcatttctctccttcctgctagaatggctccaaacgcattattagatagctccctgagggactggatttttactttttgagttgttattctttgctcatagtattacctgtaaatatacccatataggttttaaggccaaacctctgaaaacctgtaatataaactcaggccatttaatgagttgataatgacttttacttaagtactctgtttgcatgtcaatccatttgttgtcacccaatgaaaactatgagttgaaggctgaagttttttatttatttatttatttatttatttatttatttatttagagattgagtttcactctgtgacccaggcaggagtgcagtggtacactctccattcactgcaacctccacctcccgggttcaagtgattctcctgcctcagcctctcgagtagctgggattacaggtgcacgccaccatgcccggctaatttttgtatatttagtagagatggggtttcaccatgttggctaggctggtcttcaactcctgacatcaggtgatctgcccacctctgc

SEQ ID NO: 11419 - DNA, 750 bp, Homo sapiens
tcatagttccaatttgtatttccctccttttcaccctagccatccttgccccctttctgttcctgctacaccgtaagaatattcctgccttcgaaactttgctcttcccctagatgtccayatggacaaattcctcacttcctggtcttttctcaaatgtcagattcttaatgaggcctaccccggccagctatctaataattcatttctctccttcctgctagaatggctccaaacgcattattagatagctccctgagggactggatttttactttttgagttgttattctttgctcatagtattacctgtaaatatacccatataggttttaaggccaaacctctgaaaacctgtaatataaactcaggccatttaatgagttgataatgacttttacttaagtactctgtttgcatgtcaatccatttgttgtcacccaatgaaaactatgagttgaaggctgaagttttttatttatttatttatttatttatttatttatttatttagagattgagtttcactctgtgacccaggcaggagtgcagtggtacactctccattcactgcaacctccacctcccgggttcaagtgattctcctgcctcagcctctcgagtagctgggattacaggtgcacgccaccatgcccggctaatttttgtatatttagtagagatggggtttcaccatgttggctaggctggtcttcaactcctgacatcaggtgatctgcccacctctgc

SEQ ID NO: 11420 - DNA, 750 bp, Homo sapiens
tcatagttccaatttgtatttccctccttttcaccctagccatccttgccccctttctgttcctgctacaccgtaagaatattcctgccttcgaaactttgctcttcccctagatgtccatatggacaaattcctcacttcctggtcttttctcaaatgtcagattcttaatgaggcctaccccggccagctatctaataattcatttctctccttcctgctagaatggctccaaacgcattattagatagctccctgagggactggatttttactttttgagttgttattctttgctcatagtattacctgtaaatatacccatataggttttaaggccaaacctctgaaaacctgtaatataaaytcaggccatttaatgagttgataatgacttttacttaagtactctgtttgcatgtcaatccatttgttgtcacccaatgaaaactatgagttgaaggctgaagttttttatttatttatttatttatttatttatttatttatttagagattgagtttcactctgtgacccaggcaggagtgcagtggtacactctccattcactgcaacctccacctcccgggttcaagtgattctcctgcctcagcctctcgagtagctgggattacaggtgcacgccaccatgcccggctaatttttgtatatttagtagagatggggtttcaccatgttggctaggctggtcttcaactcctgacatcaggtgatctgcccacctctgc

SEQ ID NO: 11421 - DNA, 750 bp, Homo sapiens
tcatagttccaatttgtatttccctccttttcaccctagccatccttgccccctttctgttcctgctacaccgtaagaatattcctgccttcgaaactttgctcttcccctagatgtccatatggacaaattcctcacttcctggtcttttctcaaatgtcagattcttaatgaggcctaccccggccagctatctaataattcatttctctccttcctgctagaatggctccaaacgcattattagatagctccctgagggactggatttttactttttgagttgttattctttgctcatagtattacctgtaaatatacccatataggttttaaggccaaacctctgaaaacctgtaatataaactcaggccatttaatgagttgataatgacttttacttaagtactctgtttgcatgtcaatccatttgttgtcacccaatgaaaactatgagttgaaggctgaagttttttrtttatttatttatttatttatttatttatttatttagagattgagtttcactctgtgacccaggcaggagtgcagtggtacactctccattcactgcaacctccacctcccgggttcaagtgattctcctgcctcagcctctcgagtagctgggattacaggtgcacgccaccatgcccggctaatttttgtatatttagtagagatggggtttcaccatgttggctaggctggtcttcaactcctgacatcaggtgatctgcccacctctgc

SEQ ID NO: 11422 - DNA, 712 bp, Homo sapiens
atggaggtactcaaatgtgaacagaatctaaccactcaaaggactggtagtggtctgatgcaccaggatggaagtatttggatatagtgtattaaaaacgaacaaatgaaaccctggagctttgcacactggcatttcagtactgtataaaccacagggaattgtgtgtgcacatattaagctgtggtgtctaacagcccagaaacaaatatcacaggccatgagctagatttggctcattaataaatgatagcactccccgactgacatactcttcaaaatacgagcagccttttggaattaagctttgtctgttttttttttgttttttttgtttttttttttttttgagatggagtctcactctgtcgcccaggctggaatgcagtggcgcgatctctgctcactgcaagctccaccttccgggatcacgccattctcctgcctcascctcccgagtagctgggaccacaggcacctgccagcacgcctggctaattttttgtatttttagtagagacggggtttcaccattgttaaccagaatggtctcgatctcctgacctcatgatccgcccgccttggcctcccaaagtgctgggattacaggcgtgagccaccgcgcccgagcaagctttgtctttttaatgtgaacaatatgtaaaatgaattggacactcttgattaattctaagtggcctcactagagtta

SEQ ID NO: 11423 - DNA, 611 bp, Homo sapiens
ataaaaaatgatgagttcatgtcctttgtagggacatggatgaaactggaaaccatcattctcagcaaactatcgcaaggaaaaaaccaaacaccgcatgttctcactcataggtgggaattgaacaatgagaacacrtggacacaggaaggggaacatcacacaccagggactgttgtggggtcgggggatgggggagggatagcattaggagatatacctaatgctaaatgacgagttaatgggtgcagcacaccaacatggcacatgtatacatatgtaacaaacctgcacattgtgcacatggaccctaaaacttaaagtataaaaataataaaataaaataaagtaaaaaataaaataaaataaaataattgatgtggtaacatatgacagatgttgctattagtaaaatattaaaaatttttaaaagaatatatgaagtctagtaagtcaggtttggatgtaatgaagttaactcacaggaattgacttgactgggtttcttaagtatgaaacccacaagaacaacaccctcttccaaagaccttttccactaactccaccaaacaaaacagacatagtctttctcttttccagagtccatttct

SEQ ID NO: 11424 - DNA, 543 bp, Homo sapiens
tttttttttttgagacagggtcttgctctgttgcccaggctagagtgcagtggcatgatcacagctcactgtagtctcaacctcctgggctaaggtgatcccacctcagcctcccgagtagctgaaaccacaggcatgtgtcaacatgcccaaataatttttaacaattttttgtagaggtggggtctcaccgtgttgcccaggctgatctcaaactcctgggctcaactgatcctcctgcctcagcctcccaaagtgctaggaytacaggcatgagccaccatgcctggcctgaaatcactatttttgaatatggaaaaacatattgatagacactgtacagcgcagtgtaaaacctctgggtgtgagagcaggtaggcaagtgtctaaaaagatgagactggaggggagctaattccccagagaaattctatacttcaaggtgatatgatccatagggcaattgttaaagctgcaaagccccatgggacatcagtagtcacactttcttacttttacataaagtgctctgcaaacagtttc

SEQ ID NO: 11425 - DNA, 569 bp, Homo sapiens
aaatctcctacaggttctatttctctggagaacatggattgatgtataatccaatcccctctttgcaacactacgacctctttaaattagggttgcaaactcaaatgttaatgggggcctggcaggtaatgtcactggtgcaaatgtctgttggacaataaatgacaatgaacagcctgcctcagggtccagaggacatgagagtgttttggaaactacactgaactggggacacttccacttacaggggacagcagagttgccagattgcaattggggccagtgctactaaatgctccatttgttcaagagaggccagaaatccacagttttaaaatgtaacatccccccactcattgcaattcttaactacttgcaactaattcaaatttaaggcacctagtaatttaactctatgaagagcaaatacactgagtctaggagccagatgggagagggaraaacaggttctatgtgttctacatgcattaactcatgtggtcctcacaatgtccctgtgaggtaggtactattattaagccccttttgcagatgaagaaactgtggca

SEQ ID NO: 11426 - DNA, 544 bp, Homo sapiens
tggaccttcccaggacctcaacaaaacaaaaccatgaagaaaaaccttgacatgaaccccaaaaaaacccagtcagcaatattttaagttaaattttgaaacaaatccaaacgggttcctccccataaatctaccagtaaattgtgcagaatcagaactgaagccatgccctttcttaaagtattgaattagaataaatgagaacatctaaatattttccaaattcatattccagttataatattcaagtttcttagtttctctctgttcacattcaacatgaaatagtcccattagtcagtagcaagagctgcaacatttctayaggtactaaaggatgtgatcagagcagggaagatggccaacaagatgatgccactctagcgggtgcccatccaaatcataacccatgaatactgcggctttattatcttggacaacagaaagctgatcttgtaattggatgatcacccctgcttgcatgctttcgagtagttacgtatgacaaaaggagctactggttttgtgatgatgggtttctggg

SEQ ID NO: 11427 - DNA, 575 bp, Homo sapiens
gatagggagatttcatggaacaggactcarcaagagaaagggctacacttttgatgcatgcaataactcaaataaatatccggggaattatgccaactaagaaaagctgatcactaaaggctccatgctatatgattccatttatagaacatttttgaaatgacaaaaattttaaaagtaggggagccagactttagagatgggggcggtgaagaaggggagatgggcgtggttttaaaaggacaacatgagggatccttggagtgatggaacttttcagtatcgtgacacgcatttacatgcatgataaaattgtatacagttcactatgcacatagataccaatgagtacaagtaaaacaagggaatttggaagaagattagattcaatcaatgtcaatatcctggttatgatattataccctagttttgcaaaatgttaccactgggtaaagtatacatggaaactctattatttctcacaactacatgtgaatctataattatcccaataaaattttcaataaaaaataaatgaactagggttcaatacagcaacataaataaatcccaat

SEQ ID NO: 11428 - DNA, 550 bp, Homo sapiens
gccctgtcatctgatgaagagggtgagtgtcctcgggcacttggggtagctggggtattggatggataccggccacttgtccggttggagccagtggtagccatttatctccccagcaaagaaaccctcttgagttgtctggtctggggtgcatagcgggactcagaaggccttggtctttgggttgctgagacattgccatcagatggggagtgactccatggcctttttcacccttgtggccatgtggcatttgagcttagatgagagcccgccagacgactccctgcacgacggggttctccacagtgggcctgactggtcccatttgccacttgagagaactgttttccccttacaggagagtagtagtggctsttggcctgctgcaatgcaaccccagcactctgttgaagtctctcttcctggaagagccgttagatgacctaagtgtgctccagctcctctggggtagggtcagaaaggattgtggaaccctggcctccatgttgttggcttagccttgttgaacccaaatggccacttaccc

SEQ ID NO: 11429 - DNA, 576 bp, Homo sapiens
gcatggtggygggcgcctgtggtcccagctactcgggaggctgaggcaggagaatggtatgaacccgggaggcacagcttgcagtgagccgagatcacgccactgcactccagcctgggtgacagagcgagactccgtctcaaaaaaaaaaaaaaaaaaaaattccaatcattttgggcaagaaagtgtcaacacccaaggttcatgtctttcttatcttcaccccagtcagccctgcccacctgcccagcaattccacacaggtgactacaagagaggtggggggtatggggggaccaaggggacttcagcagcactgatcactgggcatgctcctgcccaggggcctggcattgactatccccctggctggagtgctattcacccaaatctccacctggtgtattcatcttggcctctgcttaaacatcacctgatgtaagctggcaccccttaccttcatcactctccgtgccctgacactgtgtgtgttgggcctggctcccaggtagggagggaatcagatctctccggacaggggcagggtccagtcttagccttagccttgatccacag

SEQ ID NO: 11430 - DNA, 939 bp, Homo sapiens
aaactggaacagctaagaggagcttaaagggacatgacaaataaatgcaatgtgggatcctagatgggatcctgaaacacaaaagtgacattaggtaagaactaaggaaatcggaataaagcatggactttagttaataagaataaattagctattgcttcattgattgtaccacaccaatgtaggatgctattaatggggggatgggggggactgtttccaggaggtggggagtgtatggaaagtctgtactgtcttctcaattttctgtaaatctaaaactgtttttaaaaataacgcctgtgtgagagaaccaactaatgcaagattcaaacccactgaacagtttaattccttagcagagcaagatccctctcactcatacttacaaatctttgtcttagagctttagttagcaggaatcactcctcagagcctacacatttctgtaggaacaaagtaaatgtctttaatttattttatgttattttttaagacaaggtctcgctctgttgcccaggctggagtgcagtggcgtgatctccgctcactgcaacctctgcctcctgggttcaagagattctcccacctcagcctcccaagtagctcaatttacatgcawgcgccaccatgcccagctaatttttgtatttttttgtagagttagggtctccctaccattgcccaggctggtctcaaactcctgggctcaagcaatctgcccaccttggcctcccaaatttctgggattacaaacgtaagccaccgtgcctggcctgtaaatgtctttaacaaacatggagctggcaaacaaaaatgagagccatgctcaccctatcccagttcctatcctttatcatattattaattcctaaattaaccaattaatttaggaagatttggtcttagaagatgacctgtgtgggtaaaatgtattta

SEQ ID NO: 11431 - DNA, 562 bp, Homo sapiens
aggtactggtttaaaacaaaggacatttattctttctctcaattctgcaggttcactgggtgattcctttgtcctgggccagtttggctggggctggatggcctcattcacatggctggggcctcagctgggggcacttggagctttgtcctcatgtgttctctcactgcccagtgagctagcccaggcaaggaaggacatgccccatatacaaacacttcttaggactctgtttgcatcacatttgctagtgtccctttggcaaagtgagcccatggctaagcccagaatgaggaagtacaatacatcctctgagtatctcagtgagctggatactgaggcttccagagtctcatagacacagaaagtcatgattccctgggggccataattgcaaagtttattaatatattatcctatatgtattaatcctgtaggtcctaaggaaataattcaaatttggggcagggaacaaagctctatgcataagattttcatcagtagcaaaatatgcaaaccactaagatgtccatycattggagaatggacacatggaagacgg

SEQ ID NO: 11432 - DNA, 516 bp, Homo sapiens
agtacagtggcgagatcatagttcactgcagcctcgaactcctcaagcaatccttttccctcagcctcccaaagtgctgggattacaggcctcagccatcatgtccagcccacatttttcttttgaatcaattctttaaagccataataaggaataaatgacattctgtaaactatacatatttaaactgtaccatgtggtaagtttagactttcatagaaacccatgaaagtggccaggcacggtggctcacgcctgtaatcccagcactttgggaggctgaggcaggcggatcacgaggtcaggagatcgagaccatcctggctaacatggtgaaaccccgtctctactaaaaaaatacaaaaaattagctgggcgtggtggcaggcgcctgtagtcccagctactcgggaggctgaggcaggagaatggagtgaacccgggaggtggagcttgccgtgagccaagatcgcaccactgtactccagcctgggtgacagagyaagactcggtctc

SEQ ID NO: 11433 - DNA, 550 bp, Homo sapiens
tcaagaatggaatgaaatcgcaaaaaaaataaaaaaataaaaaaaaaaatactgctttaaaaaaaccagcaytttcaccaattttatattcaaacaaaaccacacagcattggcctgctatgtgttttcagtgtttccttgggtctagcttcctcgccatcgtgccacggcacagctgcggttggccacagtttgtcatgctagatggcgaaggctcactcagcttcacattatgtggaggacctggatggaagactcgagggtcttgaaatcccaaattgtcatggctccatcaatgccagtagtgcaaaatttgcgacaaccttgcttgtctacctcataaatagagacgtgagtgatgctattctggtgcagcctctccaaggccatgttgtggtcctcaatcgtggccctcgtgtccatgttgcggaagtgttctatggcagacatgttgcgttggatgctctgttttggaatgtctaacttggagacgaaggtcaggcagccgcggtcatcataattaaagagcattgggtagcagtcatggcca

SEQ ID NO: 11434 - DNA, 540 bp, Homo sapiens
tgaaggaacaatgttttcaccagyaggcttcacctttcagtgttctatcaatgaatatttatcggtagattatttttaatctaacttcaagcattctgtagcaggccagatgagggcagatcagatgaatgttaacatgaaaattttgtggatttatagttaatgagtaatcatttatgaaagacttaccctatatttctgcagttgaattatttgcagttggtctagtggtgagcacagtcaataagaaacagataaataaataaataaatgtataataagaaactaaatcagtagcctgaagaaaaagtagagttctatttgaaacaataaagaaagagagagaatgcttactgatcttttttttaaaatctgtgatggtcaatcaatatttctctctcagaaggcaaaaaaaaaaaaaaaaggtagccaggagacaggattaatttgtatctcctgcttggatggacagaacagcatgtggagactctcatcatgaacttttactccaagaactaccataggaacataccaggaaaa

SEQ ID NO: 11435 - DNA, 1475 bp, Homo sapiens
gatcctgcttcaacacttacaggctgagttaggcaaactactgaacatctctaaatcgtataataaaatcacaggtaataaccatgcctccttcatggaggaattgtgggaattaaatgagctaaaaacaagtgaagtgcctagaacaatgtctagacagataatgaacactccataaatattattatcatcattattattattaccaccataatatgatgccccctcaggcctcaggtcagacatgagcagagaactaggagaaattaaggatgtgtttaggtcagagccaccccctccaggaagccttcttacagggcctatggcacggtgatctttggcactttgcacctctcagatggtggacagagcctgtgcttctgaattggccttatccaagtatacatcttagctatgtgaatccaggcaagtcacttaacctgtcctcgcctcattccctcatctgcaaaaggggatgatatcttcctggtcagcgtcctcattaggcttgagtgagatgatgcaggtgcaaaatgcaggtcgtagatgtccagcgaataaaacgctgctgagtgatgtcgatttctgcattttgttatgagtagctctttctctgactgcctggctatagaccttgagttgttgattgctgggaatggttgatcccaccacactccttaatacctggcaccaagagggagctcaacagatgtttattgtctcaagctaactgaagaagcagcctcccaccttacccggatcccttccaccatgtcccctggcagtcctgggccacaggcattgggtcactggggaagatatataccagggaaattctgatgagagtgagcaaatatgctggaatctagaattccccaattgacgacgaaaagtgaagaacctcttcctgaatgagtcaggtggggcttaaccatgacttcatattcaatctgcacctcccaaacccacttaagaaacatctgtcgcttcccctttgccccctggccagaatctcttatctcaaagcctgctaaggaaattctttaccggcaggagggattatttatacctactttctgtacattcacacccaaccttttttaactttccatttctctccctcttttttatttgtgtcacatttttccctaccactgaggcagaataaattcagtgtgagtgatggtttgcaatgcagttttcactgttatagctggcaacgtaaagctggatcacattttcacaaatatagtctcatgcaggataaaagtaaaggctgtccagttggaatgtgtttacactttccaggtctaagccccaacaccaaggcattaaagaagkccagtgtttagtatcagaattgtactgggttgcatctcaatttcctgattgatttgaagcaggtttccaatgttagaatattacattatacagtgactgtgtcccaatcctctgattgatttgaaatgaacttg

SEQ ID NO: 11436 - DNA, 2074 bp, Homo sapiens
tgacagttctgacttgagaaatagctgtgataattaaatgagcatctatttaaggcatcgcgcacaatagctctttacctagagaagggtaggttcccatgtgggggtttcctttttcttggtgctatcttggcctaatgtctgagaagcagtgtcctaggcggtgtcccgctgacccaaatccccaaggagygctgggagccactgtgggtgactgggggagggagattgcacacccaattaggccagaactgtgaggaaggggggagagcatggggtttggggccagttcgctccagttccaaggacaagtggttctttgcttactaatgaggccctaagatgtccttttctaagcttgtttcctgcatataagtagaaaggggtacaaatgacaaaggatgcaaagcatttagcatgcagtctacttggtaaaaggagcctgttgctttaagtatcattcttattcccatagtttacaatttacagcgtgagaactgaagagggtagcaattgactaaactgctctatgtgcctcatggcaaaagtcacagcaagaacagggcagcctggaaggcacctgtggatgaggccaggacggttgagtctggaaatcgcagggaatgttgatcagacagcacggtgatatcagggtttgggaaactctggaaagagctgcctccacttgtagccgggacctgggttgggcgggtgcacttattctagaactgtagccttcagtatggcagccaccagccacaggtggctttcatacacttgaagagttgtcaaggctaggtgtggtggctcaagcctgtaatccgagcactttgggaggctgagattggatattcacttgagctcaggagtttgagatcagtctgggcaacatggcgaaaccccatctctaccaaaaattaaaaaattagccaagcatggtggcacatgcatatggtcttagctactccaagaggctgaggtgggagaaccatttgagcctaggaggcggaggttgcagtgagctgtgatcctgccactacagcgtgcgtgacagtgagaccctgtcttcacaaccaccaccacctcccaaaaaaggttggtgtgaccgaggtaactggattgaattgtatttcaaccactctggaataaattgtaagacctgttactcattctgttactgggaagcttaaatatgttggaaacaacttaagtatatgaatgtccttctcaatggaaaattttatgaaacttaaatttgtagtaaaattttgcatctggattgagatatagtaggagcctaagacacatggcaaatttgaaagaattagtacccctccaaaagtgaatagctcgtaaatgtttatagtgactcgaaatacttctgatatagtgtttaaatatagtactaaaattgcacctttttctttctgcaatgggttctggtagtgttagaagatacacatatggtttgtatctattttctttggacagtactgctgggaatggttcatcctactttgtcaacattattttttcatttggaccattttggtagccaaaaaaatgttctaccatttgttttaatttctctccctgccacgtgaggtcagacatgttcttgggtctattggtttaattctggaaattgtgtgcctattttattacagtattcttggtcttttctaccttggtttgtagaactttctatattacatatgtacttaatgctcttctagatttctctgcctttgggtttttggcttctgttatttgatacaaagaagttaaggtttttattaaagataaactattttctctatgttcaggaaccctttttgatgctttcatttttactgcttgggtgatgatctcatctgggcttttagaatgcagtgtaaagtaagtatccaactaatgggaaagctgggggacaaaacagatttctattttaaatgggtttttactcagttggttcatcctttgtcttgatttttaagattgttggtgtgactaaagtcttttaatagcagcaaatgtaaacacctgcagaaggtgtttggtttttttttttgtt

SEQ ID NO: 11437 - DNA, 2074 bp, Homo sapiens
tgacagttctgacttgagaaatagctgtgataattaaatgagcatctatttaaggcatcgcgcacaatagctctttacctagagaagggtaggttcccatgtgggggtttcctttttcttggtgctatcttggcctaatgtctgagaagcagtgtcctaggcggtgtcccgctgacccaaatccccaaggagtgctgggagccactgtgggtgactgggggagggagattgcacacccaattaggccagaactgtgaggaaggggggagagcatggggtttggggccagttcgctccagttccaaggacaagtggttctttgcttactaatgaggccctaagatgtccttwtctaagcttgtttcctgcatataagtagaaaggggtacaaatgacaaaggatgcaaagcatttagcatgcagtctacttggtaaaaggagcctgttgctttaagtatcattcttattcccatagtttacaatttacagcgtgagaactgaagagggtagcaattgactaaactgctctatgtgcctcatggcaaaagtcacagcaagaacagggcagcctggaaggcacctgtggatgaggccaggacggttgagtctggaaatcgcagggaatgttgatcagacagcacggtgatatcagggtttgggaaactctggaaagagctgcctccacttgtagccgggacctgggttgggcgggtgcacttattctagaactgtagccttcagtatggcagccaccagccacaggtggctttcatacacttgaagagttgtcaaggctaggtgtggtggctcaagcctgtaatccgagcactttgggaggctgagattggatattcacttgagctcaggagtttgagatcagtctgggcaacatggcgaaaccccatctctaccaaaaattaaaaaattagccaagcatggtggcacatgcatatggtcttagctactccaagaggctgaggtgggagaaccatttgagcctaggaggcggaggttgcagtgagctgtgatcctgccactacagcgtgcgtgacagtgagaccctgtcttcacaaccaccaccacctcccaaaaaaggttggtgtgaccgaggtaactggattgaattgtatttcaaccactctggaataaattgtaagacctgttactcattctgttactgggaagcttaaatatgttggaaacaacttaagtatatgaatgtccttctcaatggaaaattttatgaaacttaaatttgtagtaaaattttgcatctggattgagatatagtaggagcctaagacacatggcaaatttgaaagaattagtacccctccaaaagtgaatagctcgtaaatgtttatagtgactcgaaatacttctgatatagtgtttaaatatagtactaaaattgcacctttttctttctgcaatgggttctggtagtgttagaagatacacatatggtttgtatctattttctttggacagtactgctgggaatggttcatcctactttgtcaacattattttttcatttggaccattttggtagccaaaaaaatgttctaccatttgttttaatttctctccctgccacgtgaggtcagacatgttcttgggtctattggtttaattctggaaattgtgtgcctattttattacagtattcttggtcttttctaccttggtttgtagaactttctatattacatatgtacttaatgctcttctagatttctctgcctttgggtttttggcttctgttatttgatacaaagaagttaaggtttttattaaagataaactattttctctatgttcaggaaccctttttgatgctttcatttttactgcttgggtgatgatctcatctgggcttttagaatgcagtgtaaagtaagtatccaactaatgggaaagctgggggacaaaacagatttctattttaaatgggtttttactcagttggttcatcctttgtcttgatttttaagattgttggtgtgactaaagtcttttaatagcagcaaatgtaaacacctgcagaaggtgtttggtttttttttttgtt

SEQ ID NO: 11438 - DNA, 2074 bp, Homo sapiens
tgacagttctgacttgagaaatagctgtgataattaaatgagcatctatttaaggcatcgcgcacaatagctctttacctagagaagggtaggttcccatgtgggggtttcctttttcttggtgctatcttggcctaatgtctgagaagcagtgtcctaggcggtgtcccgctgacccaaatccccaaggagtgctgggagccactgtgggtgactgggggagggagattgcacacccaattaggccagaactgtgaggaaggggggagagcatggggtttggggccagttcgctccagttccaaggacaagtggttctttgcttactaatgaggccctaagatgtccttttctaagcttgtttcctgcatataagtagaaaggggtacaaatgacaaaggatgcaaagcatttagcaygcagtctacttggtaaaaggagcctgttgctttaagtatcattcttattcccatagtttacaatttacagcgtgagaactgaagagggtagcaattgactaaactgctctatgtgcctcatggcaaaagtcacagcaagaacagggcagcctggaaggcacctgtggatgaggccaggacggttgagtctggaaatcgcagggaatgttgatcagacagcacggtgatatcagggtttgggaaactctggaaagagctgcctccacttgtagccgggacctgggttgggcgggtgcacttattctagaactgtagccttcagtatggcagccaccagccacaggtggctttcatacacttgaagagttgtcaaggctaggtgtggtggctcaagcctgtaatccgagcactttgggaggctgagattggatattcacttgagctcaggagtttgagatcagtctgggcaacatggcgaaaccccatctctaccaaaaattaaaaaattagccaagcatggtggcacatgcatatggtcttagctactccaagaggctgaggtgggagaaccatttgagcctaggaggcggaggttgcagtgagctgtgatcctgccactacagcgtgcgtgacagtgagaccctgtcttcacaaccaccaccacctcccaaaaaaggttggtgtgaccgaggtaactggattgaattgtatttcaaccactctggaataaattgtaagacctgttactcattctgttactgggaagcttaaatatgttggaaacaacttaagtatatgaatgtccttctcaatggaaaattttatgaaacttaaatttgtagtaaaattttgcatctggattgagatatagtaggagcctaagacacatggcaaatttgaaagaattagtacccctccaaaagtgaatagctcgtaaatgtttatagtgactcgaaatacttctgatatagtgtttaaatatagtactaaaattgcacctttttctttctgcaatgggttctggtagtgttagaagatacacatatggtttgtatctattttctttggacagtactgctgggaatggttcatcctactttgtcaacattattttttcatttggaccattttggtagccaaaaaaatgttctaccatttgttttaatttctctccctgccacgtgaggtcagacatgttcttgggtctattggtttaattctggaaattgtgtgcctattttattacagtattcttggtcttttctaccttggtttgtagaactttctatattacatatgtacttaatgctcttctagatttctctgcctttgggtttttggcttctgttatttgatacaaagaagttaaggtttttattaaagataaactattttctctatgttcaggaaccctttttgatgctttcatttttactgcttgggtgatgatctcatctgggcttttagaatgcagtgtaaagtaagtatccaactaatgggaaagctgggggacaaaacagatttctattttaaatgggtttttactcagttggttcatcctttgtcttgatttttaagattgttggtgtgactaaagtcttttaatagcagcaaatgtaaacacctgcagaaggtgtttggtttttttttttgtt

SEQ ID NO: 11439 - DNA, 2074 bp, Homo sapiens
tgacagttctgacttgagaaatagctgtgataattaaatgagcatctatttaaggcatcgcgcacaatagctctttacctagagaagggtaggttcccatgtgggggtttcctttttcttggtgctatcttggcctaatgtctgagaagcagtgtcctaggcggtgtcccgctgacccaaatccccaaggagtgctgggagccactgtgggtgactgggggagggagattgcacacccaattaggccagaactgtgaggaaggggggagagcatggggtttggggccagttcgctccagttccaaggacaagtggttctttgcttactaatgaggccctaagatgtccttttctaagcttgtttcctgcatataagtagaaaggggtacaaatgacaaaggatgcaaagcatttagcatgcagtctacttggtaaaaggagcctgttgctttwagtatcattcttattcccatagtttacaatttacagcgtgagaactgaagagggtagcaattgactaaactgctctatgtgcctcatggcaaaagtcacagcaagaacagggcagcctggaaggcacctgtggatgaggccaggacggttgagtctggaaatcgcagggaatgttgatcagacagcacggtgatatcagggtttgggaaactctggaaagagctgcctccacttgtagccgggacctgggttgggcgggtgcacttattctagaactgtagccttcagtatggcagccaccagccacaggtggctttcatacacttgaagagttgtcaaggctaggtgtggtggctcaagcctgtaatccgagcactttgggaggctgagattggatattcacttgagctcaggagtttgagatcagtctgggcaacatggcgaaaccccatctctaccaaaaattaaaaaattagccaagcatggtggcacatgcatatggtcttagctactccaagaggctgaggtgggagaaccatttgagcctaggaggcggaggttgcagtgagctgtgatcctgccactacagcgtgcgtgacagtgagaccctgtcttcacaaccaccaccacctcccaaaaaaggttggtgtgaccgaggtaactggattgaattgtatttcaaccactctggaataaattgtaagacctgttactcattctgttactgggaagcttaaatatgttggaaacaacttaagtatatgaatgtccttctcaatggaaaattttatgaaacttaaatttgtagtaaaattttgcatctggattgagatatagtaggagcctaagacacatggcaaatttgaaagaattagtacccctccaaaagtgaatagctcgtaaatgtttatagtgactcgaaatacttctgatatagtgtttaaatatagtactaaaattgcacctttttctttctgcaatgggttctggtagtgttagaagatacacatatggtttgtatctattttctttggacagtactgctgggaatggttcatcctactttgtcaacattattttttcatttggaccattttggtagccaaaaaaatgttctaccatttgttttaatttctctccctgccacgtgaggtcagacatgttcttgggtctattggtttaattctggaaattgtgtgcctattttattacagtattcttggtcttttctaccttggtttgtagaactttctatattacatatgtacttaatgctcttctagatttctctgcctttgggtttttggcttctgttatttgatacaaagaagttaaggtttttattaaagataaactattttctctatgttcaggaaccctttttgatgctttcatttttactgcttgggtgatgatctcatctgggcttttagaatgcagtgtaaagtaagtatccaactaatgggaaagctgggggacaaaacagatttctattttaaatgggtttttactcagttggttcatcctttgtcttgatttttaagattgttggtgtgactaaagtcttttaatagcagcaaatgtaaacacctgcagaaggtgtttggtttttttttttgtt

SEQ ID NO: 11440 - DNA, 2074 bp, Homo sapiens
tgacagttctgacttgagaaatagctgtgataattaaatgagcatctatttaaggcatcgcgcacaatagctctttacctagagaagggtaggttcccatgtgggggtttcctttttcttggtgctatcttggcctaatgtctgagaagcagtgtcctaggcggtgtcccgctgacccaaatccccaaggagtgctgggagccactgtgggtgactgggggagggagattgcacacccaattaggccagaactgtgaggaaggggggagagcatggggtttggggccagttcgctccagttccaaggacaagtggttctttgcttactaatgaggccctaagatgtccttttctaagcttgtttcctgcatataagtagaaaggggtacaaatgacaaaggatgcaaagcatttagcatgcagtctacttggtaaaaggagcctgttgctttaagtatcattcttattcccatagtttacaatttacagcgtgagaactgaagagggtagcaattgactaaactgctctatgtgcctcatggcaaaagtcacagcaagaacagggcagcctggaaggcacctgtggatgaggccaggacggttgagtctggaaatcgcagggaatgttgatcagacagcacggtgatatcagggtttgggaaactctggaaagagctgcctccacttgtagccgggacctgggttgggcgggtgcacttattctagaactgtagccttcagtatggcagccaccagccacaggtggctttcatacacttgaagagttgtcaaggctaggtgtggtggctcaagcctgtaatccgagcactttgggaggctgagattggatattcacttgagctcaggagtttgagatcagtctgggcaacatggcgaaaccccatctctaccaaaaattaaaaaattagccaagcatggtggcacatgcatatggtcttagctactccaagaggctgaggtgggagaaccatttgagcctaggaggcggaggttgcagtgagctgtgatcctgccactacagcgtgcgtgacagtgagaccctgtcttcacaaccaccaccaccycccaaaaaaggttggtgtgaccgaggtaactggattgaattgtatttcaaccactctggaataaattgtaagacctgttactcattctgttactgggaagcttaaatatgttggaaacaacttaagtatatgaatgtccttctcaatggaaaattttatgaaacttaaatttgtagtaaaattttgcatctggattgagatatagtaggagcctaagacacatggcaaatttgaaagaattagtacccctccaaaagtgaatagctcgtaaatgtttatagtgactcgaaatacttctgatatagtgtttaaatatagtactaaaattgcacctttttctttctgcaatgggttctggtagtgttagaagatacacatatggtttgtatctattttctttggacagtactgctgggaatggttcatcctactttgtcaacattattttttcatttggaccattttggtagccaaaaaaatgttctaccatttgttttaatttctctccctgccacgtgaggtcagacatgttcttgggtctattggtttaattctggaaattgtgtgcctattttattacagtattcttggtcttttctaccttggtttgtagaactttctatattacatatgtacttaatgctcttctagatttctctgcctttgggtttttggcttctgttatttgatacaaagaagttaaggtttttattaaagataaactattttctctatgttcaggaaccctttttgatgctttcatttttactgcttgggtgatgatctcatctgggcttttagaatgcagtgtaaagtaagtatccaactaatgggaaagctgggggacaaaacagatttctattttaaatgggtttttactcagttggttcatcctttgtcttgatttttaagattgttggtgtgactaaagtcttttaatagcagcaaatgtaaacacctgcagaaggtgtttggtttttttttttgtt

SEQ ID NO: 11441 - DNA, 2074 bp, Homo sapiens
tgacagttctgacttgagaaatagctgtgataattaaatgagcatctatttaaggcatcgcgcacaatagctctttacctagagaagggtaggttcccatgtgggggtttcctttttcttggtgctatcttggcctaatgtctgagaagcagtgtcctaggcggtgtcccgctgacccaaatccccaaggagtgctgggagccactgtgggtgactgggggagggagattgcacacccaattaggccagaactgtgaggaaggggggagagcatggggtttggggccagttcgctccagttccaaggacaagtggttctttgcttactaatgaggccctaagatgtccttttctaagcttgtttcctgcatataagtagaaaggggtacaaatgacaaaggatgcaaagcatttagcatgcagtctacttggtaaaaggagcctgttgctttaagtatcattcttattcccatagtttacaatttacagcgtgagaactgaagagggtagcaattgactaaactgctctatgtgcctcatggcaaaagtcacagcaagaacagggcagcctggaaggcacctgtggatgaggccaggacggttgagtctggaaatcgcagggaatgttgatcagacagcacggtgatatcagggtttgggaaactctggaaagagctgcctccacttgtagccgggacctgggttgggcgggtgcacttattctagaactgtagccttcagtatggcagccaccagccacaggtggctttcatacacttgaagagttgtcaaggctaggtgtggtggctcaagcctgtaatccgagcactttgggaggctgagattggatattcacttgagctcaggagtttgagatcagtctgggcaacatggcgaaaccccatctctaccaaaaattaaaaaattagccaagcatggtggcacatgcatatggtcttagctactccaagaggctgaggtgggagaaccatttgagcctaggaggcggaggttgcagtgagctgtgatcctgccactacagcgtgcgtgacagtgagaccctgtcttcacaaccaccaccacctcccaaaaaaggttggtgtgaccgaggtaactggattgaattgtatttcaaccactctggaataaattgtaagacctgttactcattctgttactgggaagcttaaatatgttggaaacaacttaagtatatgaatgtccttctcaatggaaaattttatgaaacttaaatttgtagtaaaattttgcatctggattgagatatagtaggagcctaagacacatggcaaatttgaaagaattagtacccctccaaaagtgaatagctcgtaaatgtttatagtgactcgaaatacttctgatatagtgtttaaatatagtactaaaattgcacctttttctttctgcaatgggttctggtagtgttagaagatacacatatggtttgtatctattttctttggacagtactgctgggaatggttcatcctactttgtcaacattattttttcatttggaccattttggtagccaaaaaaatgttytaccatttgttttaatttctctccctgccacgtgaggtcagacatgttcttgggtctattggtttaattctggaaattgtgtgcctattttattacagtattcttggtcttttctaccttggtttgtagaactttctatattacatatgtacttaatgctcttctagatttctctgcctttgggtttttggcttctgttatttgatacaaagaagttaaggtttttattaaagataaactattttctctatgttcaggaaccctttttgatgctttcatttttactgcttgggtgatgatctcatctgggcttttagaatgcagtgtaaagtaagtatccaactaatgggaaagctgggggacaaaacagatttctattttaaatgggtttttactcagttggttcatcctttgtcttgatttttaagattgttggtgtgactaaagtcttttaatagcagcaaatgtaaacacctgcagaaggtgtttggtttttttttttgtt

SEQ ID NO: 11442 - DNA, 2074 bp, Homo sapiens
tgacagttctgacttgagaaatagctgtgataattaaatgagcatctatttaaggcatcgcgcacaatagctctttacctagagaagggtaggttcccatgtgggggtttcctttttcttggtgctatcttggcctaatgtctgagaagcagtgtcctaggcggtgtcccgctgacccaaatccccaaggagtgctgggagccactgtgggtgactgggggagggagattgcacacccaattaggccagaactgtgaggaaggggggagagcatggggtttggggccagttcgctccagttccaaggacaagtggttctttgcttactaatgaggccctaagatgtccttttctaagcttgtttcctgcatataagtagaaaggggtacaaatgacaaaggatgcaaagcatttagcatgcagtctacttggtaaaaggagcctgttgctttaagtatcattcttattcccatagtttacaatttacagcgtgagaactgaagagggtagcaattgactaaactgctctatgtgcctcatggcaaaagtcacagcaagaacagggcagcctggaaggcacctgtggatgaggccaggacggttgagtctggaaatcgcagggaatgttgatcagacagcacggtgatatcagggtttgggaaactctggaaagagctgcctccacttgtagccgggacctgggttgggcgggtgcacttattctagaactgtagccttcagtatggcagccaccagccacaggtggctttcatacacttgaagagttgtcaaggctaggtgtggtggctcaagcctgtaatccgagcactttgggaggctgagattggatattcacttgagctcaggagtttgagatcagtctgggcaacatggcgaaaccccatctctaccaaaaattaaaaaattagccaagcatggtggcacatgcatatggtcttagctactccaagaggctgaggtgggagaaccatttgagcctaggaggcggaggttgcagtgagctgtgatcctgccactacagcgtgcgtgacagtgagaccctgtcttcacaaccaccaccacctcccaaaaaaggttggtgtgaccgaggtaactggattgaattgtatttcaaccactctggaataaattgtaagacctgttactcattctgttactgggaagcttaaatatgttggaaacaacttaagtatatgaatgtccttctcaatggaaaattttatgaaacttaaatttgtagtaaaattttgcatctggattgagatatagtaggagcctaagacacatggcaaatttgaaagaattagtacccctccaaaagtgaatagctcgtaaatgtttatagtgactcgaaatacttctgatatagtgtttaaatatagtactaaaattgcacctttttctttctgcaatgggttctggtagtgttagaagatacacatatggtttgtatctattttctttggacagtactgctgggaatggttcatcctactttgtcaacattattttttcatttggaccattttggtagccaaaaaaatgttctaycatttgttttaatttctctccctgccacgtgaggtcagacatgttcttgggtctattggtttaattctggaaattgtgtgcctattttattacagtattcttggtcttttctaccttggtttgtagaactttctatattacatatgtacttaatgctcttctagatttctctgcctttgggtttttggcttctgttatttgatacaaagaagttaaggtttttattaaagataaactattttctctatgttcaggaaccctttttgatgctttcatttttactgcttgggtgatgatctcatctgggcttttagaatgcagtgtaaagtaagtatccaactaatgggaaagctgggggacaaaacagatttctattttaaatgggtttttactcagttggttcatcctttgtcttgatttttaagattgttggtgtgactaaagtcttttaatagcagcaaatgtaaacacctgcagaaggtgtttggtttttttttttgtt

SEQ ID NO: 11443 - DNA, 2074 bp, Homo sapiens
tgacagttctgacttgagaaatagctgtgataattaaatgagcatctatttaaggcatcgcgcacaatagctctttacctagagaagggtaggttcccatgtgggggtttcctttttcttggtgctatcttggcctaatgtctgagaagcagtgtcctaggcggtgtcccgctgacccaaatccccaaggagtgctgggagccactgtgggtgactgggggagggagattgcacacccaattaggccagaactgtgaggaaggggggagagcatggggtttggggccagttcgctccagttccaaggacaagtggttctttgcttactaatgaggccctaagatgtccttttctaagcttgtttcctgcatataagtagaaaggggtacaaatgacaaaggatgcaaagcatttagcatgcagtctacttggtaaaaggagcctgttgctttaagtatcattcttattcccatagtttacaatttacagcgtgagaactgaagagggtagcaattgactaaactgctctatgtgcctcatggcaaaagtcacagcaagaacagggcagcctggaaggcacctgtggatgaggccaggacggttgagtctggaaatcgcagggaatgttgatcagacagcacggtgatatcagggtttgggaaactctggaaagagctgcctccacttgtagccgggacctgggttgggcgggtgcacttattctagaactgtagccttcagtatggcagccaccagccacaggtggctttcatacacttgaagagttgtcaaggctaggtgtggtggctcaagcctgtaatccgagcactttgggaggctgagattggatattcacttgagctcaggagtttgagatcagtctgggcaacatggcgaaaccccatctctaccaaaaattaaaaaattagccaagcatggtggcacatgcatatggtcttagctactccaagaggctgaggtgggagaaccatttgagcctaggaggcggaggttgcagtgagctgtgatcctgccactacagcgtgcgtgacagtgagaccctgtcttcacaaccaccaccacctcccaaaaaaggttggtgtgaccgaggtaactggattgaattgtatttcaaccactctggaataaattgtaagacctgttactcattctgttactgggaagcttaaatatgttggaaacaacttaagtatatgaatgtccttctcaatggaaaattttatgaaacttaaatttgtagtaaaattttgcatctggattgagatatagtaggagcctaagacacatggcaaatttgaaagaattagtacccctccaaaagtgaatagctcgtaaatgtttatagtgactcgaaatacttctgatatagtgtttaaatatagtactaaaattgcacctttttctttctgcaatgggttctggtagtgttagaagatacacatatggtttgtatctattttctttggacagtactgctgggaatggttcatcctactttgtcaacattattttttcatttggaccattttggtagccaaaaaaatgttctaccatttgttttaatttctctccctgccacgtgaggtcagacatgttcttgggtctattggtttaattctggaaattgtgtgcctattttattacagtattcttggtcttttctaccttggtttgtagaactytctatattacatatgtacttaatgctcttctagatttctctgcctttgggtttttggcttctgttatttgatacaaagaagttaaggtttttattaaagataaactattttctctatgttcaggaaccctttttgatgctttcatttttactgcttgggtgatgatctcatctgggcttttagaatgcagtgtaaagtaagtatccaactaatgggaaagctgggggacaaaacagatttctattttaaatgggtttttactcagttggttcatcctttgtcttgatttttaagattgttggtgtgactaaagtcttttaatagcagcaaatgtaaacacctgcagaaggtgtttggtttttttttttgtt

SEQ ID NO: 11444 - DNA, 546 bp, Homo sapiens
gaggccaggtgtggtggctcacgcctgtaatcccaacactttgggaagccgaggcgagcagatcacttgaggccaggagtttgagaccagcctggccaacatggcaaaatgccatctctactaaaaatacaaaaattatctgggcatggtggcgggtgcctgtaaccccagctactcagggggctgaggcaggagaattgcttgaacctgggaggcggaggttgcagtgagctgagatcgtgccattgcactccagcctgggtgacagagcaagactccgtctcaaaaaaaaaaaaaaaaaaagtgagaccaccagccacgttcctgttcccgccttcctcactcctgagacaggtgtgrccatgaggcttcctgtgcatatcgtgggtttgtaaatgaaccccactgggctgtaccaagtgcccttcaagaggtccacttctcctaccaccttcacagccgctccatcaactggctgcttgtgacatttgaaatcttacacacagaatccagttttctccaggcaggacctggcacagctttgtt

SEQ ID NO: 11445 - DNA, 442 bp, Homo sapiens
cctaaggatgctgtggccagtcacaccctcccacgggcaagggcacccggcaataagccccagctactgccattactcatcccacttcccaggcaggcaggaaggcaggtgtgcagagcactgggcagggccatagtacctgtgccacacacacacatgctcttcacctcatccagagtttcctaggttttggtgcttcaacagccctcagtaacgcaggctccttactatgagatagcctgggagagagcyggggtttctgtgatgggaaagggctaagccgggaaaggaaacagtgtgtgactggcgccttgcaagccacctaaggcaccaggcacacacaggggaggggagaagaggacgggagaggagtgggggccacgggatgcggcttgtgttcccctgatgtcctgggacacagctccctgaaccccaaaacacc

SEQ ID NO: 11446 - DNA, 442 bp, Homo sapiens
cctaaggatgctgtggccagtcacaccctcccacgggcaagggcacccggcaataagccccagctactgccattactcatcccacttcccaggcaggcaggaaggcaggtgtgcagagcactgggcagggccatagtacctgtgccacacacacacatgctcttcacctcatccagagtttcctaggttttggtgcttcaacagccctcagtaacgcaggctccttactatgagatagcctgggagagagctggggtttctgtgatgggaaagggctaagccgggaaaggaaacagtgtgtgactggcgccttgcaagccacctaaggcaccaggcacacacaggggaggggagaagaggacgggagaggagtgggrgccacgggatgcggcttgtgttcccctgatgtcctgggacacagctccctgaaccccaaaacacc

SEQ ID NO: 11447 - DNA, 921 bp, Homo sapiens
gcctgtagtgctagctacttgggaggctgagatgagaggaacacttgagcccaggagttctaggttagtgagatgtgattgtgccattgcaccccagcttgggtgacagagagaaaccctgtctcaaaaaaaaaaaattaaaataaacaatattctayaaatgtgtgttagttttaataatactctaaggctattactgtcctaataggacatgtgcattccagggatgtcatctggcatttaatcagaagacaacactgcagaggtaactactgtaagcactttggctatctttatgatccacactacaggtttttctaattagcataatgaatgctagaaatgggttttcattggtgtaaataatagtgcttaatatatgtggattggctagtgcagcagttggcaaactctttccataaaggaccagatagtatttctggctttgtgagccttaaggtttctatcatgaccactcactctgtcattgtagtataaaatcagtcatagatatatgtaaataaactggcatggctgtgttccaataaaactttatttacaaaaacagacacaggctacatttagcccatgcaccatagtttgcgactccttggcctagagtagcctagaaaccctgtctgtccttgaatgaatagggtttaagaatataaatctcttcacacatgaagatagttcccaaggttgatgtattatttcattttcacactgctatgaagaaatacccaaggctgggtaatttataaaggaaagatgtttaattgacttacagttccacatggctggggaggcctcaggaaatttacaatcatggtggaaggggaaacacacatgtccttcttcacacggtggcaggagtgagaagaatgagagcagaatgaagggggaatctccttgtaaaac

SEQ ID NO: 11448 - DNA, 567 bp, Homo sapiens
cagacattatttctaaaatcagcatttaaaatctcaatattgcataccaatagtacagacacttttattttcttaaagtttaccatatattttgaaataaactgacacacaaaaagactttagatgtgttaagtgtataatctgaggatttctgacataggtagatactcgtagaaccatagccacattcaagaaaatacacataactatcacaccccaaatatttcctaatgccattttgtaatccctccaacccatactaaaaaaatttcctgaactttatataattagaaacttaacagtatgtacccttatttgcctggctttaaatttcaacataattatttttagattggtcaacagtatcgcatgtatcaatagtctgttattttgtattgtcgattaatattccactgtatagatattccaaaatttgtttattcatttattmcctgatggccatttgggttgtttccagcatttgcctgttacaaagaaaaagctgctataaacatttatcttttcatagacatgttatttatttctcttcaataaatacctagaaat

SEQ ID NO: 11449 - DNA, 547 bp, Homo sapiens
tgccgggttttagtattrgaatgatactgccctcaggggatgaattataaagtattccatcttcttcattttttggaatagtttcattagaaataatatcagctcttcgttacacatcaggaataattagactgtgaatctacccaattatagctctagagattacaaaattgtcaaggatgtaagtgttcaatacactttttaaaggtttcattatttttaaatgttttgataatcgtacatagacatgcagttgtaataagtaatacagacaggtcctatattcccttcactcaatttcccccagtggtaacatcaaaactatgatatgaagccacatcaggaaatgggccctgagacaatccagtgatattattaagagttcaccaatgttatagacactcaagtgtgtatggttgtttctatgcaattttatcacttgtggagattcatgtgaccactaagatagctcagacacagaacagcttaatcatgaggatccatcagactttcattttgtagtccagccacctttcctctttcccca

SEQ ID NO: 11450 - DNA, 556 bp, Homo sapiens
tatctggaaattgtcataagggaatactacagatgaagaaatatatattctaaaaaaatccactaatactaggtagagacagtgagaatgtgtcagttgaaccatgattctctccctccctcacccacctgccaagttcagcatagctgtaattccattccaggcaggtatagtcatatagccagaaacacatggctgtctctccccttgattatggtatcttcctaggagaactggatttcttattagagctttctccattttgtttggtttctattgtaactaaaaactaaccaaatgtttggtttttcctatattttaaaatctgtttcattatttttatgtctgtgcatgtcacaaattctatgtaatttacaaatttattagtcttatatattttaatagatatttataaacaaatattgaacctgaatctttgaactatatttgtctctttcatttgaggtttttttttaacaaatttrtctcattttggtcataattcacttggtgaaactttttgtgtgtgtttcctttgagtcaaattggtagtaca

SEQ ID NO: 11451 - DNA, 567 bp, Homo sapiens
cacaaggaatagttgttgagttgaatktgtctgaattaaagagaggaatcaaaggcaaccccgctggtggcaaggctgcagaaaaccttgagaaaatgaaaaggagagttggtttggggaagggggagcggaaacaaaggatgaagttggcaaaataatgaaatattccttaaacttcataaaggcctttatgtaagttacctataaaattttaaaactgtaaaattaatacattgtatggaaggcaagcttacggtacttttaaaaatacatggcagcctcaaaggagttttattcaaaagaatgacacgccatgaatgcggtagttaaaacatgtgggcagctgggagagaattagaatgtggagataaatcacaagggaggcatatgttggctattctgggactgcctcctaatgtaggaggagcaaaattattaaacatgctcatctgttgggataagctctgcattttagcatctagaagaaatctagtgaagtatttgggacagcattattgcaactccttattgtgaagtggagttaataactgaagaattggttattcc

SEQ ID NO: 11452 - DNA, 658 bp, Homo sapiens
tatatgggtaaaatgctgttaaacgcatcacaagctacagagaaatcttttgtgaaagagagtcaatcaacatgacagacctcattactgtcttattttaaggactttccacagccacccaaccttcagcaaccaccaccccaatcagttagcagccatcgataaccaggcaaaaccctccaccagcaaaacgactgtgattcgctcaatgttcagatgattgttagtattttttagcaacaaattatgttttaatccaggtatgtacattgttttttaaacataatgctcttgcacatttaatagactacagtatagtgtaaacataacttacatgcactggaaaagcaaaaaaaatcgtgtgactccctgtactgagatatttgctttattgcagtggtctggaaccaaatctgcaatatctccgaagtacatctacagycagtaggaaacatgtggcagagtggaaaacagaagtggcctgcaaatatgtctgccttttgtcttaaaagcctaagcccacagagaagtgatatttggtaaacataaatagggtttctacaaaaaaattaaagggattagaatctccttatttttagatattttccttcagatttgtgttgaagagtggaagggaaagaaagagagaaggaggaaa

SEQ ID NO: 11453 - DNA, 588 bp, Homo sapiens
caaatgaaagcaaaagttgtctgctattgtaaataattttttttgcatacgaacattatgtatacgtatatatatrtcttttactgtactctaggtacacagaattgaattgctcagaatatatgatgcattgtccacttttattattgatatatcatggtcctcttttatttgtttcattatttacttatttttaatgaattaacctccataaaaccaccacgtgatcagaaaactagacccgaaaacattaacaaaaacttccatctgcctatttgttttctccattccgtttttctttcttctttctgtcctgatgtaaccactttctgggacttgtgctcagtgcctaaacaatatattgcttaattttagttgttttaaaatttttgtttagagtcttgaccttttgaaagtatcaaaatcttcctaagtgtttattgctaagctagccgaatagaaggctaatgctctaggcatctcagttctattgctgattcctgtccaagaaaaagagaacttttacttcttgttaaggctcacatcaaaatagagcttaagcatacatgcttaataagcattcgtgag

SEQ ID NO: 11454 - DNA, 517 bp, Homo sapiens
aacctactagagtcagtcaatgcagttatgttagagaaggtaaaggcgcaaaaccacttccaagtacctactctgtgtgggagcctgcacagtgtgacctgtttctgtcaccaactcaagctcacttcttacatcacaggggccatggatcagtactgttctgtggccttttagraaccgggcaacacacagcaggagttgagtggtgggtgagtgagccaagcttcgtctgtatttacagtcagtccccattactagcattactgcctgagttccgcctcctgtcagatcagcagcattagattctcataggagcacgaaccctattgtgaactgtgcatgtaaggaatctaggttgtgcactccttatgagaatctaatgcctgatgatctgtcactttctcccatcacccccagatgggactgtctagttgtaggaaaacaaactcagggctcccactgattctacactatggtaagttgtataagaaataattacttcattatatattacaat

SEQ ID NO: 11455 - DNA, 522 bp, Homo sapiens
caccattgggtcccaagagtttggcacataaatatttactaaacgaataaatgaatgaattcctctgggttcccataacwtatggatatttcccctagcaccatacttagctcattacaagggcccatgttcttctttgtctccccagctgacctataagctccttgagtggcgggatgatattttgccagtgtgacttgccagtgcttgtcccattgcttagcaattaggcactcaaagaatatttttgcatagatgaataaatgaataaatgatgataggccaggcgcggtggctcatgcctataatcccagtgccttgggagatggaggtgggtcgatcccttaagcccaggagtttcagaacagcctgggcaacatggtaaaacctgtctctataaaaacacaaaaatttaccttagggtgtggtggcatgcacctgtagtcccagctccttgggaggctgagttggtaggacctcttgagctcttgagcccaggtgctagaggttgcagtgagccat

SEQ ID NO: 11456 - DNA, 380 bp, Homo sapiens
gtggaaagaacagccctggatttaaaatcaggctctgacacactggctgggtgacctcaagcaagtcacaacccaagtctatgaactaatgtgtaaaatggggttgtctccaccaaccctgcagggcttagtgggaactccataatcagtctcatttcctcccagaagacaggattttaaaagggagaggaggggaaattagtatcgcagtgccaggaagcttccatgcttgcctccctcccacctttgacctcattagaggactcacacacaaattccacacttttccttttgtgcccttccttcctatccacacttttgcttccttccatcttaattgaccatcctatttgcaagaygggatgcattcctctaggaca

SEQ ID NO: 11457 - DNA, 517 bp, Homo sapiens
cctcccgaggtgcaagcgatcctcctacctcagcytcccaagtagctgggactacaggcacatgctaccacgccctaatttttgtaatttttgtagagatacggctttgccatgttgcccgagctggtcttgggctcctgagctaaagtgatccacccacctcagcctcccaaagtgccgggattacaagagtgaaccactgtgcccagtcaactctaattttttgataatacaactaggtctactttttttctgtaaataactttggtataaaatgactaaatctaaattggcttacctaacatgtagacataggcaaccgggtttttgtattaagaaatctgcacccagctactttatatagggcttgaaatatctactttctactgaaagttatacctgtaattgtcagtatcaaaatgccagatctaggcctatactccctagatatcaatagtgaacactgaattttcagttattattagtaatgacatattttcattcatccattcaatga

SEQ ID NO: 11458 - DNA, 517 bp, Homo sapiens
cctcccgaggtgcaagcgatcctcctacctcagcctcccaagtagctgggactacaggcacatgctaccacgccctaatttttgtaatttttgtagagatacggctttgccatgttgcccgagctggtcttgggctcctgagctaaagtgrtccacccacctcagcctcccaaagtgccgggattacaagagtgaaccactgtgcccagtcaactctaattttttgataatacaactaggtctactttttttctgtaaataactttggtataaaatgactaaatctaaattggcttacctaacatgtagacataggcaaccgggtttttgtattaagaaatctgcacccagctactttatatagggcttgaaatatctactttctactgaaagttatacctgtaattgtcagtatcaaaatgccagatctaggcctatactccctagatatcaatagtgaacactgaattttcagttattattagtaatgacatattttcattcatccattcaatga

SEQ ID NO: 11459 - DNA, 517 bp, Homo sapiens
cctcccgaggtgcaagcgatcctcctacctcagcctcccaagtagctgggactacaggcacatgctaccacgccctaatttttgtaatttttgtagagatacggctttgccatgttgcccgagctggtcttgggctcctgagctaaagtgatccacccaccycagcctcccaaagtgccgggattacaagagtgaaccactgtgcccagtcaactctaattttttgataatacaactaggtctactttttttctgtaaataactttggtataaaatgactaaatctaaattggcttacctaacatgtagacataggcaaccgggtttttgtattaagaaatctgcacccagctactttatatagggcttgaaatatctactttctactgaaagttatacctgtaattgtcagtatcaaaatgccagatctaggcctatactccctagatatcaatagtgaacactgaattttcagttattattagtaatgacatattttcattcatccattcaatga

SEQ ID NO: 11460 - DNA, 517 bp, Homo sapiens
cctcccgaggtgcaagcgatcctcctacctcagcctcccaagtagctgggactacaggcacatgctaccacgccctaatttttgtaatttttgtagagatacggctttgccatgttgcccgagctggtcttgggctcctgagctaaagtgatccacccacctcagcctcccaaagtgccgggattacaagagtgaaccactgtgcccagtcaactctaattttttgataatacaactaggtctactttttttctgtaaataactttggtataaaatgactaaatctaaattggcttacctaacatgtagacataggcaaccgggtttttgtattaagaaatctgcacccagctactttatatagggcttgaaatatctactttctactgaaagttatacctgtaattgtcagtatcaaaatgccagatctagrcctatactccctagatatcaatagtgaacactgaattttcagttattattagtaatgacatattttcattcatccattcaatga

SEQ ID NO: 11461 - DNA, 577 bp, Homo sapiens
ttgagacagagtctctctctgtcccccaggctggagtacagtggtgcgatctcagctcactgcaatctccacctcccaggttcaagcgattctcctgcctcagcctcctgagtagctgggattacaggcgcccaccaccacgcctggctaatttttgtatttttagtagagacgaggttttgccatgttgcctaggctgctctcgaactcctggcctcatgtgatccgcctgccttggcctcccaaagtgctgcgattacaggtgtgagccaccgtgcagcatcacccttactcctatcctgtgccctgcagctatttctcactcatcttggtcttaccttaatcaggatctccataaagatgtattatattaagckgttcttattatccaatggtgttttctcctatatcattttatgatttctttttgtactttaaagtcttcttttaaatttaagatgctctgcttcccaagaatccagatttttgtacaaatttaaaagtgtacacttaaccccaaggcctgaagcccttaactttagggctctacctgtcttgtctatctttatagattgtt

SEQ ID NO: 11462 - DNA, 1112 bp, Homo sapiens
tgcattccatgattgttctgaccctagaggagtctactttccctccaccttctgctccaagactgaggctggctggataaccatgtccttctcctccctggtcaaagaggatgtttccctaggaagggccctgcctcgatctcgatgtcccactcctcaactggcatttgaaaatttgtaccatttattccctagaaataaaccctcagaaacaactcataaaacccacttgtagaaatgtaggttcctgaactgatgtgatctgggagcccacgctgcctctccacctccaaagggctggagttctcccctctaagctattggaaaattgaacgtgtgaatgaatgaggtcccgtcctcacttccctatcaccttatggctcccctgcctctcttttctctagaggctgaagtttatgtgtgtaaaacttccatttgattagcagacatgccttttcatgggctcttggattagtcttttttcacactgatacaaagaactacctgagactgggcaatttataaagagaacagctttaattagttcacagttccgcgtggctgggaaggcctcaggaaacttacaatcatggcagaaggtgaagagcaagcaggaaccttttcacaaggcagcaggaaagggagggggggggagggggaacttccaaacacttttaaaccatcggatctcatgagaactccctcactatcacaagaacagcatgggggaaaccgcccccatgatccaatcacctgcccccaggtacctccctggacacatagggattaygatttgagatgagatttgggtggggacacagagccaaaccgtatcagctttcaaaccccaataaataaaaatcgcctttctttgcctccataaaagaccagaacacaagctgaatttgtgggtccaggaaaggcttcttgggggaatgctttccacgcttgtccctgatggaatactgcactagccacaggaagggcaaggtgaagtgggagaaaaattccagggacaggaaagagcaggtgcaatggtgtgagagatacacacaggggaagaggcaggctggagaggtgaaatcaagctcaggaggagaagaggggaaata

SEQ ID NO: 11463 - DNA, 595 bp, Homo sapiens
ccccttaactttctacctccaggttagtaggtattccctgaataagcacccacctcccttgtttttttgtttgtttgtttttgagatggagtctcactctgtcacctaggctggcgtgcaacaacgtgatcttggctyactgcaacctctgcctcccgggctcaagcgaccacctccctattccttcctggagatggcatctctccacttagatattccacagatgcttcaaactactgaagtacaaactgaattcatgaactttcccccccaaaatctatcccttattgttagccattccagtaaagagggtcctaatactccgagctgtccaaaccaaaagtctcagtgtccctcacgtctcatatccaaaaagtgcatcctatcagttctttctcaagtacttgctggttaaacctctctggtccaagctaccttcatcttttatttacagcagaggttggtgaacttctgctataaatgaaagttttttctttaatttttgtttcaaaacaaagctttttttttccagcaaacaagttttttgtttgtttgtttgtttgtttgtttgtttttgagatggggtctcgttttg

SEQ ID NO: 11464 - DNA, 535 bp, Homo sapiens
ccaattcataacaaggaggttgggaagaccctgaaaccaactcagtggaagtagggaggtgctagttgaagccatggagattcctccagccagcccttcctgctgttatgctgggagagctatggctaacagcaccaactctggctgtgtgataactcagttgatcactgagtgtcaacttcattggattgaaggacccaagtattgatcccgggtgtgtctgtgagggcattgccaaaggagattaacatttgagtcagtgggctgggtaaggcagacccacccttaatctggtgggcccaatctaatcagctgccagtgaatataaaggaggcagaaaaaatgtgaaagagcaagactggcctagcctcccagcctacatctgtctcatctrtctccactgttagatgcttccagccctcaaacatcggactccaggttcttcagttttgagactcagactggctctccttgctccttaagcttgcagacagcctattatgggatcttgtgatggtgtaagctaatacttaat

SEQ ID NO: 11465 - DNA, 586 bp, Homo sapiens
tccagggcaggggctcaactatcttggtttacagaatatcatctcaaaccagtcaatgtctacactggcacattctgctgtcttcaaaggctgtttcagtctccccagcctgtccagctcagaaaaactgatgttcatccttttctgtttttctcaaagaaaataccaaagcttttaatagctgatatctcctagtggtgcaatcatgagagatttttattttctccttgtagttttctgtaattgagagattatcgacaatgactatgttacttctataatcagagagagaaatattgtgcttgcttttattttcttaagcaactctacataaattcttgccacarctttctgggccccgtaatgttactgctgtgtctccttcctcccagccctcatggcaggactcatgtgtgacaggctctgggtcttctctcatctgccagtggcaaggaaaccctaggctgccaggactgcttagcaaatagatcatgaagtattacgactccattttacagatggagaaaccaagccccctgacttccctctgtctacactacaggcaaatgggatctggacccactga

SEQ ID NO: 11466 - DNA, 533 bp, Homo sapiens
ctgaactgaaggaaattacaaaatggcctacattaaaacatagtacatagcctcagagactatattaaaaatctagtataggcagtcctataaattgattttcctaaatgtctcttgtttttcttttgactttcaagttttctagtttctgatttactccagatctatttcatgaccctctcaaktgaagatcagttttttgttacatctgagtcaaggcagtttccttcacttgctcctattaagaacaccacatacttagccttccataccagtatcacaatgcataataagttcttattacttactttccatttgtatactatgtgataattacattagttcagggttaatatctgttaaagtttgtaaataactaaatgcctgtcattaagagctatgcaataaacatttattgaatagctagaaaattgagaaataaatgctcaattgttgctgtttttaaaaactgttctgttatagtactttcggggtaattaacacttggcgtatgcctctatatcttagagtct

SEQ ID NO: 11467 - DNA, 544 bp, Homo sapiens
tttttctttttcttttttttttttgagatggagttttactcttgttgcctaggctggagtgcagtggcatgatctcagctcactgcaacctccrccttccagtttcaaatgattctcctccctcagcctccagagtagctgggattacaggcgcccgccaccacgcctggctaatttttgcatttttagtagagactgggtttcaccatgttggccaggctggtctcgaactcctgacctcatgatcttcctgcctcagcctcccaaaatgctggaattacaggcatgagccatcatgcccggccgtaggttggcattttaagctcacacaatcctaccaaggtgacagtgaatctccttatgacaggattgtgggtctgagagagctgttgtagccttttactctctccagtcaacaaagattggcaactacagggttaccacctttggagtctctttcctcctgtctgccacgtctacagactactgcttgtcaatgtgatatgcatgtattttcttcttcagctttgcccctcctgccact

SEQ ID NO: 11468 - DNA, 544 bp, Homo sapiens
tttttctttttcttttttttttttgagatggagttttactcttgttgcctaggctggagtgcagtggcatgatctcagctcactgcaacctccgccttccagtttcaaatgattctcctccctcagcctccagagtagctgggattacaggcgcccgccaccacgcctggctaatttttgcatttttagtagagactgggtttcaccatgttggccaggctggtctcgaactcctgacctcatgatcttcctgcctcascctcccaaaatgctggaattacaggcatgagccatcatgcccggccgtaggttggcattttaagctcacacaatcctaccaaggtgacagtgaatctccttatgacaggattgtgggtctgagagagctgttgtagccttttactctctccagtcaacaaagattggcaactacagggttaccacctttggagtctctttcctcctgtctgccacgtctacagactactgcttgtcaatgtgatatgcatgtattttcttcttcagctttgcccctcctgccact

SEQ ID NO: 11469 - DNA, 518 bp, Homo sapiens
ttggaaatggttaattgtattcttgtgatgttatctagatgttcccctatgagctgaattgccttgtaaacaggtagttaggtctagataattgattagttttagattcagtgacatgggaagcttgcagagttttgcaggagaaattacatttgaaaagatcactctggtaactgtgttgagaatagacttttagaaggcaaaggctgaatcagagagaacagtgggcctattgcaataatccaggagagagatgagactggtttggatcacaatgttagatgtgaaaataatggatagtggtcatcttctggatgtattttgtaggaagagacaacagaatttgctgaaagatcagatattttccagaagctaggcttgtgsactccttcatctggtaccccaccaaaagaggccattctacatctgcccctgaagtcatagccttcatgtggggaacatgtggggacactagatcaaaggagcctcctcttgtagccgacaaagatggctgtttg

SEQ ID NO: 11470 - DNA, 510 bp, Homo sapiens
gggagggcgggacagagcagaggccggtgtgaaactggagagcctcacgtggggctgggagccgtggggctgggagccgagtccggagtccatcagcttgccagcttgcctgctgaggcctctttttgctctggggcccctggctggagtctgccctgagccccgcttcaccccacatgccttccttggggacgtgttcacacatgtggccctagctgtgagagacagacctgccttgacgtgcctgtgcctgtgtgcaggggctgaccctcctgggccccattgcttttttctctctgcctgccctctcacttccttggcatctcagaacagctgagctggaagtgggtgaataataataataataataataataayaacaacaacaattagcactcactcatgtttagccctgtgctaagtgctgtgcttttattaactcactcactcctcgcagcaaccctaatgaggtagatactttttttttttttctgagacagtctcgctctg

SEQ ID NO: 11471 - DNA, 590 bp, Homo sapiens
tcaagatggcaccttggatattgtgtccacacatggcagaaagtggaagggcaaaaagggcctagtctagttccctccagcccttttattaatataaggcactaatccattcataagggcagagccctcaagacttagtcacttcccaaaagggcttacctcttaatggggattaagtttcaaaaagaattttggagaggacacattcaaaccatagcagcaagtctcagaaggacaaatactrcatgattccacttatatgaggtatctgaaatagtcaaattcataagaacagagagaagaatggtggttgccaggggctggaggagaggacaacgtagagctgctgttcaatgggtataaggttccagttacgcaagatgaataccttctagagatctgctgtacaacattgtccctatagttaacaatactatgctgtgcacttaaaatcgtgttcagagggtagatctcatgttaagtattctcaccataatagtaataacaataacatggttaccactggggattctggtacctggaatggcagctggcttctggatgacttcagtggaaaaccatgcttcacg

SEQ ID NO: 11472 - DNA, 522 bp, Homo sapiens
atctgggcctgtgtgtatatgaatgcacatacatacatgcatgcatccatatctayatctacataaacatatatacatataaataatatcagattttcagcaaacatgaggtgtgtgtattttagttccttgcatgtcatctcagaaattgaggtcacaggaatagattaaaacaggctcttttttgtcttcaatattttattctcagaaaaatctttcttaactactctacaccctgatctatattctcttcatgttgtcaatgattatgttgtactcccaatttccaggacagcagaacagatatgcttttttttttctttgtgctttaaatgctacaaatgaaaattactggtttaagacacagtttaatttgtaatcacatttggctttgccaaattaatgagtatattctaattgataaatgctgcaatttttttcatactaaacacttgtctccttctatccacgattttatttctaaaatgttatgttttaaagcaaagcttcaaaaaataggtg

SEQ ID NO: 11473 - DNA, 522 bp, Homo sapiens
atctgggcctgtgtgtatatgaatgcacatacatacatgcatgcatccatatctacatctacataaacatatatacatataaataatatcagattttcagcaaacatgaggtgtgtgtattttagttccttgcatgtcatctcagaaattgaggtcacaggaatagattaaaacaggctcttttttgtcttcaatattttattctcagaaaaatctttcttaactactctacaccctgatctatattctcttcatgttgtcaatgattatgttgtactcccaatttccaggacagcagaacagatatgcttttttttttctttgtgctttaaatgctacaaatgaaaattactggtttaagacacagtttaatttgtaatcacatttggctttgccaaattaatgagtatattctaattgataaatgctgcaatttttttcatactaaacacttgtctcyttctatccacgattttatttctaaaatgttatgttttaaagcaaagcttcaaaaaataggtg

SEQ ID NO: 11474 - DNA, 522 bp, Homo sapiens
atctgggcctgtgtgtatatgaatgcacatacatacatgcatgcatccatatctacatctacataaacatatatacatataaataatatcagattttcagcaaacatgaggtgtgtgtattttagttccttgcatgtcatctcagaaattgaggtcacaggaatagattaaaacaggctcttttttgtcttcaatattttattctcagaaaaatctttcttaactactctacaccctgatctatattctcttcatgttgtcaatgattatgttgtactcccaatttccaggacagcagaacagatatgcttttttttttctttgtgctttaaatgctacaaatgaaaattactggtttaagacacagtttaatttgtaatcacatttggctttgccaaattaatgagtatattctaattgataaatgctgcaatttttttcatactaaacacttgtctccttctatccacrattttatttctaaaatgttatgttttaaagcaaagcttcaaaaaataggtg

SEQ ID NO: 11475 - DNA, 312 bp, Homo sapiens
tcatgattgtctcaatagtgcaaaataatcatttaataaagtgcagtatgtacgtgtgtgtttgtatttaaatcccctaaatagtagaaacaacagkttcctttcataacctgataaagactatctactaaaaacctaatcataaataaaagtacataaacaggaacaaaaacatttaatggagaaacttgttttaagattcagaagaacaatgctgattataacaacctttgtttgtcctaacatcaaaagttctgaccaattcaacttaatccaggtacataaaagatgatctaaataactggaaatgta

SEQ ID NO: 11476 - DNA, 573 bp, Homo sapiens
tcttttctttgcaagtacatattttgaatgaaggaaaaaaaggaattaatatttttggagcttttgctgttttaatggctgtactatgttagactatgaaagcaattaccttatttaatccttagagcaaaccctatgaggtgccaggtgtttttattcttcttcttctttttttttttttttttttttttgagacagagtctcactctgtcactcagactggagtgcagtggcgtgatctcagctcactacaacctctgcctcctgggttcaagttattcttatgtctcagtcttctgagtagctgggactacagccgtgtgccaccacgcccagctaatttttggtagagacggggtttctccatgttggccaggctggatagcaggcatttttctacaaagaaacaagctcrgtgacttccacaaggtaaagaagctagtaaatgataaaggtagagccatcaagaaaaatgtgtaacaccgaaggggaaaaaagaaaggtacagaaatgaaatttctattattagcaaatgtcataactttatcagctttaaaaagtaataaaatcgaa

SEQ ID NO: 11477 - DNA, 534 bp, Homo sapiens
tggctgcatagtattcaatggtgcatatgtaccaaatattctttatccagtctaccattgttgggcattcaggttgattctatttctttgctattgtgaacagtgcttattgctcaaaatttcaagtcccacttagaaagcctttccttacatggaggttaaagaggcagttacccatgctttcatctagtattttattactttatcttttacattgagacttgggtccatttggagtttatgctcatgtatggtgtgagtaatgaatttaatttcatttttgccaaatggctatccagatgtcccaacaccatttttttttttaaaagactatctttgcctyggtgatttgagataatacctttgtcaaacactagatttatatataaaataggtcaatttctgtgctttctattcaattctattgatctgtctgtcaattcataagcctggatatattttgaaggtagagttaacagatgttggtgatgaatttgatgtgaggcgtgagaaaaaaagagtcaggtatgactc

SEQ ID NO: 11478 - DNA, 533 bp, Homo sapiens
ggagggggaagggatgacgacttaatgggtgcagcacaccagcatggcacatgtatacatatgtaactaacctacacattgtgcacatgtaccctaaaacttaaagtataataataataaaatttttaaaaaaagaaattaaactcctcatctcttttacctgtaatatctagagttgttttcagttaaaatatgtcatccaggggataaagctaattatagcctttttatgcatgcttttggcatcactgttattgtcagtttttwtacttatatgtacaatatttattgatatacaaatattctttatttgcaaattaaatacaaaaagtaactttaaatgcatcctgcacctccctcccatggcactaaattgctcaagcaataattagtaaaatacatagtagcacttttttaaagtgggaatataaaaaaatttctaacttgaaagaagtagaaaaagggcagaaagcattcaccaggttaggaaaaacaccaagaaaaataaaaataacgtgaagaagtagcaaata

SEQ ID NO: 11479 - DNA, 587 bp, Homo sapiens
cagcattttaaatagccagaactgaaatcaaggttctcatcctttgcattattgacattgtggacttgcgaattccttgttgtgcttggtgtcctgcacgttgtaggatatttagcagcctttctgccctctgcccactagatgactagatgattgtagcaccttctcatccccattgtaacaaactcaaatgtctccagatattgtcaaatgtctcctggagggcaaaatcacccccttttggagactaccaatgtagatagtttgcatcacaatgtcttatttctttgattttctcaagtgttccttctcagttctgatggaaaagatgggccaaaaccggaattctttaaattgtcacagatcatggaaatctttttgcgtataaagaaataagaaacctgccttgttctaaaattgaggttatggccggggtgcagtggctcatgcctataatcctagcactttgsggggctgaggtgggtggatcacttgaagtcagaagtttgagaccagcctggtcaacatagtgaaaccatgtctctactataaatacaaaaaatagcctggtgtggtggcaggcacct

SEQ ID NO: 11480 - DNA, 588 bp, Homo sapiens
tgaaccgtctctttttttttttttgagacagagtttcactcttgttgcccaggctgtagtgcaatggtgcgatctcagctcaccacratctccgcctcctgggttcaagtgattctcctgcctcagcctcctgagtagctgggattacaggcatgcgccaccacgcccggctaatttttttgtatttttagtagagacagggtttctccatgttggtcaggctggtctcaaactcctgacctcaggtgatctgcccaacttggcctcccaaagtgctgggattataggcttgagccaccatgcttggccccatctcttatttttttaatggggaaaggaggtgtgggtgtgcaaggccctcgtgaatgtctctggccaatgccatctcgtgttctcgcaaactcctcttcctaggactgggccctcgtacatgttatgtgtgggacagtgtagctgcgaggggcacagaccaagagccagatggccactctgtgtcctgactctgccctcaacaacttgtgggactcgaagcaaattactcagccgctcagtgccccagctttctcatctgtaaagcaggaataataa

SEQ ID NO: 11481 - DNA, 495 bp, Homo sapiens
tgtatatgaaaatattccaaaattaaaaaaaattaaaatctgaaacacttctggtcccaagcatatcagataagggatactcaacctgtatacaactagtgcccttaccttctgtacagcccctgtagagaatatttagcccrtactaggaactagataatatttatttgtgacaatggtggaaatccttaagggtgatctttgttgtggttacttctcaaaagtttgtcaagttttaatttatttttgacctttcataacaggattgacaattgccaaacgcatccagatttctgatttacctcaattagttgctgcttttcacagtttagtgggtttggcagctgtacttacttgcatagctgagtacattatagaatatccacattttgctacggatgcagcagcaaatctcaccaagattgtggcctacctcggcacttacattggtggcgtcacctttagtgggtctctcattgcctatggaaaattgca

SEQ ID NO: 11482 - DNA, 380 bp, Homo sapiens
cccagtggaatttcatcgctcaatgaagggccccaattcatgtcctgattagatacagataaatgagattatagtctcttcacaactatctaactttgttgagggttaaggtaaaacacagacacatatacaaccaaaataggaaacagttcagaaagcatccttatttgatctggcacatgttatttgtaaggattttgaatgacaatgtttctgttgttctgaaaacctgtaattctaaataaaacacaaaattactctacaaatatctgacctggaaaagtaaaacaaagcaatgttgtgtgatctgtatctctgttcattccccaactcttstcttattcttctaccctaacatgggatgtaaagcacaagcataa

SEQ ID NO: 11483 - DNA, 523 bp, Homo sapiens
tccttacttattacagacataaatacatgcattcagacaaatgaatacacaggagaaccatataaagtaattggcgcatcacttcaagatgctttttcagttactggaggaatttgatgcctctaactttaatcttttccattaaaatatccgttctgccttcagattgtgaagcccataatattttagactgtctagatggatctgttagttttgcttgtcagtttaatttgtggctctatgactttgggtggcttgttagattgtacatggaaactcgtgatctgcaaatgatgttcaacatcccaagcttaagtcctctccccagagagactggacataccataaatatgcaattggcagatttcatttgyaaccagcctaattgatatgatgatgtatagaatggcagacgtttagaacggcaaagaagctcattgctgttactatatcccttaaatgtttatagcactttttactctttgcaatgcattttatgtacactatctcatttgattctcag

SEQ ID NO: 11484 - DNA, 576 bp, Homo sapiens
agatacggcattgtaaaggttttaaagtcaagtggtctagggattacatctgggcttttaatcacattagaacataactttgaacatatttctggactcgtttaaatcaatttgctcatctttaaaatgtatgattttacagtaattttaaagatggtattgcatgacaagataatatatgtaacaagctaagatcagtatagattttatggcaaataataaatggcatctataattgttgtattgctaacactacttttatcatttctactaccaagattatctcatagttctgacttaaggatatagttactgtattcattataaagtctacagtgatatgttttatgtggtttaggcatgttttgaagagcctcacagatttctagatctatgagcaatcctgagcattcctcaccgttggcatgcatgttaaggacaataaattgaatagcccacactactttctggttgctagcacctggtaactttaaactccctgcccatgccatctcattcattgcctttaacatattctttttggaagacaaatrtttactgagtgtgtactaaata

SEQ ID NO: 11485 - DNA, 598 bp, Homo sapiens
tgctaaaatgcactctcatttttttttcacccttcacctgttatcagatgtaattcccagttacraaaacagagacccaaagagacagtggatagaccttggtttactcagatacccccatatgggctcatcttctcttggggagcctccagtcaataagtttcctctctgggcccaagagaaatcaattcagttggccaggagaattgccaagcacatattatgttaaaaatactcttccaaataactgagaataaagactttacagactaaaggccaggagcggtggctcacgcctataaccccagcacttcgtgaggcccaggtgggcggatcacatgagctcaggggtcccagaccaacctggctaacgtggtgaaaccccgtctctactaaaaatgcaaaaattagccaggcatggtggcacacgcctgtagtcccaggtactcgggaggctgaggcaggaaaatcgcttgacccaggaggcgtaggttgccgtgagccgagatcgcgccattacaatccagcctgggaaacagagactccatctcaaaataataataaaaataataataacgatagtatattagtaattaat

SEQ ID NO: 11486 - DNA, 598 bp, Homo sapiens
tgctaaaatgcactctcatttttttttcacccttcacctgttatcagatgtaattcccagttacaaaaacagagacccaaagagacagtggatagaccttggtttactcagatacccccatatgggctcatcttctcttggggagcctccagtcaataagtttcctctctgggcccaagagaaatcaattcagttggccaggagaattgccaagcacatattatgttaaaaatactcttccaaataactgagaataaagactttacagactaaaggccaggagcggtggctcacgcctataaccccagcacttcrtgaggcccaggtgggcggatcacatgagctcaggggtcccagaccaacctggctaacgtggtgaaaccccgtctctactaaaaatgcaaaaattagccaggcatggtggcacacgcctgtagtcccaggtactcgggaggctgaggcaggaaaatcgcttgacccaggaggcgtaggttgccgtgagccgagatcgcgccattacaatccagcctgggaaacagagactccatctcaaaataataataaaaataataataacgatagtatattagtaattaat

SEQ ID NO: 11487 - DNA, 551 bp, Homo sapiens
tacttggacctaaggtctttttaaagagtatattttagttgcctgctcatttctttattcataatacttctagccctacttttgtacttcttgaattagttattatatacgtttctatgaagtgatacatttcacctagttttctaaatgtctggcataaaggtaataaaaatattttcctatgattcttgctctaatataattttaaatttcctttgcacttacaatgttgtttatccacatcttttctagttttcttttcattataattgccaaatgttgaatttaatggtctttccaaaaacagttttgattttgttgattggtgggacagatcctgaggaagatgcatactctctgataagccagaggtctctgtagcatcttcaatcaagggaggtgcaatagcctttaatagggargaatgggccacttctgcaggtggttcagggaaactgggggtttcaaatttctttagtgtgtcaaccaagaagttcccatctcaagactccttccaaaagaggacctgacctgggtttagaagcacttcc

SEQ ID NO: 11488 - DNA, 675 bp, Homo sapiens
caacttaggtatcacgttagagaaatacattttttaggtatggctaatagtaacatcatttaaatataagtctcttccatgtgatrtattgttttatcagcgtgcacaaactaatagactgctttcaaatattccttactacttatgggtttttttttttttagattgttaaatgatttccagaactctatttctaaatcacaggtaagttgcagtgattctgggtttggttatttaacttcccggtgaagaatgcaacatttagaatgaaaaattaatctatgaagaagaggtaaagttagtgtaaataagacctcaaagcaacaaaaagattaatattttctaacacccttttagaagaaaaaaaactaaaaattatacagaaagaaccacatgcagcagttattttaaactaccccaactttccttttgtctgcagatgtggaaaatcttacggttatactacaccttcttttcaatacatgaaatatcaaaaaacagtagtcaaatatttacaaatattgcaccatgtactacccctgggtaaaggggaagcttagatgctcagaaagcttactcagaagctgcaagcagtagcagagaattactaaggcctcctgccaacgcatttccagaattttagaatcttatgacatttttgagaaagtgtgctat

SEQ ID NO: 11489 - DNA, 481 bp, Homo sapiens
taagaatgtgtttttgtaatagcataagaaattttataatgtgtgtggaaagttgttctcactgcaagtcctttggtttggattttttagagtatatacttcaccagacacacaaataggaaaagtctgaagaagtattttccatatttcagtctgctaaaattcatatagctataaattacatatttatttataataagtgaactaaaaaattgggtgtacactgctaaagagcattttaatataacttctcgggaatcttaatacatactacgtctataaggtgttgtggtagagaaacattggtgcctcaattwgattaactccaagtagggagagggtgatccatgggtctgctattgttttttctttccggagggcttctgctatggtttggatatttgtcccttccaaatctcatgttgaaatttgatcccagtgttggaagtggagcttaatggtaggttggttatgtcaaggc

SEQ ID NO: 11490 - DNA, 709 bp, Homo sapiens
atggtcattttttaatattggtggaattaattatcttatgcccacaatcctcaaacacagataactgatttttacatcttgttttgcatttttatattcacttatccrtgcttctatatttactttatatttatagtgaataagatgttggcacatttctagaattattggcttatatttttatgttttttaaatcgttatgattaagtgtgagttatttgatagttttaagtttatacatggtatttttatgttggaagtgctggattcaaacaagatgaattaggaaactctatattttatgggggaagagcaccaaaataacttcagtaattataaaattgtagcttcctaaaaatttagtgagttgttggctatggagctacctggactggtacatttaaatgtacatttttaattactttttctttggtcaattctgtacttatagatctattaaacttgtatggttttcttgagtcaatttaaattttgacagagattcagctatttcctctggattttaaaaattgttatggataatttttaatattttccatatctatgattatatctgttccttgcttcaaaatatttttggaggggtcatattttataaatctctacattttgttttcaattttactgatttcatattttatctctattacgcttttcttactccatttttatattgctttatttttct

SEQ ID NO: 11491 - DNA, 709 bp, Homo sapiens
atggtcattttttaatattggtggaattaattatcttatgcccacaatcctcaaacacagataactgatttttacatcttgttttgcatttttatattcacttatccatgcttctatatttactttatatttatagtgaataagatgttggcacatttctagaattattggcttatatttttatgttttttaaatcgttatgattaagtgtgagttatttgatagttttaagtttatacatggtatttttatgttggaagtgctggattcaaacaagatgaattaggaaactctatattttatgggggaagagcaccaaaataacttcagtaattataaaattgtagcttcctraaaatttagtgagttgttggctatggagctacctggactggtacatttaaatgtacatttttaattactttttctttggtcaattctgtacttatagatctattaaacttgtatggttttcttgagtcaatttaaattttgacagagattcagctatttcctctggattttaaaaattgttatggataatttttaatattttccatatctatgattatatctgttccttgcttcaaaatatttttggaggggtcatattttataaatctctacattttgttttcaattttactgatttcatattttatctctattacgcttttcttactccatttttatattgctttatttttct

SEQ ID NO: 11492 - DNA, 536 bp, Homo sapiens
tgtagcaaggtaattattaatattacaacagaagtttgtgaaggggatccagggagcccagtatagcaggctgctgtctctgtgtggcacagaggttggcgattagcaaggcctctgagagtagtgtttttaaatgggagagttcactgatacccctcacaggacatgtgacagaggtgtggctcacctgttcagtcgccaccactgctgaaacccyttacgggaggaggagcacacagacagacaagtgcaggagcccaagtgggcgtgtattacagtgtgccctttcagccttcccatttgtagacagcttgagtgttaaccatctcagtggaccctctgcctttctgcaagggcagagggctagtgtgacagcttcctgtatcctgaactcttgtccagtgtcctggaaaaattgggtcacacacagcctggaaggatgaatgtgggtgttttatgagtggtggaggtggctctcagcaggatggatggggagctggaagaggggatggagcggtaatatgatcttccccatg

SEQ ID NO: 11493 - DNA, 558 bp, Homo sapiens
atcttaaaacattttgattatgtctattcaatgtcacattgtatgccaaatattaaagtaaaccaggtaaaattatatagagacaatgaaatttttccactctgttttttaaagagaaattatgactggtatgtattttctatttttatggtttctaggttgtactttctttgttctaaatactaccatactcatgagtcactgcaccctttgtgtgtatatcttaactgctattctcacttacatgcagaaatgcatgccatcattcttcmtcaatatattagttgaattgtaaatattaaaagtagctatgtttttatgacagaactagcctacttcattatgataaaataaatgctgccaattcagtaggcaacaataaacaggactgctgagctttctttccacatactcatgtcttacattgtctgagaaaatacaatattcagaatgtaacacaactattcaccttctatggtatattcattgatatcctaataaaaagagaaggttttagaattgggagtcttaaaccagtaaatccaaaaaacagaaaca

SEQ ID NO: 11494 - DNA, 530 bp, Homo sapiens
tcagatttaagtatggcattttagtgagccaggcttgtggtatagacttgctgtctaattctctctcttgtgctactaactagtacatgttgattttctttgtgcctagtggaatttataagggctaacacatccatcttttccacaaataagaggagagatattttcttatcttagttagctataatgatacttccatcacaaaatcgctttaatgatagacctcaaccctcttggctgttctaacccgagttcatggrctccagtgaagaaagtacaacaactcataaggggacttctctctattatgtatttgtccacggttaccaaggattgggtagcttacagagcctatggctctttctgaaaatacaagcacccctaacacatgggttgtgtggtctgttcacacaagagatagaaaggaaaggcaaacaatttaaaggaatttagtattaacaaatctaattttcagacacaaaatagaaatgtgattattaatacttcattgtctcttggtattactcaat

SEQ ID NO: 11495 - DNA, 573 bp, Homo sapiens
aaaatatgggaatctcattcaacctcacaagctccctcaataagaatgatgaaaagtgtaactgttacagggttgatcccacaacaaactgaacaaagcttttcttgttaaaaatgaacaatgccaggtgcggtggctcaagcctgtaatcccagcactttagaggccgaggcgggtgggtatggaggtcaggagttcgagacgagcctggccaacatggcaaaaccctatctccactaaagatacaaaataacatgctgggcatggtggcacgtgcctggaatcccagctgtgtacatcaaaagcacgtatggggcaaaatcacaaaagagaatacaaaaccaggaaaagccaagatacacaagracagattcttcatgtctggaggaacattttcctcacccacagactccaggttcctgtagttctcccacatcacagccctgtataaagcgttctgtgcagggtccaggcgtttccactccagcaaagagaactctatagccacatctctgaaagtcaagtatccctaaaatgagaaacacgtttaaataaaacattatggaggcgtta

SEQ ID NO: 11496 - DNA, 573 bp, Homo sapiens
aaaatatgggaatctcattcaacctcacaagctccctcaataagaatgatgaaaagtgtaactgttacagggttgatcccacaacaaactgaacaaagcttttcttgttaaaaatgaacaatgccaggtgcggtggctcaagcctgtaatcccagcactttagaggccgaggcgggtgggtatggaggtcaggagttcgagacgagcctggccaacatggcaaaaccctatctccactaaagatacaaaataacatgctgggcatggtggcacgtgcctggaatcccagctgtgtacatcaaaagcacgtatggggcaaaatcacaaaagagaatacaaaaccaggaaaagccaagatacacaaggacagattcttcatgtctggaggaacattttcctcacccacagactccaggttcctgtagttctcccacatcacagccctgtataaagcgttctgtgcagggtccaggcgtttccactccagcaaagagaactctatagccacrtctctgaaagtcaagtatccctaaaatgagaaacacgtttaaataaaacattatggaggcgtta

SEQ ID NO: 11497 - DNA, 513 bp, Homo sapiens
cattagccaagcatgatggcacatacctgtaatgcagctactcagttggccgaggctagaaaatcatttgaacccatgaagcagaggttgcaatgtgctagtaagttccagcctgttgacagggtgagacacctgtctcacaaaacatacaaaaaaaaaaaaaaaaaaaaagaaaagaaatgactaacagtgtcagacggctgaattatgatgtcacgactacagttaaataacagtcaggcaatacggcaattctatatacacatattgcccttagttatctagttcactatgcgtaagatataaaacatagaatgtgtactgggaaaattgataaactgggatcagagaaaacatagtataaaacaaatcgtataataaaaacataaaaaaagatgcaggctccctggtctggatgttcatattggccaaaagccatgtttggatttaattaattaattaattwattaatttatttatttatgtatttattttttgagatggagtctcact

SEQ ID NO: 11498 - DNA, 513 bp, Homo sapiens
cattagccaagcatgatggcacatacctgtaatgcagctactcagttggccgaggctagaaaatcatttgaacccatgaagcagaggttgcaatgtgctagtaagttccagcctgttgacagggtgagacacctgtctcacaaaacatacaaaaaaaaaaaaaaaaaaaaagaaaagaaatgactaacagtgtcagacggctgaattatgatgtcacgactacagttaaataacagtcaggcaatacggcaattctatatacacatattgcccttagttatctagttcactatgcgtaagatataaaacatagaatgtgtactgggaaaattgataaactgggatcagagaaaacatagtataaaacaaatcgtataataaaaacataaaaaaagatgcaggctccctggtctggatgttcatattggccaaaagccatgtttggatttaattaattaattaattaattwatttatttatttatgtatttattttttgagatggagtctcact

SEQ ID NO: 11499 - DNA, 534 bp, Homo sapiens
gcctcgtgaccttgactgcattatttagcgttggacaagcatggaggagtccaggccctgagctgaccgccaccttgtctgcacagcccactggcggcttctgttaagggagggtgccccgacgtatggcattttatttctaaagcccagagaaaggagtgtgaaatagttccactgatgtgttctactaacttagcagtactggtgctgagtactggccatggcaaggtacttgacctccctgaaactcagttttcccatctgtaaaatagacgtaatrgaacctttctgcagaatataagactaaaagaagtaaagtttataaagcccgttgtgcagagagccagctaagtagctggtgcccacaaatgttacttcccttttccttgcccttcttaagaagccacttcttgcctgtatttctgctttttcagaaatcagcttggggctgctggcagtggatagctcataaaacagactgctttttctggaattatattaatattttctgttatggcagggcttggcagacta

SEQ ID NO: 11500 - DNA, 630 bp, Homo sapiens
ggattccctctgcccttctggcatctgaaggctgattcaaagatcccccctgcaaccttcccacaaatgaaccaactgattctcacaaccgaaggaagaatggacacctcccattgagggacaaaaaaaaatcacactctggcctgctggcaagtcacctgtcatttccagctcatcttcatagttccatagttagtcctattctttagtaaatataaagactattaaaagcttctatgaggtgcactatgtgcgtctctggggtcagtcttgtgcttgacacagcgaaagctcattttagttcagtgtgaaaaaccagacctcaccaattcatcacaactaactccatcggaagcagaggattgctcctcatctgactcctcctgtgtgagacctgattctcagtcagaggctgatgccggaactgagaccatcagccatagagagatccttccagaatatggtgtcattaaccccgcagttcactactgcactttgccatgattcaggactggaactcttgtcatcgactttaaagatcctgaaaaggcaatctgaatgctgggygcatctattgaattagaaatgatcggaatggctcctaagtcaggatgttatgtcctgaaaata

SEQ ID NO: 11501 - DNA, 545 bp, Homo sapiens
gaggttctggaacaaaatctacagcctatgctttctggactatctgtcgatcattcctgaagagagggatcaatgttgaggtattcatttcacatgatgaaaatgacaatatcaaatgtcagaggtagtagggctcacgtagaaatccaatacatccatggtaggactgcaaattacttgaatcaatttggggaaaatatcagaagtacccagtgaaaaagaagaaacatggccgggcrcggtggctcatgcctgtaatcccagcactttgggaggctgaggcgggcggacacgagttcaggaattcgagtccagcttggccaacatagtgaaaccccgtctctactaaaaatacaaaacattagctgggcgtggtggcaggtgcctgtaatttcagctactcaggaggctgaggcaggagaattgcttgaacctgggagacggaagcaagttggcgccagttggtgcagtgagccaaggtggcgccattgcactccggcccaggtgacagtacgagacttcatctaaaaaaaaaagaaaaaaaa

SEQ ID NO: 11502 - DNA, 558 bp, Homo sapiens
  misc_feature (1)...(558): n = A,T,C or G
ttctaatcatcagataaaaaactaagacttagtagaaacatcgaatggatggcatctactttcatctccyacttcataaggggatgtcctttcatgccaggtaggtactagcctgttgtgcttaagctgatacagtatttctccaggtcatgatggtatctggctgtagaccctatctattaggatgagcttttaaagaccatacatgggacctgcatcagttgaagagtagttagtgagaacttttcataaaggactggtcctccatttaaaacaaaagctctttcccagggcaaaatgaatcagtaagaaaactccaatgtcttctaagaaaaaatccagaaacctgaagcctagatcacttgcaaatgttgaatctgaatttatatcaccatgtgttgtgggagtctcattctgaaaatttaaacactggtcttgggcctatgaacttctaagggtacccaacagggaagcaaactgnntatgggtagaatactcccatgaatctaggtatggntacctgaactgctttaaaaaaaaaaatccctactaataatg

SEQ ID NO: 11503 - DNA, 1447 bp, Homo sapiens
tgctgcctacatctgtttactatgatctgccaagcctatctcaaaagcatctttgagatcatgttcatccctcccaagttcaagcccttagagttgcctatctgggttattaccagggccttgaataatcattatttttatcactctttcattctcgcgtgcactagtcattttgcaatcagagttacctttattttattactctactaaaatatcctgagtttcatcttcacaagagaatgaagactttatctccatacatatcatatgtcttcatgttcatggctaaaatacatcaagtgaagcttgaaggaattagcaactgtggatctattctcctcatctcctagaaagtttattttaatcttgtccacrttttcttcacacgagaggagtgttcttggtgaaatgtgtggttggcatctgcccagatctattgtttattcctatttattgctttcacttttacaacccacagttctcagcccagaattgtcttctcctttctaagcccatcttttattccttggtcttcaaaatccaagtggaaaggccatatattatcctaggattctaaaacttcagagtccctcagaaaacatgttaaaattcctggaccttgctcagagatattcggattcattaagtgcaggattggttccaacatctgaattttaaataagcacttgaggtgattgggattctgggggttgaaggaacatattccatgaaatagagtgctcgaagcagtttgatcctgcaacccaagggacctcattccattctgctgcagacttctaagtcaagcttcagtggctgtggctctgacacccaccgtcactgatacaaccccttctaaagtgttcttttatctctctggtcactccttctccatctaactttcccttaatttcttctttgcctacttcctaacttccatgctgtcatacattctgtttttcccctctcctcagcccaggcaccctcctcggaaaatcttatttgcactctggggatcccaaggtgtgaataagttgtccatcttcaattctgtcttcttcaacatccatttattcaaaggttatttattgagcgccatgatgttcctggtaatggagcagctctggagataatggtaaatgatgaacagaaaaggagatgtgctcctgctttcatggagatatcaggcaatatgttactgtatggatatcatcccagtgtttctcttctttgtcgcctattactgggatgatcatacattccagtttacctgggacattcccaatttatgccttctgtcccaatgtctctctggctaccatatttcatttttttaggttttcttgggttggacaataaattatatggtcaccctacatggtagcatccttttacttaaactgacatcgtgaacagactgggctattgtcattattccctaaaagat

SEQ ID NO: 11504 - DNA, 584 bp, Homo sapiens
ccaggtgtggtggctcacactggtaatcgcaacactttgggaggctgaggcaggaggatggcttgaggccaagagtttgcgataggccttggaaacaaagggggagtcaccatccctacagaaaaatacatgaattagcctagtgtggtggcatgttcctgtagtcccagctacttgggaggctgaggtgggaggatcacttgagcccagggaggctgagaccgcagtgagtcatgatcaggcctctgcactccagcctgggtgacagagtgagaccctgtctcaaaacaacaaaaaagtagcagctaacatcaactgaccttttaccaggtgcctattgataccatagtttaatttcttataactgtttcttatttcacttaccaactctgtcttcagttactcccagatttttactgtgtgtgtacagatgaccttttgyttagattgaattgtctccccagaagtaagattactgtgagtcatggtgaatggacattctccttacccttgatgtaaattgacagggttttgggtgcctcccagctataatcttagcactttgggaggctaagagaggagga

SEQ ID NO: 11505 - DNA, 543 bp, Homo sapiens
tgtactaaaaatacagaaattagccaggcatggtggcgcatgcctgtaatcccagctactcactcaggaggctgaggcaggagaatcacttgaacccaggaggcagaggttacagtgagctgagatcacaccactgcactccagcctgcgcaacagagtgagactctgtttcaaaaaagaaaaaaaaaaatttattctgagataatcccagttcccagtgtgaaactattcctgcagtcactggaaaataataaccactttcttgtaaggagatgaaattttggagctcagatgccgtgtttatattgttattcagatggcctttttaacctgtgctttaatggtgaaagttgtagcsactgatgtgtgtaccacaatggcattggctaagttgctcgtcctttgagatagatgtcaatgtgattaaagaaattgagtacaccttagcatatgaattaagaaacatattgacatagtgatcctcatagtgacatagatcagcaggacttgtgttctgagcactggtcatgaccctgctcatga

SEQ ID NO: 11506 - DNA, 488 bp, Homo sapiens
gcaaaagagagatttgctctgaactgcgcccaagcccgtgatcgtgcaatatttacattaaattcaaaagtgaatgaaatgacaggtcagccaacaggagagtagtttttgcctgtaaaggcactcttcttacccggacaaatgggcaggctgtgttttgaaaaataataatccaggacagaatggggaaggggtgagcttttgtggaaagatccagtatccgtggatcatttcagtgtttgtgacctcgagaaggaaaaggagggaagcagtctggggcgttttcctggactttggacatgggctctggatatggcgtcgggggccrgtgcgcgcagggctggccgggggacagacatccaccagagctggtgtgctcttggctctgttcccgctggacctccgtgagattgaaagattttcctagagggacaagggactgaatcttctccagctctgcacctcctttgaagacatcagaataatgc

SEQ ID NO: 11507 - DNA, 1412 bp, Homo sapiens
taaaaagttaccctgagccttttttctttgcttttaagctggaaagatagcttgattacttatgaaatgaaaaaaagttttcctaaatgaatgtaacagtttaaatcatactgttacgaaaacaacactgtcaagattaaaaagaaattctgctccttttagtaataaacaatgtcgtgtgacactttggaacgcttctctcgttacaaaccagcgtctttactgaaggtccttccgctgcagagctgcgcaatggatgtgtggacagagctagtcggcacgtggaggctctcctggtttycgagcaggaaacgtgctgtgagcaggaatcgcgagtgagttccatggcgtccccgggtcagcgcgcgtgcaggaatcgcgagtgagttccatggcgtccccgggtcagcgcgcgtggggtcctgtctcgctggctcaccactggtggccagggcatgtctcccccagccctgagtctccgcagtggtgaccagggcatgtctcccccagccctgagtctcccggcagtggaggcagcgtgggcacagggtttgtcacagcctgtaagtgaatggaggacacaaaaataaccagagaggcaggctctgccctccgggagtgcacaggcggtttttaaaatgtgtgcgttcatgtaattaaacgtctccgtttgtttctcagggagtggttactcaatttcttcccagccagagctttgtaaacctgcgcttctcacccctcagtgaagcctgagtccagcctctaaaggtgggtcccctgggtgggctgcagccagtgggggcttggaagggctctgaaggttgagacaaggaaaacgggcgtgagctggactcagggaagccgggtcaccgtggtacctgcactgtggcccttggccatgacagtgtgtcagcttccggcagggactgcttgtgtgcctcgggacaccagtgaccaggtgtggccaggccccagatggcattgctgcagctctctcgtgaaagagtaatggaggtgactgcaacctgcgccgggagccatctgggctatgaaaacgagactggcctccagcgcccccggcctccacacaacactcttacactgcccaggagagcagcggtcactagcaagttccttccatgcacaaaggcaggcaggctgaggccgtgatcacagctagagctcggctccttttccttccgggctggggaaccaccatcccccgctccttctggaggaaggctgactcttctctgatggaaaccatcaagcacacggcgccgccacctcactccaacacccgagtgccacgtccagcgcggggtctcgcctcgtcacctgaacgacacgtggaaggaggcgcctgtggagagccctggggagggtcctgaacgtcacggggaaggaggcgc

SEQ ID NO: 11508 - DNA, 1412 bp, Homo sapiens
taaaaagttaccctgagccttttttctttgcttttaagctggaaagatagcttgattacttatgaaatgaaaaaaagttttcctaaatgaatgtaacagtttaaatcatactgttacgaaaacaacactgtcaagattaaaaagaaattctgctccttttagtaataaacaatgtcgtgtgacactttggaacgcttctctcgttacaaaccagcgtctttactgaaggtccttccgctgcagagctgcgcaatggatgtgtggacagagctagtcggcacgtggaggctctcctggttttcgagcaggaaacgtgctgtgagcaggaatcgcgagtgagttccatggcgtccccgggtcagcgcgcgtgcaggaatcgcgagtgagttccatggcgtccccgggtcagcgcgcgtggggtcctgtctcgctggctcaccactggtggccagggcatgtctcccccagccctgagtctccgcagtggtgaccagggcatgtctcccccagccctgagtctcccggcagtggaggcagcgtgggcacagggtttgtcacagcctgtaagtgaatggaggacacaaaaataaccagagaggcaggctctgccctccgggagtgcacaggcggtttttaaaatgtgtgcgttcatgtaattaaacgtctccgtttgtttctcagggagtggttactcaatttcttcccagccagagctttgtaaacctgcgcttctcacccctcagtgaagcctgagtccagcctctaaaggtgggtcccctgggtgggctgcagccagtgggggcttggaagggctctgaaggttgagacaaggaaaacgggcgtgagctggactcagggaagccgggtcaccgtggtacctgcactgtggcccttggccatgacagtgtgtcagcttccggcagggactgcttgtgtgcctcgggacaccagtgaccaggtgtggccaggccccagatggcattgctgcagctctctcgtgaaagagtaatggaggtgactgcaacctgcgccgggagccatctgggctatgaaaacgagactggcctccagcgcccccggcctccacacaacactcttacactgcccaggagagcagcggtcactagcaagttccttccatrcacaaaggcaggcaggctgaggccgtgatcacagctagagctcggctccttttccttccgggctggggaaccaccatcccccgctccttctggaggaaggctgactcttctctgatggaaaccatcaagcacacggcgccgccacctcactccaacacccgagtgccacgtccagcgcggggtctcgcctcgtcacctgaacgacacgtggaaggaggcgcctgtggagagccctggggagggtcctgaacgtcacggggaaggaggcgc

SEQ ID NO: 11509 - DNA, 1412 bp, Homo sapiens
taaaaagttaccctgagccttttttctttgcttttaagctggaaagatagcttgattacttatgaaatgaaaaaaagttttcctaaatgaatgtaacagtttaaatcatactgttacgaaaacaacactgtcaagattaaaaagaaattctgctccttttagtaataaacaatgtcgtgtgacactttggaacgcttctctcgttacaaaccagcgtctttactgaaggtccttccgctgcagagctgcgcaatggatgtgtggacagagctagtcggcacgtggaggctctcctggttttcgagcaggaaacgtgctgtgagcaggaatcgcgagtgagttccatggcgtccccgggtcagcgcgcgtgcaggaatcgcgagtgagttccatggcgtccccgggtcagcgcgcgtggggtcctgtctcgctggctcaccactggtggccagggcatgtctcccccagccctgagtctccgcagtggtgaccagggcatgtctcccccagccctgagtctcccggcagtggaggcagcgtgggcacagggtttgtcacagcctgtaagtgaatggaggacacaaaaataaccagagaggcaggctctgccctccgggagtgcacaggcggtttttaaaatgtgtgcgttcatgtaattaaacgtctccgtttgtttctcagggagtggttactcaatttcttcccagccagagctttgtaaacctgcgcttctcacccctcagtgaagcctgagtccagcctctaaaggtgggtcccctgggtgggctgcagccagtgggggcttggaagggctctgaaggttgagacaaggaaaacgggcgtgagctggactcagggaagccgggtcaccgtggtacctgcactgtggcccttggccatgacagtgtgtcagcttccggcagggactgcttgtgtgcctcgggacaccagtgaccaggtgtggccaggccccagatggcattgctgcagctctctcgtgaaagagtaatggaggtgactgcaacctgcgccgggagccatctgggctatgaaaacgagactggcctccagcgcccccggcctccacacaacactcttacactgcccaggagagcagcggtcactagcaagttccttccatgcacaaaggcaggcaggctgaggccgtgatcacagctagagctcggctccttttccttccgggctggggaaccaccatcccccgctccttctggaggaaggctgactcttctctgatggaaaccatcaagcacacggygccgccacctcactccaacacccgagtgccacgtccagcgcggggtctcgcctcgtcacctgaacgacacgtggaaggaggcgcctgtggagagccctggggagggtcctgaacgtcacggggaaggaggcgc

SEQ ID NO: 11510 - DNA, 526 bp, Homo sapiens
ggacacttacagatgtgtggaaaatctgagacaggaaatgaagcctcaccagtaagctgaacaggggagatttaatgcaaacatttgtccctggctgggcactgtggctcatgcctgtaatcccagcactttgggggctgaggcaggagggttgcttgaggccaggagtttgagaccagcctgggcaatacagcaagaccccatctcttaaaagaaaagaataaagagtattagccaggcatggtggtggagcacacctctggtctcagctactcaggaggctgcagcaggaggattgcttgaacctgggaggttgaagcaacagtgagccgtgatcgcaccactrccctccagcctgggcaacagagtgagaccctgtcactgacagaaaaaaagccttgtccctgaggcaaaaagcttctgaaggggtgagtagaagccataaggatccagaaagtgatggggatgggagctgcgcctccaggtctgaggggagagggaaagtaagcaggaggcccgtaactca

SEQ ID NO: 11511 - DNA, 590 bp, Homo sapiens
gaggtctgtcctaaccacctcaaagaagtatctgtcagcaccccagggacatgctcctttttatcacctaaccaaaatccagtctagtttttcttctgtggattcccccaggctctcttgcctcgcgtctctctcttacggagggctgtgtgggttctcagtggtcatcttctccagcctggctcatgttggggagcaaggtagctggagctcctgggagtccatagcactgggcatagaatgggacagacttcccctgtccacrttgcttagcagcccatacaggtgagcacctggggaacagggagttgggaagcatctcttatagaaatgaacctaaagccatttctgcctcagccttttgctttgtttttaagtggcctggtttcctcactgcttctgggacatccagctgaactttatctctgtttactatgcctcactattgttagaagctacaataataagtccctcttcccagaaagaggacactggatcatatgaacaagtacaagagttcagactttttaaaaaggggtttttctgtgaccatcttgaactttgagcgtgcagtgacttcatctaggctg

SEQ ID NO: 11512 - DNA, 590 bp, Homo sapiens
gaggtctgtcctaaccacctcaaagaagtatctgtcagcaccccagggacatgctcctttttatcacctaaccaaaatccagtctagtttttcttctgtggattcccccaggctctcttgcctcgcgtctctctcttacggagggctgtgtgggttctcagtggtcatcttctccagcctggctcatgttggggagcaaggtagctggagctcctgggagtccatagcactgggcatagaatgggacagacttcccctgtccacgttgcttagcagyccatacaggtgagcacctggggaacagggagttgggaagcatctcttatagaaatgaacctaaagccatttctgcctcagccttttgctttgtttttaagtggcctggtttcctcactgcttctgggacatccagctgaactttatctctgtttactatgcctcactattgttagaagctacaataataagtccctcttcccagaaagaggacactggatcatatgaacaagtacaagagttcagactttttaaaaaggggtttttctgtgaccatcttgaactttgagcgtgcagtgacttcatctaggctg

SEQ ID NO: 11513 - DNA, 594 bp, Homo sapiens
aagtttttagtactgaaaactcttaccataaaacactcttgtgtgtagcttttttttttgttaggtgacatttcaagaatagattagaaattaaacatacttatttctaagactgtgctataaaaarcatcaatgatatcctctgagaattgtttacttatttttaaagaaaccacttccaactcagtgagaaaagatataaattttaattgtaatccacatgcaaagagaaagagaatatatttcattaagtcttcatcataatatctgttatttttctaattttctacaagttgcattgacctgtatttatatccctgctttgagatcaagccattatcctcctcaaaaccctcctatgctcccagtggcttgcagaataaaatccaaattgtcagatatgcagtgtgatctgacccaagctatttgcctggactcctctgcctcccacagctcactgcactgagttattcccagtgtcattaaaacattgtgacctcaaaatatccaagtatagatttgttcacatatttctatctaatgtcctttccattcttgctgcttattaaagttgttcattccttcaaagctcag

SEQ ID NO: 11514 - DNA, 624 bp, Homo sapiens
agtttattaggaggctgtttgtccacagatgtatcctcagaatagaaacaaggatcaatagcactggaggtcattgtctccctcctagggggcattttttgtgaatcaccataggtagctgagtgtggtggtttcagctgatggttttttgcctttattctcctgtttctaaactcccatttcaaatcaagatcaggccaaaaatctaagagcacacaaaatgaaccaaggtcagaactgctgtgtggagatatttccaccaagatcacctctgtcaccattgtattatggttggtatccagcgatcacttcacaacagggtagctgcttctcactctaagaagctgtgaggagatgcttggagaaacagagagagggcaccagaaaagagaacagatggggagggttgcaagggggtttctttccaccattttttttctccttgctctgccagaggaatagaagactcaacagggagaatagtttgaaacacattaataaaatttgctttgcattttgttcttgtgcacatgatgttctccctgtcaatcagagttatcatgcagtattgcagtraggaggtagatgcaactgttgagttaggattgttacaggtggagggca

SEQ ID NO: 11515 - DNA, 551 bp, Homo sapiens
agaaaaactgtaaaatgaaaaaggatggataaataagaaattaataatctaggattttggcagctggaccaaattgtcacctgttgttctgtttttctaattattctcactgtaatttactcagctgtgcctataattctcaagtatgtatgaagttaatacaggagttaaagttgttaaggtcaagctaactgtttattttacttacaaccatttgaataaaagataatattcatttttgtgagaaatttcaaagaataagagattttagtactccgtaaggggaaaaaagtaaatactcacrtaacagatttgtacattatgtaaggtacaatttagtagttcactgtcttttattcttgaacccaaagtgttgaattcagtatagtaattcaattcaaattctggatttttattcgctaatattaatccataattttaaaaagtgatgcttaaaacaaattaaaacaaagctttgtctaaaagaacgtttcacatacaatttgctctacatggaaatttacttgttcttcacctaatttatatttatc

SEQ ID NO: 11516 - DNA, 551 bp, Homo sapiens
agaaaaactgtaaaatgaaaaaggatggataaataagaaattaataatctaggattttggcagctggaccaaattgtcacctgttgttctgtttttctaattattctcactgtaatttactcagctgtgcctataattctcaagtatgtatgaagttaatacaggagttaaagttgttaaggtcaagctaactgtttattttacttacaaccatttgaataaaagataatattcatttttgtgagaaatttcaaagaataagagattttagtactccgtaaggggaaaaaagtaaatactcacgtaacagatttgtacattatgtaaggtacaatttagtagttcactgtcttttattcttgaacccaaagtgttgaattcagtatagtaattcaattcaaattctggatttttattcgctaatattaatccataattttaaaaagtgatgcttaaaacaaattaaaacaaagctttgtctaaaagaacgtttcacatacaatttgctctacatggaartttacttgttcttcacctaatttatatttatc

SEQ ID NO: 11517 - DNA, 661 bp, Homo sapiens
ttggttctttccatagttgttcaaatacttgcccctatttaaatttttttctcatttaaaattttcatatcacagaatgtcacactatattttctacattggtaattggttacataacctataaacatacttgttgactaaccgaatgtactattatctgaatcctccaatactgaataataaaaattcacaaaccaaatttttcctagatacagcaaattctaccataaataatgtttcttctcaatatataagtcaacaaaatcacgcttctaattctgaagcgaaaaattcatacatatatgcatatgtactctggaatttctcttttacctggatgacaaattaaacaaagaagcagatttttttaataatgttccaaagtccagatagtaatggcaaccaatttctaacagaccttgttgttttcwtcactataaagcagagacatttgtttcagggtgtctaaagcattttgcctactcagtgcaataatctttatggctcatacaatattgagagtttccacaaatgaaagtcaacttcattattatagaaaactttatgtggttttatgtgtgtgtgtgtgtgtgtgtgtgtgttatgagaaaggagagctttactacataaacggttttacaaagccgaattttacctttta

SEQ ID NO: 11518 - DNA, 697 bp, Homo sapiens
aacatccctctcaactcccaagaaccagcaatgatccactgcttctggggaaggagccgaacaaatgctctctgcccacagaagtgagcaggaaaatgtcttgaacccagaatctgcattcataaaaggcaaagatctaccactggcggtgggcaggaaactaaactgttgcctgtccaagatccactacagatacaaggcagatattggcttccatgggtgggaggagagacaggaaggtggcaaaagtgcaattttcagtttcagaggcttacaggccctcttggaggtgcaggcatgtagggtctgcagaaatttgaagtagaacaggagcacaaagaatgctcagggaagagaagcccattgctggaagaatctgagatctatggtacacagaggataacaacaaagataggtcaaccacagtgttagacttctatgctgcataacaaacagccacaaacacagcacatgacacacatttattatctcatactttctgtgggtcaagcctctggaaatgacttagctgggttatctacaaagctaaaattaaggtgtcaacccaggatgagtactcatccrgaagctcagctgatgttctcctagaaagttaagactatatgaactatatgaaagttaagactatatgaaagtcagactatatgaaccagtaatctcccccttaggtgttttc

SEQ ID NO: 11519 - DNA, 538 bp, Homo sapiens
tgtcagtaccaccttcattgttagcatcattatctttaaattagtgtggccatttttctaatggagcctcattttattctcctaggtaaacttcaaaaaaatttagccagggagaagcagaggagaaatacttaatggaaaaagtataagcctcaaaggcacaagagctttaagaataggctcagccatgtgctaactgagtgaccttgaacacgtcatttaatctcagtgaggtgcatctgcaaaatggagataatgccccttaccttacctagtgaaagaagttgccatgaataccaacttaaatacatacgtgacagtgttcaacaaaagtaagtaattaaaaagacaaaacagccattaaaaattaacatttacatttcctttttccaaacaatctcatgtgttgggactctatctgaccaaaaaataagcacctgtatagaaggaaacagttcagcgggtccaagaagsaaacagttcagcgggtccaagaaggaagggaaagagggagaaaacaaacttgaaaattatttga

SEQ ID NO: 11520 - DNA, 517 bp, Homo sapiens
caccgtccaatcaactgccagtgcagctagaaaaaaagcaggcaaaagaaggtgggagaagctgacttgctgagtcttccaccctttatctttctcccgtgatggatgcttcctgatctcaaacatcagactccaaattcttcagcttttggactcttgtacttacaccagtggttttccaggggctcttgggcctttggccacaggctgaaggatgcaccatcagcttccctactyttgaggttttgggagtcagactgacttcattgctcctcagcttgcagacggcctattatgagacttcaccttgtgattgtgtgagtcaatactcctttataaactccccttcatatatacatctatcctattctgtctctctagaaaactctgactaatgtacctcatctttaaaaaaaaacaaaaacacaaacaaacaaacatgaatttgaacttctggtgctggccaagatggaataagccttggccagcaccaagacttagcacaacaacctgtttc

SEQ ID NO: 11521 - DNA, 538 bp, Homo sapiens
tgcaaaagatacccagaaaggagtcctctttcagagctgctttcctccctgctcttggccatggtcacctgctccacactgagtaccctcctccgcagccacagagcatcaaggccccagggctttttgaattttcccagagccrcacgctgcagcccgagggtgacagccacaacctcaaacccaccaatgggatttacccatattccacgaccctgcacagagcccccacacagtcatgaagtcatctggctgcttccaccctagttctctctcctccccaccccatgcgctccacttgccaacttccttgccttcctctcacctctctaatccagagtgtctctatgctgctgcttgtagcacgaagagttcccttacatcatatcctgagatctttctttcttaggcttaaaataaactctactctcaggcctgcaaactcagctgtcaagatgtaaaggtagcttttacagttagaaatccctttatgtttttccaggtaaccacccattccttagagggacgatccttctga

SEQ ID NO: 11522 - DNA, 538 bp, Homo sapiens
tgcaaaagatacccagaaaggagtcctctttcagagctgctttcctccctgctcttggccatggtcacctgctccacactgagtaccctcctccgcagccacagagcatcaaggccccagggctttttgaattttcccagagccacacgctgcagcccgagggtgacagccacaacctcaaacccaccaatgggatttasccatattccacgaccctgcacagagcccccacacagtcatgaagtcatctggctgcttccaccctagttctctctcctccccaccccatgcgctccacttgccaacttccttgccttcctctcacctctctaatccagagtgtctctatgctgctgcttgtagcacgaagagttcccttacatcatatcctgagatctttctttcttaggcttaaaataaactctactctcaggcctgcaaactcagctgtcaagatgtaaaggtagcttttacagttagaaatccctttatgtttttccaggtaaccacccattccttagagggacgatccttctga

SEQ ID NO: 11523 - DNA, 535 bp, Homo sapiens
aaacgattttgaaagagggaacaaaatgtcactgcagacaccactggaggtgaggtggcaggtgggatttcacttcgggccagattgaagactggttgaaacagggaagaggcatgcctaccagcaccatgatggtttacgactgccgtgccaacacctggaagttaccacttctgttctagaaatttctgagtaacccaccccttaatttgcatgtaattaaaagtatgtataaatataactggagaactgcctctgaactgctactcaaacacacggcctttgaggtatcctggttctgcagaggcagtcacagagctgtaacactgttgccccaataaaagccatttttttctaccaccagctcattcttgaaacctttcctgagtgaagccaacaattttcccaggctaarccccagttttgggactggcctgccctgcatcaagtggcattcctagctgctctcacagaaggcctatgccctccctggagcctcctcagtgccgccgttctgaggagggtcctgccagtt

SEQ ID NO: 11524 - DNA, 547 bp, Homo sapiens
ttccaatatgctggatatgttaccacagaatctcgttgaaggctccatgagccataatgaagagaagcacaaaagtagtatttgaaaagcatacttgttctcgagacaggacaaaatcagtgttttcattttcttatggaagagtttctcagaaaagaattcaggtaagatagctaaatgccattccccatttaattaaaaataaagttttatctgaaatgaattaaacacaactctgtttaattaaacccaaaacctttaagaggatcactccagtaagatcaattaacattctcttcyatattgaacataattagaatggcaattcttgtaatccactggcataacctttaaaacttgcttggtctttaaaacatatgtggcatttccttaaaaatccaaacagctaaatcataaaaccacatactaagtttaatgttagtgctcattttaaaattaaaactattcataaaatagaactattaaatcttatttgacaactggtatttctgagttacttgagagttctgcatgaaaaataggttcc

SEQ ID NO: 11525 - DNA, 551 bp, Homo sapiens
aaagtggtaggatgacaggcgtgagccaccgcgcccagcctcttctattcttttagagacagggtctcactccgttgcccaggctggagtgcattgatgtgatgtgtgatcatagctcattgcagccctgaccatccgagctcaagcaatccttctgcctcagcctcctgagtagctgsggccgcagatgtgcaccactgcacctggctaatttttaacctttttgtggagccagagtctgtataaaataaagtgtaaatagtaccatcaataaagaatacatagtaccattttatagtagtataaaacggacattagaaactctgaacttaaaggttaaaaaaatacacaaaagtagttctcaagttctagagacttggagaatccaggaatcaacaatgtcgtggaactcctacagcctttcataaagaatggccctcgaggaaagtggaattgtcagtgggcattgtgttcgtgcctcagctaaacacggcaggaatttatttataacctagtgtaacatcctcgaggcactgttcaattagtcaagc

SEQ ID NO: 11526 - DNA, 546 bp, Homo sapiens
gccaagagcatctgccctgccatctcccaagccggggttcctccaggtggatcaggttaggtggtgargattcctggggtattacccatggtagagacgtccccagcatgagaagcagggccctgaaccagagaccacaggaatctcaggctgtaccccatccagtcagtctgcagctcccttcttggctcaccacgctcaggctcgtgtacatgaggcctctgcagcctcctcttcagcacatcagtgttcctcataggtgactaactcatgcacaggctctcacaacttctgctttctgtttctgtcacctcagcatattggctgtttccaaacataggtagccatgcctttactaacaaatatacctccatatcctctagtagtgacacttgagttgcatagttaccacataagcgtctttcccctttaacagcatgccgctcttggaagcagggcttagctgattcaccctgtattcccagctcctgacatcatgcttggcatataaggggtgcctattacatgtctgttggtgcatttgag

SEQ ID NO: 11527 - DNA, 540 bp, Homo sapiens
cctttaggaaaagactgtgaccagcttcacaaaaggcagcaaaggactatcagagaaagagaactccgagtgaggggtaagcagcctggccacagggaaggggctgggggtggagatgcctgcrtctgagggaggaggggctgggggcctggactcctgggtctgagggaggaggggctgggcctgggactcctgggtctctgggtggtgatggagctacaggaggtcgtggtgcagttctctgccattgctgacccctcctttcctgctccatcgtgcaggtctggcctaggcccgggatcggaccaggctccctcaggaccccatcctttcctgcccggaccgtgaattcatctccttgaagccataacgtccgagctgctggtgcggggcagccctggccctaggcttcctacccctggaagcgagaggatgagaggaggccggcccagctccttctttcagggtggggggcattcagcctccactgtgtctgtcttttcttccctggggctccccctcgaggcgaggggccatgca

SEQ ID NO: 11528 - DNA, 540 bp, Homo sapiens
cctttaggaaaagactgtgaccagcttcacaaaaggcagcaaaggactatcagagaaagagaactccgagtgaggggtaagcagcctggccacagggaaggggctgggggtggagatgcctgcatctgagggaggaggggctgggggcctggactcctgggtctgagggaggaggggctgsgcctgggactcctgggtctctgggtggtgatggagctacaggaggtcgtggtgcagttctctgccattgctgacccctcctttcctgctccatcgtgcaggtctggcctaggcccgggatcggaccaggctccctcaggaccccatcctttcctgcccggaccgtgaattcatctccttgaagccataacgtccgagctgctggtgcggggcagccctggccctaggcttcctacccctggaagcgagaggatgagaggaggccggcccagctccttctttcagggtggggggcattcagcctccactgtgtctgtcttttcttccctggggctccccctcgaggcgaggggccatgca

SEQ ID NO: 11529 - DNA, 540 bp, Homo sapiens
cctttaggaaaagactgtgaccagcttcacaaaaggcagcaaaggactatcagagaaagagaactccgagtgaggggtaagcagcctggccacagggaaggggctgggggtggagatgcctgcatctgagggaggaggggctgggggcctggactcctgggtctgagggaggaggggctgggcctgggactcctggrtctctgggtggtgatggagctacaggaggtcgtggtgcagttctctgccattgctgacccctcctttcctgctccatcgtgcaggtctggcctaggcccgggatcggaccaggctccctcaggaccccatcctttcctgcccggaccgtgaattcatctccttgaagccataacgtccgagctgctggtgcggggcagccctggccctaggcttcctacccctggaagcgagaggatgagaggaggccggcccagctccttctttcagggtggggggcattcagcctccactgtgtctgtcttttcttccctggggctccccctcgaggcgaggggccatgca

SEQ ID NO: 11530 - DNA, 540 bp, Homo sapiens
cctttaggaaaagactgtgaccagcttcacaaaaggcagcaaaggactatcagagaaagagaactccgagtgaggggtaagcagcctggccacagggaaggggctgggggtggagatgcctgcatctgagggaggaggggctgggggcctggactcctgggtctgagggaggaggggctgggcctgggactcctgggtctctgggtggtgatggagctacaggaggtcgtggtgcagttctctgccattgctgacccctcctttcctgctccatcgtgcaggtctggcctaggcccgggatcggaccaggctccctcaggaccccatcctttcctgcccggaccgtgaattcatctccttgaagccataacgtccgagctgctggtgcggggcagccctggccctaggcttcctamccctggaagcgagaggatgagaggaggccggcccagctccttctttcagggtggggggcattcagcctccactgtgtctgtcttttcttccctggggctccccctcgaggcgaggggccatgca

SEQ ID NO: 11531 - DNA, 540 bp, Homo sapiens
cctttaggaaaagactgtgaccagcttcacaaaaggcagcaaaggactatcagagaaagagaactccgagtgaggggtaagcagcctggccacagggaaggggctgggggtggagatgcctgcatctgagggaggaggggctgggggcctggactcctgggtctgagggaggaggggctgggcctgggactcctgggtctctgggtggtgatggagctacaggaggtcgtggtgcagttctctgccattgctgacccctcctttcctgctccatcgtgcaggtctggcctaggcccgggatcggaccaggctccctcaggaccccatcctttcctgcccggaccgtgaattcatctccttgaagccataacgtccgagctgctggtgcggggcagccctggccctaggcttcctacccctggaagcgagaggatgagaggaggccggcccagctccttctttcagggtgggggkcattcagcctccactgtgtctgtcttttcttccctggggctccccctcgaggcgaggggccatgca

SEQ ID NO: 11532 - DNA, 596 bp, Homo sapiens
gtgacatatttttgcaaagctgttctcactccgcttccccatctcaagcaaattaagatttagaacaatgactttaagttcccttttatgctacttctgctcttgtacagtaaaatagctttcctgcraacacaaaatattttccaccagtgaactaaaattgtaagtattatctgttacctgcattgacctcatgcagcatttcccccaaagttaattcctgtgaacattggtcctacttagatattttgggagaaagaacaaaaaggttctgtggtcaaatatgatttggaaattgctgtgaattatacttttcctttgatattcatagtgttcattactgtctcaaagactttataataagagaactaatttaactttgcttaacccaagattttctgaatgtatttgaatcatttttcctctgcaacattcatgtgtgaacatcctgcagaaggcttagtagatgagtcatgatgagattacagtagcgtttattgagtgtgtactgtatgccctacagttttacaagcactttagtgggatgatgcctctgtcaggctcaaatatcatagaacaaattcagactctatagt

SEQ ID NO: 11533 - DNA, 640 bp, Homo sapiens
cactgctttgagagctctacttatgaaaatatccatttaatctctcaaaaaccatatacggtaggcagcgctattgttctcatttgtagatgaggaaacatgcaaattgttaacttgcccaaagtctggcaactatggagggacagagctcggattcaaacccagacagcctggtcccaaagcttgctaacatgaccactgtgcactcctccagacatggcagtggaacagcaggatgggtctgggttccagtgtgggaacaagaaaatgggtagagtaagaaaaaaaataatgagacaatcttttccattttcaggagtcagggaacaagtacatacagtttatcttttcagtaactttttacttcacacctctccatttctcccacggatgctctgagttacaggaaagtccactttgctccatttccaagcttttyttcttttttctttttttttttttttgagacagagtgttgctcagttgcccaggctggagtgcagtggtgcgatctcaactcactgcaacctctgcctcctgagttcaagcgattctcctgcctcagcctcccaagtaccaatgtctaccaggctggtctcaaactcctgacctcaggtgatcctcccaccttggcctccca

SEQ ID NO: 11534 - DNA, 541 bp, Homo sapiens
tcaaaagtggacctgtataggagaaactcaggtctgagtagcgtgatgccaggcataccrtgctcagaccgcctgctctcagctgagcacacctggactgagttaaacatgttaaacatattgctacagcaagtaatacattcacctagtaatgcattcttttttttccctttgaaaagagattctctacaagatgacatcactcgctttgcaaaacagacatgaagaatgtgtttgcttctttcatgcatggagcatcctatatcaacatcacacagggttgtacaaggatttttcttggatgttgaaatggaaaagcattcatagcttccctgaattttacgagcactgtaaactcaatttccaaatcgctattctctatgttaaggcaattacacatcaagtgtggctaccagacttctgctgtgcatgtccacttcttccatatgtcacgcctctgctgtctgctcccgcacttcagctcagagtctccttgcattgctctgttgaaaggcacctgaagttcatgtctttacccaag

SEQ ID NO: 11535 - DNA, 612 bp, Homo sapiens
ataaatccggctgtttctgtacctcacttctattttctgaatgtcactttgcttcttctgtacataaatctttttttccatgtggctgtgctggagtctctctgaggctatttgggaccacaggctgcttaatttccaaattattctttgctcaattaaactatgttaaacttaatttctctgaagtttttttcttttaaaagttttcaaatgttttgtatgataaaaaaataagtgatgtgttgttgggctttgattatctaaaataagttatgttttccaagttattcaatatcagctatgtcagctattttttccaagttattctatgttctttcaaaatgcttttgcaattccttttttgtttttgttttgttttgcttgagacagagtctcactctgtcacccaggctggagtgcagtggtgtaatcaatcatggctcaatgcaacctccaccttccaggcttaaacaatcctcctaccctagacacccgagcatcatcatgcctggttaactttttaaatttgttttatattsagacaggattttactatgttgcccaggctgcacttgaactcctgagcttcagtgattctcccatctcagcctc

SEQ ID NO: 11536 - DNA, 556 bp, Homo sapiens
caatggcgtatttaaaaaggtaatattcgttatctttgaggaaacactgagattttctgataggttgtttttgtgtgagtaaacattgttacattagatttttagaaatcaattttactgtatagcaagggctttctatttatttcacatctaggaatctcctttgaaatagacctcattgaccatgttcatgacagaccaattatattaaagaaaaatggaaaatttcccaatatactgtctgacaataacaaaaagatgaaaggcaattagtatatcctcatttggaatatgtttcagtctctttcaggctgaaagaaataaagtaaatattgagttactttaaacaaatatcactgagcctgaagattcatgaggaaaagaggaaaatgggcacatgaacagaggtttagcctgaattcaaaaggatctgaaatgatcaaagaggctgrcctaatctataaaactgaccaaaggtgggaattttacagggaccatatgaggccattctgtggccttctggagagaggagaggtttagggcagcaggaattgca

SEQ ID NO: 11537 - DNA, 556 bp, Homo sapiens
caatggcgtatttaaaaaggtaatattcgttatctttgaggaaacactgagattttctgataggttgtttttgtgtgagtaaacattgttacattagatttttagaaatcaattttactgtatagcaagggctttctatttatttcacatctaggaatctcctttgaaatagacctcattgaccatgttcatgacagaccaattatattaaagaaaaatggaaaatttcccaatatactgtctgacaataacaaaaagatgaaaggcaattagtatatcctcatttggaatatgtttcagtctctttcaggctgaaagaaataaagtaaatattgagttactttaaacaaatatcactgagcctgaagattcatgaggaaaagaggaaaatgggcacatgaacagaggtttagcctgaattcaaaaggatctgaaatgatcaaagaggctggcctaatctataaaactgaccaaaggtgggaattttacagggaccatatgaggccattctgtggccttctggagagaggagaggkttagggcagcaggaattgca

SEQ ID NO: 11538 - DNA, 784 bp, Homo sapiens
gactgacatgtccctgcccccggctgcactgtgttagccactgaaggttcacagcccagtgcctctccagaaattactctcatccaagacagggaggttcagggagcggggagccacatgcagtgastagtttaggcaggggtacaatttgggacaattctgaagggtcattttgggtccagagcgccccatggagtttgcagagtcccatgttgcaactacatcatagaccaccttctctctgtccagtttgccttctctccttgcctttcataaggtgatcccacgggtattttccaataaaccacctgcactcagaccatctcagaggctgtttaccaaggaacccaacataagacagcaaagaaattggaacaggatgctgttttggcagtggccatggatggaccggatgccactgttaggcaagtcatcatcttcctgggaatctcagccattcttaaaggggagccttcagctgacagttaagagatatgcactggttttctgtttggggacctagtctaattctttcatcttatagatgaggaaattcaaattctgtgcactaaagtgacttgaccaatagcacatagctagctggcaaaagaacaaaaaacaagcttacagttcctggctgctgccattggtgctgtttttgaagagccatcatggaattttttcagagttctgctgctgctataactcagaattgactgcagatgggtctagagaccatttgcctgatccgtttgctcaactggtgtggaaaacagatacctca

SEQ ID NO: 11539 - DNA, 579 bp, Homo sapiens
tagttggaatggtatgtcctggacctcatgacttgcttaagaatgtgcatgtcactgtgtatttgaataacagacttccatagccttcaaggtttctagctgactgtaatccatgcataataagagtccctttggctcaagaagatttacagactgttcaaaaccataagttttttttactcattattaccattgataaaactactgtcagcagctttttgtagctaccaagtatcacaaacttaaaaggcatatggcccaggaaaaattgaagattaagtggcacagttataaactttggattgtgtttgttgggccatagttaaatatcagattagtgatttttctcccttatctatcctaaatctactaactggcaatctattcatgttgagtttatggcacacaacttaycaccaatcaaatgaatcttgttgtcaggttaaaaagaaaaaaataagtgctgtgtgagtattccaaaatatagattcgtaacatataataatcatttaagactcaatataaatgtctgtggttacatatatgtagggcatagcacatagagaagtggaaagagag

SEQ ID NO: 11540 - DNA, 573 bp, Homo sapiens
agcaatgggaagaggctgggcacgattgctcaggcctgtaatcctagctctttgagaggctgagtgggtgagtcgcttgagcccaggagtttgagaccaccctggataacatggtgaaaccccatctctgcaaaaaacacaaaaattagccaggaatggtggcatgcatctgtagtcccagctactcaggaggccaaggtaggagttgggaggattgcttgagtccaggaggtcgaggctgyggtgagctatgatcatgccactacactccagcttgggggacagaatgagaccctgtctcaaaaaaacaaaacaaaacaaaacaaacaaacaaacaaacccactggaatgtggcaaatgctgcctgggatagaggtccagtattctgcctgctgaggggggctggagatggggagggggacagatctggagagcccccgtcctcaccacccctgccctgtctgtgtttccaccagacagatccaggttgaagttcagttcaagatcaagttcagcctgggatcaggggttggttggaattggggttcagtgagaagtgggagctcagcccga

SEQ ID NO: 11541 - DNA, 664 bp, Homo sapiens
taaattaaccaaaaacataaggagaaaataaactgcaagtccacattccagagaaggataacattgttaacatttcggtttgcttccttccagtcttttttctattgcagatgctcaccgtgattcaatttagtgctaaatcgtatcagataattgtgcatgccttctgctgtgtaattgccaatacagctagcctattgctataattttctttaaatgtttttaattcagtgagtcagacacccatatggtattcactatcrtatctcattggaacagggaaagggctgggctacctggttactgggttctcaatggtcaggaaggagagaaaacggaatcatcaagaaaaaagctaagagatatacttgtccatgggccagagaaggtgacttacacttgaactcagtgcccaaaaggacccaacaaatctggtaacatttaagtgagaattgaaatccaagaggagtccacttggcccagtgggttcttgttctagtatttgaaatcaccccttggttacaatggtaattgaatcaccaaacatttactgaacaacaactatgtgcccagtactgggcaaatgctggagctacaatgatgaacaaatggacaagatcccatgacttcatggagttttcattcagaggagtaggaggagata

SEQ ID NO: 11542 - DNA, 545 bp, Homo sapiens
tcaaggatcagggagggctacatgtacctcaacaatctcctactgatatttaatatgtaattgacaaatagcgttgtatagctagttattaaaacatagkgtagaaggagaattctggagtaaaactgtaaacatacaagttgtacagtcatgggcaaaatgcttaattcaacaatacctcccttagtagaatgattttagatacaaaatatcagaaatccaatttgaaatgtgctaaacaataaggaaggttattaactcacaaagcaaggagttgagagagcaattacaaggctaagacatgtcatcaagtacccagttcttcccatttttctatgctgttttttgccctcaggcgtgtactttcgaggtaataagatggtttcagcaaccaaagcatcacattctcatacacacactccaaagacaggatgagaaaatttcccgtccttgtgtgccctctgtaaagaagaaggaaactttcccaaagccatgtacaactgtatcatatactcacttctaaaacaataatttgcaagatgctg

SEQ ID NO: 11543 - DNA, 637 bp, Homo sapiens
cagctaaaggtattcacttcatcgttggcatcataaaaaagaaagtattctgatatcttaaagtggaatccaataagttgtcctcattgttgttgcataactaaggacaaaaatttccttattttgctttcattaattttaatgctgctccaataaatacaggttttttattcttaatattttaaaatgtttttaaatactatttttaaaacaaaactaatatcttcaaagtgcctgaggtgcccaagaaacttgttccagtaaagaaagaacctgtgcctgttaccaaaaaaccagaagttcttccagaaaaaggtacctaccatgaagaaaaaatagatttctctaactgctatttaagcatgttaataataggtcttagagaaaaacatactgaatgtgaatttatgttaaaaccatattgcacagaaaaaagggaaataatgaagggaaaaaaatgaaacagacaagcaggagtgaaaaaatgartgggattcagttgtgctgtgatatatcacatggctacaactagtagaaaagaaccttctctcattcaatgtgtaaaacagctcaattcaacatattttgttgaatgttgaccattaacaagacatcatattagaaaaattaaggcctg

SEQ ID NO: 11544 - DNA, 660 bp, Homo sapiens
ttttttctcagttttatatataatcattatgtacttacaggaaggtaaaggacaaattttacatatttttttccactaaaagtatattgcattctttttttgtaacagattcatgcccaagcacaaaacaacccatttaaagaagatgctcggccttaaaggaaatggcggtgcggttctgtccatggcccttccttttcagccagagcagagagattcagaggatttattgaagaattttaattcagagtgtgatacacactgtggccttgatactgcacgacaagaatatttgggtaactcattaagacaggaatcagacttgaaaaaatccacctcgtcagataattcaagctctcatcatggtgaaaataaacaaaatctgactgttgatccctgtgacattttgggtggagttgataatcagcaaagactgctacacattgtctggcctcacaggtggtaagtcaaggcatgccaatttagtaagagttgtagaactggtaaaagaaaatatattctgttgattgacataataatttgytcttcttattgctttagaaaaagattattttaatgtggtggtattactaatgatctgccaaggtggtactactaaatatcttcacatgaatggtcatgtgcttagattaaatttga

SEQ ID NO: 11545 - DNA, 633 bp, Homo sapiens
ccaaggagctcctgttaccccagttctcctcactccccaaggcagtgtctgtgtctgatgccagcagaagtacaacctacaaaccatcacagctctggatgtcaytaccttttgtttggagaacacggggcagaagatttagaggtcccctggcacctaaatgatgttagtcatgactggtgttcagggttacaagttgcactgagccaatggtgaatgtgaagtgaccgaggaccttctaaagtgagggtccaggaccccctaccctagtccttgaaggccaatgctgcaccccttgctaaataaccatacaaatattactatagtggattgaatggtgtctcccattagaatgtccacattcgaatccctggaacttataaatacaacctttttttggaaaaagagtctttacagatgtgttaaattaggaatcttgagataagctcatgttggattatctgtgtgggccctaaattcaatgacaagtgattttataagagacagaggggagtcggagaagaggagaaggccatatgattacaggggcagagactggagtgatgcagccacaggccaagaatgagagtcaagttatagccttcggagggaataggccctgcccatagcttg

SEQ ID NO: 11546 - DNA, 517 bp, Homo sapiens
gttttgcatctaagttaaactgaagcttgtgatatgatgcttccacagagctattaaaagttattaaaatcctgattctgtgtgtctaataaattttggctgtatgatatgaatgcattaattttgtgcttaaaagcaaaagggctgataaaaagttccagttaatatataaacatagtagaaatttgatacatacttcttgatgatacatattgtgtgacagaaaacctaactataataatgataccaactcatattgtacaggactytttcatatattacattatttgatcctcacaatcccatcagctaggaaaggcagactttatgaatttctatttaaagatgagaaaatggaaattcaaggaggtatttgagttttctaggattcagacataggtctagtaatatttttcagtataccatattgcttctgagtactcagaatctcattttcaattgtaacagttgtaaaaggcctgtatatgcttacaatatgtgtgcagagtgtagatat

SEQ ID NO: 11547 - DNA, 558 bp, Homo sapiens
ctcttaagagagctaaaatttaaaaaaaaggagtgctcaatctctgacattcatcctcctcttctattgtagaggatacctaaagccatgtctttcaaattgtaaattacaacacaatgctaatagtgaaataaaattagcaagtaataagcagcaagtgtaaaaaaagaaaatacaacagagtagaccacaataaaattgaaaatatcagccgggtgtggtggctcatgcctgtaatcccagcactttgggaggctgaggcaggtggatcacctgaggtcaggagttcgagaccagcctgaccaacatggtgaaaccccrtctctactaaaaatacaaaaaactactggacgtggtggtgggtgcctacaaccccagctactcaggaggctgaggcataagaatcacttgaacccaggaggcagaggttgcagtgagccaagatcgccccattgcacttcagcctgggcaacaggagcaaaactccatctcagaaaaaaaaaaaaaaaaaaaggaaagaaagaaaaatcagagtgcacaatacatagtaagaatgtt

SEQ ID NO: 11548 - DNA, 558 bp, Homo sapiens
ctcttaagagagctaaaatttaaaaaaaaggagtgctcaatctctgacattcatcctcctcttctattgtagaggatacctaaagccatgtctttcaaattgtaaattacaacacaatgctaatagtgaaataaaattagcaagtaataagcagcaagtgtaaaaaaagaaaatacaacagagtagaccacaataaaattgaaaatatcagccgggtgtggtggctcatgcctgtaatcccagcactttgggaggctgaggcaggtggatcacctgaggtcaggagttcgagaccagcctgaccaacatggtgaaaccccgtctctactaaaaatacaaaaaactactggacgtggtggtgggtgcctayaaccccagctactcaggaggctgaggcataagaatcacttgaacccaggaggcagaggttgcagtgagccaagatcgccccattgcacttcagcctgggcaacaggagcaaaactccatctcagaaaaaaaaaaaaaaaaaaaggaaagaaagaaaaatcagagtgcacaatacatagtaagaatgtt

SEQ ID NO: 11549 - DNA, 558 bp, Homo sapiens
ctcttaagagagctaaaatttaaaaaaaaggagtgctcaatctctgacattcatcctcctcttctattgtagaggatacctaaagccatgtctttcaaattgtaaattacaacacaatgctaatagtgaaataaaattagcaagtaataagcagcaagtgtaaaaaaagaaaatacaacagagtagaccacaataaaattgaaaatatcagccgggtgtggtggctcatgcctgtaatcccagcactttgggaggctgaggcaggtggatcacctgaggtcaggagttcgagaccagcctgaccaacatggtgaaaccccgtctctactaaaaatacaaaaaactactggacgtggtggtgggtgcctacaaccccarctactcaggaggctgaggcataagaatcacttgaacccaggaggcagaggttgcagtgagccaagatcgccccattgcacttcagcctgggcaacaggagcaaaactccatctcagaaaaaaaaaaaaaaaaaaaggaaagaaagaaaaatcagagtgcacaatacatagtaagaatgtt

SEQ ID NO: 11550 - DNA, 533 bp, Homo sapiens
gaagatctaaaaatatgtcttgaagcaggaagagatctgaggcagaaaccagcaaggaggcaaaaacagtagtttcaaaggacaggtgattaagacttggacaaggctggtggcaacgagcagagaacaggccaagaccaaagagattcttcaacagaagagtctgcagtactcagacagcataagcaggatgggcaagcaaggaagaatcaggcctggtaggtgctgggcctacacggtcttgggatgagaggacctggcagaagttacaagagrggagccaatttcactggaagatgaaaaagccaattttgcccacaaaagagtttgggattacaggacatcccgaagaaggatcccacaggaaggtgaggctcaggtaggacatgaggctagaaaggtgaatctgggtctaaaggtgagagaagccacaaagtgagtcatttatctgaactagaaaagaagaagggagtcaaagattggctatattggctatgttggtgctggcggggagaggaacacaaaggaaaaag

SEQ ID NO: 11551 - DNA, 549 bp, Homo sapiens
agctagtgtaagtattctaaactgtgctagtatagctgctttaaatcactgctttcttctgcaaatggtggcacctttaaagtgttatcttgaaggggaagtgagtgatttgctcatgtctctactgaactaacactgttaacacccagtccagttctaccttaaacaagtcggagaaatacagacataatccatacttgttatttgtcaagactaaggtaaaataaggaaagttggaactmactcatatcctcttatgactgatgtactgaaaacaatccatctctcaccatttcctaaatagcatagtcacaaagagctctaccctaccaagtactctgcaagtcccactctcaaaggaagactcacaggtgactgagaagataaatttgctattgtttccattatccttcagttcatctgacacctttgaagaaatgcatttggataagactcacaagtctcagggccccttctttatgaaagaaatagctaagcctccatactcagaagcatcagacttttcagaatgcttaagtcatgtaaaaa

SEQ ID NO: 11552 - DNA, 549 bp, Homo sapiens
agctagtgtaagtattctaaactgtgctagtatagctgctttaaatcactgctttcttctgcaaatggtggcacctttaaagtgttatcttgaaggggaagtgagtgatttgctcatgtctctactgaactaacactgttaacacccagtccagttctaccttaaacaagtcggagaaatacagacataatccatacttgttatttgtcaagactaaggtaaaataaggaaagttggaactcactcatatcctcttatgactgatgtactgaaaacaatccatctctcaccatttcctaaatagcatagtcacaaagagctctaccctaccaagtactctgcaagtcccactctcaaaggaagactcacaggtgactgagaagataaatttgctattgtttccattatccttcagttcatctgacacctttgaagaaaygcatttggataagactcacaagtctcagggccccttctttatgaaagaaatagctaagcctccatactcagaagcatcagacttttcagaatgcttaagtcatgtaaaaa

SEQ ID NO: 11553 - DNA, 526 bp, Homo sapiens
tgtaatacattattaaattgtttcaaggtgctgttttgcctaaaaattttgtgtgtcttgaaaactatagtattgggtattgagactctgcaaattctcggcatgcttggcatgaggtaatcggtttttattcttacaaaattgtaactatgtaagtgtgtttattaaaagaacacaaactaaaaaagttaacagraattaaagttgtgggatgaaaaagttacaggataaaaaaatactgtggaaaagtggcaaaaaaaagttgtggaaaaaaagtaaaaaaaaagttttatgaaaagttattttaaaaagttatgaaaaattagttacaggatttaaaaaaagtcatgggataaaaataaaaataaataaaagcaggcccctgtcagcataagcctggagaagtgggtctggagtcttcacccccaccatgtccctacaacccctccccagtcagccctttaccattagggtagcaagacaagacccttgtctaatggagggagacaaacagaccctttaccac

SEQ ID NO: 11554 - DNA, 508 bp, Homo sapiens
cctctcccttaaaaaatcagatttttttttgtaatctgcattttcactcaatattgtagatctgtgtcataagttactcctctacagtgccttcagttattgtgtgctttgtgttggatgactgtaccatctagtctttcgtgtttcctggtactgactacataggggtgagtgtgtgtgtgtgtgtgtgtgtgtgtgtrtattttttttctaccttaactaatgctttggacatcatcaacaggtagagctaaatccttgaaaccttccaagtggtggctttcagttattgctgaattggtttttagagatggaacaaattatattgtatggaaactttttttttttttttgagacaaagtctcaccttgtcacccaggctggagggcaatggcatgatcttggctcactaaaacctccacctcccaggttcaagtgattctcttgcctcagcctcccgagtagttgggattacaggggcctgccaccatgcccggctaatgtttgt

SEQ ID NO: 11555 - DNA, 515 bp, Homo sapiens
ggctaagggtctgagaagagagttgaactagggaactagattttcacatcccatttcacttatcatggtagcatattcctgaaagctttatgcagagagtacagtactagcactccactatgaccaaagtttttggcttcaactctatatctgtatgtgagcattaatrccctattagggccatacctctcttggtagccccattgtagtgatggtcacaaattctttatgaattattaataagagatggaatttagtctcccttttcttgaatccaagctggctttgtgacttgatttgaccaacagaatgttgaaaatgacactgggccagttccaggcatacctttttttttttttttgatacagagtctcactccgtcaccaggctgggatgcagtgacaccatctcggctcactgcaacctccgactccctggttcaagagattctcctgcctcagcctcctgagtagctgggattacaggcatgcaccaccacgcccagctaatttttg

SEQ ID NO: 11556 - DNA, 886 bp, Homo sapiens
tttttagtagagatgggctttcaccgtgttagccaggatggtctcaatctcctgagttcgtgatccgcccgcctcggcctcccaaggtgctgggattacaggcgtgagccatgcgcctggcctaatttttgtatttttaatagagacagtgttttgccatgttggtcaggctggtcttgaacccctgacctcaggttattcacccccttcggcctcccagactgctgggattacaggcgtgagccaccatgctcggctctaartggtacattttcaatgcgtattctattcttgtttctctagatttttaaaccttctactcttattttgagaaaacctttccattattaatctctttgatggtttttgccataatcacatctccacagtcacttttgacatatatggtactaatctcaggaattaaaatgtggatagagtggttggggggcataatttagtgtatgaactccattttattttattgatctatttctccatcacagtgtcttatttactatagctttaaaatagatctcaatattcaagagtggaaaaactattcttattcaagactgtgtcattttttgctctttttatttacatataattttgaatatcagcttgccaatttccacacatatgtacacctactgagatatttattttgaatgcataacattcatatattaatttcacaaactttagcacctacacatttttgtctttaataattgcatggattgagaaggtacatttaaatttctaaataattacatctattttgaaaaaaaaaaaaacctgttaaagcaggctagccttggggaggtcggaattgttcaggacatgcacaatttgttttagaacattaaatatatctgactcc

SEQ ID NO: 11557 - DNA, 546 bp, Homo sapiens
ttcaggggtaccctaaaaatagactaattttacctgtcactcccttttctcctgctgttatttctcttccttgttaaaattgggactatcttagtgctcagtgtttaacattgttccatgaatctttcyggctgtccatgtagctgcatattattttttagcctttagaagtgaaacattctctttcttcagtccttagcaagctaggtgtgaatctgatgttaataattcacagtaagcaataaagaagggtagatagtgtcaggagacatttccatttgaaacatttgctagcgcaagtatatttcagatagaagaataagtgaaaatggtgttattgagaaaagtcatttgctcatttcttctaggaagtgacacagaatcaaaacttgaatcacacaatctccttgcaaactaggatctcatcatttcacctgattgtgcaacactgaggtcattcagtaaagggaataagatgggtgttagttatgaggggtgggatccagtaaaatgttgtattttgaaacctagcatcatatttttttt

SEQ ID NO: 11558 - DNA, 693 bp, Homo sapiens
tgaatctttaaaataatgtgcatggtggaggatgggcagtggtaccccccgccctctgtaacagacaagctgctgaagggacgtgtaacacactgtttctggtcacctgaacaacagtttaaaggcgcagtaagagggagagaktccctacttcatgggttgtgagaaatccttttgcgaaatggagatccctttagtagggaaagacctctctccctcatctaccctaccccggggttaccttttggagttcagattttcttttctcaacatgaccgtgttacccgtaccccaagtgaacaaccttggaagtttctgacattgcaaatgtccattttctttaatggccagaatggaaaagacttaaagtaggcactgttcagagagggtacaaatgaattctcccacgggatccttgcgaccaccgccgacagtcagccaggacaccacagggtagtggccgctattcgggtccccccaccagttcccgtctctagaagcaagcaacctgccccacccacggaggcaggcacccagctgccaagcttctgttatgggataggtgggatcgtaaacacagttacctcctcctagccagcatcctgaaacaattctggtgacatttcaccaatggctttactggtgcagagacatagcatggcttgtcccaagtcacagctaagctacagaccc

SEQ ID NO: 11559 - DNA, 514 bp, Homo sapiens
cccagaacagaaattatcccattacaacatttgttatctttttattaaactaaaaacaagtcmgtttacaaaaaggtagatctatttcagaacatggtcaagagtttaacacagaaaagagaaactctagaagagattgtatcaatttattttgggaagctagcatgttttctacagtcatacaaacttaagtttttctatacctgttgactttgtagttgtgtttaaccaaatttctgggttttggggattttttttaaaaaatttgctgttattgttgttacttatctattcttattttcttttctcaaaggacaaaaccacagttaccaaaatagagtctttgacatgtagttatcaagttgaaaacatcattataaataaatgagaaaatattttgtagagctcaacttcatactaattatctaatatggttttcggcatcttctaaaaaagaattagtaaacacaaaatgatttacttggttacttgaattactcatgcacatttaaaa

SEQ ID NO: 11560 - DNA, 537 bp, Homo sapiens
atgccttatctagttaaaatgatgatttcaatgagctttgaaatcaygttgactagcaatctttcttaccaaccagcacatacaaaagaaaattacatttccttctcttccgggagatcagagatttagtaaagagattttttaaaagtgttttctagataatactgaaggtgacatcaatagataatgaagaacagtttacagaatgataagaacaataatgagatgacttgaggctgtgagaaaatgactttaggaaataatgaagctgactgattgaaagtaggaaagacaactacattgaagcccaaagttatattttgacctcaaatgagcattaatagcatactgaatgatataaaaaaggaagttttttttttttttaccatatgtggtaaaatgtctttttttaagtcatgattttataaaataaccttgaaacagtgaatgcaacagtcttcattcgatgaggctaaaattacacacaaaaaaattaagaacaaataaaagaacttaagttgagcaacaaaaaggtta

SEQ ID NO: 11561 - DNA, 563 bp, Homo sapiens
tcactcaatatgaaatcttatggacattagaagcagaattatttcacagaggaaaaaaaggaggtattcagaaagaggatagaaagcaaaatgtaaaggacgaacacagtcagggcctgatgtctttttttggtgtagaagaggtatatggatcttccgaattctgygtggcctcaaataatcacaaaatagtcaaccctacgggaaagggagaggtaggcagaaagttttgccatcactgatctttcccattagtgaaacttaaaggtggtgtttctctcaaatcccttctagtcaatcatggctaagggcttccaagtgaccttggcaatctggcctctcccacactgggtgtcctttacccagtccctgagaagcttagggagaagagtgaaagagaaaacaggaaagcaaaaacaacttcaaaatttctgccttcagctaagtctgggattgtccaagctgcctctaatgtggtgtcagccaaggctcccactctttgcagaaaagttagctgctataggagcttggaaaattagaccagagtagttgaaactgacaat

SEQ ID NO: 11562 - DNA, 906 bp, Homo sapiens
  misc_feature (1)...(906): n = A,T,C or G
gctgtactgacacttaaaagtagggatgttcagtgtgagttgattaaaagctgggaaggctgtttgcataagagagaaccatccaaacttaaaagggatgggatacaggtgtcctgtgacatttgagagtatgaatcagcatttttattccttatgacctcagattccctaaaagctgtcttccctacaactttntatgcagatcctgtcctggagttttgagagacatttcagcttgctgctaataaacatacttaagacaaagcaaatgagcaaataaaactaaaactccagcctaatgcttgttaatacctgcaaccaaaaaaaactcttcataaaatattaagctctctgaagatcaaagcaatctttttggtttcccatagaaaatacctttacaagaaacaggtacaggttgagtatatctaatctggaaagctgaaatccaaaatgctctaaagtttgaaactcttcgtgcgctgaaatgcatgatgttcaaaggaagtgctcatttggacatttcggattttggattttcggatgtgggatgctcagctgggtacctataatgcagatatcccaaaatctgaaaaaaaaatttctgaaatccaaaatactggttccagcatttcagataagggacactcaacccatatactcaaaatccatttggccttcaaattcctaaaagcagtctttcctacaacttgtatgcagtaagtcacttaagcacttaagtgtcatatgggtacttacatggaattagagcacttcctgaatggaattagaaaaaggcaaattgtgcatactactgatgcattcatttcctacagagatatgataccaagggccartaagtgaatagaaaaagggaggaggatttattaatggaatgagttctaaccc

SEQ ID NO: 11563 - DNA, 525 bp, Homo sapiens
ctgtcttggagtcggagctgtacttcctcatcagctggtacctgttgaccagcctgtgtcagagastggcctaggtagcagtgctggagctgaagcagcaccagttgctgctgaagaggttggactaggagggcaacgaacacaacagtctaaaaatttgagacataattattagactgaatgcaaagaattggtcttgtccattaagcatgtggctcctgatcacctgctgtgggtctgccagtgcttcaatcttattttggttaaagaaattccactcggtatttcaagagtcacttctttccttggtgcaggaaggcagtctttgttacatacagcagaacataggttaatgtggagatgtgttctgctttgtgttaatagctttaagcattgtggaggaaaggtgataatatatgtaagtcatgctgtgaactatacaattctctgcatttagcatagaacattgaattctgctgtgtgtttcatgggcccttctgcatttaaaaaattgataaagacaca

SEQ ID NO: 11564 - DNA, 525 bp, Homo sapiens
ctgtcttggagtcggagctgtacttcctcatcagctggtacctgttgaccagcctgtgtcagagactggcctaggtascagtgctggagctgaagcagcaccagttgctgctgaagaggttggactaggagggcaacgaacacaacagtctaaaaatttgagacataattattagactgaatgcaaagaattggtcttgtccattaagcatgtggctcctgatcacctgctgtgggtctgccagtgcttcaatcttattttggttaaagaaattccactcggtatttcaagagtcacttctttccttggtgcaggaaggcagtctttgttacatacagcagaacataggttaatgtggagatgtgttctgctttgtgttaatagctttaagcattgtggaggaaaggtgataatatatgtaagtcatgctgtgaactatacaattctctgcatttagcatagaacattgaattctgctgtgtgtttcatgggcccttctgcatttaaaaaattgataaagacaca

SEQ ID NO: 11565 - DNA, 525 bp, Homo sapiens
ctgtcttggagtcggagctgtacttcctcatcagctggtacctgttgaccagcctgtgtcagagactggcctaggtagcagtgctggagctgaagcagcaccagttgctgctgaagaggttggactaggagggcaacgaacacaacagtctaaaaatttgagacataattattagactgaatgcaaagaattggtcttgtccattaagcatgtggctcctgatcacctgctgtgggtctgccagtgcttcaatcttattttggttaaagaaattccactcggtatttcaagagtcacttctttccttggtgcaggaaggcagtctttgttacatacagcagaacataggttaatgtggagatgtgttctgctttgtgttaatagctttaagcattgtggaggaaaggtgataatatatgtaagtcatgctgtgaactatacaattctctgcatttagcatagaacattgaattctgctgtgtgtttcatgggcccttctgcrtttaaaaaattgataaagacaca

SEQ ID NO: 11566 - DNA, 524 bp, Homo sapiens
tttctatctggattccccattgttatctaaacaagaaaggtactttccttctattcacgtaactttaccttgtttcctactaaaaatcctgggcttatgctaaggtagtattaatcttttcctgcataaacagaaggcaaatggcatgtccgagctcttctctccaatcagtaggcttctcccctgactgcaggaggaagaaggagataccttttggttcatctaacaaagtatatgaatctattttgggtggaagcagcagcagtattggcatttgcttctcagagtggatttgtttccaaatcttaaagtgtagtcagattccctcggacattcgagagcatgcagtaggtgttcatgacctgtttgtaagttgaatggtgagggtgagctacagaggggatgagttgractcagaggggaaaggagattaggccaggagtctaaatcgtgggttatgactctggtcctgcaatgcactgactttgtgatttggggcaattttacttcatctctttcagcct

SEQ ID NO: 11567 - DNA, 2793 bp, Homo sapiens
cagagctgtgggtctgggcacatgcagtgggcatctctgaggtgacccctaagaagcaagtctactcaatgctgtgcagacactggctacttcaggggccacaaataccaatggaggatcaaaatgcacaaagtaattgcctcctgatgctttattttattttagaagtcagtccagctctcaacaacctacagcaaaccctgaatattgtgacagttcagaaagaagtgatagacaccaatctcacaactctccgagatggtcttcatgggatacagagaggtcagcatcttcctaatccattgtactcggttggcttcttttgttgaacgttttagatacttatacctccctatctgtgtgtgcattaggtgatattgatgctatgatcagtagtgcaaagagcatggtcagaaaggccaacgacatcacagatgaggttctggatgggctcaaccccatccagacagatgtggaaagaattaaggacacctatgggaggacacagaacgaagacttcaaaaaggctctgactgatgcagataactcgggtatcaggcgatctctggccaggacatcttagccattctctccattgttatgtgttttggtccatttccattcttccctggtaaagtctgatctcagaaactaaaacattagaaaacagctccacctgatacaggatatattcaaagcgtatagatatcctgctagttggaaggaccagacaggatttttaatttttagaaaatacattgaaaatgctattggtttgcttttttacaaagtggagatatatgtttctaaatcatgaggcattgaattatgattgatattaagaatcagaaaacaggctgtgttttctgtgcgctgtggctcatgcctgtaatcccagcactttgggaggccgaggtgggtggatcacgaggtcaggagatcgagaccatcctggctaacatggtgaaatcctgtctctactaaaaatacaaaaaattagccaggcgtggtgatgggcgcctgtagtcccagctactcgggaggctgaggcaggagaatggcgtgatcctgggaggtggaggttgcagtgagctgaaattgcaccactgcactccagcctggacgacagagcgagactccatctcaaacaaaaaaaaaaaaaaaaaaaggaaagaaagaaagaaaaagaatcagaaaacaaaggtttttttttttctttctgtagtggtcaaagtaaaggatttggtacctagattgcagaatacaattcaccatgtacagtagttcctccttatcctcaggggatatgttccaagacccctactgggtgtgtgaacccacagatagtaccaaaccctatatatactatgttttttcgatctgataacccagacagctactaagtgactaatgggtgggtagggtagacagcaaggatatgctggaaaaaaggaagattcacatgggtgggaccatatgagatttcgtcatgctattccaaacagcacccaattcaaaacttatgaattgcttatttctggaatttttcttttttaatatttttggaccatggttgatagcaagtacttgaaaccttgggaagtgaaaccatgggtaaggggggaactaccgtaactaattatgacccatcctgttcaacatctggggaccaaacatgccacttgacaaatactgtcagtaagaacatttgtagttagccttttcttaatgcacaatcttacatttctattttttttctcaccaacagtgaataagttaaccaacaaactacctgatctttggcgcaagattgaaagtatcaaccaacagctgttgcccttgggaaacatctctgacaacatggacagaatacgagaactaattcagcaggccagagatgctgccagtaaggtgagtgtgtccccacgtggtcagtggccaaggctagttctttaatgagttatcacatttatcaagaaagaaaaaaacacttatttactcaagaattggttgtctttctttccccaattcttgtgttgcttgaatataaagattgattttctcctgtcatcctttacaagtgtacatgaccttcatccttacattatctggtatatcaggatcctgaagcaatttgcccccattgagtttattcaggcagaaagaaggattttcttccaggccccagtttgtaaactgtaattgcacattcaagggagggttctgtggtcagaatgtgccagtgtgatactgcacaggacctaccctcctattgtaacttgaaagttgtagaatccatctttgctgaggatggaggatttaagatgacagcagttttccatcattggagtactgattcaccagcctttcttgttttaacctgacattatttgcttgaattactgacacttgtctcttragatttgttttgtcctaaaatggcataaatacaatttcttatattttccaataactcctagacagccctacaggagagttttggagggagagggttggagagcctagtcagaatatcattgccctggaggcatcgtgcccaataaccaggctcactgttacttcttttgagcctcagaatctgccctttcttctaagaaagcaaagtattcccaacataaaaacttgaacaggaaaacaaagagcataaggcaaagtttggaagaacgcaccctcttcacactcatacatgctttataaaaaccaaatgaataagaatgtatgctagcttttacccttctgtgttcattcactaatttatccaacaaaaatttg

SEQ ID NO: 11568 - DNA, 627 bp, Homo sapiens
ggtagtgattaatgtggtaattaatgatgttttaaaggcaaaaaagtaaaattcagatgccagaatgcagtcagcatttttattaactgtctctctttccttctctctcttttctctctctctaactatatctatataatacaaatatgaaaatgcatatatgtatattatacacatatgcatacatatgtatataattcctagcacaaaatacatacacatcatacaaatagtgaaaaaagaatctcaacaatataactgacaaaaggttatcattctgagtatataatttattcaaaataataagagaaagcacaatattttatcttgtaagcactacaacaaaatgatcagaagcataggtctaggggttagttagatttcatattctagtcaaaatctgccatttgctatatgatgttactttagaaaactgtttaaagtctcttaccctcaattatttttaaactttcttaacctcagtttctaatgatgataattgtayttacttaatggaaccttttaaggcactatgccaaatggatagtgcatggtaatgggtaaccactcattaaatatttcttctaccattgctaaaataaaaaagtaactttttatctaaatatt

SEQ ID NO: 11569 - DNA, 1951 bp, Homo sapiens
  misc_feature (1)...(1951): n = A,T,C or G
ttagggtacatattttaagaagcattaaaactatctgctttatgtatccctagagtggaatagagtggttaatacagaaatttctgggtgttactggcagccacatgtggaatttatgaaagtcatattttaacacatcatcatatatacatatgcaaataccacatgaacacacacgtatgcacacacatacaaacacatgcaaaattgtaataggaaaaaatattttgtagatccttcaaatgagcttttctgctcatgtcttaaccttttccccctttgccagccatttgtctcaacatttattctactatctgcctatataaatatttccttaaatcaagagccccttctacagttgacaattgaacaatgcaggagttaagggggcagatcccctgtgcaataaaaaattagcacataccctgactccctaaaaacttagcttctaatgattactgttgatcagaagctttgctggtaacataaacagttgaataacaaatatttttgttttatgtattatatactatattcctacaataaattaagctacagaaaataaaatataacaaaatcataaggaaaggaagatataaatactgttcattaagtggaagcaaatcatcataaagttcttatcgttgtcgtcttcccactgagtaggctgaggagaaggaaaaggaagggttcgttttgctgtctcaggggtggcagaggtggaagaaaatccacatataagtggacacgtgtggttcaaacccatgtttttctggagtcaactgtacttacttatatgttttatgcatcccacatgctaacatagagtgaggtatttcttgatgtgttagcatttaacaatatccctgagacatttgaggatttctgaaggactttgaaattgaaggttataagctcttccattctgcctgtgtcccagcctcactgttatttttccactgtttcttaacagatgggattctgtactacttgacatcttgatcaactttcttccctgtcccatttccatctttgaattatctctaccttctctaaattgtggttggaatagacgcagagactaatcagatgagcgttcctctaagcaaaataaaataagtttctaccaaaaaaaaaaaatccataaatgatgacgtcatcagagtaaagtgttctattttagccaaattagtagagaaagttctgtcaaaactctgtaccataccctcgtcactgtatctctaatagttcttgccatttcagctaattcgtggggnnnnnnnnnnnnnnnnnnnnnnnnnnnnnnnnnnnnnnnnnnnnnnnnnnnnnnnnnnnnnnnnnnnnnnnnnnnnnnnnnnnnnnnnnnnnnnnnnnnngaaagagcgatgggtgggggcacacacacattccagataaaggctgcgctatgcactgttcacgtttagagtccaggctcttgttaaaaagttcatggagcaggtatttggagatttgattcccatccacaggcactaattcactcatttttctttatatttcctcatgcctccttttaaaatatttattttattatcttcccctcccatctcgctaaatatttctacacttcattttttaagttatacttttacttaagttggtttctctttctctattttatcttctctttctctctcgtatttgttctctaatgattccccttgcttttctcttatctcttctattttttctcctttgttgtttttacttctcaatgttcttgcagtttccaatatttttccactctctcttcttctctattcatttctcctttattagatctcatgtytgccttcccattaattctgagaagcatcactattgttttcttttgaaacagtagtaaggacagcacatgaagtttcttcactccaatttttgtaagggttaaaaatacctaacccatctttca

SEQ ID NO: 11570 - DNA, 558 bp, Homo sapiens
taattgcttgctttgggtttttttggtacaattcccagcttttcttggggtgttacagtgcatacccaagtatgtatagtttatttagcccaattttattaaggacgtggtatgggctggatgaacctcattttagacacagaagataggaaaacaatatttttaaattgccattgtggagttcaaattccagctgcctttggtactatgacaatagcaacatatgatccattgrtaaaccctggagttgcatctcctaaatattttctaaacaaattattattctcttcaaatagttattgctgtattgttagtttaagccatatatatatatatatatatatatatatatatatatatatatatatattcttgtaatgttgtcttactctgatttattcacatagcagccagggtgatatttctaaattgcaaattgtattaagctattctcccgagttttattgtaaaacatattgaaagaaaattggaaatccaattttattattgtgggctacattacttggtctttgactaactctttattttgttcttatg

SEQ ID NO: 11571 - DNA, 553 bp, Homo sapiens
tcaggagcagagcaaagtactgctcatggctgggcctcagccacctttatagctcctctgggcaacagcccggccatcggaacacacctttctgccagctgtggagacagcctcgggctggttgctgcaaggcttgctctctggacagctgcttcatcttagtggctgttctggaatctctgtctgagaaaatgagacagtttccyggggagttcagatttcttggaaacaagctgtctcttttgcgtcattgaagaaagttggaaaaaaattctactgtcttactaacctgcatcactgtgtttcttgcatgccttcctgaagcaggacagtgtttaagttttttttttttttttttttttatctcatgcaggtcataggttttggatctgttgaaattgcagcattcatagctatggtagaaattgtttgttatggctcagatggtctttcttaccatcttgatgagatcattagggaataagaatattgtcttccttggcatgggcttttagagactccagttagctcagtatgcttttggatctgaagc

SEQ ID NO: 11572 - DNA, 374 bp, Homo sapiens
ctggaggggtggagctgagggggattaggaaggattgtaggggttaaagcgcagccctggcagggctcaatgggaacagcttgtccttccatagaccccgggaacaggagaagtggggcagagtagggagatgacagggttgggactggggctcctgggtctctgcagggctgagccacctgagctggcttggagtccccacttgggttagtgaacactttttttccaccatcactgttcctcctctctgcattttaagcagaaggtgaagtctcaggggaggccctcattatacaagtgctgagctgcgccccyctggcctggcattttgttggtgcttacacaagcatggggaggggataattctgaattta

SEQ ID NO: 11573 - DNA, 549 bp, Homo sapiens
ttcaagggatagggacaggagaaggtcagagagtgacctttttgcttctgccattttctcaaatgccaaggtgctatattttgaggtagcatgtcctgaacccatcactttccagatcttgctcaataactgactggcactggtgagagaccattcctctttctttaaggtgggacacactctggggcacaatttgtcttccagtctttcaccaagagatcaaatggaagcaggtctccagctgttaccacattcttgattagctctttttgcttctgatgctttctgcttccctgctcctcttgaacactccctcaataattcctttgaacaagaattctaacctgagtgctttttctatgggatcccacctaaaacaacagcttttttgtgtgttccgacagactcacctaagcacctaagcattaagatatgagcttctttcaacctaaattcagttacagtgatgaaaattttttttccatcaacattttccccttcatytcaatgaaggtaaataatgcttagactacagtgcattaaaagtca

SEQ ID NO: 11574 - DNA, 548 bp, Homo sapiens
tgtcaaactgccctcataaacgatgagaacatttcatgagattgtgtatttcaatgcaataagtagaagataatgcatttatttaataaacccatgtaaaatgttaaaattcatcgttctctgaagtactacaaaatgtttcccaaagatatcataccagtatgctacggcagccaaaagaaagataacagctatagggaataaacacaaatagaatattgggctagacaggctcctgtttgctagagaggcattttacgtattcttactttcttttgccttttgaaaaacacagtatccagtcccattcttaacaccatttatcttcattcttactatacgtgaggggatgaaaatgccttttagtagccaagctgatgtaagtgtggaattcacatcaactgaaatcactgctaggccaagtcatcaaaatcttattgttgaattagaatctagactcagactccaaggagacatgaataatgtgtgtgctggtctttccctaaytagtattaatgaatccctgggaattctctctctctctctct

SEQ ID NO: 11575 - DNA, 529 bp, Homo sapiens
aaccaaagtgccaaaaaacctagcacagtgttaatacaggaataaaaaaatggatcagaggaaccaaacagaaaagccagaaatggatcttaggaaayatgagaatatgatatatgatagatgctaaatgaattcagtataaaaatattaatgtaataaatcatgcttgctattcaagtaaaagaaaatgaggttagattcatgtctcataccaaatataaccataaattataccttgattaaattttttaattaaaaagcaataatatttgaaaagaaatataggatactcaatgtataacctgaaggttgggtagtacttttcaacaaatataggaatttttcacttgaaatactagaagaaaaaaagatagcaaacaaatacaggaattccaatttcaagcagatataatgatttcatgaaatgttaactgtgcacatgatagatggtctatggatagtgcaaaagaaaaagagaaaagaaaaaatgttttttaacatatgcagcaaaaaaggtttttaacatcta

SEQ ID NO: 11576 - DNA, 516 bp, Homo sapiens
ccctaaaacttaaaktataatgaaaaaagaaaaaaaaaagaagaagatgtgagaaatgaaatgttttcttgttcaaatggaggagaagaagagtacagattctaaaaatacagaatggtaaatttaatgcagacttttgtccaaattctggaagagaatattaaattaatttcactactacctaataaagagacattaatcacagtaagactcattgcttgcagaaacagctaaagtctacatttaaatttgcatcttcttctaaaagactatccggagaatgacaagaacataatggaacttgatgtcagtataaaatctgacagcatatcttatattaattttataaagtagtttgtatcatgttgcacatttcacaattgcttgagtgactgagagtagactcagctgcagtggaaaacatgcttaacctgaaagcagaagacatggatctgaatatttttctctagctcctttgatttcagaaatcaattacacaaataaattaaaaatgga

SEQ ID NO: 11577 - DNA, 516 bp, Homo sapiens
ccctaaaacttaaagtataatgaaaaaagaaaaaaaaaagaagaagatgtgagaaatgaaatgttttcttgttcaaatggaggagaagaagagtacagattctaaaaatacagaatggtaaatttaatgcagacttttgtccaaattctggaagagaatattaaattaatttcactactacctaataaagagacattaatcacagtaagactcattgcttgcagaaacagctaaagtctacatttaaatttgcatcttcttctaaaagactatccggagaatgacaagaacataatggaacttgatgtcagtataaaatctgacagcatatcttatattaattttataaagtagtttgtatcatgttgcacatttcacaattgyttgagtgactgagagtagactcagctgcagtggaaaacatgcttaacctgaaagcagaagacatggatctgaatatttttctctagctcctttgatttcagaaatcaattacacaaataaattaaaaatgga

SEQ ID NO: 11578 - DNA, 498 bp, Homo sapiens
gaaaaacatacaggactttgccattttaactcagcaaatatcttgagattaatatatttcctctgaaataaatatatctcagtttaattactatcaattaagcaccaaagatacgtataaatatttcatttgcagtatccctttctaaatggaaccatgctgttttctctgactagatccagtgtctatattaaatcaaaattcgcttaactcaggactaaaaaaaatcaatggatttttttttccaaaaaccatcaaaaatactatttagcattttaaaaacaagttgacttcatttaaaaagaaatttaagtagttttgttgatacggccacagataacaaagctggtatttttaaagcagcgaaacacagctctatattgcattaaatttyatacatactgtgttattttatatattctctttcattctcctaaaaatgtcattcacagagtgagtgattatttggcagttttacatttataattgaccagtaat

SEQ ID NO: 11579 - DNA, 581 bp, Homo sapiens
ggggcctaaggcactcctagaccctgagccttcactgataggaagagcgtccccccattccaaatgggacatggtgcacagatgggcctgctggtgtggtccagcctagtactgacaccatatggtttaaaaccaagtggaaacagagtactgaatgagctaagctcagggcagtgtaaatgataatcaccaaaagggtaactcctatggtaatctgcgccaatagctgggcagtttatcaaagctcatgtatgtaatgggyctgtgtacccaaaagcttagttatgtatcaggcctgcatgcccaaagcttatgtgtcaggtttatatgtcaagcctatgtgtatgtattgggcctgcatgcccaaaattacgtcaggcctgtgtgcaaaacctgtatatcaaacctgtgtgtccaaaccctatgtctccctcagcctagggggtggagtgtaagttacatggacgtgctttggtcaaggaatagaccgaggcagacatccggccacagtgactcagtgagtttagagcgcaggcgtgtaactccacttgttatcacagccatgtagccataacatggga

SEQ ID NO: 11580 - DNA, 581 bp, Homo sapiens
ggggcctaaggcactcctagaccctgagccttcactgataggaagagcgtccccccattccaaatgggacatggtgcacagatgggcctgctggtgtggtccagcctagtactgacaccatatggtttaaaaccaagtggaaacagagtactgaatgagctaagctcagggcagtgtaaatgataatcaccaaaagggtaactcctatggtaatctgcgccaatagctgggcagtttatcaaagctcatgtatgtaatgggcctgtgtacccaaaagcttagttatgtatcaggcctgcaygcccaaagcttatgtgtcaggtttatatgtcaagcctatgtgtatgtattgggcctgcatgcccaaaattacgtcaggcctgtgtgcaaaacctgtatatcaaacctgtgtgtccaaaccctatgtctccctcagcctagggggtggagtgtaagttacatggacgtgctttggtcaaggaatagaccgaggcagacatccggccacagtgactcagtgagtttagagcgcaggcgtgtaactccacttgttatcacagccatgtagccataacatggga

SEQ ID NO: 11581 - DNA, 537 bp, Homo sapiens
aaatgacataatgtgggcccacatgggaactgatttcctacactccatctccatgtcagtcccctgatcttttcaataataaacctgctttctacccgagttactttgaggggatgtgcacacgcgtacgttctggccggaatccaggtgtttttcccatccacacagtacacttttrttacctgttactccctggcccatcctagttctggctggggtcaagactacctcatgaactactggcacaccccctcatctggggtcactgaaaattccctgagcactcagctgtccctaattcagtggccttcatgcagggggtgtggaaagcctccctcacatgttgtggccacatgtgtctctatgtcctctgtgccatcactgagcctgtggccaggccgccttagaggtttcgatctcttgtttgtttcagttctcttgtttgtttcccagtttgagtggtggtgttcagggaacggactcttccatataagtcacggattgcttaagcccaaaacagagacaagactgttggca

SEQ ID NO: 11582 - DNA, 587 bp, Homo sapiens
gtcgcgagcttagcagcataagaataaggaagttttagtctttcttgttaattaaaaaatatcatccttgtgtaattgcataaatacttgtgtggtgcttcactgcttcaaacttgctttttacattcatcaccacagctgattttacaagatactctccctgcgagctcccaaagtgtgagttattgagagctgtgcccagggaaggaggaggaggctgtttggattgtcccctcttactaattaaatcacttaagcatggaatgcttaaaggcagtttcaaaaacattagtctcagragggaatgcctgacttgtcccttgtggtcctccccttggtctactctcctgtgcccttctgctttagaagattgttcctcgccaggcgcggtggctcacacctgtaatcccagcactttgagaggcagaggagggtggatcacccgaggtcaggagttcgagaccagcctggccaacatggtgaaaccccgtctctattaaaaaaataaaataaaataaaacaaataaaataaaaattagccaggtgtggtggtgtgcacctgtaatcccagctactcaggaggccga

SEQ ID NO: 11583 - DNA, 702 bp, Homo sapiens
tgagcccaaatccaaaacaggatggatctattcagaaccatgagcattttttccagggctaagaatgcaggagctttcttatctagggagaaggggcagaagccacagcagcagtggtctctgtctcaagcactctctgctaaaacatgctcaggcctcctaaaatatggctgggccagatcttgcaagaagccaagaattgtctccacktatgcctaatgctgaggttactcagcccttgactcttgtaccattgtggtggctccagagtcagtgcattaattttccaatgctgtgtaacaaatttccaaaaacttagcatcttgtaacaactcatatatcatctcacagttgatatggaagacaaagcatgggtcctttgtccatggtttcaccaagcaataatgaaggtatacactaggctgtatactcatctgcaggcttgactggggaagaattcacttcaaagttcattaaagttattggctgaagtcaattcctttgcagttgtatgaccatggtccccatttttctcctggctgttagctggtgataactctcagctctaagaagctgcatgaaattccttgccattggccttctcatgacatggcaacttacttcttcaaagccagcgagggagagtcttttgctctagtctgcttaagtggacttctacataacatactgagaacacagaaa

SEQ ID NO: 11584 - DNA, 702 bp, Homo sapiens
tgagcccaaatccaaaacaggatggatctattcagaaccatgagcattttttccagggctaagaatgcaggagctttcttatctagggagaaggggcagaagccacagcagcagtggtctctgtctcaagcactctctgctaaaacatgctcaggcctcctaaaatatggctgggccagatcttgcaagaagccaagaattgtctccacttatgcctaatgctraggttactcagcccttgactcttgtaccattgtggtggctccagagtcagtgcattaattttccaatgctgtgtaacaaatttccaaaaacttagcatcttgtaacaactcatatatcatctcacagttgatatggaagacaaagcatgggtcctttgtccatggtttcaccaagcaataatgaaggtatacactaggctgtatactcatctgcaggcttgactggggaagaattcacttcaaagttcattaaagttattggctgaagtcaattcctttgcagttgtatgaccatggtccccatttttctcctggctgttagctggtgataactctcagctctaagaagctgcatgaaattccttgccattggccttctcatgacatggcaacttacttcttcaaagccagcgagggagagtcttttgctctagtctgcttaagtggacttctacataacatactgagaacacagaaa

SEQ ID NO: 11585 - DNA, 702 bp, Homo sapiens
tgagcccaaatccaaaacaggatggatctattcagaaccatgagcattttttccagggctaagaatgcaggagctttcttatctagggagaaggggcagaagccacagcagcagtggtctctgtctcaagcactctctgctaaaacatgctcaggcctcctaaaatatggctgggccagatcttgcaagaagccaagaattgtctccacttatgcctaatgctgaggttactcagcccttgactcttgtaccattgtggtggctccagagtcagtgcattaattttccaatgctgtgtaacaawtttccaaaaacttagcatcttgtaacaactcatatatcatctcacagttgatatggaagacaaagcatgggtcctttgtccatggtttcaccaagcaataatgaaggtatacactaggctgtatactcatctgcaggcttgactggggaagaattcacttcaaagttcattaaagttattggctgaagtcaattcctttgcagttgtatgaccatggtccccatttttctcctggctgttagctggtgataactctcagctctaagaagctgcatgaaattccttgccattggccttctcatgacatggcaacttacttcttcaaagccagcgagggagagtcttttgctctagtctgcttaagtggacttctacataacatactgagaacacagaaa

SEQ ID NO: 11586 - DNA, 702 bp, Homo sapiens
tgagcccaaatccaaaacaggatggatctattcagaaccatgagcattttttccagggctaagaatgcaggagctttcttatctagggagaaggggcagaagccacagcagcagtggtctctgtctcaagcactctctgctaaaacatgctcaggcctcctaaaatatggctgggccagatcttgcaagaagccaagaattgtctccacttatgcctaatgctgaggttactcagcccttgactcttgtaccattgtggtggctccagagtcagtgcattaattttccaatgctgtgtaacaaatttccaaaaacttagcatcttgtaacaactcatatatcatctcacagttsatatggaagacaaagcatgggtcctttgtccatggtttcaccaagcaataatgaaggtatacactaggctgtatactcatctgcaggcttgactggggaagaattcacttcaaagttcattaaagttattggctgaagtcaattcctttgcagttgtatgaccatggtccccatttttctcctggctgttagctggtgataactctcagctctaagaagctgcatgaaattccttgccattggccttctcatgacatggcaacttacttcttcaaagccagcgagggagagtcttttgctctagtctgcttaagtggacttctacataacatactgagaacacagaaa

SEQ ID NO: 11587 - DNA, 702 bp, Homo sapiens
tgagcccaaatccaaaacaggatggatctattcagaaccatgagcattttttccagggctaagaatgcaggagctttcttatctagggagaaggggcagaagccacagcagcagtggtctctgtctcaagcactctctgctaaaacatgctcaggcctcctaaaatatggctgggccagatcttgcaagaagccaagaattgtctccacttatgcctaatgctgaggttactcagcccttgactcttgtaccattgtggtggctccagagtcagtgcattaattttccaatgctgtgtaacaaatttccaaaaacttagcatcttgtaacaactcatatatcatctcacagttgatatggaagacaaagcatgggtcctttgtccatggtttcaccaarcaataatgaaggtatacactaggctgtatactcatctgcaggcttgactggggaagaattcacttcaaagttcattaaagttattggctgaagtcaattcctttgcagttgtatgaccatggtccccatttttctcctggctgttagctggtgataactctcagctctaagaagctgcatgaaattccttgccattggccttctcatgacatggcaacttacttcttcaaagccagcgagggagagtcttttgctctagtctgcttaagtggacttctacataacatactgagaacacagaaa

SEQ ID NO: 11588 - DNA, 544 bp, Homo sapiens
tgatccctttttctttatctaaactttgagaattgttattgtttcttccttgaatgtagaaataatcagtggagccaggtacgtctgaaatttttattgtgygaatattttaactatgaatgcaattttaaaaatagatacagagctactcagagcttcgataatttggatattccaagaaatatgtccactttatctaagttaccacacttaccgtaatgaggtgtttataatactttaaaaatcatctttttaatagttgtaggatttgtagtgatgtccctttttaattcctgataataatgaactaattttattactgctttttaaaaagtggattttagttttatttctgattgttattctatttcattgatttctgctgtcatgtttattatttgcaaatatttgaagatttttcagattttcatgttactcatttctaatttaatataattgttgtcagaagaattgtggatgatttcagtccttttttattgagaatttttctatggtttatgatatagtctattttggtaaatag

SEQ ID NO: 11589 - DNA, 567 bp, Homo sapiens
tttttttttttttgagatggagtttcgcttttgttgcccaggctggagtgcaatggcgcaatctcagctcaccgcaacatctgcctgcctcccaggttcaagtgattctcctgcctcagcctcccaagtagctgggattaaaggcatgcgccaccacacccacctagttttgtatttttagtacagacggggtttctccatgttggtcaggctggtcttgaactcccgacctcaggtgatccgcatgccttggcttcccaaagggttgggattacaggcatgagccaccatgtccagctgatttctttttcttttttctttttttagagatggggtcttgctctgtcacccaagctacagtgcagtggtgcaattatagctcactgtaaccttgaacttctgggctcaagtgatcctcccaccttagcctcccgagtaagctgggactgaaggttaattttttgatgttggttttactttctctgcccaatctgaaaatctctgccttttatttgggaacacattcaattaaacycaattagattttacttgctaaaaagagtccaa

SEQ ID NO: 11590 - DNA, 680 bp, Homo sapiens
gttagtctttgtgttttgtgatcttgacacttttgaaacgcactggtcagatattacgtaaaacataacgttgttttgggtttacctgatattttcccatgatttgattgaggttatgcatttttggtaagaatagcacagacacagtgtgcccttcccagtgaatctatcaggaaaaacaggctgttgatatgtcttattactggtgatgttcaattgttatggttattccattttggattcaacccatttcctgttgattttctctaacagacatatggtaaaaaatattactgtttgtgatggacagttctgtggtttttggtaaatctgtagagtcgtgtttccatcatcaaagtcrtaatttgcaacattttcatcatcaccatctctcattctgcctctttgcagtcggcccctctccacatccaacctttttgccagccacgaatttgctttcagtttctgttgttttgccttagaagatgcatttaagattcatccatgtttttgtgcgaatcaagtttgtcccattttattgccaaacagtttccattatatagatgtcacatggtttgtttattcattcacaagttgaagaatggctgctcttgttcatttttaataaagctgctataaacatttgcatacaggtttatgtccaggcttatatccttctc

SEQ ID NO: 11591 - DNA, 519 bp, Homo sapiens
atgactctagatattggattatatcatttaggcataaaactttctgataaatatgcactgggaaatgatttcacatctaacttttctttcagggaaagtggaaaagttaaagggtttggacaaaaccacatataacaatgtacttagtgtaaaaatattttttaaataataaatgtgcatttaaaacattgtgaaaatttggtttctgtaacactatgaatcctaaaaggcaatacaaagtattgttaatcaactgttggattaatgtttattataaccaaaaatttttatttagaattktcaaaattattataaagtagaattgcatattttatatgctgcaatactttggggcccctcatcattaatgtgtggactaataggaacatagttttaatataagcttaactccattctttgcttcactgagggtctaaagtacaagttctttctgctttcaaggaaagggagatttagaaagtttgtttcgtgtgataattaagggcatgagccctggag

SEQ ID NO: 11592 - DNA, 525 bp, Homo sapiens
agaaagcttgtttttataattctaaactctttcagacatcagttgtgtatctaatcttttgtttacaggacctactcaatctaaatcagaaaaagaacaggctgaagctacaaataagataaaaagaagtagaaatgactgtcttgtatttataaaatggcgatcatgagatttcatgttaatgactgactaccgagacatgctatttggctctatgtgtctgtttcccacagaaaggatgtcaggcctggtgttgatgggcaagctgtccagaacatgggtaccacacgtgcagcacgggctcgggcctcagagtcaggcacgctggagcactcattgcagctcaggtgccacccacagggcgagctcacacatgctcmctctggtgagtgctgatagcagaaaggatgcctaggctctccttctatatgaagaaattaaatacattatttaggactaattttaaattagctaggtctcttttttaaatgaaaaaaaaaaaactgggagaaggatgatttgaca

SEQ ID NO: 11593 - DNA, 627 bp, Homo sapiens
tgcattcattattttatttgttcttcgtaatacccctggtgaagtatgcaaggcaagaattattcacattttacagctggggaagctgaagcttgaagaataatttgtctaacatcacgctggtaataagtgataatgccagatcttgaatataaattctgaagtcctgccgatgtgagacgtgagtttgatccttatggttaatagtttgcttatatatgcctccaatgtatatttttaagcttaaaacattaactggttaattaaaggtgttatgatcgatactacagcacagactgtttaaacactgtgcttctcaaactttaatgtgcatacaagccagtgatgatcttgttaaaatgcaggttctgatttrcgaggtctcaaggctctgctgtgtaaagctcccaggcgaggctgcaggtctgcagaccgaagcatttgaaattgcaaggatttagcagatttttgccaaataaacaatgacttataatgtgagggggagtaaagtgtgatttaaaatgtcctggactagggatcaggttatgttggctctaatcttaagaaaacacttgcagatgctagaacttggagtgacgttagcagttttctaacccaagtttttca

SEQ ID NO: 11594 - DNA, 627 bp, Homo sapiens
tgcattcattattttatttgttcttcgtaatacccctggtgaagtatgcaaggcaagaattattcacattttacagctggggaagctgaagcttgaagaataatttgtctaacatcacgctggtaataagtgataatgccagatcttgaatataaattctgaagtcctgccgatgtgagacgtgagtttgatccttatggttaatagtttgcttatatatgcctccaatgtatatttttaagcttaaaacattaactggttaattaaaggtgttatgatcgatactacagcacagactgtttaaacactgtgcttctcaaactttaatgtgcatacaagccagtgatgatcttgttaaaatgcaggttctgatttacgaggtctcaaggctctgctgtgtaaagctcccaggcgaggctgcaggtctgcagacmgaagcatttgaaattgcaaggatttagcagatttttgccaaataaacaatgacttataatgtgagggggagtaaagtgtgatttaaaatgtcctggactagggatcaggttatgttggctctaatcttaagaaaacacttgcagatgctagaacttggagtgacgttagcagttttctaacccaagtttttca

SEQ ID NO: 11595 - DNA, 627 bp, Homo sapiens
tgcattcattattttatttgttcttcgtaatacccctggtgaagtatgcaaggcaagaattattcacattttacagctggggaagctgaagcttgaagaataatttgtctaacatcacgctggtaataagtgataatgccagatcttgaatataaattctgaagtcctgccgatgtgagacgtgagtttgatccttatggttaatagtttgcttatatatgcctccaatgtatatttttaagcttaaaacattaactggttaattaaaggtgttatgatcgatactacagcacagactgtttaaacactgtgcttctcaaactttaatgtgcatacaagccagtgatgatcttgttaaaatgcaggttctgatttacgaggtctcaaggctctgctgtgtaaagctcccaggcgaggctgcaggtctgcagaccgaagcatttgaaattgcaaggatttagcagatttttgccaaataaacaatgacttataatgtgagggggagtaaagtgtgatttaaaatgtcctggactagggatcaggttatgttggctctaatcttaagaaaacacttgcagatgctagaacttggagtgacgttagcrgttttctaacccaagtttttca

SEQ ID NO: 11596 - DNA, 592 bp, Homo sapiens
gagtgtctgaacatttaaatgtaaggttgctgctggtgattctggggcagctcattggttgagatgttactgcttccagcgcagttcgtgtgatgtatgtaccttttgggccttgctggctgggggtattgagacgctctgtagtgaaccagtatgttctgctccacgcagattgcaggactttttgccctcacagacggttaggccacctactctctatgagggcagagcctcctttcttaagggtaaaacggaaattgcatttactttggagagacggctttgaccttcctcttccactttagtcagtgatttttacgacatatgcagctttccagagcctccttacttttctaatatttagaaagaaccaggaaaccgattagaggtaatcttggcaaattgggaatttgtgaagtggaaaagaacactattaaagtgatggctgtaaatagaaaaataaatggagcatttttagaacagcagtttaacagagctgtggtttccagtagtttcacacragagggtgttcagaaccatcgtgatacaggtagtgttggccggcctctttcttctcctctcaataatcttt

SEQ ID NO: 11597 - DNA, 529 bp, Homo sapiens
tagccataaactttcctaagagctatgttctatgttctatgaaacctttcagattggggaataagttagactccgttagtaaaatggaatgagccccacttagaaataacatgatcatatagtggtctcatcagcaagctttgtggttgcactatggcttcctggctgagtaaaatttggcagtggctgtgactaggaaggttgtggggagtagggacaaaaatgaaggccaacttgtcataaattcaggaatacctggaggcaccattccctgtggaaagcggaacctcagcttccataggcttttgcatgatgtagaatcataaaagggcgtggccctttgaaatctggaagtttgtagctcatcctaagctctggaaaccacaattccatgtgattctcagagaaagtaggtaaaggtgggaggcaaacattaatcagtgctgtttaaagtaaactttccctcgagaaatcttaaaaacagattattccttcyttatttggaaaacttttctaaaccttcacatca

SEQ ID NO: 11598 - DNA, 574 bp, Homo sapiens
taaattagcctgtctcaaaaaaaaaatttctttatgctccaaatctaaccaacttcaagtctatgagtctagacaatttctaggggacagcatcatatctgaaaggacataaaaatggctacagtatcaaattgtttcatgaaacataagaaaagcaagttctaataaaatcaggtaattttcccaacactataaaaaccatccaggaatgttctaagatccttttttatgaaaggaaactttaaagcatatcagaattcaccctagataggccaagctataacttagcaaaaaaacaaacaaacaaacaarcaagcaaaaaaaacccaaagtaaaaatataaacaaaatcacaaaatgtgctcagttctagaagaagtcaaataagactataagactatataaaggatatacttgggccattctgtgaaggtgctccctttcaaatcgtctctgcttcaaagagaaaaccattctgatcagagaaaagaatcaagagtgagcggagagcccaacacggcactaacagccagagattcccagccaaagatgtgatggtagccttgatgtggcca

SEQ ID NO: 11599 - DNA, 387 bp, Homo sapiens
caaccttccaagtgtgaagtgacagccttgtgtgtgatcttttctgtcttccccaagtttgcattttcaatattaaagtttactttttaattaaaagttaaaaataaatwaattaattaattaattaaaaataaataaaaaatgggcaatggacctgaacagtcatttctccaaaaatagaggccaggtgtggtagctcacacttgtaatcccagcactttgggaggctgaggcaggaggatcacttgagcccagaagtttgagaaaagccttggcaacataacaaggcccctgtctctacaaaaaagttttaaaaatattagctgagtgtggtgccatgcacctgtaatcccagctacttgtgaggctgaggcaggaggatcatgc

SEQ ID NO: 11600 - DNA, 542 bp, Homo sapiens
ggtgcctctgacacctgaggctctcctccaggttgcacatatgtccacctgtgctcatcttgaattacaagattatcctccctgccctgtcaggacaatatccactgcctgagggagtgggacatagctggccccatcacaactgaagcacttagtgtcagtcctcatttaaaagtaagacaaaagataagcaaggtgagygcgtgaaggcatgccatgattgttcacctgctgaagtctgagacctagactatgagtgtggagatcaccctggtggtctttgcaaaagttagacttttaagaaaggcagaataacacagtagataagaagaaaggttctgaagctggacagctggctggataaaaagctgtacgagttttggttgtgctatttagattcaaatcttagctaagttacttattagtgtaaatttttaacttctctgtgcctcagttcttgtctgtaaaatgataacaacatctacttctaaaacatgcccagcacatcgtaagaagggttagctctcactactataaggaag

SEQ ID NO: 11601 - DNA, 537 bp, Homo sapiens
ctccagaacagtgagccaaaaaatatatatatttatttcaaattacccagcctgtggtattttgtcataacaaaacaaaatgaactaggaaacatcttaatattataatacccatgggcgaaatggaagaggattacttaatgtacaagctctttctccagatgaaatctccagactgaaatccagattatttcagagggccacactttgaattatgaaggcatttaaaataatatataattttcatgtgattcaaactttacaagagctttgaataagtaggaaacacacacacacayatatatatataaatatatttttaattaagcaacatttagttagcaaatgggttggatacagtgatagcaaattctgcaaagatacaagttaaaaaagaagcctccataatagatgtaggaatcctaaataaaatattgccaaatgaattaatctccctagatgatgtacaacaaacaaagatactttaatctcaagcaaaagagaactctattagtgtaatttatcattttaatatgc

SEQ ID NO: 11602 - DNA, 537 bp, Homo sapiens
ctccagaacagtgagccaaaaaatatatatatttatttcaaattacccagcctgtggtattttgtcataacaaaacaaaatgaactaggaaacatcttaatattataatacccatgggcgaaatggaagaggattacttaatgtacaagctctttctccagatgaaatctccagactgaaatccagattatttcagagggccacactttgaattatgaaggcatttaaaataatatataattttcatgtgattcaaactttacaagagctttgaataagtaggaaacacacacacacatatatatatataaatatatttttaattaagcaacatttagttagcaaatgggttggmtacagtgatagcaaattctgcaaagatacaagttaaaaaagaagcctccataatagatgtaggaatcctaaataaaatattgccaaatgaattaatctccctagatgatgtacaacaaacaaagatactttaatctcaagcaaaagagaactctattagtgtaatttatcattttaatatgc

SEQ ID NO: 11603 - DNA, 504 bp, Homo sapiens
atccacccacctcagcctcctaaagtgctaggattacaggcgtgagccactgcgcccagctaacacaactattttagagtgactttatctgccccagaccacagactctgttgtatcaaatagtgccgctggaagagaaggagtaggagcagaaaccctgctgacctctgagggcccctgtgtggcagtatcacttttttgtttcatgttgttttgggggaacccaagaacactgaaaaacctttttcaaagtgctgccaaataatgaatcgagcaggtacaccaaaatctgttgaaagttaaagaaaaatcaaagaaccctaaatacatttgaatttttacatttccctcacctggagtgaggtgctgaagctccagcctgggtcccgtttggtgacasacgtgaacacaaacatggaccctctctttgcccgggagcaagatagtcaggccaataggatgggatcttccattcagggtcatcaaagaaggctgagtgctgtc

SEQ ID NO: 11604 - DNA, 578 bp, Homo sapiens
gacaaccaaatggacactamaccatcttaactgaactttgaacacagtatatgtttcttcatcaaccctctgtcccatcctccccctcacctatttcacacttttttcgcttttctcaagtttccacccttcctctcaatacacctttcactgagcctccatagatttccccttctaattagcagatgtaaggcgagcatcagccttcctacaaacatgctcttaaaagcttaatttccctagacttttaggagaaggaaggttttgcctctcaggcttctggaagttgtttttcatgcattgcctgagtctcctcttctttccaaactccatcaaggaaaagcctcccttactgctggctgcctccctgaatacctgggtacagcctcttcaaagtcccgcctgggtttcagcagaggggtggatgtaaggcaggccacactttttttttaaacttcatacagttattccttgcaatggtatcaggtaaagctatcctgatgtattagatttttctgaagagttggtggtagatactctattatatgagggaaattaaaaatgcaaataaaataaaa

SEQ ID NO: 11605 - DNA, 578 bp, Homo sapiens
gacaaccaaatggacactacaccatcttaactgaactttgaacacagtatatgtttcttcatcaaccctctgtcccatcctccccctcacctatttcacacttttttcgcttttctcaagtttccacccttcctctcaatacacctttcactgagcctccatagatttccccttctaattagcagatgtaaggcgagcatcagccttcctacaaacatgctcttaaaagcttaatttccctagacttttaggagaaggaaggttttgcctctcaggcttctggaagttgtttttcatgcattgcctgagtctcctcttctttccaaactccatcaaggaaaagcctcccttactgctggctgcctccctgaatacctgggtacagcctcttcaaagtcccgcctgggtttcagcagaggggtggatgtaaggcaggccacactttttttttaaacttcatacakttattccttgcaatggtatcaggtaaagctatcctgatgtattagatttttctgaagagttggtggtagatactctattatatgagggaaattaaaaatgcaaataaaataaaa

SEQ ID NO: 11606 - DNA, 526 bp, Homo sapiens
atggatagagaaattttttctcaggagaagtcattcagagcagatgtggacaggaagggtcgtacaaggttcatatacatgctgagccctggggggtggggaatgaatgagggaccccacaggatgccttcttttgtgatgtggtcctaccctgtgagtgtattagttgggaaaaactaagtttattgtcatggcaaacaacccccaaatctcagtggctttaaaaataaagcgttattggccaggcagggtggctcaggcctgtaatcccagcactttgggaggccaaggagggcagatcacgaggtcaggaggtcgagaccatcctggctaacatggtgaaaccccgcctttactaaaaatacaaaaaattagccaggtgtggtggtgggtgcctgtagtcccagctactggggaggctgaggcaggagaatggcatgaaccccagaggcagagcttgcagtgagccaagatcacaccactgcactccagcctgggtgacagascaagactccatctcaaaaaa

SEQ ID NO: 11607 - DNA, 596 bp, Homo sapiens
gtccgacctgagagcctccttcttacctaaaaataatctgcttaggcctcaaaatgctgtataaatatttgctgggaaagtacaatgaagattttcatttcaggaatataaaaaaccattttgtactcacactaaatagaaagactttttaaaccccatactaccttcccacaaataaatatccatataaatgaacacaaacacacagcactatacactctttcttyatcttcctttattgttctgcccctgagtcaggtcaaaccaacctccttggaaccaggtcccttttcatacttctttcagttgctaattagatgctaaggccaggcatggtggctcacacctgtaatcctagcactttgggaggctgaggtgggaagacagcttgagcccaggcgctcgataccagactgggcaacatggtgaaaccctgtctatccaaaatacaaaaattacccaggcatggaggtacgtgcctgtaatgccagccacttgggaggctgaggtgggaagatggtggatggcttgagcctgggagggagaggttgcaatgagctgtgtttgcgccactgctctccagcctgagtgacaga

SEQ ID NO: 11608 - DNA, 596 bp, Homo sapiens
gtccgacctgagagcctccttcttacctaaaaataatctgcttaggcctcaaaatgctgtataaatatttgctgggaaagtacaatgaagattttcatttcaggaatataaaaaaccattttgtactcacactaaatagaaagactttttaaaccccatactaccttcccacaaataaatatccatataaatgaacacaaacacacagcactatacactctttcttcatcttcctttattgttctgcccctgagtcaggtcaaaccaacctccttggaaccaggtcccttttcatacttctttcagttgctaattagatgctaaggccaggcatggtggctcacacytgtaatcctagcactttgggaggctgaggtgggaagacagcttgagcccaggcgctcgataccagactgggcaacatggtgaaaccctgtctatccaaaatacaaaaattacccaggcatggaggtacgtgcctgtaatgccagccacttgggaggctgaggtgggaagatggtggatggcttgagcctgggagggagaggttgcaatgagctgtgtttgcgccactgctctccagcctgagtgacaga

SEQ ID NO: 11609 - DNA, 522 bp, Homo sapiens
tgaggttggggcagctttttgggcataaggcagccattctagaagacagaaagcttccaaggttaggataaacttgaatgaagtagcaagatgctcaggtcagttagtgcacgtgtaaaacaaattgaaagacttataggaagaccagatgaactaaattaaagggaaaataaaagcaaaaatgccttatggacttaaaaaacaataacaaagttgagtttaaaaataaatcaaaggtatcatttttttctartgttttaaactatagtattgcttttaactgtagaataattcagtaagtgtttaaaagttaatctcattattttaaaagttactgcattcaataaaaattgtcttttacaattttcaattattttgaaatcaagaagcaactttttgttatacttggcctggtcccaactgagaaaatacagattatgtgacatgcaggtctctaagcgtcaatagcataagaacagaaaagtagaaaaacgaagggcagggaggagaaagcacaatgaa

SEQ ID NO: 11610 - DNA, 554 bp, Homo sapiens
gtgatgtggttctaagtcatgtactatgtaaaactctctttttaaccctcataataatttcaacccccaaatttaaatggggctaacaaaagcctatataatcttccctttagagcatttttakcctttagtgatttttttcggacccacagttaagattagacattctcttttatagtcagatattctcccttcacagatatgatcatagaggataaagatcataaggccatgcccaacatgatatactctatactcaactcgtttgttcagtttctgaagtattacgcttagaacttatctaagtattttattgcatggcacacagtaggcactaaataagtgcttactgaaccaagggaaagaaagagcaaataaaccaataagtaaatgctttgctgaccctctataccaggttacttttcttgatgtgataaccacagccaccattttctaataacactgttaagcgaaatggaaagagaggatgttgggtttcaccccaaaccccaatgaactaggctagtctacctagaaaacaattccaggcaagg

SEQ ID NO: 11611 - DNA, 545 bp, Homo sapiens
taaggaagtcattaaaagctttataggaaaagtcttaacaaattataaacatatataacattgcaaaactgtctaaaagggaatgaaagctttccccactgtgtaaaggttgatctctgaggagtacacttaacctggaggtgatgagttgattacagagatttattagcacagcgggggaatatgtaggggccatctcagaactgtgttgacaaaggcacaaactagcaagaatacagagagacttcttggaagggagggatggtgtcagggagtaaggacagagaggggaatgaggtgggtgacagagtggcaacatgtttttgttggacataggtcattacatagtatggtgggaagaataacgaagacttcacctcccaatccctgggatctgtgaatgtgtcaccttacatggcaaaaggaactctgaagattaaatcaaggattkgaagatagggaacttatcctgaattgtctgggtgtgtgccatgtaatcataaggctccttattggggaaagatggaggcaggaccaggagaaag

SEQ ID NO: 11612 - DNA, 527 bp, Homo sapiens
tttgcttcctttaccaccttcttggttttcaggacaaaataaatggtggccagatgcagtggcttaggcctgtaatcctagcactttgggaggccaaggtggaagaactgcttgagtccaggagttcaagaccagcctggacaacacggtgaaaccgtgtctctacaaaaaacacaaaaacattagccaggcatagtggcatgtgcctgaagtctcagctacccgggaggctgaggaggaaggatcacctgagacctggaggttaagacttacattgagccaygatcacaccagccctccagcctgggtgcaaagtaagacctcatctcaaaaatataaatttaataaataaatgcatggcattctttttatgctctgctgatataggaacaacagttgtttagggcatattgaatatgaagtgcccatggaatgtcaactataagtatgatatagttggaaataccagtgtggagcccagaagaaagatctggctatagatatacaatggtaattcattcccatac

SEQ ID NO: 11613 - DNA, 888 bp, Homo sapiens
tgagtagctgggactacacacatgcaccactatgcgcagctaatttttttttatttttatttttttgggacagagtctcactctgtcacccaggctagagtgcagtggcaccaacacggctcaatggcaacctcaatctcctaggctcgagtgaccctcctacctcagcctcctgagtagctgggactacaggcacacaccaccacacaattttgtttttttagtagagacggggtcttgctatgttgcccaggctggtctcaaactcctgaactcaagcgatcctcccactgtggccttccaaagtgctggagatataggtgtgagccacggcacccagtcagaaccacagctcttgacagctctgaccttgtgtgtgttcagccttgtcacctatgagaataggactgtgtttgagttgctccctcagtcccttaccctggtgccaaactgcagtttgraaaatcctggagagggattccaggcctggggagaagtaacaaaatgggaagttcccaccagaaatacattgttagaatgggagtgggaaggccatcctcaaaagccagggttaacaagagaaggaaagggggtaagtgcttgggagacaaaaacaatagatgtctgatgtaaatgggcagtggaatccagtactggtttgctaataacagcactcttaattccttttgtttttaaaatgctttcatgtacatcatctcattggatccttctgacagccctgtggttatgtagttagagtcagaacaacagggctgagtctgttctaatgttaggcagtgcttatgtgagctgcaaggtagctgagccttctcaggacatggcacccaaggtgcttgctgaggcgtgggtgggtagactatctgtgca

SEQ ID NO: 11614 - DNA, 888 bp, Homo sapiens
tgagtagctgggactacacacatgcaccactatgcgcagctaatttttttttatttttatttttttgggacagagtctcactctgtcacccaggctagagtgcagtggcaccaacacggctcaatggcaacctcaatctcctaggctcgagtgaccctcctacctcagcctcctgagtagctgggactacaggcacacaccaccacacaattttgtttttttagtagagacggggtcttgctatgttgcccaggctggtctcaaactcctgaactcaagcgatcctcccactgtggccttccaaagtgctggagatataggtgtgagccacggcacccagtcagaaccacagctcttgacagctctgaccttgtgtgtgttcagccttgtcacctatgagaataggactgtgtttgagttgctccctcagtcccttaccctggtgccaaactgcagtttgaaaaatcctggagagggattccaggcctggsgagaagtaacaaaatgggaagttcccaccagaaatacattgttagaatgggagtgggaaggccatcctcaaaagccagggttaacaagagaaggaaagggggtaagtgcttgggagacaaaaacaatagatgtctgatgtaaatgggcagtggaatccagtactggtttgctaataacagcactcttaattccttttgtttttaaaatgctttcatgtacatcatctcattggatccttctgacagccctgtggttatgtagttagagtcagaacaacagggctgagtctgttctaatgttaggcagtgcttatgtgagctgcaaggtagctgagccttctcaggacatggcacccaaggtgcttgctgaggcgtgggtgggtagactatctgtgca

SEQ ID NO: 11615 - DNA, 888 bp, Homo sapiens
tgagtagctgggactacacacatgcaccactatgcgcagctaatttttttttatttttatttttttgggacagagtctcactctgtcacccaggctagagtgcagtggcaccaacacggctcaatggcaacctcaatctcctaggctcgagtgaccctcctacctcagcctcctgagtagctgggactacaggcacacaccaccacacaattttgtttttttagtagagacggggtcttgctatgttgcccaggctggtctcaaactcctgaactcaagcgatcctcccactgtggccttccaaagtgctggagatataggtgtgagccacggcacccagtcagaaccacagctcttgacagctctgaccttgtgtgtgttcagccttgtcacctatgagaataggactgtgtttgagttgctccctcagtcccttaccctggtgccaaactgcagtttgaaaaatcctggagagggattccaggcctggggagaagtaacaaaatgggaagttcccaccagaaatacattgttagaatgggagtgggaaggccatcctcaaaagccagggttaacaagagaaggaaagggggtaagtgcttgggagacaaaaacaatagatgtctgatgtaaatgggcagtggaatccagtactggtttgctaataacagcactcttaattccttttgtttttaaaatgctttcatgtacatcatctcattggatccttctgacagccctgtggttakgtagttagagtcagaacaacagggctgagtctgttctaatgttaggcagtgcttatgtgagctgcaaggtagctgagccttctcaggacatggcacccaaggtgcttgctgaggcgtgggtgggtagactatctgtgca

SEQ ID NO: 11616 - DNA, 546 bp, Homo sapiens
tcccaaatcaacattaccaacctgggtctttgactcaagctctagaacatactcccagtggcctaaaaaaatctccacttgaggctgggcacagtggctcacgcctgtaatcccagcactttgggaggccgaggygggtggatcacgaggtcaggggttcaagaccatcctggtgaagatggtgaaaccacgtctctactaaaactacaaaaattagccgggcatgttggcaggtgcctataatcccacctacttgggaggctgaggcaggataattgcttgaacatgggtggcagagattgcagtgagccaagatcacgccactgcactccagcctggtcgacagagtgagactccgtctcaaaaaaaaaatctccacttgaatatctaactgcaaaatcaacttctctaaaatctaatgcatcatacgtaagtaattctctttccctttccttcctcatttctgtttttggttctaccactttctgagtaaagccggagatctttgatccaccataagtctgccagtaagacctacattttctt

SEQ ID NO: 11617 - DNA, 546 bp, Homo sapiens
tcccaaatcaacattaccaacctgggtctttgactcaagctctagaacatactcccagtggcctaaaaaaatctccacttgaggctgggcacagtggctcacgcctgtaatcccagcactttgggaggccgaggtgggtggatcacgaggtcaggggttcaagaccatcctggtgaagatggtgaaaccacgtctctactaaaactacaaaaattagccgggcatgttggcaggtgcctataatcccacctacttgggaggctgaggcaggataattgcttgaacatgggyggcagagattgcagtgagccaagatcacgccactgcactccagcctggtcgacagagtgagactccgtctcaaaaaaaaaatctccacttgaatatctaactgcaaaatcaacttctctaaaatctaatgcatcatacgtaagtaattctctttccctttccttcctcatttctgtttttggttctaccactttctgagtaaagccggagatctttgatccaccataagtctgccagtaagacctacattttctt

SEQ ID NO: 11618 - DNA, 570 bp, Homo sapiens
cccagttaacagagaggagagggtgctccaggccggtggcagtggggccatgtttggtcagggtggtactgggggtggaaggacaagaagctggagcactctaagtcactccacttcatgggatgagggagagggggagaacacaggtcttgggactycttcaaaggccagaggcttggagctggcacaaggagtccttgtgcagaaaagaacagaaggtggttttgctgccctacatccatccccggaaccttctcagaggtgagtagtcattactctcaagtgatgagattagaggcagtttggtgccagtgacagaaggacaggaggaaagacagagctctgggctgggagggaggagcctgactcaagccttggctcaactgatcccaggccgtgaagcctgggcagaccttcccgtgcctgctcagggtcctatctctagtctgtataaaaaacagccagggcaggctgtcctcaaaggtgcccactagctcaaaagttctggaattgtattaataagaggatgctccttgctgtgcacgacagtgctgacatgggacttaccat

SEQ ID NO: 11619 - DNA, 578 bp, Homo sapiens
ttgtggtttgtttagacaagaggatyaaaggagaagtctaaatgaaatggcaaatggggattatgttactgcttctacatatcatatctcagagatggctgaaataggtcaaaatattgatttttgtgtggttaaaaattacaaaattaaaacaatgtaacaaggccaaatgtatgtatagtcaccatctctttcctggcccaactctctgaaaaatttgggttggcctgtttgacactgcatgctatctcccttcccacccccagtccttccatcttatttttcagttgagagtaaattagtatgaaagaataggaggataaatgatgggtaattggccttggaaaggctcatttttttctcataagaaatgaaaaagaatataggcagcagaaaagggaaattaaaaggaaagaacggggctgaataccctgggtgccagggcttagggaggccgagggtggggaattccttgaggccagcagttcaagagtaacctgggcaacatagtgagatccatctctaaaataaaaaataaaaaataatactggcatgatggcacatgactgaagtcttag

SEQ ID NO: 11620 - DNA, 550 bp, Homo sapiens
aaatcactcttagaaattgtattgactcgtagagttcactggaaaaaaaaaatgatagaatagcacgtgaactgaatcatggcattttcataaatattatttgtaattctgtagttgaagttcaaagttgtatgagttcaaacttcaaattaggagttaaaaaccttcagctgtctccaaactaatatcagtgtaaatacaggcgagccatttgtcaattctgtgtgtatacgtttaagtcatctcsaagagcaggcgctccatttttccttctcttgggaaatgggaagtatctatcattaactttccagccaacaggagctttgtagtcatactgtggggctaatccgaagggtttaaacgcacagcagtgtctggtaagtcacagcagagctgaggtcaggttaaatggctttaattaagaataataataaaaaaagaaagactgtttgacacataggtcaatatttttccttcaaactgatgtagccatgctgggaaaaaaatcattgcatattcatcaaaaagaagcaaaaagtatgaggactca

SEQ ID NO: 11621 - DNA, 550 bp, Homo sapiens
aaatcactcttagaaattgtattgactcgtagagttcactggaaaaaaaaaatgatagaatagcacgtgaactgaatcatggcattttcataaatattatttgtaattctgtagttgaagttcaaagttgtatgagttcaaacttcaaattaggagttaaaaaccttcagctgtctccaaactaatatcagtgtaaatacaggcgagccatttgtcaattctgtgtgtatacgtttaagtcatctcgaagagcaggcgctccatttttccttctcttgggaaatgggaagtatctatcattaactttccagccaacaggagctttgtagtcayactgtggggctaatccgaagggtttaaacgcacagcagtgtctggtaagtcacagcagagctgaggtcaggttaaatggctttaattaagaataataataaaaaaagaaagactgtttgacacataggtcaatatttttccttcaaactgatgtagccatgctgggaaaaaaatcattgcatattcatcaaaaagaagcaaaaagtatgaggactca

SEQ ID NO: 11622 - DNA, 581 bp, Homo sapiens
aatgtctataatgtggttctatagctatgtaaaatttgctaatttatataattcattatatgtaacacaccacatgcacacacacacaaacacacacacacgaatgaatttaagcttacttaaatccagggctatcaagtgaagacagaattatgtgtatctgaagtagtgatttgaaggttcagatctgggttgctaaattcatacatgactactccaacaaaatctcacataataattgcatttttaaataatttgaggaacaaagagtgttcatgtcactattgaacatcgatttatcatttttcctcttttaaactaaattctggttcttatatcagcagtttaaacccattccttgctgttctagcatctgtagagaatagttgtttttctcctctgtctactacccactgtactgctggaaggcaattatatttatgcactggctgccttctttttttatttgaaatgtttgyagagtctgtagcctttcttcctaagcctagtaaccaaactctttattttggatggtaatagcattacaaacagatgtcttacaagcataattgaaaacagca

SEQ ID NO: 11623 - DNA, 796 bp, Homo sapiens
caggaaagcagtcccaagtactaagagtttcttacaggggcgggcttatggtgccgtggggccaggactccagctccacttctctgcaatgactctcagctgcaccctctgagttttgggttgcagtacaatgacacggaagtcccaggagccaaatccagacaggatgaaggcccaggggaagaacaaaaacgtctttttctcattctctgaagcaagaaaaacattcccagaattcccccagagcattggccagaattgcattacatgacagatactaaaccagtcactgacaaagggagggagataactctgattggcttgaatcgatcaaagtttcctcttagaactggggataaggagtagcttgggagcaggtgactttctgaaagtgatctgggttctgttagaaggaagaatgaacagaaagacattgtgctgcaggtgaacagctgagcacattatgcacagagatatttcattttttagataattagaatagggagaggacattctacacagggcaaaagtgaagctgcctcttttgaggagaaatggttaatttagctgaagcatgaaagcaagagggggaatcactgcagaagaagatattctggacaacaatacaattatgatatcagagaactcttaatttctcaaaaacacttcactgactctcacatcaactagaacagcaagtatcaacagagaaatctgaagtccagagcaggtgagtmaatcttccaaggtcacacagcctgtaaacaacaaggtctggtgactcttgcctgggatc

SEQ ID NO: 11624 - DNA, 545 bp, Homo sapiens
aatacaaaaattacccgagagtggtggcgcgcgcctgtgttcccagctactcgggaggctgaggcaggagaatcgcttgaacccgggaggcagaggttgcagtgagctgagatggtgccactgcactccagcctgggcgacagagcgagactccgtctcaaaaaaaaaccaagtgatatgtgtcagagttttgtttttagttagtgtccatttactacatcacttcaggagacgaattattggttaagtacatttaggaartggagttgtggcttttatttgacattaatgagatatttacttgagtatataatttttacatcttatttcagaataagaagtaaaatacgggtgtcacaaatccaactacagttaaaacttgataaccaagcaaacttggttttcttaatgcttaattttagagattacaaaatactgtttttaatgtcaccatttcagggtaatagatttgtcacttgtatgaagaaggcttactagtgaaactggcttggggtcttaataatcttaattctgaaacatcttct

SEQ ID NO: 11625 - DNA, 545 bp, Homo sapiens
aatacaaaaattacccgagagtggtggcgcgcgcctgtgttcccagctactcgggaggctgaggcaggagaatcgcttgaacccgggaggcagaggttgcagtgagctgagatggtgccactgcactccagcctgggcgacagagcgagactccgtctcaaaaaaaaaccaagtgatatgtgtcagagttttgtttttagttagtgtccatttactacatcacttcaggagacgaattattggttaagtacatttaggaaatggagttgtggcttttatttgacattaatgagatatttacttgagtatataatttttacatcttatttcagaataagaagtaaaatacgggtgtcacaaatccaactacagttaaaacttgataaccaagcaaacttggttttcttaatgcttaattttagagaytacaaaatactgtttttaatgtcaccatttcagggtaatagatttgtcacttgtatgaagaaggcttactagtgaaactggcttggggtcttaataatcttaattctgaaacatcttct

SEQ ID NO: 11626 - DNA, 491 bp, Homo sapiens
atttgggtttgctttggtgagaatcgacaccaacagccctattggcacagcgcacgctcagggaggtgtcctgggttctttcttttccaagtgctaggtagagacccagaaactggcaagtctccagaggggtgcccctaccccttctcaaccttaagtttctcatctatggaatgagagggctacactaagtcatgggtttttwttttttatttttttttgaaacggagtcttgctctgttgcccaggctggagtgcagtggcgagatctcggctcactgcaacctccgcctccgggttcaagtgattcttgtgcctcagcttcctgagtagctgagattacaggcgtttgccaccacgcatgcctggctaatttttgtatttttagtagagatggggttttgccatgatggctaggctggtctcgaactcctgacctcaggtgatctgcccacctcggcctcccatggtgctgggattacagttgtgag

SEQ ID NO: 11627 - DNA, 1487 bp, Homo sapiens
tccctgggtgattcatacgcactaaagccctatgtagagatcgagccttaagccagcgggcagtctgggtcactggccacctgaataacattatttctacaggacatgtgtcccaaattttaaactgcagaattatatttctttaaaaaatttttttaaatttttttttggagatgaggtcttgctctgtcacacaggctggaatgcagtggcataatcatagcttactgttgcctcaaattcctgggcctaagcaatcctcctgcctcactcctgagtagcttagctaggactgcaggcatatgccaccacgcctggctaatttatttttatcttttatttttgttgtgatgggtcttgctatgttgcccaggctagttttgaactcctggcctcatgcgatcctcctgccttagcctcccatagtgctgggattacaggtgtgagccactgtgtcaggctttttaaactcccaatagtcccttaattgcaaaaaacaatttcttagaatttaaaatattcatttagttcaaccactacaagttaatgtggaaaactgaaacctaaacaaatactttctattgagataatgctaaatggcttgctttctgtgaacagaaatggactggagaagctaaaaaagacactgctggacttgtcacagccgccgggaaacaagaattaagacagttcggaagagtcccattcaaagtgggcggtctagaaaatgaaaattttaaattccacagcagcaacagcagctctcatgtatggagaatctgctggatccagggctctatccttgcgtggtctctgactcctaagacagcggaagccagcatcgctgtgctcatttgatagactcagagaaattaaatcactccctaaaacaccctgaagcaattcattcagtcatgtccttttgcttcctgctcttctgctggataacactgcctcactcactcactgcccttttaatggtctgataaacactttcaggcaggcgaattagtgccacagctcacctgttaactaggctggaatctgttttcagtaagagactgtctcaggcaaggattcttttaaagtctgtttcttaaattgctctttctggcatgacatcaattagtcacccatagggccacatgggcattgtgagcaggactgggtgcctgtgttagggggtcctccatcaaggggcatctccagcggcacattcagaggcyttggagtcagacgtctcctaggaccagcaggaacgaaagggatctgattcaggcctgactactgcgaaagatgctggagccaaatcaatggtatgatcagagttgggaaaggcttaccaaggaagggggatagcctggtctgcccggtgggcccaagagatgggctgtgggaacagtgcatccacgtgcttggttgatgaaaaatccctcaagactattttgtctgactccacgttcaccgattaactttctgtcattctg

SEQ ID NO: 11628 - DNA, 626 bp, Homo sapiens
cgccgggtccctgctctttcttagactgcttctttccgctattaacaaaagtaactgatagagaagaattatcaaaactcaagtgtctacrtggcagcagaggaactagacaatttttataaatgacagtggctgaaacaggataaatcatggggactcatcattgatattacatagactaaatatgatagtgttccattaattaattctacaaatatttaaatgttctcagaatttcaaacattatttagacttttcttcaccttaactcttatgtaagctttccctagaccttcccaaaaagttgagacaggaaaggaaacttaagacttctgaaacacaagagcattcaccaggcctactcactaagaggtctggacactagattggagattgttactcttggagaacaaccttgataaaactatgcttcccagtgcagtgtgaattggggtctcggtctctatagtctatagctaatagcataattaactatatcaagtctgacctattattagtccaaatggcgtaactcaaatcctgtcccataggtttattatactcatatattttggagacaataagatgtttatagtaatgttaaaacttgaggccaggcacagtgg

SEQ ID NO: 11629 - DNA, 822 bp, Homo sapiens
ctcccatatgaaagatgtcctccttgtaccaggagaaaggaaacattcttcaacaaggagtcatagccaagagaatcctgtacaaacagcctttgttaaaatagttcctatcttcctgtagcctccccacataacttggttaattttcttcttcttttttttttttttttgagatggagtctcgctctgtcacccaggctggagtgcagtggcatgatctcggctcactgcaaactctgcctcccrggttcaagccattctcctgcctcagcctcctgagtagttgggattacaggcgtgtgccatgatgcctggctaattttttgtatttttagtagaaaaggggtttcaccatgttagccaggctggtctccaactcctgacttcaggtgatctgccctcctcggcctcccaaagtgctgggattacaggcatgagccaccgctaccggctgacttggttacttttcttcgtttgcttctctagtatgtagatttagcacttctttggtcctttgtttccatgaaggtcctcatgtcatgtaaaatttatataaatttgtatacttttcccctgttaatctgttctatgtcaatttaattttcaggcccaactgaaagctctaaaagggtagaagtcaaattttgcctcccctacaatataaagatagattaattctaggtgctcatagaaaccatatataatcgtgggagtaaacattttaagttaaccatgtaaataattgaaatagaatacataactctggccgggcgtggtggctcacacctgtaatcccagcactttaggaggctgaggcgggtg

SEQ ID NO: 11630 - DNA, 822 bp, Homo sapiens
ctcccatatgaaagatgtcctccttgtaccaggagaaaggaaacattcttcaacaaggagtcatagccaagagaatcctgtacaaacagcctttgttaaaatagttcctatcttcctgtagcctccccacataacttggttaattttcttcttcttttttttttttttttgagatggagtctcgctctgtcacccaggctggagtgcagtggcatgatctcggctcactgcaaactctgcctcccgggttcaagccattctcctgcctcagcctcctgagtagttgggattacaggcgtgtgccatgatgcctggctaattttttgtatttttagtagaaaaggggtttcaccatgttagccaggctggtctcsaactcctgacttcaggtgatctgccctcctcggcctcccaaagtgctgggattacaggcatgagccaccgctaccggctgacttggttacttttcttcgtttgcttctctagtatgtagatttagcacttctttggtcctttgtttccatgaaggtcctcatgtcatgtaaaatttatataaatttgtatacttttcccctgttaatctgttctatgtcaatttaattttcaggcccaactgaaagctctaaaagggtagaagtcaaattttgcctcccctacaatataaagatagattaattctaggtgctcatagaaaccatatataatcgtgggagtaaacattttaagttaaccatgtaaataattgaaatagaatacataactctggccgggcgtggtggctcacacctgtaatcccagcactttaggaggctgaggcgggtg

SEQ ID NO: 11631 - DNA, 529 bp, Homo sapiens
tttttttgagatggagttttgctcttgttgcccaggctggagtacagtggtgcaatctcggttcactgcaatctttgcctcccaggttcagtcgattctcctgcctcagcctcccgagtagctgggattacaggcacgtgccaccacacccggctaattttttgtatttttagtagacatggggttttgccatgttggccaggctggtgtcgaactcctgacctcaggtgatccatcgccttggcctcccaaagtgctgggattacaggcgtgmgtaccgcaccaggcccagagctggaatttgaacctaggaagtctacctctagagtgtgtgctcctctcctttagggtcaaagaagcagagagactgctaggcgtgataataaaaccattagtattagtttcacgattctgaaggctgtactatgattatgtagaaggctttgtggaatgtttgtatctgaagggaatatacactaaatagggatggtgaagcatcatgtcagcaacttaatctcaactgctacta

SEQ ID NO: 11632 - DNA, 562 bp, Homo sapiens
tggcggtaattggctacacagaaatagataatacaaaagctttaaggtttaacttctcttgggtctttagagactaaaagaaggaggtcctatagcttccgaaaagaaaaawacaaaacatgttccaaacatgtggattggaaagagatggagaagcccaagctttaggatcaccagcctagggatattcaaaggactctggccagagaaacacaaagaggcccatgagagaggcaccactcagaagctacttacaatgccacaagggtctgggctacaagttcccttacgtaaggttcatcttgaaataaaattcatgaaaattgtcaagaaaatgttgaaaaacaaaagggggaaccttgttgcaacagataacaaaactttctaggccaggcacagaggctcacacctgtaatcccagcactttgggaggccgaggtgggaggatcacttgagcccaggagtttgagaccagcctgggcaacctagtgagaccctgtctttacaaaaaatacaaaaaactagctgggcatggtggcatgtgcctgtagtcgcagctact

SEQ ID NO: 11633 - DNA, 602 bp, Homo sapiens
tttcctaccacttagcaaggctggcatgtcagggagctttgatgtctaacagctttgtggatgttacatgtgtatttcattgtggaggcccagccctagccttcccacattcaggttttgaaaagcagaacctcagtggattttgtccaatgctttatttcaaattccatttaacatcccttcaaggtggtttcagagtaaataaatgaactgaggttttatttaaatataacttgagtgttatatttatttattaaatatatattatattattatattgtacattaaatataatatatcgtatttattataatattgtatattaaatataatatatcgtatttattatattgtacattaaatataatatatcrtatttattatattgtccattaaatataatatatcgtatttattatattgtacattaaatataacatatcgtatttattatattgtacattaaatataatatatcgtatttattatattgtacattaaatataacatatcgtatttattatattgtacattaaatataacatatcgtatttattatattgtacattaaatataacatatcgtatttattatattgtaca

SEQ ID NO: 11634 - DNA, 602 bp, Homo sapiens
tttcctaccacttagcaaggctggcatgtcagggagctttgatgtctaacagctttgtggatgttacatgtgtatttcattgtggaggcccagccctagccttcccacattcaggttttgaaaagcagaacctcagtggattttgtccaatgctttatttcaaattccatttaacatcccttcaaggtggtttcagagtaaataaatgaactgaggttttatttaaatataacttgagtgttatatttatttattaaatatatattatattattatattgtacattaaatataatatatcgtatttattataatattgtatattaaatataatatatcgtatttattatattgtacattaaatataatatatcatatttattatattgtccattaaatataatatatcgtatttattatattgtacattaaatataacatatcgtatttattatattgtacattaaatataatatatcgtatttattatattgtacattaaatataayatatcgtatttattatattgtacattaaatataacatatcgtatttattatattgtacattaaatataacatatcgtatttattatattgtaca

SEQ ID NO: 11635 - DNA, 1384 bp, Homo sapiens
ggctaccaaaagacagaatacgtagtcactaaatgagtgacattggatagggcaacgtcatgatttattatccaaataagctcagttggtagagtgaaaagaggcagcaaccaactgggcctctgagcaggcctaaactgacaggcttgtgtgagctcgcaggacatctggtccccccaggcacgaaggacacagattggaagtcctcattccacacttctctagtgttctgagggcttgaaattgccatagatgatgattgttttggatcaaaggtttgaagttttctttaaaatgaaagtatgagataggcacctctgtaaaagattagttacaatagttttaccagattagtcgaattccctgagggtgtttgagaaatgagacattgtgttaggcaacaggaggctgtgctaatgaatgaactaaagtaatcatggcccaatactagaaaactttctctcttactcattgttttaatttcctatgggtgctctaaaaaaawaccatgagctgagtggctttaaacaagggaactttattctctcaggattctggaggacagagaccgaaaatcaaggtgtcactaggccatgctctttccctgggctctaggagagaatctgtcccatgctatgctcttagttgccagtgttaccgtcagtgctttgaacacatcactccagtctctgcctctgtcaccgcatgggcttccctccgtgttcttctcctcttcttatcaagacaccagtcatgtggattagtaccatccaatgtcctccatcttaactggataacacctacaaagaccctattcccaaataaggtcacatttgcaggcaccagaggttaaggcactatttaggagggaacagttcaacctacagcagaactttgggtcaagaagccaaataatttttagagatcaaataagatggcaccaaaagccccagtgacgtgggtttaaaagtgacagaagatgatcaaacagagtgtgtaggaaagaggtcatgagaagtttatctctgaaaggaaggaagctggaaggaggtgaaggattgaaaggaggagatttaaatatgcataaaagccagtagtaagaatctagttgagaaggtaagttttaatataaaagaaaaaaaacagtataaacatcacattaggcagccagaaataaatccaaaccattggcgtaggcctcagctttggggaggagaaatgacccttctagcaaaagtagaggaatataacaggatcctgataggtttatactgcaacttacaaaaatgagaaatgtgtaggagttcgagcaggagactggctcactggggtgggctggggaggaggcactggtgggagagaggagctttaggtaggagagaag

SEQ ID NO: 11636 - DNA, 1384 bp, Homo sapiens
ggctaccaaaagacagaatacgtagtcactaaatgagtgacattggatagggcaacgtcatgatttattatccaaataagctcagttggtagagtgaaaagaggcagcaaccaactgggcctctgagcaggcctaaactgacaggcttgtgtgagctcgcaggacatctggtccccccaggcacgaaggacacagattggaagtcctcattccacacttctctagtgttctgagggcttgaaattgccatagatgatgattgttttggatcaaaggtttgaagttttctttaaaatgaaagtatgagataggcacctctgtaaaagattagttacaatagttttaccagattagtcgaattccctgagggtgtttgagaaatgagacattgtgttaggcaacaggaggctgtgctaatgaatgaactaaagtaatcatggcccaatactagaaaactttctctcttactcattgttttaatttcctatgggtgctctaaaaaaataccatgagctgagtggctttaaacaagggaactttattctctcaggattctggaggacagagaccgaaaatcaaggtgtcactaggccatgctctttccctgggctctaggagagaatctgtcccatgctatgctcttagttgccagtgttaccgtcagtgctttgaacacatcactccagtctctgcctctgtcaccgcatgggcttccctccgtgttcttctcctcttcttatcaagacaccagtcatgtggattagtaccatccaatgtcctccatcttaactggataacacctacaaagaccctattcccaaataaggtcacatttgcaggcaccagaggttaaggcactatttaggagggaacagttcaacctacagcagaactttgggtcaagaagccaaataattttkagagatcaaataagatggcaccaaaagccccagtgacgtgggtttaaaagtgacagaagatgatcaaacagagtgtgtaggaaagaggtcatgagaagtttatctctgaaaggaaggaagctggaaggaggtgaaggattgaaaggaggagatttaaatatgcataaaagccagtagtaagaatctagttgagaaggtaagttttaatataaaagaaaaaaaacagtataaacatcacattaggcagccagaaataaatccaaaccattggcgtaggcctcagctttggggaggagaaatgacccttctagcaaaagtagaggaatataacaggatcctgataggtttatactgcaacttacaaaaatgagaaatgtgtaggagttcgagcaggagactggctcactggggtgggctggggaggaggcactggtgggagagaggagctttaggtaggagagaag

SEQ ID NO: 11637 - DNA, 522 bp, Homo sapiens
ggcttgctttggcccttgagttgcaaaacacaatgcttatggcatagagaccctgatattatctccataaatgtgacaaattacaagccaaattaaatgacatacacctagaagagccccaatggtacaatttattaaatactttagtataatgagtatttatgttaaattgattatgctaagactatggcaggttaagcttaatatttctggtttctgaatgctcagtttaatatatcagattayagcatcttcacctctgtttattgttttgtgctgcgtgtgtgtgtgtgcacaaactcaaagaactaaaaaaagaaaaagaaactaagcccgtattagcagactaaagtgaataataaatattaaatcagaactaacaaaatagaaaataatttgtaaaaactcaataaaagtgagttactttttggaatgaccaacaaaattcacaaaacttcagctagactgaaaaaagaaaaaattcaaataaataaaataaaaaatgaggagacattataactg

SEQ ID NO: 11638 - DNA, 522 bp, Homo sapiens
ggcttgctttggcccttgagttgcaaaacacaatgcttatggcatagagaccctgatattatctccataaatgtgacaaattacaagccaaattaaatgacatacacctagaagagccccaatggtacaatttattaaatactttagtataatgagtatttatgttaaattgattatgctaagactatggcaggttaagcttaatatttctggtttctgaatgctcagtttaatatatcagattacagcatcttcacctctgtttattgttttgtgctgcgtgtgtgtgtgtgcacaaactcaaagaactaaaaaaagaaaaagaaactaagcccgtattagcagactaaagtraataataaatattaaatcagaactaacaaaatagaaaataatttgtaaaaactcaataaaagtgagttactttttggaatgaccaacaaaattcacaaaacttcagctagactgaaaaaagaaaaaattcaaataaataaaataaaaaatgaggagacattataactg

SEQ ID NO: 11639 - DNA, 522 bp, Homo sapiens
ggcttgctttggcccttgagttgcaaaacacaatgcttatggcatagagaccctgatattatctccataaatgtgacaaattacaagccaaattaaatgacatacacctagaagagccccaatggtacaatttattaaatactttagtataatgagtatttatgttaaattgattatgctaagactatggcaggttaagcttaatatttctggtttctgaatgctcagtttaatatatcagattacagcatcttcacctctgtttattgttttgtgctgcgtgtgtgtgtgtgcacaaactcaaagaactaaaaaaagaaaaagaaactaagcccgtattagcagactaaagtgaataataaatattaaatcagaactaacaaaatagaaaataattkgtaaaaactcaataaaagtgagttactttttggaatgaccaacaaaattcacaaaacttcagctagactgaaaaaagaaaaaattcaaataaataaaataaaaaatgaggagacattataactg

SEQ ID NO: 11640 - DNA, 750 bp, Homo sapiens
ttaaaacaggactgtttaaaggtcacttcaagaagtaacacatatgaacacactttaagaagcaacacacatatagtatttgccaacaggcgaataaaaagaccaactcctgatcttaggctatgggtactcgtcactgggtatattatttccaggggcagcatcgttaactgactccacaaaagcgctttatctcaaatggctcaggtgagagcagagctgagaggttctgctaaccacgtcaggggactccaagtactctggtgatcaccaaaaccgatgaaaaacaacaggtaaagagttcaggaaaacactgttttgtgtcctgccagtaaaaccaaacagaaattaaaacttttttttaaataaagctgtcaaaatattgaaccgtaacaaaattaataaagtaaacaagctatgccaatacttacctatatacctaaaaagtatacataccctaattggcccaaaagaagatgtaaggagcttctaattggaaaatgatgggactgtaatatttatggttacctgctatcayggcatattagttaaataagtgcccctctattaaacaacatgcaacaacatccagcattcaactttcctggcaggagtcaagcaattccaatggacagtaaagtaccaaaagtaattttcagccgaaatctttgtcaaccaactgtatagggttgctcaatgcctgatatgctattacaatccttcccactcccgaagcatgtgctggaccta

SEQ ID NO: 11641 - DNA, 592 bp, Homo sapiens
cccaaatgtaggggtttacatgacaagcattctttttaaaataaaaaataaaaggagtaatgtatgattatttgacaagcatttaaaaaaatttaatgagggcctggcatggtgcctcatgcctgtaatcctagcacttyagaaggctgaggcaggagggttgttagaggccaggagttggagaccagcctgggcaacattttttaaatacaaatttaaaaaattagccaggtgtggtacctcatgcattgcggtccagctactcaggaggcttgagcttatagtaagctatgatctcaccactgcactccagcatgggtggtggagcaagaccctgtctcttagaaatatatattaaaaaatgaataatatattaaattactcccactctcttattccgtagagtttattgggtatttttcgttttctttttgtagagacagggtcttgccatgttccccaggctggtcttgaactccatgagctcaagtgatcctcttttttctacagtggtttttgttttttatgtaaatcacagtatgccattcctctgctgaaagcttcccagggctttcctttttaggaatgaaat

SEQ ID NO: 11642 - DNA, 1382 bp, Homo sapiens
ctcaagtagctgggactacaggtgcatgccaccatgcctggctaattgttgtatttttagtagcgatagggtttcaccatattggccaggctggtctcaaactcctgacttcaagtgatctgcctgccttggcgtcccaaagtgctgggattacaggcatgagccgctgtgcccggcctcaattaagtaacattcttgattttgggttagtaacttaattgactcagctacaaacctatcctaccaattggaggagaattaccaaaactgctaataaaaggagcactggactcttgaaaccagaaaatttagattaatttctttgccmcatgtttattaagtatccactaaatattggattctggtgatatatagattaacaaggtatattaatagtcaaagctctgacattttaaaactctgtgacttggcatattcacacagctgagtttcttcatctgtcaagtagagataacatcttccctgactacctcacaggattattataaggatcagaaacatgctctatgatataaaatgtgctatgaataaaaatattatttcagaattaagagatatctagttggtgtgttcaaggcaatcagtcataacatttacatgcatagttttcccctttttacaattttcactggaatatataaaaattttccctgcatactttgctgcctatctcaaggccttgaatgctgaaagaggtcttgaaagcagaaaaagaatgagctgttactgttcaagttcagactttctttttctttttttaatttaaagtgtcacaagtgttctcatatttgcagttatcttgagcataatgtattatttcctgctgttgtgagcaaaagttactgtttgttttttacagagacagtaatcaatatggatgctttctaagaccttcctcttcagaaatagaatattgtatgaatacatagaactgaaactgcatgtgttgatgataattcaggaaaagtaacataataaaatgtttctcttgaaatcagatttttaaaagggagttacatttttactgctacttagcagatttttaaaaattctttctagatgaaatcaaaccgaatttgaaaaatccgattcgactttgagaagaatctgtgtaattaagtaacctgacaattgacttcacttctgtagtttcagatatttatgatactatatttgcatgactctcatagacctttaaaatatctcttatccaggatactgctgataatcctagccataagttcttagggttgaaaggcattttggagatcatttgttcgaacacctgttgtacaaatgaagtgacagaccaaaaaagtaaatccatatgttcaaaattacaatgtgattgcataaattcc

SEQ ID NO: 11643 - DNA, 515 bp, Homo sapiens
tcacaaatctggctgggaaaactgttttgtgacctactagatctctctgactttcattcccaaactcctcactgtratttctcagtttttttcagaactgccttagctgtctcttgactaccttatcagaataagaaattaattttcaaaattctcagttctcttgtccaggtttctagatgcttctcaactcaaatagaatcacagatgtttctgtgtgtggtaatgcccattcttggttcatgagagtcagaatgatacataataatgtaccagtgtcttggacttgtaaagtcttatgagataatagtatagcattttggatgaatgtagtaagtaaaccaaagttctgaaaagttaaatgctactattgatgtttattttggttgagtattgtgctaaggagtgaatatggatgagctccttacgtccaacaaagtcctgcgtagcattttttatacatatttaaatatgaattcactgaaacttcagcaggtttaaatacttcaaaaggg

SEQ ID NO: 11644 - DNA, 520 bp, Homo sapiens
gctttccccgcaccacactaggggtgctggttttaaaaccaagatttaaaacataacaaaatacacaacagctttggtttttgggccctcccctaggccagttgggactttyctgttctctccattcgccattctgccttcagttttatcctagtttgtgatggaggaatggataaggtattgggtgattcttctgtgtctgagctttactcattttcaatcccttttacagcccatcctctggcccagaagaggtttgtttctgcccttttttatcacatgacctaactttatttcagactttttggtccatactatcaattctataccctgagtactccagacttctctgaactgtataattactgccaattgaaagtgctttgactgaattcatggtatcccattgcaagacttcccataaagctacactaatcaagcaaaaggatactttcaaaaggataggcacttagatcactagagaagaatatagtctagaaataaacctacgcaagtatag

SEQ ID NO: 11645 - DNA, 520 bp, Homo sapiens
gctttccccgcaccacactaggggtgctggttttaaaaccaagatttaaaacataacaaaatacacaacagctttggtttttgggccctcccctaggccagttgggacttttctgttctctccattcgccattctgccttcagttttatcctagtttgtgatggaggaatggataaggtattgggtgattcttctgtgtctgagctttactcattttcaatcccttttacagcccatcctctggcccagaagaggtttgtttctgcccttttttatcacatgacctaactttatttcagactttttggtccatactatcaattctataccctgagtactccagacttctctgaactgtataattactgccaattgaaagtgctttgactgaattcatggtatcccattgcaagacttcccataaagctacactaatcaagcaaaaggatactttcaaaaggataggcacttagatcactagagaagaatakagtctagaaataaacctacgcaagtatag

SEQ ID NO: 11646 - DNA, 300 bp, Homo sapiens
gaatctgtttggcaatagttcgctgaaccaataaaggtagtccagacccactaccagaactttgtgactggtcaataaggtcttttagtgattctccaactggaataaatgcttcatccgttccaaatcacsattgtaacgacgtctgcttgagatgctcttgcaataatgtctccaagatgtggctagataaaactgtacttccgattttctccaaacagctttgatctatgcttccatctcgtgaattccaagacagtattaaactgatgcatattttcataagtccggaccccaggg

SEQ ID NO: 11647 - DNA, 546 bp, Homo sapiens
ttttggataaggatttaagtcatagtttctaaactgggtgtaattaactattccctatagaagtagcaatcatgaatctaattagcattagtctcagtggtctaagctaattgaatycagtatctataagcattagttccaaccactcataaatgtagctggatttctaaatgccagtttctatccattactatagatttatgactatatttttctaagctacaagtttgcagtcttatttataattattaataacataggcacatacaagtcagtgctagacaggagtgggaatgcagattttgtgggtcattgttaggggaattcaattttgtgataaattagtgtcatttacttatcagaaagcaatggcttagttacaagcctgcccaagaaagttatttgcacaatttgaatatgtggcttgttggctgagataaagaatgtaaagcagaagagtgcctggctcttgatatacaatcaaattttaatgagtggtagtaagaatagcagtagtagcagcagaaggaatagtaagtactgtgg

SEQ ID NO: 11648 - DNA, 581 bp, Homo sapiens
ttcgaaaacagcctggccaacacagtggggaaaaaaaaaaaaaattagctgggagtggcatttgtagtcccagctactgggaaggctgaagcagaagaattgcttgaacccgggaggtggaggttgcagtgagtcgagagcgcaccactgcactccagcctggtcaacagagcgasactctgtctcttaaaaaaaaaaaaaaagtagctcggccaggtgtggtggctcacgcctgtaatcccaccactttgggaggccaaggtgggtggatcacaaggtcaagagatccagaccatcctggccaacatggtgaaaccccgtctctactaaaaacacaaaaattcgctgggcatggtgtcatgcgcctatagtcccagctactcaggaagctgaggcaggagaatcacttgaacccagaaggcggaggttgtagtgagccaagatcgcgccactgtactccagcctaggtgacaaagcgagactcagtctctaaataaataaataaataaaaataatgacaatgtaatgtaggatgggcagtttgtaacttttctataataattcttatatgattttaaaag

SEQ ID NO: 11649 - DNA, 581 bp, Homo sapiens
ttcgaaaacagcctggccaacacagtggggaaaaaaaaaaaaaattagctgggagtggcatttgtagtcccagctactgggaaggctgaagcagaagaattgcttgaacccgggaggtggaggttgcagtgagtcgagagcgcaccactgcactccagcctggtcaacagagcgagactctgtctcttaaaaaaaaaaaaaaagtagctcggccaggtgtggtggctcacgcctgtaatcccaccactttgggaggccaaggtgggtggatcacaaggtcaagagatccagaccatcctggccaacatggtgaaaccccgtctctactaaaaacacaaaaattcgctgggcatggtgtcatgcgcctatagtcccagctactcaggaagctgaggcaggagaatcacttgaacccagaaggcggaggttgtagtgagccaagatcgcgccactgtactccagcctrggtgacaaagcgagactcagtctctaaataaataaataaataaaaataatgacaatgtaatgtaggatgggcagtttgtaacttttctataataattcttatatgattttaaaag

SEQ ID NO: 11650 - DNA, 619 bp, Homo sapiens
tcatatggaaatcagtcattatttggtgaggtgtggagtccatggcccatgccttctactcctctggactagattactttattcttagattcatagtttgaaaatatattctcccattctgtaagttgtctgtttactctgttgatagtttatttcactttgcagatgctctttaatcagaagtcccatttgtccattttgtattttgttgcatttgcttttgaggtcttcatcataaattatctgcctaggccaatgtctagaagagtatttcctaggttttctactaggatttttacagtttttggtcttamagttaaggttttaatccatcttaatttttgtgtatggtgagaattaggtgtccagtttctttctactgcatattgctaaccagtttccgcagaatgatttattgaatagggtgtcctttccccgttgtttatttttgtctgctttgttgaagatcagttagttttaagtgtgtggcttttatttcaggagtctctcctgtttattggtgttcgtgtcaatttttataccagtgccatgctgttttggttactatagccttgtactatagtttgaagccaggaaatgtgatgcctctggctttatt

SEQ ID NO: 11651 - DNA, 619 bp, Homo sapiens
tcatatggaaatcagtcattatttggtgaggtgtggagtccatggcccatgccttctactcctctggactagattactttattcttagattcatagtttgaaaatatattctcccattctgtaagttgtctgtttactctgttgatagtttatttcactttgcagatgctctttaatcagaagtcccatttgtccattttgtattttgttgcatttgcttttgaggtcttcatcataaattatctgcctaggccaatgtctagaagagtatttcctaggttttctactaggatttttacagtttttggtcttaaagttaaggttttaatccatcttaatttttgtgtatggtgagaattaggtgtccagtttctttctactgcatattgctaaccagtttccgcagaatgatttattgaatagggtgtcctttccccrttgtttatttttgtctgctttgttgaagatcagttagttttaagtgtgtggcttttatttcaggagtctctcctgtttattggtgttcgtgtcaatttttataccagtgccatgctgttttggttactatagccttgtactatagtttgaagccaggaaatgtgatgcctctggctttatt

SEQ ID NO: 11652 - DNA, 563 bp, Homo sapiens
ctgggcatggtggcaggcgcctgtaattccagctactcaggaggctgaggcaggagaatcgcttgaacctggagggtggaggttgcagtaagctgagatcatgccactgcactccagcgtgggtgacagagcgagactgtctctaataaaataaaataaaaacaaaacctacattaaaaaacccccatgcagcttctggaagaagagatctcacaggtcccagagtcacagcagtgacaacaaatgaaagartgcaggtgccaccaaagacgcatgaacattcacctgtgttcaaaagccaattgttggtaaaaaaattattcctggttcacccagaaaagtattacaaatgaaacttaaaatatcaatttttatcagatacttacctcacggagcgggataatgaggctacataagttctcctccttgctggtaaaacagatgtaatttgtggacacaaacatctgccccaaaatgtgcattttgttaaatggagtccagagagtgcagtctgtgtggccatctaatttttcatctttgggcagccggaaaagtgcacggta

SEQ ID NO: 11653 - DNA, 547 bp, Homo sapiens
cactcatatttggtgtaaaaatggatgacactacagttctgagaaatcttcaccttttttcttccagaaatcttcatgaatattccaccccttggttaaagaaaccagtaaagatagaagccccaagccccactgcaagcgactcactctcttgagtttgcccacactgccttttcttgagtgtgtactttttgctttgcaataaatcttcatactttcactattttctgacttgtccttgagttccttctgacaatggtgtcaagagcctagacactggccagggtggaggttatgctggcatttggggacctcccctagcccactggtatcagcttaaagctaggtgctatgagagaaaaaaaatccatacatattctygctagatgaaagaacttgaggatagagttcagggaaaatatggccactgaatagtgtgagagtcttcctgaaaagatcagctccaatgctagccaaccataaattctatatataaactgtgcctgaatctatccttgatccctgagcaatacaagtataaggcaga

SEQ ID NO: 11654 - DNA, 547 bp, Homo sapiens
cactcatatttggtgtaaaaatggatgacactacagttctgagaaatcttcaccttttttcttccagaaatcttcatgaatattccaccccttggttaaagaaaccagtaaagatagaagccccaagccccactgcaagcgactcactctcttgagtttgcccacactgccttttcttgagtgtgtactttttgctttgcaataaatcttcatactttcactattttctgacttgtccttgagttccttctgacaatggtgtcaagagcctagacactggccagggtggaggttatgctggcatttggggacctcccctagcccactggtatcagcttaaagctaggtgctatgagagaaaaaaaatccatacatattctcgctagatgaaagaacttgaggatagagttcagggaaaatatggccactgaatagtgtgagagtcttcctgaaaagatcagctccaawgctagccaaccataaattctatatataaactgtgcctgaatctatccttgatccctgagcaatacaagtataaggcaga

SEQ ID NO: 11655 - DNA, 547 bp, Homo sapiens
cactcatatttggtgtaaaaatggatgacactacagttctgagaaatcttcaccttttttcttccagaaatcttcatgaatattccaccccttggttaaagaaaccagtaaagatagaagccccaagccccactgcaagcgactcactctcttgagtttgcccacactgccttttcttgagtgtgtactttttgctttgcaataaatcttcatactttcactattttctgacttgtccttgagttccttctgacaatggtgtcaagagcctagacactggccagggtggaggttatgctggcatttggggacctcccctagcccactggtatcagcttaaagctaggtgctatgagagaaaaaaaatccatacatattctcgctagatgaaagaacttgaggatagagttcagggaaaatatggccactgaatagtgtgagagtcttcctgaaaagatcagctccaatgctagccaaccataaattctatatataaactgtgcctraatctatccttgatccctgagcaatacaagtataaggcaga

SEQ ID NO: 11656 - DNA, 525 bp, Homo sapiens
ccatgaagccagaaagaacagggagttttgcaatcagaagaacacagatgcaagtcctgattatttaattatatgaccttatggaggccatccagtcactaaaactgttttcctcaattttaaaataaagaaattaatctctacttcattgggctggatttcactgaaaactacacaaagagatacataccctggaacaggaaatatatatatataamtataatttattttttatatctaaataaatataaatatcctaataaatataaatatatctaaaaataaatataaatacatatattaggttctctctctctttatataaacgtgtgtgtggatacataccttggaatagggaatatatatataaataaatatatacttatatgtaaataaatataaatatatacacacctatatatttttatttaagagaatatatatgttatatatgtatatattacatattatgtattataatatatatacttatatctaacatatattatattatatataatataa

SEQ ID NO: 11657 - DNA, 525 bp, Homo sapiens
ccatgaagccagaaagaacagggagttttgcaatcagaagaacacagatgcaagtcctgattatttaattatatgaccttatggaggccatccagtcactaaaactgttttcctcaattttaaaataaagaaattaatctctacttcattgggctggatttcactgaaaactacacaaagagatacataccctggaacaggaaatatatatatataactataatttattttttatatctaaataaatataaatatcctaataaatataaatatatctaaaaataaatataaatacatatattaggttctctctctctttatataaacgtgtgtgtggatacataccttggaatagggawtatatatataaataaatatatacttatatgtaaataaatataaatatatacacacctatatatttttatttaagagaatatatatgttatatatgtatatattacatattatgtattataatatatatacttatatctaacatatattatattatatataatataa

SEQ ID NO: 11658 - DNA, 494 bp, Homo sapiens
acaaatccacatcttttcatccaaaacccatgttaatccaactgtaaatgctgcaagaaattaattatataaatattatttctgcagcgtatgaaatgtataaatgcctggtttaagttagggccttagactatgtgttttgctttccaagcttcataaagagtataccagtttggaaaattttgatgtaagtttaaacarcattattatggtacactcaactgataatgcaaatagagcacctaacacatcatatttatctataattcattttagaattgatgtgagaacaaacacaactatgacaaaataatttgcataatatgttgtcatcaaagaaaaacatgcatcctaggttaactttgaagattctatttaatatactgcttgcattatttcttatattctctattaagttcatggaaactctgctggtacatatgtgggaataaagaaaattgaatcacatatcataggcatccctggacaggttt

SEQ ID NO: 11659 - DNA, 535 bp, Homo sapiens
gtaaccactatgagtgactttcttactttgaaggctgactttctttcttaaatgatcctattgattaatagaagttcacacttttaatctagtcaaattatcaacatttgtttttatggtkagtatttttgtaatgtttaagaaagctttccccatactgaattacttaacctactctgtaataatatcatcagaaagtaattcctttttgtcttccacatttaaagttttgttgttttctttctgttcacacacaattgtcccagcttcttttgtagaaaagtctgtccttgcctaattactttgcaatgcagcctatgtaataagtcaagagtccacaggtaaacgggtctttccctgggccactctcctgttcacatagcatttgtgtcttacgtgaaaaacacagccttctaattactgtagatttatgaacagctgatatctggaagatatttcttttttatcatgaagtgccaattaaatctaaatttctcaattttcttttggtttttagagctttttcttatttaat

SEQ ID NO: 11660 - DNA, 1302 bp, Homo sapiens
cactaccactgggaaatgaaggattatggaccagctaagggaggcaagaagaaggatcctaatgccccgaaaaagccaccgtctggattcttcctgctctgttcagaattccaccccaagatcaaattcataaaccctggcatctctattggagacatggcaaaaaagctgggtragatgcggaataacttaaatgacagtgaaaagcagccttacaccactaaggcggcaaagctgaaggaaaagtatgagaaggatgtttctgactataagttgaaaggaaagtttgatggagaaaagggtcctgctaaagttgcccagaaaaaggtggaagaggaagatgaagatgaacaagatgaaaaggaagaaggaggggaggaggaggaggaggaggaggatgaataagagactgtccatttgaaaaaaaaaaaagaaataatactaaaaactcttaaccacccttctagaattcttgaaaaatagggtattcatctgattcccaatgaacattagctaactgtagatggcaggtcagactacgggaaattcaagtaaatttatcttaatcccatgacacatcctaaaaactaaattttgactagttttctcatcatttatgtatttatcaaacaagcttctccctccccaacaattccctgtatttgtgcgattatttattgggattccaaggagctggagataaccagaccaacatcatagtaaatatttccaggaatgtctgagataaccaggaatcatctacttatttactattttaactaaaccaaacaggatataaatgggtagtctatagtatgttcagagttaagtatggaaaactgtagcagctgttatgtgcactgccttgagctcactgaaaattcacacccagaggtctcagaggaggcagcccaagcacagaggcagacgtttcaggcacaaggttcatgctgggctcacagcttcctcgcctcgctgtccacagagccaggacatgtggttggtagatcaaagcccagcctctcggccctgccagcttgaggcttgagctggcctacctccttccatctttcttaaggcccaacactaaacttaccctgcactaaatgcaaagggactgatactgaggtgatgttttttcttttaaattattagctcttggcataaagctttatttctgcctttacaataatagtaaagtcagtcaaagctatggcagaacattgtaaacaggattaaacagattcctttcaaaactagacaaggaggaaaggatgagactgttacattccaattttcaac

SEQ ID NO: 11661 - DNA, 554 bp, Homo sapiens
actactggtgttctctttactaactgaaatggtgtcattagcacctttaaatctaatccatttagagagccagttcyggaaacctcagaaccagtttggaaaacttccgttcttctgaagccatttttggaaccacatctgtgctaggttctccagggaaacagaaccaatatgttttatttactatggggactggctcatatgattctggaggcctagaagtccctccctctcaagatgtgctgtcagcaagctgcagaaccaggaaagctggtggtgtcagagtctgaaggcctgagaactgggtggggagtgggacagactaaggggcctttagtctctgggttggtgtggtccccacaggtgagcctttcgtggagaagggtggagaggggatctggaagggccaatagaagatactcagcactaagagacctttggactcagaccagaacttacaccattcattcattcagtcggtgaaaatgtattgaccactgtatcaaccaggattgtgacacaaaaacagatggcacactcaaaagaggataatt

SEQ ID NO: 11662 - DNA, 575 bp, Homo sapiens
tggaaaaatacttttatctaaacatttgcagacattttttatagactgtaaatattccataatggccatttggtaatttarttaattatagctctagttttggatgtttcattttttcaggttttttgctctttcacgttttgtctagtacagattttaagtctttttttcctggctaccctttgcaagttttactgtctttgctagataatggcttttgtatttattttgacgtgtcttatgttttcagtgtggccaacccagtataccaaaattgctttgaatatggtttctgtgattagagagactacgttccaaaaatcctgttggtagagacatttcttttattcttatggagggttaaagataaatttcattccaaatctctaaatttagaaaaacagtaatgtcctctgttggttaaaaatcctcacctttcttctggcattaagactcaataatgggggctgggcacggtggctcatgcctgtaatcccagcactttgggagaccgaggtgggcagatcacctgaggttgggagtttgagaccagcctgaccaacgtggagaaacct

SEQ ID NO: 11663 - DNA, 575 bp, Homo sapiens
tggaaaaatacttttatctaaacatttgcagacattttttatagactgtaaatattccataatggccatttggtaatttaattaattatagctctagttttggatgtttcattttttcaggttttttgctctttcacgttttgtctagtacagattttaagtctttttttcctggctaccctttgcaagttttactgtctttgctagataatggcttttgtatttattttgacgtgtcttatgttttcagtgtggccaacccagtataccaaaattgcyttgaatatggtttctgtgattagagagactacgttccaaaaatcctgttggtagagacatttcttttattcttatggagggttaaagataaatttcattccaaatctctaaatttagaaaaacagtaatgtcctctgttggttaaaaatcctcacctttcttctggcattaagactcaataatgggggctgggcacggtggctcatgcctgtaatcccagcactttgggagaccgaggtgggcagatcacctgaggttgggagtttgagaccagcctgaccaacgtggagaaacct

SEQ ID NO: 11664 - DNA, 575 bp, Homo sapiens
tggaaaaatacttttatctaaacatttgcagacattttttatagactgtaaatattccataatggccatttggtaatttaattaattatagctctagttttggatgtttcattttttcaggttttttgctctttcacgttttgtctagtacagattttaagtctttttttcctggctaccctttgcaagttttactgtctttgctagataatggcttttgtatttattttgacgtgtcttatgttttcagtgtggccaacccagtataccaaaattgctttgaatatggtttctgtgatkagagagactacgttccaaaaatcctgttggtagagacatttcttttattcttatggagggttaaagataaatttcattccaaatctctaaatttagaaaaacagtaatgtcctctgttggttaaaaatcctcacctttcttctggcattaagactcaataatgggggctgggcacggtggctcatgcctgtaatcccagcactttgggagaccgaggtgggcagatcacctgaggttgggagtttgagaccagcctgaccaacgtggagaaacct

SEQ ID NO: 11665 - DNA, 575 bp, Homo sapiens
tggaaaaatacttttatctaaacatttgcagacattttttatagactgtaaatattccataatggccatttggtaatttaattaattatagctctagttttggatgtttcattttttcaggttttttgctctttcacgttttgtctagtacagattttaagtctttttttcctggctaccctttgcaagttttactgtctttgctagataatggcttttgtatttattttgacgtgtcttatgttttcagtgtggccaacccagtataccaaaattgctttgaatatggtttctgtgattagagagactaygttccaaaaatcctgttggtagagacatttcttttattcttatggagggttaaagataaatttcattccaaatctctaaatttagaaaaacagtaatgtcctctgttggttaaaaatcctcacctttcttctggcattaagactcaataatgggggctgggcacggtggctcatgcctgtaatcccagcactttgggagaccgaggtgggcagatcacctgaggttgggagtttgagaccagcctgaccaacgtggagaaacct

SEQ ID NO: 11666 - DNA, 575 bp, Homo sapiens
tggaaaaatacttttatctaaacatttgcagacattttttatagactgtaaatattccataatggccatttggtaatttaattaattatagctctagttttggatgtttcattttttcaggttttttgctctttcacgttttgtctagtacagattttaagtctttttttcctggctaccctttgcaagttttactgtctttgctagataatggcttttgtatttattttgacgtgtcttatgttttcagtgtggccaacccagtataccaaaattgctttgaatatggtttctgtgattagagagactacgttccaaaaatcctgttggtagagacatttcttttattcttatggagggttaaagataaatttcattccaaatctctaaatttagaaaaacagtaatgtcctctgttggttaaaaatcctcacctttcttctggcattaagactcaataatgggggctgggcacggtggctcatgcctgtaatcccagcactttgggagaccgaggtgggcrgatcacctgaggttgggagtttgagaccagcctgaccaacgtggagaaacct

SEQ ID NO: 11667 - DNA, 515 bp, Homo sapiens
ttatccttaccttggtaaagatttccttcattgaaccctccctgacatctattgagtgtgacttatctttcctaccagaaccttgatacccttagtaatgagttgaattatcattcttttattagttaattcattggtgtaacacacaattgtcagtgaaagactatattgcagactctttactagaaaataaaaataagaagagtacaaataacaatagctaacatttattaagcatattccatgtgtcagatayttctctaagcatataataatatataacttaataaattatgtctgtaaccctatgtggtatgtctattagtcaggataatctaaggtatattacaatagaaaagtaagttccactgggcatggtggctcatgcctgcattcccagcactttaggagggtgaggtgggcagatcccttgaggtcaggagtttgagagcagcctggccaacatggtgaaactctgtgtctactaaaaatacaacaaaattagcaaggagtga

SEQ ID NO: 11668 - DNA, 515 bp, Homo sapiens
ttatccttaccttggtaaagatttccttcattgaaccctccctgacatctattgagtgtgacttatctttcctaccagaaccttgatacccttagtaatgagttgaattatcattcttttattagttaattcattggtgtaacacacaattgtcagtgaaagactatattgcagactctttactagaaaataaaaataagaagagtacaaataacaatagctaacatttattaagcatattccatgtgtcagatatttctctaagcatataataatatataacttaataaattatgtctgtaaccctatgtggtatgtctattagtcaggataatctaaggtatattacaatagaaaagtaagttccactgggcatggtggctcatgcctgyattcccagcactttaggagggtgaggtgggcagatcccttgaggtcaggagtttgagagcagcctggccaacatggtgaaactctgtgtctactaaaaatacaacaaaattagcaaggagtga

SEQ ID NO: 11669 - DNA, 1616 bp, Homo sapiens
aaggaccatccttgacaggctgtgtgagctgcccttccccatgcctgccacttccagggatgacaagctgacccctgtccccacacaccccacccttatagcttattgctttgcgttggtccaaaaccacccgctcagctgagcctctgggatgaccagagctgatcaccagacagctcaaggcgggcctcccccctcctatctctttccaagctaaacacaagcagttctacataaatatgttatggtaaataatgagatagtaaatatgctgtaacagatcatcaaagggtgaagacccgtctccacgaaccgtgcatcacctctgccaccccatccctccccccacgacccccctgctcttccaccggggcccccaccccattctactgaggcatgtgtcctcgccctgctgcatggtgcacccctgcgtgtgtgtccgccggatcagaacccctcactgcagggtgtactgtcccaggaagcgggaggcggacggagacaggctcccattttcagccccaaacctgacattccacagagacgttcctcccatttccgcagctgcatggacaccctcgcgtgccccrtttctgctcgtgctccctaatctgagcaccttcagaccctttctggtcccgggctcaggcctccttggcagcctcgccctcctccagcccaaggagctgttctgtcgtggctttggaattcagatgctctcactgtgatagagatggggtcttggggggctgggagctgttctgtcgtggctttggagttcagatgctctcactgtgatagagatggggtcttggggggctgcctccaccactgcctgccctgctcagcgctgacccacttcccttgaccagagttttggcctctctgaatgggacggtcgttttagtcctgagggcccataagaagcccagtggcggctgggtgcggtggcgcacacctgtaatcccagcactttgggaggccgaggtgggtggatcgtgaagttaagagatcgagaccatcctggccaacatggtgaaaccccgtctctactaaaaatacaaaaattagctgggcatggtggtagtcccagctactcgggaggctgaggcaagagaatcgcttgaacctggtaggcagaggttgcagtgacctgagattgcgccactgcaccccagcctggcaacagcaagactccgtctcaaaaaaaaaaaaagaagcccagtggctcccttaataaaatcaccccttagccctctgtggtgggcagtggtgggacagtctccctgtggggagggtggctgcactgtccagccccaaccctcccgcttcgggacccccacttcccctttagggcctgagactctgactttacctcccaccgtactgcttggccatccagcagctttatgacacacacaagaacccccaggggcttgtctgtgctgtttcgctggctgctcccacagccacaggccctagacccatcctcttggaggtccttctagcgctgcctatgtggagattcttccccactcatcttgggggtttggatttgttgcataaagcagctgatgtgtttcccacagggtcctgccagctaagccaagggccca

SEQ ID NO: 11670 - DNA, 555 bp, Homo sapiens
tcctgcctgggtgggaggctgctcactgattcctcggttatgtcgttctgtggttctgggacaatgaacaagactttagcacatgtgtgctcrggccaggcacttggtactgtccctcacagaggactggggtggcaggagggcataggtaagcccagggctgccaggagcagcagtggcagggagtgtgggctccttcctgaacacaccttctaaatgtggctcctctgctctggttggttagtcccctggtcctcttcctgaagggctgtctgcctgggaagatgccatagccaccttgagaatgaaggcgactgcaggctcggcgagacccacagggctggacctgggcagggaggccgcgtgctgatgccaggcctttccaccattcccctgatggcacggagctgtgggtgacgtccagcccagccacagaagtgcaggcggaggctggtgtttggcgcctctttcctccgtctagctggtaacctcctcaccttctcttagtgacctgggaccaggtgactccttgtctacctgatgtcttcattattc

SEQ ID NO: 11671 - DNA, 833 bp, Homo sapiens
gcgccctagtacctgaagccagacagaccggtcagcccaaggtccgtgaggccagggtgggaatccgggccccctcacttcctctccgcttctcctcagccgcctctcaacgcctaacccggcttcgggctctggtccgcgcggcctaaagcctcgcgacctccaggcctcgccccctgccgcctcgcgccctccaggccccaacccctgtcccttcgcgccctcctggccccgcccttcgtcgcctcgctagtgccggttggcgggaaagtcgcgagctccagcgcttgcgcactccgccgcctgggggaactctgtccagcgacccttgacgtcagggatcacggtgcacttgattggctgctctgtcccgaccacctgcccttcgcctgtggttgcaggcagctcccgactgctggggcctctggcaggttctgaaaatcctgatactgcaatgaccctcagggactctcctccctctctttttacagatgcagaaacgtgatcccagagagggaagagacttacgttccacaagttaatggcagagttaagaccagaacctgtgtcatggaactttcaactcagcgctcttgcggccagagctaaatttaaggaaggagcagataaaagaggcaggaaccaggcatgcttctggtgctccctgacctaycgtgtcaggcaataggcagaactggttctgtttttctaaacctgggcctttcgctgtcacctgagccatggttaccctctgcgatcggccaccccacatgcccctccttccgggtggctctcctgcctcctcaccttcctaccccaagggttcctgtgcc

SEQ ID NO: 11672 - DNA, 525 bp, Homo sapiens
caaacatatcgaattcactgttccatcctcaaggttctaagtattctagtgtgaaagagaatgagccgaacaattaaagtagagtgagatttatggcacagtcgagggaagcattatgtcctcttaagatcgagggtgacactgaacaggtcaagaagtgatgcctgagttgagtctsaaaacataaccaaagtaagtcaagtaaggaaaacagggatgaagctggcctatggaaggaatgacacaagaaaaggcttagaaggaatgacacaagaaaagtcttagaggaatgggagaatatgggatgtctggagaacagctagcagttcactaggtctagagttcacaaagacttaagatgcacaattggcaaatactgagtaatgggactgtgctgggggagagttaatatatttagaactttattcttaggcagtgggagtcatcagaggctattcgatgggacagtgacatgatgtcattcatatttgcgaaaaccattatggctgtgggataaagaaggga

SEQ ID NO: 11673 - DNA, 656 bp, Homo sapiens
agatcttcatattggaaaactcttttattgcttaactgacaaattcagatattctcatttaattataatcagcaaaccttctagccttctctttacccatatatctctccctatcttccttgcaccctataccctcatcacagtcacttatattctctgcaatatttccttattgtatttctgatttcaacagtctagaaaaatccccaaactgggtaaatccaatcatccacttttttggcacttaatttcaagttctgagtacaggtgtaatgattttgctactataaattcatgctcttcaacttttttccccccaacttttattttaagttcaggagtacatgtgcaagatgtgcaggtgtgtatggtcttcaatttcatctagactctcctcaataccaagcaagcctagtcagcaatcttcctttcattactatgaccattaaaatcttattgttttatagtttaatagacatatctagtggtcatcttgtttctcttctgtaacttcaacatcttccctgctacagaatcattcccattaaaatttaaataactrtactctaactaggagtgtgagctattgctgtagtccctatggatcaagggtcctcaagtgcatctacccaaatatttccagttcaagtctccga

SEQ ID NO: 11674 - DNA, 469 bp, Homo sapiens
ctattgaagcagaatgtagtccatgagatgttatacctaattcaccttgtgaaagtttagactagaggtttcaatctcttgttccatcccttcatatatatatatatatatattttttwtttttttttttttttttttttttcatgttgctctgcaatgccttcagttatcagcagagtatattccctgccctattggtcatgtgatttgcttggccatgcattttgcttggccagtggaatgtggataaaagcatagtatgttgaattttagttgagatatcagtagacatcaattgtttgtactcaccttctttgcttctctgattaccgcaaacattgcgtgctctagatggctgctatgccatcagtctgggtttgaggatgtgagacaaatagagtaaacctggacccaccaaagcctggagtccagcctgtcccaactgagatcagtctagattattggaact

SEQ ID NO: 11675 - DNA, 530 bp, Homo sapiens
tgacactcagctcaggcaggattggctggctctgtcaatgaccactggtaccttttctccggaattaaactcctcagattgtcaaaaccctaacgtgaatgacattttacttggtgattgttagttcagcagagaattccaacactgtcatatcatctaattttactattgacttatatttttaaccagtaattataatttctaacaagcagaggacttcttcatttctaagaatccttgtaaactcagtgactgcgtatccttattagatcaggtgtttggaatgaaactaaatatctcaggtaatatttactaagtgaagctgctgataaaaagttaaactattataaaaataaatctatataaacaagttatctatactagtwaaactggctatttaactagttaggtgttggactaaatacattcagtcaaaatgtgaggtgatcttacctgaagaggaagaataatattcttaactaatagtttattactccttttcatagtaagcctttggttaaaaatggaca

SEQ ID NO: 11676 - DNA, 844 bp, Homo sapiens
aaatatccttggtaaggacacaaagggacatgcattattctagggttgtccagaaaggcaggggcaactggaaatgtgagcgtccctctctgacttgggtctggccttctgcccctatggcccctgcctctttctgatggtaaatgtggagagatggtgatggttggtttgtcacaaatagttttcagtttaccaaagtgcacccagctttctctgaatctctttgaaatgcttttagggcaacatgaagaatggaattcaacaattctccacagctgcagtcagaatacagtgaccccaagagcagctgggggcagttattttcatgttttgtagttgctgtttccttaaaagctttttcagaatgttctggaaggtcctgtggcatccatattacgaaagactgcgtgtggggcagactcttggattccaggtcctcatccaaaatttggcaaatatttgtctccacttctcaccagcaacatgttatctcagaagtacttccctgtgccctcctgcctcaacccaacaggcgcacatgcaggagtgactctcctctggaagctctatttagtgaaggaaaccctcaaatagaagccgggatccctgggatctggcatcagctgaagcttaaatcacctctttgaccttttgtcagtatctctctcttctggccttagtttcccacatctgtaaaatgaggaggttggacagaagatcttagaagactctttcggtagggaattggcaatgatgttttaaggtaagaaactgattgcagggggtgggcacggtggctcatccctctaatcccagcactttgggaggccgargtgggcggatc

SEQ ID NO: 11677 - DNA, 540 bp, Homo sapiens
atttttcaaatgtgtacattcagttattaaattggtttataccctacaaaatattttgcatattattttcacttaaaaagttattttgatgcctatacttgttagaaaatatgcatgaacgtacatttttttctagtcctgagctatctcagtgcaccataatttatgtaataaatactctgcagatgggcatttagactacaaccaatgaatttccattataaacaatgttgcagcagcaacatatttttggaaatctctcttgatcatgggaatattcttatatgataaatttccaaactaaaattgctgtgtcaaatagtcatgctgattttgcttctaaaacattatactcatttatatccttaacattataatgtgtaagatmactatcattataatttcaccatccacaacttacaaagtaatatttaggttttagtttctgatttttgtttatccctagtaaatctggacctatgtttccacatttatttttgatttttacaaattttctctgaaatgccaacattttttgtc

SEQ ID NO: 11678 - DNA, 518 bp, Homo sapiens
gtttttgaaaaaaatgaggtattggcaggaaaaacattccagaaagaaacattagcatgtgcagttgacrtggggcaggaaaaatcattgggataaaagcaaaatcttcctatcctccaaattcgagaaaggaaaagactgattatcctttggctaaagccccatactgagctatgaactaccagatctggctttaaatttgtcccatttcacctgtaaccatgcaattatttcaataaccacacctctgaatgccaaccaatctgcgacacttttctgacacttagtctatcagcaaaagcctcactccagtgcttacacttctgaaagtcattgagctacagccatattcagaaaccacgctcgcacatctgacagccagccaattcctaaactttttggacctacaaattctccacctccagaactccttgatttctaaaaccccatataagataaccattatgagagacaacatgctttgaaattacttggcaagaaatgttatgttttctttc

SEQ ID NO: 11679 - DNA, 518 bp, Homo sapiens
gtttttgaaaaaaatgaggtattggcaggaaaaacattccagaaagaaacattagcatgtgcagttgacgtggggcaggaaaaatcattgggataaaagcaaaatcttcctatcctccaaattcgagaaaggaaaagactgaytatcctttggctaaagccccatactgagctatgaactaccagatctggctttaaatttgtcccatttcacctgtaaccatgcaattatttcaataaccacacctctgaatgccaaccaatctgcgacacttttctgacacttagtctatcagcaaaagcctcactccagtgcttacacttctgaaagtcattgagctacagccatattcagaaaccacgctcgcacatctgacagccagccaattcctaaactttttggacctacaaattctccacctccagaactccttgatttctaaaaccccatataagataaccattatgagagacaacatgctttgaaattacttggcaagaaatgttatgttttctttc

SEQ ID NO: 11680 - DNA, 795 bp, Homo sapiens
cccaggaagttgaggctgcaatgagcactctagcctgggtgctggagtgagaccttgtctcaaaaaaaaaaaaaaaaaaaaaaaagttaaaaaatcaaagaccagcatactggagtctgtttttcttaattctagatgtgcttcttgaccactttccttgtcgttgaaccatcttcctgttttttcagcaccaaatgtatgttccatgattgtagatatactcagcagcctcaaggctattgtaaagcagggctgagcttgccttacaatgttaattgcaccaaaaaaacaacttctctgctgaaagttaagcaggtgaagctctgggcaaggatacagctggatgacgaaattcagggcattgctgagctgcttttcaggtgcccaatctttaaccttcttgatattgaattggctaaatcaaaataagtgcccaagactgccctttccctaagttgaaagtcatctcaccaaggaactgcagtgtgacattttgatttgttgagcctttgttgattcttagattgtctatgtaaataaccactttgaccttgactccttactgtttttcttatagcatatgaaggaactgagaatactagtattgaaatagctgcctttggctgtggaactggtgactgttgcatttgttttttaactttcatgtataaacatttattttaagtcacatttccatagatggttttccttacttcattcacatatcatcagttttcttagttttgttactctgctcagccacacaagggraataaactttttacaagagccaga

SEQ ID NO: 11681 - DNA, 527 bp, Homo sapiens
agatgctcyaccatactacctagtaaaggttctggaagttaagaaacaaacacgctggttggctcaatcagggaatataccacacaatgctaaatagtcatgtttctaccatatgtagctctacgcattttatttcacttacttttcacataagctctaatattccattataaaaataacgcacattacagaaaatttagaaaatacagaaaaataggctattagaccttaactctaaaacattttaaacacttgaactaaaaatgtattatgtagtagacaatacacattaaaaataaggaggcaaaaataaaaggtaattttactacaatgaactttccactcaagaaatcttcatcctgttgaagaaaattaaaataaaaacttaccacgattttggccaagattccatcatcacttgcatctaaggtaaccacagctttgtcagtctcaatttcacataatgcatctccagcactcaccgcttcacctacaaaacaagactgggtttgttttgttttttaaaa

SEQ ID NO: 11682 - DNA, 521 bp, Homo sapiens
gataattttgactactggaaatttttacttaactttcaaagctctactgtatatatatatataaattttcctggtttcatctccaaagatgtggtccttattgcaataatgaagtaggaaaagtaaaaggtacttactaaaagtatgaataaaatagtagaacatattaaaatttgttagaaccctaagtccctaatactcatatcagaagccaaatatactttaagagcatatttgtgtttataacttaagaccacaaaagaatacccatttcagtgattattatccaaaacttgrtgattcagtgcttataaattacagatcagtgaaatggaaaccaaaatctgttttgttttgttttgttttttgagatagagtcttgctctgtcacccaagctggagtgcagtggtgcgatctcagctcactgcactctccacctccctggttcaagtgattcttgtgcctcagcctccgaagtagaggggactacaggtgcctgccaccatgcctggctaatttt

SEQ ID NO: 11683 - DNA, 556 bp, Homo sapiens
cagaccccggcccccgccccgttcgccccgcccccgggctgccctcagcgccgcctgattgcatttgcggcctcgctgccgtatcccaggctaagcgccgcgcgcaaagccgtgcggagattggaggccgcgcgggtccctggtctgggccatgtctggctgtgatgctcgggagggagactgttgttcccggagatgcggcgcgcaggtaggggcggggccaccggtgcccggtattcccaggaggagaggcccaggcgggacccggcggctggagctgggcgcrgggtagcgggccgggcgtttagctgcggggcggggtttcgggcctggccgttcgctaccccggcgcaccgcgaccttggcgttcggaagcaaggctgcgaggccccaggagatcagtggtctcgggcggggcgctccgatggcgggagctgggcgccaaacgttggaaagaagcaaataactgagagaggagagcgtttaggtgacctcaccgggtatttatcaggaaggcaggccagagaaggaatcgtgaagcaccgaagtggagctg

SEQ ID NO: 11684 - DNA, 556 bp, Homo sapiens
cagaccccggcccccgccccgttcgccccgcccccgggctgccctcagcgccgcctgattgcatttgcggcctcgctgccgtatcccaggctaagcgccgcgcgcaaagccgtgcggagattggaggccgcgcgggtccctggtctgggccatgtctggctgtgatgctcgggagggagactgttgttcccggagatgcggcgcgcaggtaggggcggggccaccggtgcccggtattcccaggaggagaggcccaggcgggacccggcggctggagctgggcgcagggtagcgggccgggcgtttagctgcggggcggggtttcgggcctggccgttcgctaccccggcgcaccgcgaccttggcgttcggaagcaaggcwgcgaggccccaggagatcagtggtctcgggcggggcgctccgatggcgggagctgggcgccaaacgttggaaagaagcaaataactgagagaggagagcgtttaggtgacctcaccgggtatttatcaggaaggcaggccagagaaggaatcgtgaagcaccgaagtggagctg

SEQ ID NO: 11685 - DNA, 1492 bp, Homo sapiens
tgaccatagagtacaaatacttgcatcaggcattactttaaggaaatatctctaagtcttttaggacacttttatttatacagtgttaatttatacatagtccctttaaaaaaactttgttgcaagagatattaagtcaaaaccatttgcaaaactgtagcaccccattttttaaaatcccacttttaaatacaaaaaaggtatatataatagtctatatatacatacatatatggttattatatgcatggaaaaattgggggagactctattccaaattgttaatactgatattttcagcagaggggggaaagacattacagaagacttttattttctacagtatgcatttctatattatcaaaacttataaataataaaaatacatgttacttcttyatgatatcagaatagtttaaatacttctattcattaatttgagaaaaggggcatgcaactgtggaaagtgtggtccgcacatggaatggacataagtgtcttgcctggaaattcaactccaactcatctactcactccaaggcatgctggaaacccattataggcacccatgacagaaatctgtcagcattttggaaaccacttgacccctataggatgactatgtgaatgcggagctgttgaaagtgtcactcagttggccaccattgggtcctctgtagacgccctggcttctggtgcacatagtgtgtctgcagcagctctgctctgccatgactccacattttatgtctgttagtagcttgggagaagttggagtggggttaagaagacatattctgtgggctaccctccagcttactcctccattagacaattaacaatgtactgaactgatggggtcagattccaagacaccaattggaccacattttctagtggtcaaagtcactgtcggtggcaaaagtcacaagccacaaacttagatgtggctttctctgtgatggcaaaaggaatgggctgagccagagttgtctctccgggaagccttgcccatcttgctttccacctctctccctctctgtgagtacgagcgtggcaggcttatagatcagccagctggggaaggagttagactcaaggcagagaagcagcctcacttaggcccggagtctggtcatggactccagtttggtttaccagaaaccgtacatcagggtaaacaccacatgtccaggtaacagtgacgtacagtgaagggaagagcttcattcactgatgtcaactcttgcttggggccacttcctttttcacagagcaaatgattctttgaagtccaactctacgtggcgcacccaaagccagtgatgacggggatgcctcctgactccaaaatttgacttctagtggaggatgagatttacaaaacgctgttttttgcgaccgagggtgggaaagtcctcacttttccatagtgttcacagagtgaagatgtcatgatataggcaccttccaaagtgtgctggtcccttcc

SEQ ID NO: 11686 - DNA, 1492 bp, Homo sapiens
tgaccatagagtacaaatacttgcatcaggcattactttaaggaaatatctctaagtcttttaggacacttttatttatacagtgttaatttatacatagtccctttaaaaaaactttgttgcaagagatattaagtcaaaaccatttgcaaaactgtagcaccccattttttaaaatcccacttttaaatacaaaaaaggtatatataatagtctatatatacatacatatatggttattatatgcatggaaaaattgggggagactctattccaaattgttaatactgatattttcagcagaggggggaaagacattacagaagacttttattttctacagtatgcatttctatattatcaaaacttataaataataaaaatacatgttacttctttatgatatcagaatagtttaaatacttctattcattaatttgagaaaaggggcatgcaactgtggaaagtgtggtccgcacatggaatggacataagtgtcttgcctggaaattcaactccaactcatctactcactccaaggcatgctggaaacccattataggcacccatgacagaaatctgtcagcattttggaaaccacttgacccctataggatgactatgtgaatgcggagctgttgaaagtgtcactcagttggccaccattgggtcctctgtagacgccctggcttctggtgcacatagtgtgtctgcagcagctctgctctgccatgactccacattttatgtctgttagtagcttgggagaagttggagtggggttaagaagacatattctgtgggctaccctccagcttactcctccattagacaattaacaatgtactgaactgatggggtcagattccaagacaccaattggaccacattttctagtggtcaaagtcactgtcggtggcaaaagtcacaagccacaaacttagatgtggctttctctgtgatggcaaaaggaatgggctgagccagagttgtctctccgggaagccttgcccatcttgctttccacctctctccctctctgtgagtacgagcgtggcaggcttatagatcagccagctggggaaggagttagactcaaggcagagaagcagcctcacttaggcccggagtctggtcatggactccagtttggtttaccagaaaccgtacatcagggtaaacaccacatgtccaggtaacagtgacgtacagtgaagggaagagcttcattcactgatgtcaactcttgcttggggccacttcctttttcacagagcaaatgattctttgaagtccaactctaygtggcgcacccaaagccagtgatgacggggatgcctcctgactccaaaatttgacttctagtggaggatgagatttacaaaacgctgttttttgcgaccgagggtgggaaagtcctcacttttccatagtgttcacagagtgaagatgtcatgatataggcaccttccaaagtgtgctggtcccttcc

SEQ ID NO: 11687 - DNA, 553 bp, Homo sapiens
tggtgaaaccccgtatctactaaaaatgcaagaaattagccgggcgtgtggcaggcacctgtagtcccagctactcaggaggctgaggcaggagaatggtgtgaacccgggaggcggagcttgcagtgagctgagatcgcaccactgcactctagcctgggcaatagagtgagactccatctcaaaaaaaaaaaaaaaaaaaaagagttcaggcccagcttcagagttagagcatcagcttctctagaccaccagctcccacaactacgcaagggtaaccaccttactaagtcacacacagtggttctgtttttcccattgatcctgacagaacatgcatcttaaagcctcttaggtgctgatagtacaaagccttaatgtgtgggtttactctatctttttaaagaatgttcttcattacaaaagaaagaggtgtgtctaagtgaattgacattttggaaagtcacaggtattatggttgggaaatatatgcccatttactatttatctattamggcaatccttatttaatgacatatatatacatatgtta

SEQ ID NO: 11688 - DNA, 517 bp, Homo sapiens
ccccctaatttcaacccaacatcacagagtttattctagtattcaccttttcatgtttgtacagtgaggagtctagatgaaataattatcaaagtttgtatatatttgctagttctcccctgtgtatgaacagtttaacagccacagaacaaaaagttcagtgctgggcaagcttcatgacctgcactctggcacatctttcaaaaaacataacccagaagaggaggaaggggaagagaaaggaggaaagaagaaggaagtagggaaaggtaccatacttatttttgtacattaatgtatggtttgtatttatgttatttagggtgtgtgtatacacactaaatactatatatatatatatatatatatatakagagagagagagagagagagagagagagagagagagagtgtctcacttattctgccacccagactgaagtggagtggcatgatcacagctcactgcatccttgaactcctgactcctgggctcaaatgatcttcccacctcatc

SEQ ID NO: 11689 - DNA, 567 bp, Homo sapiens
gcatttctcaaaacggaaaacttcaaaaccctacatttgcttaaaaaaaaactaaatttattatttgaaaaatttccacaaagatctacaaatacaaatagttttcctggtgggttactaagtagatatatatgtataaataaagtctacggaaaggggggaactttgctccaggaaaggaaggaacacatacacactttttccatgaaatcagcattaacttgaaacaaacactgaataaaagtattgtaaattatttatagatcaatggctttcataaatacaaatgcttaacaaattataaatgaatcmaattcagtaatatttaaacaggataatatgttacatctaaaagctattttccccaggaacattaatttatgttaacatgcacaaatttcttaaagtatttcactatagtaataaaatttaaaaataatataattatctcaataaataaagataaatttgtcataatttaaaacccattcatgatgaatatcctgagcaaattagaaagaaaatcaacgtcttcaattcaataaagtgtatctattaaaaacctac

SEQ ID NO: 11690 - DNA, 567 bp, Homo sapiens
gcatttctcaaaacggaaaacttcaaaaccctacatttgcttaaaaaaaaactaaatttattatttgaaaaatttccacaaagatctacaaatacaaatagttttcctggtgggttactaagtagatatatatgtataaataaagtctacggaaaggggggaactttgctccaggaaaggaaggaacacatacacactttttccatgaaatcagcattaacttgaaacaaacactgaataaaagtattgtaaattatttatagatcaatggctttcataaatacaaatgcttaacaaattataaatgaatccaattcagtaatatttaaacaggataatatgttacatctaaaagctattttccccaggaacattaatttatgttwacatgcacaaatttcttaaagtatttcactatagtaataaaatttaaaaataatataattatctcaataaataaagataaatttgtcataatttaaaacccattcatgatgaatatcctgagcaaattagaaagaaaatcaacgtcttcaattcaataaagtgtatctattaaaaacctac

SEQ ID NO: 11691 - DNA, 626 bp, Homo sapiens
aaaccgaaactggtgtagacagatctctagaaaaccacctctagctcaggctttagaaggaaaggggtcttctgctagctatcccactggcagctgggacccagaagtccctaaaactccagaggagctgtgatcccaagagagtaggtaaacccaaattgcacaaaagtgtgcaagaaaataaagtacatgaaccccagctttctggccagagaaacaaaacagaaggctgagggaaccataaaatgctgggaagatcatggagaagaaggagattgaaaaaataaccccataaacttctttaggaactcctggactcattcccaaggtgtggtgcatgaatagatctcattctaatcagaaaccaaagactggaattggctacgagggaacacatgtgggacagactgaaatagcactgcaaagatttgaaaacagactgacaccagaaccataacccacagaaagctggctagaacttggaatctgaacycaacaggatcagttactaaaacaaaaatatcaatgttctccagaggatttaaacaaaacccaaaccctcataacataatattcaaaatatccatggtatcatccaaaattattcaacatgcaaagaaccaaga

SEQ ID NO: 11692 - DNA, 608 bp, Homo sapiens
tactgtcacttatcagttttctttttataatgaggtaataaaacttttttttgaaaatttctrttttacctgctatcagcctctctgtatcaggtagatgtgtgaactgtcttctgtattcctcattcctgtctttataggtggaacttgaaatctgcaacaataaaaagattacatttctgtctaattgtaattatagtgtcctagaaaataaatatcaagtggaatttaaaatcatatgctttctatgcaatattttgtatgtccttatataaataaacatttcaaaaacaccaaaaagaagcaaagaagacttccagcatgatgagatgaggagtttggcaatcccctctgcaaaagcaaatatataactagaaaaaaaactgtcaaaaataatcatctcaaacgatggaaaatgaccaaaggcatacaatacaatcaactgagaagtatttgttcatgaaaatccactgaacttaggtaaggatggtggaagtctgtggcactcattcctgggcctgttcccattacccttcttccttcacctgttaagtctttgtggtagttctttgggggtgggaacagatcatgaaaactggcagctatct

SEQ ID NO: 11693 - DNA, 1817 bp, Homo sapiens
ggggactactgtatagttcaacaaataatttttagaacaatagaataaggcatattttaaaatgatgactatgtgggatgcactaactccttgtgccataggatcttatgaccagtcggggttggccaagagttaacaggaaaggctttatgtaggaagagggtttttattgtacttttggctaaaacatactttcctatgattgtgctctggcaactctagtaagaaaatagtataaaaatacacattgttatcctttgtctatagtttttttattggcttcttcatgcttcagctctcctcctataatttctcaaatgtgcattgcctacagattctcaaatgtcttctatatatactcaacaagtgcccagttgtctcagggtattgaagtttacccaaacctcacatactcctaatttccagcaaagcttcccagaactgtttattccagtccctgtgaaaattcgaagacacacaataatatttatctgattaaagtaattcacaccaatttataaaaggaggctttaatcttccttgtaattagttactgaacctaagaatctaagccggttttgactgcaagacacatttcttttttaatacaccctaggaaatactgccaattttaactgcaagatgccattgatcttaagacacatccagatttcagatatgttaatatgtgataaaatatgaagtttagaatttatgaaattttgtataagtgatgattaggtaaggaagaagaggacagcagttaactccctccctttctctctctctctctctctctctctctctctctctctctctcgctaataaatactcctacagggcactctggtaggtgcttgggccccatagttttaagtttgaggagttcaaatttcagtttcggaataataataagtaacaaataattaattatgaatcaagagaataatctaggtactgaaaatcatttcactgctctttgtttccccattacttagtgctatagtaggcactcagttaatatttattgaactgacctaaagtgagaagacctaaactgaaaagaaaattcttgtggtttattataggccaatttcttttatgaaagattctaggtagcatctgaagagaatgcatccccaccttgaggaaaggaaaacaaattcccttgaattcaccactaaattgcatttctctttccaatcccacacttcacactggccaaagcactctaatgaaaacaggctaagaaagcccatcctatcacttaggcagctggtgtgcaccaaagacagatgaatcttagaaccaaggcttcaagtaatacrcgacgatggagaaaatgatactcaaacctgtgacagtgagattattcagctaatgattcagagcccactcaatgtgacatttaaactgttatccagcaatctcacactctgtttaggcatgccatatgtaaattctccattaatactagagtcacattgttttctcagtaggattctgggggaagcatctgattatgtgttttgcctccttttcttccttttagtgtttgacccaagaataccagacagataaaagaaggcaaagaagttgaaaatatgacagttctaatggagaccttgtacctttttagcagttccctgattctaacaggcttcctttatgagaaaataacccattagattttaatcattgcaagtttttcaacagttgaactgtgataataacaacttgattaggaaatgtatcctattgctataaaaatgctagtgcttgaatctgatatcacagtactgtgctggagctcactc

SEQ ID NO: 11694 - DNA, 668 bp, Homo sapiens
gttgcaccctgtcatggcagccctataaactaatacaataataayatatttgttctctacatttgaattatgaaagttccttcactatctgctgctgtctcttagtaactaaatctttgatcaaatgtgggcacttcacaatatagttgttttctgtacaagatatctgcatcctctttaattaataaatattgtgcatatataccgcctacttttcgaagatttcaccacttttcaagtggatgaaggctgaagataaattaatgtgatgaaaagaaaataacaagcatgttattaatacttttaaaatctattagatactggagtctcaaaattagtattattttagtagcccaggttttaagctttggtagaataataaagaaaatattttatttccatatgcccttaggtgtatttcatatagtatattttatataattatgttttacaagtttattataggtacagtattttaaagcaattcaaacacaagatgcaaacatattctcctgataaccgcaaattataattttattataattttgcattactgtatatggttattaaatattaaatgatcaattaaagaatatgttaaatacaaatcaagatataagccaggaaatctattctgaagaattaatttatcaatgaatagtgcacct

SEQ ID NO: 11695 - DNA, 529 bp, Homo sapiens
atatagcaactattttttctgattataaaggaatatgaaaactccaaaattagaataaacattttaattgtcaagtattggaactatamggacataaccatgattaacattttagtgtgtttgtcttataaaatttatcatatgactttgttctaattgatgtaaaaactcctcatttatttttggtcattttttgtttccttttgccaattatgttatctggaaataacatttttaactgctcaatatcaaagtttattttactcttttgttatagttttttgttgcagaattgataggagcttctggatcataccacagatctgtggtagacttcatactttaaaataaattcattttaatttaaatgtcaatgactgtttgcaatagaggtgttttccttaatatgatcatctccttgtagcaaaaaaagttcttcttcagaaatggaagttatctcttcagtatctcctaaattaccatatttacttaactctcccttaacctattaatgtaaaaaatttatatt

SEQ ID NO: 11696 - DNA, 529 bp, Homo sapiens
atatagcaactattttttctgattataaaggaatatgaaaactccaaaattagaataaacattttaattgtcaagtattggaactataaggacataaccatgattaacattttagtgtgtttgtcttataaaatttatcatatgactttgttctaattgatgtaaaaactcctcatttatttttggtcattttttgtttccttttgccaattatgttatctggaaataacatttttaactgctcaatatcaaagtttattttactcttttgttatagttttttgttgcagaattgataggagcttctggatcataccacagatctgtggtagacttcatactttaaaataaattcattttaatttaaatgtcaatgactgtttgcaatagaggtgttttccttaatatgatcatctccttgtagcaaaaaaagttyttcttcagaaatggaagttatctcttcagtatctcctaaattaccatatttacttaactctcccttaacctattaatgtaaaaaatttatatt

SEQ ID NO: 11697 - DNA, 627 bp, Homo sapiens
ttcagtaatattgcgccacttgatcaaggctttgcagacatcttccaagccagtgatatgtcttcattatttaagacagtttgagttttatttatcattatatgcaacagattcctgaacaatgcactcatgtggaatgacagcttctattcacttgctatctgaaaacatttcttaacacataattcccatttcctttttcccattattttgaagaaaaaaraactataatttcaaatcatagctcattgtctattcaagttcaagatcaaccattttctcaccagatactgtaatctcagttctttcaaagagatctcacatgtctgttactaaattttaattatttaccttgtttttcatatttttatatcaaaaaattcaataattgaatattttttgttaacactggtcatttcttgtctccccatctcattattcatggaactcccatctcatacatttagcaatgttttagtataaaatattgaatacctaagaaggaaccagatagattactaaaggtaccatttatcttaaaagaatacaggacttaaggaccagtgaaaataaatttatataatggaggagattaatattaggaaatgagaatgtaagagcctctgt

SEQ ID NO: 11698 - DNA, 627 bp, Homo sapiens
ttcagtaatattgcgccacttgatcaaggctttgcagacatcttccaagccagtgatatgtcttcattatttaagacagtttgagttttatttatcattatatgcaacagattcctgaacaatgcactcatgtggaatgacagcttctattcacttgctatctgaaaacatttcttaacacataattcccatttcctttttcccattattttgaagaaaaaagaactataatttcaaatcatagctcattgtcyattcaagttcaagatcaaccattttctcaccagatactgtaatctcagttctttcaaagagatctcacatgtctgttactaaattttaattatttaccttgtttttcatatttttatatcaaaaaattcaataattgaatattttttgttaacactggtcatttcttgtctccccatctcattattcatggaactcccatctcatacatttagcaatgttttagtataaaatattgaatacctaagaaggaaccagatagattactaaaggtaccatttatcttaaaagaatacaggacttaaggaccagtgaaaataaatttatataatggaggagattaatattaggaaatgagaatgtaagagcctctgt

SEQ ID NO: 11699 - DNA, 533 bp, Homo sapiens
ttagcaactagctttagctagtttccgatacaagcactctaggccactccttgactggccttcccttacatctgcaatttgatgaaattttcagttaatgattattttaatggcccattgtctctgtgtctttgtgracttccttatatcttcaaaaacttataaatcataaaaacaaaattaaaaagttatgattcatgaattgggtgaacacaggtggctcagggtcatgaagccctgcctggattgacggcccatgagagtgattcccctccaggctcaagaaagagtagggagcctcttacctctctggggcctggaggagaacaagatgttggcttcctcagcatggagagggcactggcccactctgcaggtcaaatctgatgaaaacagagtaaacacagggcctctgatcagactggtgatggagtaggagcagggactcttgggttttaatacctctgtctcctgatctttagaatattctaaaacattcagctttacttccaaccattcacaggtggatcact

SEQ ID NO: 11700 - DNA, 533 bp, Homo sapiens
ttagcaactagctttagctagtttccgatacaagcactctaggccactccttgactggccttcccttacatctgcaatttgatgaaattttcagttaatgattattttaatggcccattgtctctgtgtctttgtggacttccttatatcttcaaaaacttataaatcataaaaacaaaattaaaaagttatgattcatgaattgggtgaacacaggtggctcagggtcatgaagccctgcctggattgacggcccatgagagtgattyccctccaggctcaagaaagagtagggagcctcttacctctctggggcctggaggagaacaagatgttggcttcctcagcatggagagggcactggcccactctgcaggtcaaatctgatgaaaacagagtaaacacagggcctctgatcagactggtgatggagtaggagcagggactcttgggttttaatacctctgtctcctgatctttagaatattctaaaacattcagctttacttccaaccattcacaggtggatcact

SEQ ID NO: 11701 - DNA, 505 bp, Homo sapiens
tcatgagaactgcatggaaaagacccactgccatgattcaattacctcccaccaggtccctcccatgatatgtgggaattatgggagctgtaattcaagatttgggtggggacacagccaaaccatatcactctcctactgaaggaaccatcattgttgccaggcaggaactcttcatcttgcttggaatacacacataatgtggagttgcaaccaacaccttgcagccctgaggtggtaacccacagctaaggaacaggatgtggaaaattaggatgagaaagagtctttgatgagggtgagctgctgctccagctctgagtgcctacttgtagacttcttgttatgtgaaataattaaatgtccgcttgcttaagcctctgttagttgkatgttttgtaagtgcccaaagaagagccaagaatggctctgacttgtgggcagttgggagacacagaagggttttgggaatgccatgatctgatttttactttagcaagatttt

SEQ ID NO: 11702 - DNA, 525 bp, Homo sapiens
gtgtatcatctttcatgatcttgcttctataggcaaaatatatgaggaatatatatttagttcataaaatgcttgagttttcttagtgtactgtttctgattttaatccctaaatttaggaaagaaaaaatatttaaatataagaagtgttttttttaataaaagccatgacacttgctgctatgtagagatataacatatttttctataaattttattaaaaagtgattaaagtaatttgccttatcctagagggataagataataaggattcaaacacacacacacactcacatgttcattcaaatcaattcagcctatctcttgtacyatttttttttataatttagttgaatctgattgtaataaaaatgagagaaacacctacaattttacatagttggaagatagatcattatagttttcattcctagtcataagggatctgattccattccaatacactgattaaaattgaagggtccatcccagcacgattgtagattccattaaactcttccccta

SEQ ID NO: 11703 - DNA, 534 bp, Homo sapiens
gagaaaatgtactactttaatagtatttttcaatttaatttaattacaaaatcaatacatatgcataataaaaatccaaataggaaagaatgatataataaaaaataaaaagatcactctccccacaaacccaagtttcactcctagaggcattaattataaaattacaaacaggttattttttgttttcttgtttgtttgagacagagtattggtctgtcatccagactggagtacagtggtgcgatctcagctcactgcatcctccacctcctgggctcaagtgattctcgtgcctcagcctcccaagtagctgggactacaggcacgtgccatcacacctggctaatttttttgtatttcttttgtagagacagggtttcacaatgttgcccaggctggtctggaactcctaggcttgagcaatccaccggccttggcctccaaaagtgttgggattacaggtgggagccaccatgcccrgccacaaacaggtgcttttgtagtctcttaaagaaaagtcctatgcattaa

SEQ ID NO: 11704 - DNA, 464 bp, Homo sapiens
aattttaaaaatcaaagataattttttaaaaaatcatattggtggtaaaattgatgatatatcaaaatatcgaattatagtctcattttaatttatgaatcctaagttgtaggttccaggaaaataaaatggatgctaaattgtttgtgtcatatgacaaaatgtcaaatgacatagttttgtttcatcctttgataagttatttatgtaaatatatattatataatcataaatgtgtttgattgtttacagataaccaccactttaaaaataactatcagacatataagaatatttaacttagttcacatgaaacataaaaatgtaaattatargaatgcacacatacaaaacaaggtagtatatttccaaatatttaagttgtagcatttaattcaatttcataagaaataaagtcttgagattaatttaaaaccataaatccaaactatatgctatttacc

SEQ ID NO: 11705 - DNA, 1269 bp, Homo sapiens
tgcatttcttcatccgtatcttctgtgataatcttttataatcaactcgtaaacctaagtgtttccctgttctataagccgctccagcaaattagtcaaactcaaagagggggttgtgaacttgaagccaatggctcagaagttctggaggcctgggcttgtgactggtgtctgcagggactgggaacggtcttgaggactaagccttcagcgtgtgggatctgatgctacctgcaggtagatagtgtcagaattgaattggaggacatcagcctgatattaacagagaggacaaacagtagctgagaggaaagaaatgaataaattgagtattaattgaggaaaattcaatattatattaacaactcgaaagagtctcaaagcaagagatgatattgtctctcagcgyaattattccagatgcctgaaagggtgaagatacacatttgccgagaccactcctacttttggaatctgacaagattgaaaggaagcctataagcatgagtaacctcaccctggcagacattcttacaatgtggtggagtggactaattatgaatggttctgtatatttttttgatgtaaaagatccatggccaaaaaccagggggtggcctgtggtggtgagatatatatatatacatatatatatatatatgtgtgtgtgtgtgtgtgtgtgtgtgtgtgtgtatgttttcattagttttcatctatggttcctggttaataactcctaaaatccttgggatttccaaagtgctgtcttttgtgtgtcttctgtctgataggttcagggtggtgctggtcacaggaaagactaaggcgggattagaggactggactttcagccccacattgcaacctccagggaggggacaggggctgaaggtcaagttgatcaccgatggccaatggtttaatcaatcatgcctacataacgaagcctttataaaactgaagaggacaggattaagagagcttccagacaggtacacatgtgaaggttctggagggtcagcgccccagggagggcacacaaacttcctacctttttctcccatactttgccctacatctttcttcattctttgtaatatcctttataataaaccagtaaatgtgaaaaagaaagaaagaaagaaattttacataaaaaatttgatttttctaagacaaaaagggcaaacacacacacacaaaagatcttcagcctcattagtagtaaagaaaagtaatttaaccaccctcccaaaaaattccatacta

SEQ ID NO: 11706 - DNA, 568 bp, Homo sapiens
catcttttcctgttgattcctgactattatacttagtgaatattttagggatcatttaatgacaaagaatagaagctcacacatactagctcaagtacaatrtgaacttacagacaggacacagggcagtaaggaacatgtatcaggtcatctggtaagtcagtacctgaaaccatctcctcagtctcttgtggcacgaggctatggtgtcccttatttctgctctttctacacatctgctgtcttcagctactgtcttatattggtattatttgtctgtctcgtgaactttctttgtctggtcatgctacaaactcctgctgtgaccctatttaacctttcagttcaaggaatcctcaccatttaattgtgtttctcagtgtcctatttgaagtttcctgggagagagaatctcagtgttcagtttgagttaggtctatttatggtccactcaggtgtggtggaggagaggggtacacaggactgtcctttcagggatgtgaataggacttccaaggaaggtgtatgttcgatgggaaattattggtatctctacgtagtgcagtaa

SEQ ID NO: 11707 - DNA, 564 bp, Homo sapiens
cagatgtttgcgtgagatccaagttgagaatgtagtatttaagaaaaatttagaagtatataccatgacacatattgacaattttatattcaacttttatgtgtgttttcaatgaataatccaaaactatgaaccaatttatttaatcagcccatttataatgcctctctaaattaatttatactagaagctccaaactccataataaaaatctttccaaactagagtttgccatattaaatggggtgtcttttgatgtgtctattctatatccaaagtgaaaaagagaaactttgstaatggctaattctttaatttctcccccactctgagaagtaaccaaattttggtggtctcttacatcaaagtgtactagagaaaagggaagccatgtctttgttaaccaaaaaatcttctttacttaagtgatgaagttgatagcttaactaatccttgttcccaccccagtcactctccactcttaccactcacactgtacatgcccttctctaaaccattttaataatcttcctaatgaatatttagttagcatgcaagcagatt

SEQ ID NO: 11708 - DNA, 551 bp, Homo sapiens
ctatgtccttgagtttgtttcgattttagatcccacaaataagtgagkacacgcaatgtttctctttctgtgcctgtcttattttacttaacctaatgatctccatttctatccatgttgttgcaaatgactgaatctcattcattttaatggctgaattgtactccgttatgtatatgtaccacattttctttatctgttcatccgttgatggccacttacgttgcttccaaatcttagctatcatagacagtgctgcaacaaacataggggtacagatatcttttcaatatactgattccctttattttgggtggaagctgcagtagtcatttaactaaacttttctcaaaatgatgcatttataaattattttcttccttcaggaaagagtacatcatcaacattttttcttatgttaattcaatatgtgaaggagatagaagtagggaactcactaattttgaattggacactggggtaggagctcctagtcatttaatttaagccttaaagcaactttaagcatacattttatttatcctacttta

SEQ ID NO: 11709 - DNA, 526 bp, Homo sapiens
tgaagaaataataactagtaactgcgtcttctgttaaaatacaaaacaaaaatcatgccacccaatcaaaggtcatatttgtgatttctagattattgctttgctggattatctttatttctgcttctctccactggcatgtatcccaaagaatttatcattactgataagttatacatgcaatctgttagaaataaggatggcctgttttaatagtagtgtggaatcartaacatcctagtcttccttccttggaaatggtagattccaaataaagtgtatttcatctatatcactgcacttgaaaatttttcgtcttttttgaagtcatttgttattcttaggcagtgtttcaattattttagaaattttcagaaaaaaatagatttttgtctttcatttccaactcttatacttgcttttatttgtaatagtcacatgcatggtagttcttttatattaacacacagctaatctctttttttacccagaaaacaagaaaatctgtatttcagtcacattcaaa

SEQ ID NO: 11710 - DNA, 553 bp, Homo sapiens
aatattgaaaatttgagaaaagctaaatgtattaaatgtaaaacactagaaatcctcacagtgcgtatctggaagaaaagaatrtattcaaatgggcatgatgtctgtctgtgtttcctttctcatcgtttctgcctcttcccccatccccctttgaaagcaaacagccaaatattcacaataacctaaagagtgtatgagtttggggatatttcccagcaatcatctataagctaataactgtcaaaggacagagatgatatcaaaaataaggtcaacatttagaattggaaacaaaaataatctataatgataagaaattccccttatagataatccagtactttaaaaataacaacaacccctttcaccttggctgctttcctgcagataaacagaagccataacacagaactcctgttttgataaccttgatctcttgagtccactgtcatttcaagttctgggtctagaaagacatatttattttccctgaagctttccataaaacacaaggaagtcttagaagatataatagctctgaaaaatcaca

SEQ ID NO: 11711 - DNA, 849 bp, Homo sapiens
  misc_feature (1)...(849): n = A,T,C or G
gaatacctagagaactgttaaagatttattttgggtatatttgtgagggtattttcagaagagattggcacatgagttgctgcactgaatggggaggatctgccccctatgtggccatccagttggctaggagtctggataagaaaaaaagacaattttctctcattctgtctgctggagctgggtcactcttctcctggccatggacatcagaactccaggctctctggtctttggactccagtatttacaccagtgggcctccaggttttccgagctttgtctttagactgtcacttacagctacacttctctggttctgaggccttcagacttgaactgagccaagcaataggcatctcaaggtctctaacttacagaatacctgctgtgggacctttctacctctatattcatgtaagcccattctgttaataaatttcttctcatatatcagtgcatattctattggttatgtccttctggagaaccctaatatagtttccacattgattttctgtctggacgatctgtctcatgttttatgcaacattattcacagtagtcaagatatgaaaacaaccaaggtgcccaccaacagataaagaaytgtggtatttatatacagtgaaatactattcagccttaacaaagtgaaaattctgtcatttgtgtcaatatgaataaaaccagaggatataatgctaagtgaaattagctagacatagaaagatacataccttatgannnnnnnnnnnnnnnnnnnnnnnnnnnnnnnnnnnnnnnnnnnnnnnnnnnnnnnnnnnnnnnnnnnnnnnnnnnnnnnnnnnnnnnnnnnnnnnnnnnngg

SEQ ID NO: 11712 - DNA, 504 bp, Homo sapiens
atttcatgcaaatgaatttttttttctttgtaggcttttggtaacccatagaagtatttgatcagagatatgaaataatcaatgcaattgtttaagaagatcatctgacagtggtgtacagatatattggagtaaaataacacacaccagtgagatgaggtgggaagcaagaacaattgtccccatgagaggtgacaaaaaccattatttttttctgtaatatttagtgtattgtatcaactgaaattatttaccttgctaaattgtgaatggctttttaatttcttcccaaatttacttttagtaacagaacaatgaatggcacattgatccgtgttttattcaagtctaactcaactagatcctgaattttcatactatatttggcagggatgactgtcatcacaaytttgtgaaataatgtttaaaaatgaaaatccaaaacctagctacaattgtctttgaagtttgtcagtactgttctatgataattctgtgaaggaa

SEQ ID NO: 11713 - DNA, 556 bp, Homo sapiens
gattttcccagaatcagaccctgagccaaggattttagtgcaaatttttgcatgcgtgtggtgatctcaaaaagcaccaatacaggactgcagaagtgaaatagagaataacagaaaacgaatctgaattcaggataccttaacaagcaggttaccacttggtgaaattggattaggtctcactgggcccctccagtagatgtagaatttgcctcagagttgttccattcaaggggcaagaaaggtggagattggcttctggayggccaaactccaggagaagaccaatttctactcctcattgtttaaaagctgtgctcatggacagtaactccctggagattacagaggccaagcaccctccacccaggaaaccctctgactaagggatgcaggtacctcaagtaaagaagttattggcatgtatgggaaacataattgcataggggatatggctgtaactgctctactgtacccactgtactgcacagattcactcatgctttgaattaaattccctccatctagtcactattcttcaatgtagtggctagtc

SEQ ID NO: 11714 - DNA, 511 bp, Homo sapiens
acaaccaaattatctattcatgcattttccattgtattgaaactggtgatagctttgtcttaagccaaacatagttttgtacagaaacagacatacttaaatttggtgatcaattttggaatccagagagaatagaactctcctttatgcaaaaataattgtcccaaagaaatcttggcttcagaayctcaagttatcaaggctgtcagaggtcttatgatagtccataaaaaccatttgctaaataaatcatttgtgttgaaactataatttacatgatttggtatactgggaatatagctggtactcaagtaatacttttgaaggaatgaagagcccacatatacaattatagcataccatttttatttaaatagccttcattgaactcttctgtctggaatagtaatgggaaagttcaggagacaggagatagggcctggaaggtagtgcagatggggctgagtgtgagttttgtctataaaaggcctctggctgagtatgggtgggg

SEQ ID NO: 11715 - DNA, 439 bp, Homo sapiens
ttcaggatttgccccatcgcatatctggagttcggggtcttagaaagctttcttgccctgttaaaaattaaaggatggcttcaatacatacttagctgcttggctacattgcagaaaaacaaattgcctttccagagatcagttttttgagacagggttttgctctgtcagccaggctggagtrcagttgtgtgatcatggttcattgcagccttgacctcccaggctcaggtgatcctccagctccagccttctgagtagctgggactgaagtcatgcaccaccaggcctggctaatttttcaaattttttttttttttttttttttttttttggtagagatggctttctctatgctgcctgggctggtctcaaactcctggtctcaagtgatcctcccacctcagtctccctaatagttcgacctacaggcacaggg

SEQ ID NO: 11716 - DNA, 553 bp, Homo sapiens
atttattcttcaccaggctgataatatctgcctaattttaaactttcttccattttgtaggtttcaacttattctattgtaagatactgttaaatctaatagaggcattgtcacttttacgtataattttattttatttcatatatttcctattggytttttacatttaaattatggagcacttcatcatataaaaaacttcaattatatttaaacagtaagtctttggatttttttgccttttaatttccatattacataataatgagataaacattaatgttttcagggtactttaaattttagataattactcattgtattcatgtgaaatttgtttttactgcatgtgtgggttggaggacggttttcacttctgattcatctttactcttatctcatcagagctcatacctcttgtagttgggggattgcagtttataattccaataaatggggcaaattcaataataacataatacaaatgagtttgaatgcaggacaggtcttcaaagcatacacaacatgggcctacatatgtacaacaataata

SEQ ID NO: 11717 - DNA, 516 bp, Homo sapiens
gaaaaaaaaaaaaaaacccactggcaagccctgcgtaaaatcttgattgattaaaaaactcatggatcactgaaactaaaaattcagaaataaaccaaagtgtctaagaaagtgtcatagtgcatcttggctgctataacaaaataccttagactgggtaaaggataaataagagaaatgtatttttcacagttatggagtctggaaagtgcaagatcaaggcagcagcaaatttcgtatatggtgagagccctattccccatagatggtaccatctcgcacatgggacaagggcattcccttcaacttcctttgaaagagcactgattccattcatgaagatgaagaactcttggcttcaccactttcccaaaggcctcacgcctaaaattatacacatgaatttgaaaggggacataaacattcaggccatagcaataaaaactacatgggtgrtggcatcatttatacatgaggtgtaaaaatgtgatgttcttatcacaaaggaaataaatg

SEQ ID NO: 11718 - DNA, 539 bp, Homo sapiens
tttttttttgagacagagtcttgccctgttgcccaggctggagtgcagtggcgcgatctcggctcactgcaaactctgtccactgagttcacgccattctcctgcctcagcctcctgagtagctggggatacaggcgcctgccactatgcccggytaattttttgtatatttagtagagacggggtttcaccatgttagtcagggttgtctcgatctcctgacctcgtgatccacccgccttggcctcccaaggtgctgggaatacaggcatgagccaccacaaccggccgaaaaataattctttagatatctacagcattcaactgtgtgcactcatgaaaagcagacaatttaagtcattagaatttaataaattgcagtaaaattatacagaaaatacattacaatcattaataacaggctctaatgagaggaatttaataaataatcattaaaaatacaggataattttattatgttctcaatatgttgctgcacttcttaccacaaaacataataaaattatatgactataata

SEQ ID NO: 11719 - DNA, 490 bp, Homo sapiens
acatttgtagttttctgtccattttaagtttgcttcttttttttctggttctgtctttcctgtggtattgttcatttttgttgagacaaagttatgctttcttgctcagactgaagttcagtggcatatcacagctcactgtagcctcaatctcctgggctcaagcaatcctccccccttagccacccaagtagcttggactacttggacacgtaccrcaacacccaaggagcttatgattcttccaccttggcctccaaaagtgttggaattataagcaggagccactgtatccaatgtgtaatttttgttgtttgtgtatgctttaattactttctctttttctttactatgtttttttttcccccagtggttatcatgagacttatgtaaaacctcttgtattttaatagtctagtttaagatgataacaatttaaagtattctgaatttcagtatgtatttaccatttttagtgacatttatactt

SEQ ID NO: 11720 - DNA, 490 bp, Homo sapiens
acatttgtagttttctgtccattttaagtttgcttcttttttttctggttctgtctttcctgtggtattgttcatttttgttgagacaaagttatgctttcttgctcagactgaagttcagtggcatatcacagctcactgtagcctcaatctcctgggctcaagcaatcctccccccttagccacccaagtagcttggactacttggacacgtaccacaacacccaaggagcttatgattcttccaccttggcctccaaaagtgttggaattataagcaggagccactgtrtccaatgtgtaatttttgttgtttgtgtatgctttaattactttctctttttctttactatgtttttttttcccccagtggttatcatgagacttatgtaaaacctcttgtattttaatagtctagtttaagatgataacaatttaaagtattctgaatttcagtatgtatttaccatttttagtgacatttatactt

SEQ ID NO: 11721 - DNA, 490 bp, Homo sapiens
acatttgtagttttctgtccattttaagtttgcttcttttttttctggttctgtctttcctgtggtattgttcatttttgttgagacaaagttatgctttcttgctcagactgaagttcagtggcatatcacagctcactgtagcctcaatctcctgggctcaagcaatcctccccccttagccacccaagtagcttggactacttggacacgtaccacaacacccaaggagcttatgattcttccaccttggcctccaaaagtgttggaattataagcaggagccactgtatccaatgtgtaatttttgttgtttgtgtatgctttaattactttctctttttctttactatgtttttttttyccccagtggttatcatgagacttatgtaaaacctcttgtattttaatagtctagtttaagatgataacaatttaaagtattctgaatttcagtatgtatttaccatttttagtgacatttatactt

SEQ ID NO: 11722 - DNA, 521 bp, Homo sapiens
atccttacagccacctggggcctttccagttttgaattatataagatgtgatgactttaccctcctttgccttcagttccatcaccagaatcaaccactgtcaactagtttgatgtaagagaagaaaaacattttctgttctgctaaaagtactggcaatagtttcacactatttagtaactaatctgcagcttgagaagcyagctttatttttatatttatttctcaaatatacctagataggggctgtttctatgttctgttacatttatctgtccattccaatgccagatagtactatgctgattctaaatcaggctttatagtaaacgtttttattatccttttccaaaatttcttgggattcttttacatttattcttccatataaatttctttttccaccccagaaaatccttaatcatttaaaatttactctgattagaattgtctaaaattattcattgatttggaaataactaatgtaataatgatcagttttttcatccaggaacatatgt

SEQ ID NO: 11723 - DNA, 547 bp, Homo sapiens
ttgatttccagctccattactctgtgcctttgaggaggataaggacccttagttgccacaccatgatatttatcattaaagaaaatataattatgagcctcataaatttgtcctgaagcttaagtacaggacaagcaataaatgcagatacaattatttttactcattttttcaagtatgtgagtcatctatttccccaacaatggctgaaggtcttcagtgcaggaatacaacagtacttcgtaacattttgaactcatcagtcacagatattgaagaccagaaaatattgcaggagttatcgagtcaacttttgccatatattcagaggagaatattggtggccccattgagttgctcaaataaagtaagtggtaaagtgtccttgacttgtttaaaaaaaacagagtcaattcttttatcttataaaagtgctcacattatataaagtaatattttgaaagtcatgttagaatgtgtatttttatatacatgcggttactggtatcactttagtagatgataggaaargtacaaccactcccat

SEQ ID NO: 11724 - DNA, 1083 bp, Homo sapiens
aaatgcaaaaatataattgttctattttgtgtagagctcaccaagaaaaatgagcttctagaaaagcaaatgcaattttgacagaaggcagagaaggccccctccctccggtggaaagaaaggtcatccttggaactgtcctacaaatgaactgtgtgtcttagatgacaccaacatctttcccagtatagygtccatatacggagctttcactcaagaatgttttgagtggcatccacaatgtcagtgcaagtaatggtatgattaaaataattaaaaccaagtcaaggtaaatcagacattgtaacgatatcccctatgacccatcactgcagagttaagaagtctggacaggtttcagggaagagaagggagaaaattcttgaggtttcagggaagagaagggagaaaattcttgaggtgaaaaatgattaggaccctaggaagtgtatcagggctttgaggtacaactgatagaggaggaggccaagattgtggtgataaatcccatttacctgcggcttttaggagagccattccagttttcttctatttacgtatagataagaatttcttttatgtgtgcattaaaaaagaaaaaaaagaaaccactattacttaaataaaaagccaacactctcaccgtcacctctcatctaagaattattttagaaacttgttaaaaatgcaaaggccacacttttagagattctagttcagagatctgaagtgggtgtccaaaaacatgttttgttgttttgttttattctttgtttaaataaaccctttggttgatattgataatggtggtcccagaccacacttggagaaatacctctcaggaagctctatgttttcaaattaagattcacactcatctctcaatacttccaacacattttatgtcctggagctctcctttatctaatgcaggtcttcttgccttccttgaacatataagaaatcttatttattggctacaaacaaaatcaacttccaccattttaccaatatgagaaatctatctccataaagatttgttaattatttgtttgtgtagcttttatataatagaggctttgc

SEQ ID NO: 11725 - DNA, 1083 bp, Homo sapiens
aaatgcaaaaatataattgttctattttgtgtagagctcaccaagaaaaatgagcttctagaaaagcaaatgcaattttgacagaaggcagagaaggccccctccctccggtggaaagaaaggtcatccttggaactgtcctacaaatgaactgtgtgtcttagatgacaccaacatctttcccagtatagtgtccatatacggagctttcactcaagaatgttttgagtggcatccacaatgtcagtgcaagtaatggtatgattaaaataattaaaaccaagtcaaggtaaatcagacattgtaacgatatcccctatgacccatcactgcagagttaagaagtctggacaggtttcagggaagagaagggagaaaattcttgaggtttcagggaagagaagggagaaaattcttgaggtgaaaaatgattaggaccctaggaagtgtatcagggctttgaggtacaactgatagaggaggaggccaagattgtggtgataaatcccatttacctgckgcttttaggagagccattccagttttcttctatttacgtatagataagaatttcttttatgtgtgcattaaaaaagaaaaaaaagaaaccactattacttaaataaaaagccaacactctcaccgtcacctctcatctaagaattattttagaaacttgttaaaaatgcaaaggccacacttttagagattctagttcagagatctgaagtgggtgtccaaaaacatgttttgttgttttgttttattctttgtttaaataaaccctttggttgatattgataatggtggtcccagaccacacttggagaaatacctctcaggaagctctatgttttcaaattaagattcacactcatctctcaatacttccaacacattttatgtcctggagctctcctttatctaatgcaggtcttcttgccttccttgaacatataagaaatcttatttattggctacaaacaaaatcaacttccaccattttaccaatatgagaaatctatctccataaagatttgttaattatttgtttgtgtagcttttatataatagaggctttgc

SEQ ID NO: 11726 - DNA, 1083 bp, Homo sapiens
aaatgcaaaaatataattgttctattttgtgtagagctcaccaagaaaaatgagcttctagaaaagcaaatgcaattttgacagaaggcagagaaggccccctccctccggtggaaagaaaggtcatccttggaactgtcctacaaatgaactgtgtgtcttagatgacaccaacatctttcccagtatagtgtccatatacggagctttcactcaagaatgttttgagtggcatccacaatgtcagtgcaagtaatggtatgattaaaataattaaaaccaagtcaaggtaaatcagacattgtaacgatatcccctatgacccatcactgcagagttaagaagtctggacaggtttcagggaagagaagggagaaaattcttgaggtttcagggaagagaagggagaaaattcttgaggtgaaaaatgattaggaccctaggaagtgtatcagggctttgaggtacaactgatagaggaggaggccaagattgtggtgataaatcccatttacctgcggcttttaggagagccattccagttttcttctatttacgtatagataagaatttcttttatgtgtgcattaaaaaagaaaaaaaagaaaccactattacttaaataaaaagccaacactctcaccgtcacctctcatctaagaattattttagaaacttgttaaaaatgcaaaggccacacttttagagattctagttcagagatctgaagtgggtgtccaaaaacatgttttgttgttttgttttattctttgtttaaataaaccctttggttgatattgataatggtggtcccagaccacacttggagaaatacctctcaggaagctctatgttttcaaattaagattcacactcatctctcaatacttccaacacattttatgtcctggagctctcctttatctaatkcaggtcttcttgccttccttgaacatataagaaatcttatttattggctacaaacaaaatcaacttccaccattttaccaatatgagaaatctatctccataaagatttgttaattatttgtttgtgtagcttttatataatagaggctttgc

SEQ ID NO: 11727 - DNA, 1800 bp, Homo sapiens
gaaatggaagactgcagcatttctaagattcaaagttagtctatacagctggatcaagaaaagcaagggggaaactggtaccagatgtttgctcttactgaaacatatggcaggctgaatacatataccacttgggctgttcagtccaacacgatggtgaggaggaaaactgggaaccactaatgttctaagttatggatccttctaaaatgtatgtatctaatgtgtgcttaggcaagacagctgggagtatttcacaaaaagctccggtacaatctcacttcaatacacaaatcaatacatagagtatatatacatacaggtatatagccacattatctctctaattgaaaacaggtaattcttttaaaatcacactgtacacttgcaacatctatgttttcttccccaattacacgttttacaagaaagcattaccatgagataatcacaaggaataatagtgaaaaacaatcaatattacactgcaatgtttgcaatacagacaaactttgtagaaattatttcttctaccttttaagaaacttccatatagtagttactaaataccctgagcattttttccaggctatgtttagcacacagaatcaattttaatgctaaatttatttttgcaaattaacaatgttacacagaatcgaataataaaattaaagggaaaattttgttaacttgttatttatttttcttttcattaaaaaatgaaaaaatccatttccaatgatgatataaaattcactcagacttggctggttttctattggttttatttagcttgtcagaagaccaaagaaaaagaaggcatcttctcaataattastcagaaggtgcacataaaatgtaatcatactaccaaaagcaaccatgactaataatttagcatttttcctcctactcttttttcaccaagaaataatatactacgtatgtatacacatacatacatattaaaaacagatgattatgtaagtttatagcctaactttttacagaaaaaataacgtttaaacttttgatagacaacctgttttatgaaggtagtatcccacaaaagaaatgtaccatatcccacaaaggaaagtaccaatgtacttggccttttctatattattaagcatccagaagtttttctgagcttttgctttttataagtaatgtagcattgaacttttttattctatgcctgttctaccaataacaggaaatcagtggcagagaaggtaacaggaaaagaaatcccctttcttttctaagtcacagttttttttttttttaatttctacaaacatttattgagaagcaactccatgccaggccctttcaagatatcccactgaggatacacagatgaccgagaaccaataccacttgctaggagttcactgtctattacagtggatttcaacaaggaccattctgccactacacagtgccccaacccagggggacatctagcaatgcctaaagacatttttggttgtcacaatgtgggctgagtgtgccagtagatagaagccagggatatgactgtacctcctataacgaacacaacaggcccctacaacaaagaattatccagcccaatatatcagtagtgctgaggttgagaaacccctgtctagcccttttgtgtggactgcttatctctatcaaactcaagagatcttttcacctcaatgataacacttaataagttataagaatcaaaaggcacaccaacaatcaccatgcaactacatatttaggcagcccaactaggaggaggcaatcctggttccc

SEQ ID NO: 11728 - DNA, 218 bp, Homo sapiens
cctcttcatacttttcaaagtgatcttttaaaatcaaatgtggggtgcataagagattatgtctcccttcatatgyataaattcacaatgtcctggggcattgacttcagcacagaaaattcctgatattttagtcaatttaaaacaaaaaaaaagtttaagaaataactgcatcatatagaattttaagtacttctctttcatcatattacataaaa

SEQ ID NO: 11729 - DNA, 298 bp, Homo sapiens
atatttgatgaaactgttaatactataattgctggtagagttagcactcatcctgtaaaacataaacatttgaaatactgccattccataataatctatsatattactaaaattcacatttccaaaacttcacatttccaaatcagtacattggtgatgaatgcgctttcaatggctgttattgttcaacaaatattgtactaatctctattatttgagaattaatttttgatgcttctgactctttcctcccaaagatgttggaacagattccttccttcatttatggatgcattca

SEQ ID NO: 11730 - DNA, 536 bp, Homo sapiens
ctcaggggtcactgtggcagaggtagcagtgtcgatacatggtgaggaggccagagagaaagtataggaaagattctccctcccttcttcctttctttttttcattccttcccttctctcctttcctctccttcctttttctctttcttctctcctgtcatttccttttctcctcctccttctccttcttcttcttctttttttgacagtctccctctgtcacccaggctggagtgcagtggcttggtctcagctcactgcaacctccatctcccaggtttgagcgattctcctgcctcagcctccagagtagctgggattacaggcatctgccaccatgcccagctaatttttgtatttttagtaaagacagggttttgctatgttggccaggctggtctcaaactctcaaactcctgacctcaggtcatccgcccacyttggcatcccaaagtgctgggattatgggcatgagtcactgcacccaggccaccttttttctttttttttttttagagactaggtcttactctgtc

SEQ ID NO: 11731 - DNA, 1299 bp, Homo sapiens
gggaaagtgccatacttcaaaaccatcagctcttatgagaactcactcactatcacaagaacagcatgggggaacaacccccatgatccratcacctcccaccagttccctccctcaacacgtggggcttacaattctaaatgagatttgggtggggacacagatccaaataatatcaccacgtaagatgtccgagtgcataatgtgtgcaggctatgtatagcacactttgggaaactctcttcttcttgtttgatgagccccttacagagcccatcatggcatgtccacactgacagagatcctagatatcaccagggccaattccctttgcagactctactagcagacagaggcccagcaaaaggaccagacttgcccaggataacccattatgggagggacaggctgatgcctcctaacctccagtcctatgtctttggctccctttacacactacctctccctaggtccctccactccccctacctcccaccatcctgttgacccctcagtcagggcttgtgcccatgagagcctaataatatgcccctgtctgagtctaagagaaggtaagttgatacaatttgggcggcaccccagaaccaccttggattctctcctggtctctttccttagattatgaactccaggaggggaagagccatgattaggaggttggtgtgagatagcaggtgaagaggcagagttatatagagctcatcttcccaagtaggtactgaataggctttggacaaattgcacaggataaagagaagtagccagaagaattgtagaatttccagggctcagaactactatcaggccacagcttctggtggggcgggttgtactctgaaggaagacacctgcagaggaggcaactcaggatctcctacctgaggctgaggcagcaggcagagaggaggctgttttaactgggctcccagaggagctgcctttcacaatttgttcacctgaggggtacctgcttgtaatatgctctaaggtgccatatgagctagcagagcctacatggatcccaaagaaaattatggcagtcaaggactatgaggtaataatctgaaactcaaatgggtcctctggggcccaacagggatatgtcttcctcacctaaaggcccctgcagagctgatgagcagtgctgccttggaccagtgaggataacctgcagagctcatcagagctaagcaccaataagattcaggttgggagggtggagtacagagaccccacaaagtctagcaataatgctgccaacactcaaggtagacagaa

SEQ ID NO: 11732 - DNA, 529 bp, Homo sapiens
atgtttcctggggacatggacttctgagggggacctgtcatcactatgtcactcaccttccacaaaatcttctggtacttaagcattaggcggatgatgtgggccgcagtgtttgctaacagtaattcttcataatcagagtgtttgcttctactgaagaaaaggtttggtgccatcactgtagaaatgttccacagactcattcggttttttgattcattggcaatcactttattgaagaatgtcatgagggcctaagaagaaacagcattgtgtcatacaattgtacactgtcaaaagtgcccctgattgctatcattcattctattcccattcactctgctgccagagaactgtcagaagtatagaatggttaaacgtaccatgtttcccctctaactggttaaaagtactgagaagaaatgtgagcagtatattcaactgtctgcytcatgaaagtagccattttaatggattttattatattgcagtttctataaatgtggtttgcattttcttttcttttatc

SEQ ID NO: 11733 - DNA, 529 bp, Homo sapiens
atgtttcctggggacatggacttctgagggggacctgtcatcactatgtcactcaccttccacaaaatcttctggtacttaagcattaggcggatgatgtgggccgcagtgtttgctaacagtaattcttcataatcagagtgtttgcttctactgaagaaaaggtttggtgccatcactgtagaaatgttccacagactcattcggttttttgattcattggcaatcactttattgaagaatgtcatgagggcctaagaagaaacagcattgtgtcatacaattgtacactgtcaaaagtgcccctgattgctatcattcattctattcccattcactctgctgccagagaactgtcagaagtatagaatggttaaacgtaccatgtttcccctctaactggttaaaagtactgagaagaaatgtgagcagtatattcaactgtctgcttcatraaagtagccattttaatggattttattatattgcagtttctataaatgtggtttgcattttcttttcttttatc

SEQ ID NO: 11734 - DNA, 549 bp, Homo sapiens
cagttgtaactgtgtgctgtgaagatattacaccgagatatctatcttccaggaatttctaaaatattctataaaccattattgagttgacctaacaaaacaaaatgaagtacctagattcatttgaacactaaagaacactgaaaatatataataaataataagatatatcacactttttgatatagatgcttaaatcttaaaacacccaagctttaatgatactgtgcctatatttaaacacacacacacacacacacacacacacacacatgcgcacgtgcacacaaggtcatgctgaagtactgacactatagagcactcgtaaaacatatactattaccgccacaaacatgygcacattgtctgtgtaatcttatttccttactctttttaaattgatttcagtcattaagatatgaatatttatatcccattaatgccatatgttaataagggagacaatctttagatatgctctaaaatactatttagaagctgtccagcacgtgttcactcataaagtagtacctcatcttctttttgatt

SEQ ID NO: 11735 - DNA, 549 bp, Homo sapiens
cagttgtaactgtgtgctgtgaagatattacaccgagatatctatcttccaggaatttctaaaatattctataaaccattattgagttgacctaacaaaacaaaatgaagtacctagattcatttgaacactaaagaacactgaaaatatataataaataataagatatatcacactttttgatatagatgcttaaatcttaaaacacccaagctttaatgatactgtgcctatatttaaacacacacacacacacacacacacacacacacatgcgcacgtgcacacaaggtcatgctgaagtactgacactatagagcactcgtaaaacatatactattaccgccacaaacatgtgcacattgtctgtgtaatcttatttccttactctttttaaattgatttcagtcattaagataygaatatttatatcccattaatgccatatgttaataagggagacaatctttagatatgctctaaaatactatttagaagctgtccagcacgtgttcactcataaagtagtacctcatcttctttttgatt

SEQ ID NO: 11736 - DNA, 692 bp, Homo sapiens
ggaataacaaaatgcaccatcatttttgacagagcatttgctttgtgaacaagatgtgagattacaggtatacaaattgtgtagacttctcaggcttttatttttccattgaaataaaacttagctatagaaccacaaagctaactcaggctgagaaatagtatatattatttacaaactgagattatctccaaaacatgggacttagatacctacttatagctctaattaaaatgtaattatctagatggtctttacatccataaatcaaaatccattagataaggaatttatcaaaactattctataagtcaatgttaactagtacattaatctcatgcaatgtctggaaatatgatacattttaatatgatgatatataagacacataaatccttcactgtggaatatttaagttttatctctcactctgtgtyggtatttctaaaagagaagcattgaaatccaaagttaggtaaataattaaaataaaattggaataataagtgacagtttatctaaaataaatttatctctgtacctaaattctaaaggtcgcctgttgtgcaacatgggtccagttttgctccagagctagtaatgaattcaatgatgtgaaatggcataggttaaaaatagtttctagggagaaggacatagttagaaagcttgcatcatcaaaagaaaaggca

SEQ ID NO: 11737 - DNA, 576 bp, Homo sapiens
caaattggggtagtaggaaggagagagaaaaaaagcaacaacaaaaagcccataactcaacagggtactttgtgataaactccaaggaaaaaataaacacaatgatgtaacagaaactgaccacctggtttggaaagggctgaataacatcacaactagaagaactagtgaagcaagagcaaaccaaccccaaagctagcaaaacacaagaaataaccaaaatcagagcaattgagaaatgaaacactatgcaaaaggtcaatgaatccaggaggtggttatttgaaaaaattcataagatagactgctagctaggctacaaaagaaaaaaagagagaaataaagataygtaagctgaaattctaatggtcagactccaggcatgtaacaacctgggggcatataaaggagttagggttttgttcaaagttgaatggaagggctttgggcattaaaccggccaatcatttataaggagtccataggggaagcaggaagatgaaacagtaaacttttgtagaaatataggaaaagatcatgggagcagtaatctagagtgatagaaatggttatgta

SEQ ID NO: 11738 - DNA, 633 bp, Homo sapiens
tttctaatagatgcaaaactaaatattgttctctgggaaattattctaatgatatttagggttatctcatccaactggcataaatcaaattgtatctctactggtgaaaaatcatttgcattgctttccacatgaataattaactttgctatcagttttctacacattaacttctatccctacagaattgtaaaacagtcaacagaaagtcaataaagaggtgcagattcctgtagtatctgatgatcctctgaaagttcactatactatgttttgccctctactaaaagggcacttggtaacttatcttgcccatttccaaggccggagcatttttttttcttacaaaattacctactgtgtaacgcatatgtgtayatgtagctgaatggagacaatttgaaatgcaaagctcacacacatccatttcaagtgctgtaatgggacaatacatttccttgcttttttgtgtgtatgcgttttgtaaggaaggatggatatgtaggtaggtgaataattgttgtagaatattattcttttctttctttcttttttttttttttgagacagagtctcgctctgtcacccaggctggagtgcagtggtgcaatctcacctcactgcgagctccgc

SEQ ID NO: 11739 - DNA, 558 bp, Homo sapiens
attaggaggtggaaaggaggggtataaaggcatataagatgctattccagctgagtgtggtggctcacgcctgtaatccagcactttgggaggctgaggcaggcggatcacctgaggagttcaagaccatcctggcctggccaacatggtgaaaccctgtctctgttaaaagtacaaaacattaccttggtgtggtggcagtgcctataatcccagctactcaggaggctgaggcaagagaattgcttgaaccagggacgtggaggttgcagtgagccaagatcgtgccactgcactccagcctaggtgacagagtgagattccgtctccaaaagaaaaaaaaaaaagctatccctattttcaagatgtttataatcttaagtggaataaacagcacmggataaagttaaatagaaaattcaggtttacatataatgcattctttcgtgtattcattcaacatttgttgaacttatactgtatatgaggctcacaaagaaggctgtgcctaaggcctaaggagggcttatgggagtgtcagtataagtcttatagccg

SEQ ID NO: 11740 - DNA, 487 bp, Homo sapiens
aaaatagattttgcccrttgtattagtcggttttcacactgctgataagacatacccaagactgggcagtttagaaaagaaagaggtttattgggtttacagttccacgtggctggggaggcctcacaatcatggcagaaggtgaaaggcatgtttcacatggcggcagacaagagaagagagcttgtgcagggagactcccatttttaaaaccatcagatctcttaagactcattcactattatgagaacagcacaggaaagacctgcccccataattcatttacctcccactggatccctcccataacatgtgggaattcaagatgagatttgggtggggacacagccaaatcatatcatccagtaatttaatgctgagaaatatgacagttttttgaataggtaatcctcacacaatcactatcagaaactttacttcctgattacctatattcattcctttgtttctgcaacatgctcttaca

SEQ ID NO: 11741 - DNA, 579 bp, Homo sapiens
ttatgaacctcatttataagagatgacagttgccagtagtacaatgaaatacatgctgtgagaaaatgaagtgttctaatcaattaaacatacgtacaaggcagaatgaacttttatatccctctaaccggtaccccagtcccctggcctttcctggggcctatgataagccaaagctaggccagctcaaaggagagggagagtagcgattctgtaagaatatccatacacaggaactgygccaaggggaggccagctggacagagagcaaggttagcctgccttctaaaatccaccggcctgcttctcccaccggcccccagcacagttcctgcccaggtaaagcagaacccaatgtgaccaaaagcctgacctggacccaaggcatggcctgggagtgggagcagtaggttgaggaggtccgaaggggcaggaattggggtgtgggtggggagtgaaaggagagaaggccaaatgtggggggaggccctcaggccaagctggaaggacctggggctgaggagtgcccagggattccccgactggacccctgaccttcccatactctgactgggaaga

SEQ ID NO: 11742 - DNA, 591 bp, Homo sapiens
  misc_feature (1)...(591): n = A,T,C or G
aaacctgggtgagctgctagagcttctagagaacgaacatcccangacatctggaatgaagtgggcgtggggagaccctatgatatcaactccactgacaaattgcagtttaccaagcatggtcaaaaccagcatcccacagcacgtgacaacggtcctggggcagtgtcatcatcacgctgcacctgttttacagatgaggagactcacacatgtgcgaggacttggcctgcataggtgggcttcaaagagaggtgtgaggaccactggtcagtacgaggtgatttcgtgctgcaagggtaaattattatgctaatagacacatatttactgtaatgagcttttaaaaatataattagaaccacgaaacctgtgatttcaaggatactgttattttttttttaggcagtcttgctctgtcacccaggctggagtgcagtggcgtgatctcagctcactgcagtctctgcctcctgggttcaagcrattctcctgcctcagcctcccgagtagctggaattacagttgtgtgccaccatgcccagccaatttttgtatttttagtagagacggggtttcaccatgttgatc

SEQ ID NO: 11743 - DNA, 591 bp, Homo sapiens
  misc_feature (1)...(591): n = A,T,C or G
aaacctgggtgagctgctagagcttctagagaacgaacatcccangacatctggaatgaagtgggcgtggggagaccctatgatatcaactccactgacaaattgcagtttaccaagcatggtcaaaaccagcatcccacagcacgtgacaacggtcctggggcagtgtcatcatcacgctgcacctgttttacagatgaggagactcacacatgtgcgaggacttggcctgcataggtgggcttcaaagagaggtgtgaggaccactggtcagtacgaggtgatttcgtgctgcaagggtaaattattatgctaatagacacatatttactgtaatgagcttttaaaaatataattagaaccacgaaacctgtgatttcaaggatactgttattttttttttaggcagtcttgctctgtcacccaggctggagtgcagtggcgtgatctcagctcactgcagtctctgcctcctgggttcaagcaattctcctgcctcagcctcccgagtagctggaattacagttgtgtgccaccatgcccagccaatttttgtatttttagtagagacggggtttcaccwtgttgatc

SEQ ID NO: 11744 - DNA, 517 bp, Homo sapiens
caactatacttttctcctctactcattcaaccgtttgctacaccatccctcaacaagccctgtactttccaattttcgagccttgctcatcctataccaaactgactgcatctgaccaagtcctagctggttcagataactctcccgagcagccttttctaatcccctaattcaaaaatctttcgcccartctcctcccttctgtgcctctgtaactgcacctacctagccagggtcgtattcgagggatttctgtttataaacattcacaagcccccatcctaccaccaatccccacccggactgtgagcaccctacagacaagacccaaatgttgaatcactctcttcttgctcctccgaatatttattgtgtgacgcctgacaggaagtagaggctctgtaaatgtgtattgagtgaatatgaaagcttcaaaaatttcaagggtcagcttccttggcggccagggatatatacgccctatgcagagcccggctccaacgcctcttgtagaaag

SEQ ID NO: 11745 - DNA, 517 bp, Homo sapiens
caactatacttttctcctctactcattcaaccgtttgctacaccatccctcaacaagccctgtactttccaattttcgagccttgctcatcctataccaaactgactgcatctgaccaagtcctagctggttcagataactctcccgagcagccttttctaatcccctaattcaaaaatctttcgcccagtctcctcccttctgtgcctctgtaactgcacctacctagccagggtcgtattcgagggatttctgtttataaacattcacaagcccccatcctaccaccaatccccacccggactgtgagcaccctacagacaagacccaaatgttgaatcactctcttcttgctcctccgaatatttattgtgtgacgcctgacaggaagtagaggctctgtaaatgtgtattgagtgaatatgaaagcttcamaaatttcaagggtcagcttccttggcggccagggatatatacgccctatgcagagcccggctccaacgcctcttgtagaaag

SEQ ID NO: 11746 - DNA, 486 bp, Homo sapiens
  misc_feature (1)...(486): n = A,T,C or G
tgcggaaaaaaaaaaaattctttctccaatgtcctcaattaggacactgtatcccttccctaatgatgactgtatggtctccaggtttttgtcaccaagagatgggcggaattggctgtacttgagatttctcaaatattgccaatttcttttcaaatgttcttgtttcatcaccaccagaaaaagtgtttccttgtacatttcacttaattttaagcccgagtgtatattaagaaaatttgacccatatgttcctgatttatttacacttaactcattgaactcttcttttattactatttttaacatttttggtgtccaaaatacccagtgaattttttttttwaaaccatccttaagcccttattagattcatttgcatannnnnnnnnnnnnnnnnnnnnnnnnnnnnnnnnnnnnnnnnnnnnnnnnnnnnnnnnnnnnnnnnnnnnnnnnnnnnnnnnnnnnnnnnnnnnnnnnnnnaga

SEQ ID NO: 11747 - DNA, 519 bp, Homo sapiens
cctgtcattataaacccaaaatggcatacccactcagctctaaggatttagaaaacttaccagaaaaagtaaaaaccagacatgattttttttttcccctagatccagctattctttggatactttattctcaccccccatgtgggagaattataccagtcaaggtaacgacggcaacagtcaatcctagagttgctgtgttggctgcagtctakgcaataaccaactgtctcattgcctctttgactgttagcaattataggagcaattgatgaaggttttatatgctccatgtgaccattataattaaggcacgttttaaggtatactttaagtctttcatttttctggaaccttaaagctaacttaacaaaatattcgtgttggtggagtcaggaattataaatatacatgtgatctcaggatcagaggatcacccttggaataatttttcttggctgcctgttggataccagatcatcagtgactgcactgcagtgacaagatggcagtacttgt

SEQ ID NO: 11748 - DNA, 558 bp, Homo sapiens
cactctcactatcacccttgtggtgggcaatggttccattccataaatgcatgtcactgcaatataagaatatctgcaagtcctggtttgttttagtttcacctggttttttgttttatttctttttatgatctgcatccacaactgtctgtgacactggctatttatttctcagttcttggagatcatagactgtatttacagaactttccttatataccatttagctaagtgtcacacactaagagatcaagaaaacatatttttctggtcagaaggatgtgcctttrctctattcgatacctaattctacttctcagggagaaggatagagagtccagccattgtccaacatggagtgcctgcccctcagatgatgttactctgagcaagtcaaagaatttggctgtgtgacagaagaataggtggctttcaacttattaggaaactgtacccaaaagactcatcccgtgtaccatagcagcctagacctaggattgagttctggcttgaccgcttactgcattcctaacttcgatggagttacctaatccgtcc

SEQ ID NO: 11749 - DNA, 540 bp, Homo sapiens
ggatggaatgtgatggaaggtgaatgtggcccccaagcacgtcgtcccatctgagcttggtggagcttcaggctgcaggttgtgcagggcccacgtgtaccacgtgtgtcagcctgatatggcttggctatgttcccacccaaatctcatcttgaattgtagctcccctaattcccttatgttgtgggaggggcccagtgggagataattgaatcatgggggtggtttcccatatgctgttctcatggtagtggataagtctcaggagatctgatggttttataaggggaaacccgtttcgcttggctgtcactcttctcttgtctgccgccatgtgagatgtgcctttcaccttctgccatgactgtgaggcctccccatccacgtggaattgtgagtccattaaatctctttcttttgtacattgcccagtcttgggtatgtctttatgaacagcgtgaaaayggactaatacacagccccacctctgtcttacccctttcttgcccttgccttggattgcttgttctgtctccttca

SEQ ID NO: 11750 - DNA, 627 bp, Homo sapiens
aaaaaaaacaaaaaaaaaaggaaagggaaagaaattctatctagcttgctttactgtaaaaatataagaagtgttatctagcttactttcttgtaagaatactgtatataatatatatagcacacaaaatatgtgtcaattgactttatgttcttggtaacgtcaatattagactattagtaacatttctgggggagtttaaagttatatgtgggttttcaactgtgcragggattggcgcccctaatccctgcattgttcaagggtccactgtaaataaaaaataatttttaaaaatgcgtatcgattttaaagcctggttgctctggtggtgctgactccagccagccaccttcagcctcagagctgttaaagggagggttttggagccttctctgtgggctgctaaggtgtgcacgtgcacgctgagaggccgggcccagaaggcttgatgctgctgtctggttttggaaagacctccctctgactacctggcttctgaatctgacagtggcccaggagtcacagtggctgatctctgcagtttcctccacctctgttgtcctaggactccgtgtcctgacattggttgttacaaaaattcttataactggaaagatacttggt

SEQ ID NO: 11751 - DNA, 667 bp, Homo sapiens
cagtggtggtaattcagtagttctccttcgtgtttggatcgaggggaatcatcgccctcttcacagatgtcagaagcgccctgatgctgtgcttccactcctttggtccgtggccactggatcaggtccatttccttccatgaccctcgctgckccatcagatacacgcagaccagcatcatcctcccacatctgatccctaggcgagtgggtggtgaacttggcaagcccatgtaccacaggaaaggacgtgaaaacccatcttgtctagccccacgctgcacactcgactccagccaccccatcagtgtagaccgcatctgtctgcaccatatgagggtggttcctttgaaagctggaatgttcttcaaagagcagtcatataaaaatgcttgcttggccaggtgcggtggctcatgcctgtaatcccagcactttgggaggctgagatgggtggatcacgaggtcgggagatcgagaccatcctggctaacacggtgaaagcccgtctctactaaaaatacaaaaaattagacgggcgtggtagcgggcgcctgtagtcccagctactcgggaggctgaggcaagagaatggcgtgaacccgggaggcggagcttgcagtgagctgagatcatgccactgcactccagtctgggtgacagagca

SEQ ID NO: 11752 - DNA, 549 bp, Homo sapiens
ttcaagatataaccttgaagcaaactgcagaagccttttcccttagccttaaaatagactccacatccctctctttgtcactgtatatactctcttcacatttatctaactgtatgcaagtatccaattatgtgccttcttagaagttccacagactaatcttgaggtatacagaccaacccttgagtcccagctgcaaagtaccagcagttacttcaaggtggctcattaacaatccagctttgttgagatgatgccagcccaagatccaggtggacagggacccaygatagtcaccagaataagacacacagacattgtactcagcacaattcttgtatgtcttccttgtcaagttttcattttttaaactcctttttctcccccccaaaaaatcaaagtggttgctttggatgagaatctggccacttctcctttactagttttggttaataaagtcactttctttctgccagatgtcactctgttaattgagctctgcaagtagtgcaggattaaacttgccttcaactgaaacttcattcggtt

SEQ ID NO: 11753 - DNA, 598 bp, Homo sapiens
ggcagttagtgaccagctagtgttcatctccactaaggaaaggagaggaagtagccttaggctgtggcagaggggttgagtcttggaaagggagacacagggactcagtggaactgccttttcttgagaacttgacaattagggtcacttttagtctgcctgggacagttggcgttactcttcaaataagtttcagaaagaaataacaaacccatggcaccaaaaacatttgaccaaacccattctcatcaaaagagggctttttgtttctgttttgccctggggaatccggtcattactgccctctttccaggaaccactcaaatatgagtaatactgtgaatcctgttcatatgaacgttacagttatttctatctccagtcaagagcagtgcccatcttagaagctggctaaggtttcagagcagctttggaagcaatatttattygtagcacatgtatgtatctataaaatcctacctaagtaaaacaagtgtttctagaatcatgtgccatttggggaatggaaaactcaaaatgtaaattgttatgcaggtcctgtgatggattccccaacagacatgtcagttcgtggaca

SEQ ID NO: 11754 - DNA, 535 bp, Homo sapiens
ttccagtttttttgccactacaatactgatatgttcaatatccttgaatacagagtgatgcttttttttctataggttagatttcttaccaatttatagaagcacttactatgttcaggttatatgttacaagtatgtcttgtggcatatcttttaactattgttcttgtgttttattatacttagatattgaatatttgtgtaatcaaatataaagtgtcaaaaaatttcagagaatgaccctaatattaacaaattagtggtgatagggcttattacagaaatacttctttatatcagtgttgaatcttgacaagatatcatgctgtagcgtgtccagacctttgggttggcatatgtttgtgattctttaataacacattttaaaccttgtgcatatgtgaatttttttttttttttttttttgagacggaktctagctctatcgcccaggctggagtgcagtggcatgattttggctcactgcaacctctgcctcctgggttcaagcgattctcctgcctcagtctcccga

SEQ ID NO: 11755 - DNA, 535 bp, Homo sapiens
ttccagtttttttgccactacaatactgatatgttcaatatccttgaatacagagtgatgcttttttttctataggttagatttcttaccaatttatagaagcacttactatgttcaggttatatgttacaagtatgtcttgtggcatatcttttaactattgttcttgtgttttattatacttagatattgaatatttgtgtaatcaaatataaagtgtcaaaaaatttcagagaatgaccctaatattaacaaattagtggtgatagggcttattacagaaatacttctttatatcagtgttgaatcttgacaagatatcatgctgtagcgtgtccagacctttgggttggcatatgtttgtgattctttaataacacattttaaaccttgtgcatatgtgaatttttttttttttttttttttgagacggattctagctctatygcccaggctggagtgcagtggcatgattttggctcactgcaacctctgcctcctgggttcaagcgattctcctgcctcagtctcccga

SEQ ID NO: 11756 - DNA, 772 bp, Homo sapiens
tgaaatcaaaagacacttgttagcaacataaaaccataaataacaaagatctctggyagaggtaaatacgcagacagatattaaatcctgtgatactataatattggtttataaatcacttctaattctggtatggagattaaaggacaaaaacatgaaaataactatgaatctatgataccagatgcacaatataattttgacatcaataacataaagaggggcagatatgtacaagaataaagttttcatatgtggttgaagttaatttgttgtcagctaaaatatatattatttgggacaggtgcagtggccaggcctaaataatgtacaaaacatgatttccaatctattggaataaaactagaaatcaatagcggaagggaaactagaaaatccatgaagactggaaatttaacaatatactcaaacaaccaacaagtgaaagaagaaatcagaatgaaaattagaaaataccttaagacaaattaaattacaacatacctaaacatatgggatgcagcaaaagctatataaacaggttggtatgtagcagtaagcatttacattaaagaagaaggaagatctcttaggagtaaaatcatggttacccaaaggctggtaagggtagtgaaggatgaggggagggaggattgttaatgggtacaaatacatagttagatagaataaataagatctagtgtatgatagcacaacagtgtgactacagtcagtcaacagtaatatattgtacatttaaacataaccgaaa

SEQ ID NO: 11757 - DNA, 986 bp, Homo sapiens
catctctttgtctggctcctggtaaccttgacaggaatgagtggagacatgctgatttgtatacactcaataattcaaggtgtttgcttatctttccttgtcagatgctgctcatcccaagtctatgttaccatctaattagccatttttytttactttgctttttcacataggctttcttttttatttcatgaatttaatttgcaaccagtcttgctgttatcaaatatcacacttatttcatttgttagcatgtttattagttttttattcatattctcgatatagcctctccccctttttgattcaccctcaatgtaataatcagtttgattttgttttctaaaatataaatgaaaatcatactaaaaacatcattcctcaactgcacttactgaaatcacatgatatatatttttgactctgaattctttctctggcttattttaatcagcttttctggcatttagtgctctttatagaatcctaggtgcttgttttttcactgttccagttcttatacgtgaaaatactagagttgcttatcaatattcctggctcttctctttctgcgccatcaaaggactcatcccttcctaaatctctgggcttgccatcaccctgtgattctccttgaccaatgaactgtaagcagagatggtggaaatatttaatcacttgtataacactcccctgcatgacacccttctctgcctctatgaccatgaatgcaatgtaaaactgagctattatatggaagataactgtcctgcagacagcaggatttgcaggaaaccctgggtgagtgaaaaataagcctttactattttaagccattgaaatttgtgtattgttccttttttttttttttgttttgttttgttttttttgaggcagggtttcattctttctaccaggctagaatgcaatggcatgatcttggctcactgcaacctctgtctccttggttcaagcaattctccatc

SEQ ID NO: 11758 - DNA, 527 bp, Homo sapiens
caggagaattgcttgaacccagaaggtggaggttgcagtgagccgagatcgtgccactgcattccagcctgggcaacaagagtgaaactccacctcaaaaaaaaaaagaggacaatctaaaatctgaaatgctccaaaatctgagctttttgagtgccaacatgacgctcagaagtagtcactggagcattccagatttcgagttttcagattaggaatgctgaacraataagtatatataacgcaaatattccaaaatctgaaaatctccaaaatccaaaacatttctggcctcaagtattttggataagggatattcaatctgtggtatacggaaggaagttcattgaccgcgcttttgggtggggtctatgatctaggaaactattcagcctctgaaaagagattcagaaatacccgtcactccaagtccctgcaggattggaagagtcgtaaaaagccttagtaaacctaacattcccatattgtctccttcattggaacacactggcagatggaatactgca

SEQ ID NO: 11759 - DNA, 567 bp, Homo sapiens
ttgctctgcaggatgctcttcaacttttgcactgaaaaaagacaccagagaacattcaggaaaataaaaggacttagcaagcattatattttgcatcataagtgaactacttttcataatttttgaaaaaaattgagagacctagagaaaatagtgtagtcaaatggaaattacaggtgtggaattaatatgtgagatggtatatcagggtggtctagggcagtccactttgctgtgggtcctgtctctatcttttaccagctatccaatagctgctatttgtgaccttgaacaagttttttagcctctctgttcccattttctcacgtgtaaaatgggtaacaatagcacctatctcgtcggcaggttttaagggttaaatgaaaaaaaaatacatgtcaataattgcctagaatcataaatgtttggkacatagagtaacacttttatcatgataatgatgatattaaagaagatagatatgtttgtaaggaagtgaactttcttatactaaatccttaatacatacagacttcccatcccaggttgtaaccacaaaccttccca

SEQ ID NO: 11760 - DNA, 509 bp, Homo sapiens
tttttttttttttttgagacagagtctcgctctgtcsccccaggctggaatgcagtggcgggatctcggctcaatgcaagctccgcctcccaggttcatgccattctcctgcctcagcctcctgagtagctgggaccacaggtgcccaccaccatgcctggctaattttctgtatttttagtagagatggggtttcaccgtgttagccaggatggtctccatctcctgacctcgtgatccacccgcctcagcctcccaaagtactgggattacaggcgtaagccacggcacccggccgtcctttgcatctgtttaaattattctgcaatgaatagaaattatataatttaaaagtcttagcataatctgacagctagatacaggtatacctcattaccatggacttcaccaatccaaaattttatgatcattcacagacaggattgaccagatattgcgaatgacttacccttcttagtaatttatcttctagttctacctctttatac

SEQ ID NO: 11761 - DNA, 509 bp, Homo sapiens
tttttttttttttttgagacagagtctcgctctgtcgccccaggctggaatgcagtggcgggatctcggctcaatgcaagctccgcctcccaggttcatgccattctcctgcctcagcctcctgagtagctgggaccacaggtgcccaccaccatgcctggctaattttctgtatttttagtagagatggggtttcaccgtgttagccaggatggtctccatctcctgacctcgtgatccacccgcctcagcctcccaaagtactgggattacaggcgtaagccacggcacccggccgtcctttgcatctgtttaaattattctgcaatgaatagaaattatataatttaaaagtcttagcataatctgacagctagatacaggtatacctcattaccatggacttcaccaatccaaaattttatratcattcacagacaggattgaccagatattgcgaatgacttacccttcttagtaatttatcttctagttctacctctttatac

SEQ ID NO: 11762 - DNA, 1307 bp, Homo sapiens
aaggctatgtctaccctgggcgcatggctcacgcctgtaatcccagcactttgggaggctgaggcgggcggatcacaaggtcaggagatcgagaccatcctggctaacacagtgaaacctcgtctctactaaaaacacaaaaaaattagccaggtgtggtggcaggctcctgtagtcccagctactcaggaggctgaggcaggagaatggcatgaacccaggaggtggagcttgcagtgagccgtgattgctccactacactctggcctgggcgacagagcgagactccgtctaaaaaaaaaaaaaaaaaaaaaaaaggctatgtctattacaaatccagaagatgccatgtaaaagatgatttgactctaagactagttaggaacaaaggcaaaaactgaaaagagagactacatctgggtctaaggaagtatgattctatctccccagcctaccttcagaagaatcccctcagactgggagaagagaaattagagaggagaggagaggagaggggtacaatgataccacattgtggctttaattttcactttgatgactaaggaagtcaagcatcttttgcatgtttattrgacatttggatttcctcttttgtaaagtgcctgttcaagtcttttgatcattttcccgttgggttatctgtcttttgctggccaatttctcattttttactcatctaacttgagaaactttttaaaaattatgttctttccattatctttttaacataaatttttttttccaaaatgtttttatctgggatatttcacagctttttctatgagtcatcaatatgagtatttatatctctaaggatatatttttattggttttagatgtttatccataattcttttcaatgacaactttctcactctcaaatatttatcttcaacatttacagacttaaagacatgtttaatcattactatagtaaaggccattcttttctgtcacactgccatattttagttttttgaattacaacatatgacttttttgtttatttgtttccttgtttaccatatttttcctaccaaaagtcttcatcttgttcatctccagtgtttagaacagtgaacactatataaaggagatggtttcaaatccttatagaattaaagtgacctgatttttgactaataattggggtttctttttcatcttaaagctcaaacattctaccagaatgtcttgagaaattttctgtttgttttgccttgaatatgatgagctgttttcatatttagtcttagtcaattgcattatatctttgattaccaatt

SEQ ID NO: 11763 - DNA, 1307 bp, Homo sapiens
aaggctatgtctaccctgggcgcatggctcacgcctgtaatcccagcactttgggaggctgaggcgggcggatcacaaggtcaggagatcgagaccatcctggctaacacagtgaaacctcgtctctactaaaaacacaaaaaaattagccaggtgtggtggcaggctcctgtagtcccagctactcaggaggctgaggcaggagaatggcatgaacccaggaggtggagcttgcagtgagccgtgattgctccactacactctggcctgggcgacagagcgagactccgtctaaaaaaaaaaaaaaaaaaaaaaaaggctatgtctattacaaatccagaagatgccatgtaaaagatgatttgactctaagactagttaggaacaaaggcaaaaactgaaaagagagactacatctgggtctaaggaagtatgattctatctccccagcctaccttcagaagaatcccctcagactgggagaagagaaattagagaggagaggagaggagaggggtacaatgataccacattgtggctttaattttcactttgatgactaaggaagtcaagcatcttttgcatgtttattagacatttggatttcctcttttgtaaagtgcctgttcaagtcttttgatcattttcccrttgggttatctgtcttttgctggccaatttctcattttttactcatctaacttgagaaactttttaaaaattatgttctttccattatctttttaacataaatttttttttccaaaatgtttttatctgggatatttcacagctttttctatgagtcatcaatatgagtatttatatctctaaggatatatttttattggttttagatgtttatccataattcttttcaatgacaactttctcactctcaaatatttatcttcaacatttacagacttaaagacatgtttaatcattactatagtaaaggccattcttttctgtcacactgccatattttagttttttgaattacaacatatgacttttttgtttatttgtttccttgtttaccatatttttcctaccaaaagtcttcatcttgttcatctccagtgtttagaacagtgaacactatataaaggagatggtttcaaatccttatagaattaaagtgacctgatttttgactaataattggggtttctttttcatcttaaagctcaaacattctaccagaatgtcttgagaaattttctgtttgttttgccttgaatatgatgagctgttttcatatttagtcttagtcaattgcattatatctttgattaccaatt

SEQ ID NO: 11764 - DNA, 839 bp, Homo sapiens
catccgggagctaagagctgcacaccttggcccccgggcaaattctcacacccaaaactccagtccagccctgggaccacagctccctccgcctctaccacctcttgccactcgttcacgagcaaagttacacttattcaccggtgcacacacacactcccacacgtatccaccctttccccaaactcagacacacgctcacacacggtcccattctggggacagccacgcacccttcctaggttcacacgaaacgcatcctcagatatctgggctcaggcgcacgcygatactctacactcgcagaagcatgcccacggatgcttacacaggcacaaatgcacgctatcctggccatatcgcccccacacatgtacacaccccgggtggacacacgcgcgcacaccctcacttgcacacagttctccgagagtgcccaccgcacatgtgcacacacgcattcactcctcacgcgtgtacccacctccccatacgcgcacacctttaggcgcgcgcacacacaggcatataacacttcgcaccgctccaggagcccccaagcacttactgggtccctacgtgcgaggctggccggtcggtccttcctccggcgcctaacggcatttgtattcatgggtccccgcagccgtgggcgcgggggcggggggcgaggtccccttccctaaacggggcgcgggcgcgcggagcgcagcggcaccgggaggggcatgggcgcgcgggactgcgccgccgacccggtccgcctgcgctcgaacttcggcagctctgcgtccacgggctccggcgcgggctccgagagctgggggcggctcataggt

SEQ ID NO: 11765 - DNA, 839 bp, Homo sapiens
catccgggagctaagagctgcacaccttggcccccgggcaaattctcacacccaaaactccagtccagccctgggaccacagctccctccgcctctaccacctcttgccactcgttcacgagcaaagttacacttattcaccggtgcacacacacactcccacacgtatccaccctttccccaaactcagacacacgctcacacacggtcccattctggggacagccacgcacccttcctaggttcacacgaaacgcatcctcagatatctgggctcaggcgcacgctgatactctacactcgcagaagcatgcmcacggatgcttacacaggcacaaatgcacgctatcctggccatatcgcccccacacatgtacacaccccgggtggacacacgcgcgcacaccctcacttgcacacagttctccgagagtgcccaccgcacatgtgcacacacgcattcactcctcacgcgtgtacccacctccccatacgcgcacacctttaggcgcgcgcacacacaggcatataacacttcgcaccgctccaggagcccccaagcacttactgggtccctacgtgcgaggctggccggtcggtccttcctccggcgcctaacggcatttgtattcatgggtccccgcagccgtgggcgcgggggcggggggcgaggtccccttccctaaacggggcgcgggcgcgcggagcgcagcggcaccgggaggggcatgggcgcgcgggactgcgccgccgacccggtccgcctgcgctcgaacttcggcagctctgcgtccacgggctccggcgcgggctccgagagctgggggcggctcataggt

SEQ ID NO: 11766 - DNA, 547 bp, Homo sapiens
aacatttatgttgaagtgacttactagttcagataaacctattaagagagcattttgtccaacaattttactaccgtgtagatattcatcaataatkcatatgtaggtacaattaaagacatgtataataatagtgaagacaggactctttttgaagccaaaaacctagaaataacccatatgtctactcacaagagaatggaaaaattgagatatattaaatggaatactaaatagcaataaaatgaatgaaataaaatgctcattaaaagaggaattaaatctcacaaacgaatgtcagtgaaagatgtgagataaaagaatataggctgtatcattccatttatacaaagttcaaagccaagcaccactaatctaagatatctgaggtcagcatggggatggtgattagatgggggacatgggagaagttgcaggcatgctgctagcattccatttattgactggggtgaagagaaatagtggtgttcactctgtgataatccattgagctgtgtgctttcaattggtgtcctttcctgggaaa

SEQ ID NO: 11767 - DNA, 1084 bp, Homo sapiens
agaaatttccctcaactaaaatgcccactcaatttctcttcttgaacagcttattcattcctcatatcagcactgaccacctcactccagagcactctttttctaaattgcaattttaaaaatcacaggaggtctctaatgccattccatattccttgatgcccatccacttgctaacacttatgaaatggtcattgccttcattgtattaaaatttcaagtgcaatttgttatctttgctgtatgcatggattccatttacacactagacccatatattttcttatattctaggtgtcttttttgcttcaaattcctttctagcttttctttaaatccttactttgcccatcttcagtgctgggttggtaaaggagacagaaacttaacaatatccaccaagcaacagaactaccacatcaccaccaagaacttcatggcttcctgggcagatatgcagtgggcacaatttcataacagattaattgctaccaatcrtgaagaagttaaaatactctcagaatttagaaggtatacttgaatcacaatgaagttttgtaattctctgccaagcccatagattgaatgtcttctattatttagttggccttgtttacttagtggtaatcatttcctgagactgtacagaacattaaattggaatggatacaattctagcctagagtctatagcctagaattagttataagtagctcaagattacatagtgtatgcaattatatgtcacccatgaaaacaaacactacccagttttcaggatctcaaaataaatcacctcaaaggtcctgctttgatctgttttgtgattgggttgcatgggaaagcaaattataggactatgtgaccatgaaaatgcctcttttccctttaactagtgataaataaaaagtgaaaagaaaattacttatcagaaaggagtagcatccttcaatcttcattgatagctgactgattaatgaaatgatgcatctgtgcaacataacacagtcatacactgcatgacagtttggtctttgatagctgtatatatgatggtggtctcacagattatatttttactgta

SEQ ID NO: 11768 - DNA, 639 bp, Homo sapiens
ggatcatgaaactatgtgcataaagcccttagttattatatttggtaattgaacatttaccttacttaatttgtcttaacattgtaagacaaaccataattgtcttaacattgcaagacaaatcataattgtcttactaatgacaaaaccttgtacttagtgaatgtcttagttcaggctgctgtaatgaggtgctatagactaggtggcttatyaacaactgaaatttatttcttaccatgctggaggctggaagtccaagatcagagtgccatcatggtggagcctactttcaggttacagactgccgacttctctttgtgtcctcatgtgacagaaagagcaagagagctctctgggagtcccttttataaggacactagtcccatttatgaagactccactctcagaactctaattcactttcaaagctccacaacctaataccatcacattggggttaggatctgaaggtatgaactttaggcagacataatacattcaatccatttattcaaaatagttcttacttcacagatgtttctttctttcttttttatttttattaattttttttttttttcagacggagtcttgctctgtcacccaggctggagtgcagtggcagtgatctcggct

SEQ ID NO: 11769 - DNA, 636 bp, Homo sapiens
ggaagtaaaaacttcaatactctatctgtagccaaatattaatattttagtcattaagcctaattgcggagaagttatacaataaacaagatgaggctatattcttgctgaggtatctatgtgaagggtagcactctagaactctggagttaaaaagaacatgcaatatccctgaatttggcctcctactttgtttgggcaaggattgtctccaaaaactgacctccgagaagtagaatttagcctgttaaatacttacagtaatgggtcactcactgcctctgtcttgttttcrgggctgctgtaacaaattgccacaaatttagtggcatgaaaatcgcgatttatcatctcacagttctgaaggccagaagctcaaaggtgtttggccgggctgcacccgctacagggcctgtagtggagaatccatttgtttctagtttttcgtggcgtctggcttccttagctagtgccacattgctccaatctctgctccgtcttcacattatcttatcctctgtgtgtctcttaaaaagagacttgttactaaatttagggatcacccaggtaatacagaatgagtttctcatctcaagatttttaacttaatgacatctacaaagaccccttttcttt

SEQ ID NO: 11770 - DNA, 519 bp, Homo sapiens
tgactcactctgaagacagcaggcagccctttctgttttttttggagatgaagtcttgctcttgtcgcccaggctggagtgcaatggcgcagtctcggctcactgcaccctccgcctcccaggttcaagcarttctcccaccatagcctcccgaagctggggctacaggcacacgctgccacgcctggctaattttttgtgtttttagtaaagacagggtttcaccatgttgcccaggctggtctcaaactcctgaactcaggcgatccgcctacctcggcttcccaaagtgctgggattacaggtgtcagctaccacgcccgacccacaggcagccctttcacctcacgccgagcacgtctcctccatccatgaacattttgcaacttttttttaaagagacaggttcatactatgttgtctagattggactcaaactcctgggctcaagctttcccaagtagcttgaacctcttaagtaactgtgactacaagtgcacctggccactttttctgaga

SEQ ID NO: 11771 - DNA, 519 bp, Homo sapiens
acatactggatggatgcaggatgagtccgcattctagaagtgtgcagaggtacagaagtggccctgctccctgtccagcacccagtcatcagctttccctggcttcccgaggcaccctgacgttcacactccaaacacaaagtcttctctcaggaatctcgagtgagctgcagtctgggttctagccctgccctagcagggatctgctcagtgactgggctgctctcttcctgctttaggccaatgcgggggagaggagaccactgtgactctccccagtgcccttggagcgcagaatgaagtgaggggaggaggagggtcacgagccctggagcgctgggaagacaggctgtaggccrcaggccccgatcctgcctgggacgaggttcaacagaagtaggatggtttcatcatgacctggcaggaaaaccaccagacctggaattttgcttttacaactgtttaacttctgtttcatacaggatgaaaaccggtgaattgtaatctcacataaccgag

SEQ ID NO: 11772 - DNA, 535 bp, Homo sapiens
  misc_feature (1)...(535): n = A,T,C or G
tagaaggtggaagagaaggtctamaagagttaagaaaggtatttttattaaactttaaatttcagttcctcacaggccagccatctattatgcctttaccacaaccttctctaggttttaaacagactagctgcagtttttagaaaatgccaactacactggaaccttatttttttttttagacagactcttactctctcacccaggatggagtgtgatgtcactgcagccttaaacttctaggctcaagcaatgcttccacatccacctctccagtccaggactacaggtgcctgccacaatgaccaactaatttattttaattttttttaagagacaaagactcattacatcgcccaggctggtctcgaactcntggtctcaagcaatcctcctgcctcagcctcccaaagtgctaggtacaggcatgagccaccatgcctaggccccttttagtttttttaaataataaatctgaatcttaattgatgttgttcctcctcaccccaccatattagtcaatattctctgcaat

SEQ ID NO: 11773 - DNA, 1067 bp, Homo sapiens
catttttgttttctcggctctgcgagacttctgaaaattccactctttcagtggcctcttttagttagcttcttagcttcttgcctgagtagctcaagaatttgacaaatgttttaaaagaagaaaaccactgagtattgtctcactgctttgtagctcccttctctctggaatcctggctccctaagtcctagctgcccaggcagcctccacaggagcgttgcctccctatcatcctgtgagactgccgagaatctccacagcttttcttgcctttcagctgaagctatttgcctgacattcaccctgtcttcctgatccaagaattggcagaaactttgagggggaaagtgggtctaataacaaatactcacctctccacggttcccttcccttcataatcttggacctcaagtcctaggtgcgttggtccttagatgccttcccacagatttttttgtattccaacttaatttttttttccctcggggaagagcataggcctttcacaagctgctccattgtagctggaactagaggtcctaacttagtttttgaggaatgactagagtttgccaagcagtaaagggccaccccaggtaaaggaaacagtaaaatcctaaagccagaccctgttcgttttagcaacatggggcattgaaggcacgkgtgactctcccaacttgtgttaggacaccaacctgtactgaggcctggatcaagcccagcatatgtcaagatctcagaagactcctgcctcagggccaacagggagctctccaccaaagaggagtgttgatggcaaggctgacagtcacagactagggcctcttgttttggaagaatcctgttgttaagacagaagtgaatattcaaaatgtgtatgtacacccccgcccacccacctcacagcagcacagaaggcagaattgttcagattttctgaagaagagatgaagaccccagggaacctcctgcatttattgtgtcacatctattttttatgacaaccttcagtctgcttcccgtgggattcattcagaatctgtcttggcttctccttgtca

SEQ ID NO: 11774 - DNA, 521 bp, Homo sapiens
atctcactgcagccttgacttcctgggcttaagtgatcctcctgccttggcctccctggtagttgcgactaaaggcatgcaccaccacacccagctaatttttaaattttctggtagagatggggtctcactatgttgcccagactggaatcaaactcctgggctcaagcaatcctcccatctcggcctcctkaaatgctgggattacaggcatgagccagtgcacctggcctttaccagaacttgaacattcccagcagaaaagacagtcctggaattttcttctcaacagcgtacctaaaacctgccatgttctgcactgagattatgctgaaatgactgcagctcattttaaatagaactctgctaccttcatatcctcatttctcacaagatagtccaggaggaatatactgaccttttgtttccttcttgtactaaaactggcaattgacatctgtttgattcataatcaattgcccccatccagttctatgtgcagtgatttctggggtcttaaa

SEQ ID NO: 11775 - DNA, 656 bp, Homo sapiens
gtgctctgtttctaagaaatgacggccttgcctggacaggtatgaaccagctttaaaacacaaaaatgcaatcaagtccagtcaaacaagttgaccactttggaaactattcatcttgttcagtaacaaatcctggaatctcatatgaagtagtttgcttatttttttcagacctcctaagtgtcattgtttggttatatatattcctcgctttaattcgactcrtggttttaaaactcaaccacactggattttgcagtgttgttcttttgcaaggatttgaacatgaagtataatcacacaggaacagtgatctgctcatttccaaaaccatgggtaacttactaaagtttcagcaaattttaaaatgattgattttcatccatttcttttttttaagatagataaattttgctttgaaagtaggagtctttttgtctctgtgcctttgttgtgcaagaacaaaacattttaaacccttctttaagaatcaaactgaagtcctgtcttgcttctatttatgtttggtactaaaagaaaggaaagaagcaatagcatcctcctcgccatgctccaactctctttttgtctgctttgatgatcagactgttgcaaagaaaatgctggactgcagagtaaacacagggtttgaagcc

SEQ ID NO: 11776 - DNA, 565 bp, Homo sapiens
tttcctcagcctcctgagctatctagtccatcctactggggtggctctttttcaggcactcaaatcatttatcatgaacgaaataactcactgagaatatgaaatgtcatgagtcaagtcatggacctaaatcagttagagaaagtcaaaccttcatacctttaatttattgtcaggagagagaatggctgccgtgacatctctctggagctttgtcatgtgtgtaacagaaagaaagtgagctacgtcctgaacaaaacaccaagggtgcaagagcaaggagacatcaaaccattgtctacacccaggaaaggaattcagagtggttagaatcaccttgattttcctgtgcattctccagcaatttgtgggaggccttcagaagtatttatagttcttytccacccaggcttagacttttgcagatagaagtggctgacacttcttgaggataaacttttgatcttgctgctcactgtaagtggagctgaggggtggtgcatttccatttcttctctggcctgagcttctctgctgaagaaacagaggacagattaggtcttca

SEQ ID NO: 11777 - DNA, 979 bp, Homo sapiens
aggtaatttttgtatttttagtacagacgggatttcaccatgttgcccacaattttattggtctcaaatttctaacctcaggtgatcctcctgcctcagcctcccgaagtgctgggattacacgtgtgagccaccgtgcccgacctgaaagccgttatttattttggtctcatgtgcttatttgtttcagccttatgtcatttgagacataaatttaaaattttaaatttctgtttatatttggaacgtaataaaagctttttttgtttcaattgtttgtttgctttctcccttctctgaggtaaaagagaactttatgctaaaaaaaatttttttgattagtaattaccctaagccactaaccacttgtattatttctctgtgccttttgaggtgtaaactctttcctcagtcttacctaagaaactaccccctttaaaatgcaaatttcaatgcaaagagccgggaaacaggaatttctactgtttgcccagctaaaacctggyaataaaatagcttaagaaatttaaaaagttctatggtcaaaagtcgcctaattaaaaggtaatgcttaggtcataatttttttctttttttttttttttctttaagaactttcttctttggatcctgttttttccataacttttttcttagtcaactgaaacaccattttttaaattaataaatttattaatttattttaatttaatcaataaatttaaatacatttgcttcctttcttgatggcataaattttgccaaagataatgtaaaattttattagacttttgggaaactgaagatcttctcaatctggttcccctgagtcttgttcttttatttgcttctgctccttctatctcctttttaccttcaatcttccatccagcttcctttaatttttttttttttttttgagacagagtttcactgttgttgcccaggctggagtgcaatggcatgatctctgctcacc

SEQ ID NO: 11778 - DNA, 535 bp, Homo sapiens
ctgtcttccttaacaaagtaataggatgttaatggcattggaaaagtagcaagtttaacagaaaagacagaaggcataaaaagagtgtgtcccttgggaagtgtataacttagattggttctacatcttttattaaacttaccagtggaaacctcggacttttcccacaccctgccagagagttgaagggaatactgtgttgaagataagaacagggacccacaccacctaccactatactatatctgccgtctttgtctctatcagtgacgccatgctttagcaggataattgcaagttttgaagtcacttgtcacattaaacacttattaactgtttttagcataaggggtgaaggtttttttttcattgttcctcaagtattttagttacatggtaggtgktaacattttgctttgcttatcttttttacttataaaacttatataaccattgactatatggaataatatgataattgaagaaaagcctttaattaataatcaaggagatggtggcaactgtaatcatttcc

SEQ ID NO: 11779 - DNA, 967 bp, Homo sapiens
agtaactttcgatcgttttgttctgcatgtcagcatttaaaagcaaaatgtatcaggcactctaacttctgttgcagttaacaccatccctttctgaccatgtgatattatcaacatggtcctgatgcccaccatagcatcacttgctctgccgcttaatacctccatagagcaagaaaccatgttgaaagaaagggtgagctaagtgttctagaacagcaaaacagaaatgtactttatgttctttcttctgccttttcacatggaaatatttaatgaccttgtcaaatctcataattgggttgcactttgctgttagtaaaggagctgtttcgtagtcaaaaggaacatgcattctctaaaagcaaattttaagctactkgagattccatgagtatttatttatttgttattaactttgatttttttttctgacttgcggtgatcctgcttgaaatgtttaaagtttggatatgtaataatatgcctatcagtgatttattagctacattataaaatcaggtcttcactttatagcatagagtgaaaaagaaaatatattaagcctttacattttctaattgttcatgtatttagtctgtatctgattgcactaagcaactaaaaaataattatcctgtgtcttaatatactacattatgatttttcctctttaataactaaccccattgtgtaggcaccaatgaaatgagaacagagttttgtgtcttttgcaactgtatcacatgtttaattttttttgttttgttgttttaaattaacagctatgggcaatatttttagaagctgtttatttgtataaaacaaaattgcattgaactggactttgttttcaagggctctttctataaccctgagtattgatactcctcataattcaaattgttcatttggagagtttttaaaagatatttatatttttaaaaatctgatcaagagtactgat

SEQ ID NO: 11780 - DNA, 967 bp, Homo sapiens
agtaactttcgatcgttttgttctgcatgtcagcatttaaaagcaaaatgtatcaggcactctaacttctgttgcagttaacaccatccctttctgaccatgtgatattatcaacatggtcctgatgcccaccatagcatcacttgctctgccgcttaatacctccatagagcaagaaaccatgttgaaagaaagggtgagctaagtgttctagaacagcaaaacagaaatgtactttatgttctttcttctgccttttcacatggaaatatttaatgaccttgtcaaatctcataattgggttgcactttgctgttagtaaaggagctgtttcgtagtcaaaaggaacatgcattctctaaaagcaaattttaagctactggagattccatgagtatttatttatttgttattaactttgatttttttttctgacttgcggtgatcctgcttgaaatgtttaaagtttggatatgtaataatatgcctatcagtgatttattagctacattataaaatcaggtcttcactttatagcatagagtgaaaaakaaaatatattaagcctttacattttctaattgttcatgtatttagtctgtatctgattgcactaagcaactaaaaaataattatcctgtgtcttaatatactacattatgatttttcctctttaataactaaccccattgtgtaggcaccaatgaaatgagaacagagttttgtgtcttttgcaactgtatcacatgtttaattttttttgttttgttgttttaaattaacagctatgggcaatatttttagaagctgtttatttgtataaaacaaaattgcattgaactggactttgttttcaagggctctttctataaccctgagtattgatactcctcataattcaaattgttcatttggagagtttttaaaagatatttatatttttaaaaatctgatcaagagtactgat

SEQ ID NO: 11781 - DNA, 642 bp, Homo sapiens
tctacaatttctaactcacatagaaagaagtatttacawtctttaaacacaagattatcccagatgaagaaaatatttttccttgccttttaagcctcctctgaatcttgaagttgctcttcttgactttttagaagctgagctcttctagctctgggtcctagcatagcacagagtctggaagagtagcaaatgaattcatcaacaggaaaggcgtactaatatatatttgttctcctaattataaatgaatgactgtttctttttttgcacatgtccaatttttgatagcctcattttcctgttagatcacagtagctcaaaatttgatttttcttaaaattaagagagaagtgttattagattaattatctgaaaaaaaatgcattactatttaaaacagtcctatctaatcatttggcttccctgggccacattggaagaataattatcttgggctacacataaactacactaacaataacaatagctgatgagctaaaaaaaaaatcacacaaaaacatctcataatgttttaagaaagtttatgaatttgtgttaggcaacattcaaagccgtcctgggccacacgtggcctgcgggcaacaggttggacaagcttgttttaaaggatagaaaaat

SEQ ID NO: 11782 - DNA, 642 bp, Homo sapiens
tctacaatttctaactcacatagaaagaagtatttacattctttaaacacaagattatcccagatgaagaaaatatttttccttgccttttaagcctcctctgaatcttgaagttgctcttcttgactttttagaagctgagctcttctagctctgggtcctagcatagcacagagtctggaagagtagcaaatgaattcatcaacaggaaaggcgtactaatatatatttgttctcctaattataaatgaatgactgtttctttttttgcacatgtccaatttttgatagcctcattttcctgttagatcacagtagctcaaaatktgatttttcttaaaattaagagagaagtgttattagattaattatctgaaaaaaaatgcattactatttaaaacagtcctatctaatcatttggcttccctgggccacattggaagaataattatcttgggctacacataaactacactaacaataacaatagctgatgagctaaaaaaaaaatcacacaaaaacatctcataatgttttaagaaagtttatgaatttgtgttaggcaacattcaaagccgtcctgggccacacgtggcctgcgggcaacaggttggacaagcttgttttaaaggatagaaaaat

SEQ ID NO: 11783 - DNA, 642 bp, Homo sapiens
tctacaatttctaactcacatagaaagaagtatttacattctttaaacacaagattatcccagatgaagaaaatatttttccttgccttttaagcctcctctgaatcttgaagttgctcttcttgactttttagaagctgagctcttctagctctgggtcctagcatagcacagagtctggaagagtagcaaatgaattcatcaacaggaaaggcgtactaatatatatttgttctcctaattataaatgaatgactgtttctttttttgcacatgtccaatttttgatagcctcattttcctgttagatcacagtagctcaaaatttgatttttcttaaaattaagagagaagtgttattagattaattatctgaaaaaaaatgcattactatttaaaacagtcctatstaatcatttggcttccctgggccacattggaagaataattatcttgggctacacataaactacactaacaataacaatagctgatgagctaaaaaaaaaatcacacaaaaacatctcataatgttttaagaaagtttatgaatttgtgttaggcaacattcaaagccgtcctgggccacacgtggcctgcgggcaacaggttggacaagcttgttttaaaggatagaaaaat

SEQ ID NO: 11784 - DNA, 1070 bp, Homo sapiens
aaattccaagagaaggtgctttgtctgtcaagttttttatgtttaaagagtcatagaaagacaagggaaataagagttctaagtttttactttgtgttcttatttaagaaattattactgtaatatacttattcatatcatttctaaacaaggtggactataaacctgtaagtaatatttaagggggaaatgacaaccttttgactcagtgttatggcataagcttttatatatactatgtataagaagcatcagtataaaagtttttctgtccgatatacaaaattttataggaataaattacttcatgtattttctgtgccttatttgtctttatattgaaacacatggaacaaatttttctttcctctttgttcccaggaaatttttaaaaatattctttcatatatctttacatatataaaaaagagaaataaatgttgacttctaattaattcacccaaaacaccatatgataactacttaccttaagtctttttggtggtctcctatattattttaattaaaaaatttagtattattattaatattaagctgcctraaataatttttaagaagctgatcatactttctaaaaggctcataactaggagacatgtatcatagatcattaaatgtaaaaatatttttggaaatattctttagcttataaaataaaaattttccccaagtaattgagttatagactattgtctatattatttcgattagataacaagctgaaacattgaatccataaggtctattattaatcacatttctatattaatttgaatttgacataactttttgttaaaatgataaatgcacattggctaaactacagaatcatcccaaatcctaccttccagaagaaattaaaattaacattatctaaaaaccagtatatagaaataaatgcttagataaaattaagatgttaacatataatgattaaaagctttttaaagtgtcagttatcttcatttaaaatttttaaagtatgtgacataaaaatgaaggaattgttgaacctcaataaagatgtaaaaccataacttaagcttcca

SEQ ID NO: 11785 - DNA, 1422 bp, Homo sapiens
tgacattccacatagggttgtcttctgctttgccttgttgaaccgtttggtcagtgacttgagggaagataaatagccatgtttatcacatctatcaaagtcccatgctatgtaatgacaagataaatactcaaatagaagctaggtagtaccccctcagaattattttaaatgaattgttcaagccctttccgtctaagttaaattattcacttaactagctatcattttcagtatcattttattctaaaaaaaaaagcctcctcctcacaactaaccatttataaacacactttctctcttttatttttttctaagacatttttctttttttattatactttcagttttagagtacatgtgcacaatgtgcagattagttacatatgtatacatgtgccatgttgctgtgctgcacccattaactcgtcatttaacattaggtatatctcctaatgctatccctcccccctccccccaccccacaacaggccccggtgtgtgatgttccccttcctgtgtccatgtgttctcattgttcaattcccacctatgagtgagaacatgcggtgtttggttttttgtccttgcgatagtttgctgagagtgatggtttccagcttcatccatgtccctataaaggacatgaactcatcattttttatggctgcatagtattccatggtgtatatgtgccacattttcttaatccaatctatcattgttggacatttgggttggttccaagtctttgctattgtgaatagtgccacaataaacatacgtgtgcatgtgtctttatagcagcatgatttataatcctttcggtatatacccagtaatgggatggctgggacaaatggtatttctagttctagatccctgaggaatcgccacactgacttccacaatggttaaagtagtttacagtcccaccaacagtgtaaaagtgttcctatttctccacatcctctccagcacctgttgtttcctgactttttaatgatcaccattctaactgatgtgagatggtatctcattgtggttttgatttgcatttctctgatggccagtgatgatgagcattttttcatgtgtcttttggctgcataaatgtcttcttttgagaagtgtctgttcatatactaagacatttttcttctcttcyacctgtattatctattctgtacaggctctagagggatctttttatagacaaatcctttttttttcttttttctcaattcagtgccataaaccacttatctactattttcagcagaaaaactaaaaactttaggcagtttaaatccctcaggtaagtcttatttatctgggatatcttatttagagtggagctaccattaaaatattttatgtgaatttatggataactcactttctatataaatctgtgagtct

SEQ ID NO: 11786 - DNA, 1422 bp, Homo sapiens
tgacattccacatagggttgtcttctgctttgccttgttgaaccgtttggtcagtgacttgagggaagataaatagccatgtttatcacatctatcaaagtcccatgctatgtaatgacaagataaatactcaaatagaagctaggtagtaccccctcagaattattttaaatgaattgttcaagccctttccgtctaagttaaattattcacttaactagctatcattttcagtatcattttattctaaaaaaaaaagcctcctcctcacaactaaccatttataaacacactttctctcttttatttttttctaagacatttttctttttttattatactttcagttttagagtacatgtgcacaatgtgcagattagttacatatgtatacatgtgccatgttgctgtgctgcacccattaactcgtcatttaacattaggtatatctcctaatgctatccctcccccctccccccaccccacaacaggccccggtgtgtgatgttccccttcctgtgtccatgtgttctcattgttcaattcccacctatgagtgagaacatgcggtgtttggttttttgtccttgcgatagtttgctgagagtgatggtttccagcttcatccatgtccctataaaggacatgaactcatcattttttatggctgcatagtattccatggtgtatatgtgccacattttcttaatccaatctatcattgttggacatttgggttggttccaagtctttgctattgtgaatagtgccacaataaacatacgtgtgcatgtgtctttatagcagcatgatttataatcctttcggtatatacccagtaatgggatggctgggacaaatggtatttctagttctagatccctgaggaatcgccacactgacttccacaatggttaaagtagtttacagtcccaccaacagtgtaaaagtgttcctatttctccacatcctctccagcacctgttgtttcctgactttttaatgatcaccattctaactgatgtgagatggtatctcattgtggttttgatttgcatttctctgatggccagtgatgatgagcattttttcatgtgtcttttggctgcataaatgtcttcttttgagaagtgtctgttcatatactaagacatttttcttctcttctacctgtattatctattctgyacaggctctagagggatctttttatagacaaatcctttttttttcttttttctcaattcagtgccataaaccacttatctactattttcagcagaaaaactaaaaactttaggcagtttaaatccctcaggtaagtcttatttatctgggatatcttatttagagtggagctaccattaaaatattttatgtgaatttatggataactcactttctatataaatctgtgagtct

SEQ ID NO: 11787 - DNA, 527 bp, Homo sapiens
aaaaactgaggcttagaaagcttaaatgattggctcaagataacacagttcttaagtgggaaacccaagcttcaagccaaagccttcaaaatttcaatcttagagtaatttaattgcctcaaattagccttaacagggggcagaatcccaaaagaaagcaaaagaggaagggggaaggtcaaagaaagtatggtcctggagctgggaatgctgccaaggggaagatgaaaagaatgaaaaagactgaaaaacytctttgtcttactttgtcattttgcataaggctagtttccttcacaaccttatggattttaatttttcaaagattgaagtgggccgaaaacaagctaccaaggtgtgcaagacagttattattaaaactattttcctctccaaactttccaaccacagcgaggctggatcattaactgtgtgaaccaagagaaacgatttgtgaaaatcaacatgtgcagtccttggcatagcaagtaatcagggaaagatcgtaatggtgacaataatgacag

SEQ ID NO: 11788 - DNA, 561 bp, Homo sapiens
gccaagaatgactgatgtcataaatacagacaatgagtatgatttagtcccagaagggcgtgaggacatcatgtagacacaaaagagcatrcaacagcaaattattgggggtaaatatttaatatcttgcgtctggggaactctaagttaaagtagtttgatatggctgtgaattaaactgttagagggacagagtaaaggtgacatgagaaggatagtcaagagctggcagttgaaagtccaagaataaaagttgaaatattttggactttagacggaaaggcaagagtaactattaaaggatggataacaatgtgttggctcttcaaaacagcgtggatgattgagtgtgggttgggaatgaataggaagtggggaacggtggggctgttgtaaaagtgaagagcagatatcagccaaggatctgttaaggacactggaattagtatatagcagagaaaaaattatttacattatttaatataaagagttggctgggtgcagtggctcacacttgtaatcccaacactttgggaggccgaggcaggtggatcacctgag

SEQ ID NO: 11789 - DNA, 517 bp, Homo sapiens
tagcacaaggccctacttctattagggcatgctggctggagtcctctgtgtcctggccatagcacagcctttgactggcatcatgcccattccatgaacgaatagagagattgactaaccccagtgactagctttgggagctggtaggatgattaggaaaactgaaccctcaagaaaagaaaagcatttagctcagtgctctgtcccagaggctacattgtgttgcctcttttgtccatcagttttcattttttcagacagggtcttgctctgtcactcaggctggaatgcagtggtgatcagagctcactgcagccttgaactcctgggctcaaacaatcctcctgtctcagcctcccgagtagctgggcctacaggcatgcaccaccatccccagctaaytaggtgatttattttgaaagcactttgagaagcacttcactgtcaaatctgtaggtctaaaaggaaaagcatacatacacataattgatttcacattgttttacatttcctttgt

SEQ ID NO: 11790 - DNA, 669 bp, Homo sapiens
gtccctttattcatgacctgtgttttcagaccacagatgtactcaggttcaaatctatgaagagttctcaatatatgaaaagtgagcatggtcttctactgtgctattttgtttgttgtgaaacaacagccttccatatgggtggaactaggctatttcatgctgtattgttcacaaagggaaacatccaggtcacgagaagttgttttacaggtcaggcaagccatagtgtataagcactactctattgatgccttattatgagatactgacatagaataaaaagaaacgattcttttaatgaagacaaaatgcatggttcattgaaggaagcagaaatgtcacttgctgctttcaaaattggaccatttgactgaacatttgtgttgctttatttgctgcctattgaaagatattccaaattcctgagctgaatttgtggggctaaccataggaaaagaaagaaagaaagaaaaaaatatatatatgtaaattttaagacacaaatttacttctagaagtctttgtacttttaaaaattgtcaygcaggccccattactggtgggggaacaaagtcataatttgaggttaagctagagaaaaaagagggactaactgaggcagagagcaaggccataagatctccacagtcctcaggcactactttc

SEQ ID NO: 11791 - DNA, 591 bp, Homo sapiens
taaattagcatatctcttctgactacatcatgttgaccaaataggaatatttttaattcacgtagcagttttcacctttgaacactgaatattgacagagtgttggcttctattttttctaaaggaaggaaaaacataactgtagggaaacttttcaccaaaattggctgccacctgttgtccttttttttttgtcttcccaacatttcagtgttagaacattacaaacaaaatgtaaaagcctttgcatctacttgggcaggaaataatttgtttggtaagtgctaaatgtcataacagayagtttggaatcccctggtttctattcacttatttctgggttcacagataggccatatgttgggtatacctaaagtcttttttctaaataactgggatagtatattccacaaattatttagaaggaaacaatctaatctcaataattgaggctactgtgtgttccagatagaatggattatttttccagttggaagtcatgaattggtccctgaatgatggtaaaagaccccagatgaccctattagaaatgtagcatgagcaagaaataaagatttgtttgatgactca

SEQ ID NO: 11792 - DNA, 626 bp, Homo sapiens
tcagaaatcaccactaaagaacttactcatgtaaccaaaaaccacctgttccccagaaacctatggaaatataaagatatctatatagattttagatggacacatttgtctatctgtcttttaaataacctaatagttttgactgattttatttttttctacaggattgaacaatttagggaaaatggttgattggctgttggttgacagtcacctagtttcaggaatcaaatataagggatgaagtagaaaatttgcaaatttcatccaaccattccatatagctgcacctgaaaaggtagaaatatccaaactgtaattattgagtcagttttagttgaacattattcagtgtacatgtatccatatactgttcatgagacatacatgtgcttttcctcaatgcccarccccctgaagttgtgagtctatgtgaccaggtcttgccaattacctctgggaggcagtggcaagtatcacatctaagacaaaatatagaagataggtgtaacttctccaggcactctgctctcttgtccttgtcatcatggaaaacccaaaccaagatggccctgtcgcaaaatggagtgtgccatacatttttatgtattaagtttctgagattt

SEQ ID NO: 11793 - DNA, 533 bp, Homo sapiens
gtaataataaactggataattagtaggactaaagaagtaaaacagatatggatgggcagattcaatggataaacttgaataaatccttctagagctaaaatgtttgaaaaaatagccatttatactatttatatatagttttccaggaaagtatatgagcccctaaaacaaggtgagtagataagagtatagattaataaatataaatataatttatatttagtaactaatcactttaagaartcatcatctgtaattctttctgttatacacatctctcataatgataaagatatcaaaaagcaagtagcagccaagtcaaaggatgtaaagatatttatcaaggtggtactttgccatgtgtttctttcacttgtcagctacttgttgtcacaagtgatgtacatgtgctcctcaacttatgatgaggttaagttcaccataaacccaccataaattaaaaatatagttccccccactacgcactcccaagatggcagattagaggtagcttgcctcagccacttggaggt

SEQ ID NO: 11794 - DNA, 503 bp, Homo sapiens
cattatctaaagattgcagataaagaaaatctacgtgtaaaaatagtgactttccaaaggcattactatcaaattaagcgaaaattagaattcatacaccttcatttagtctgtaagartcctgtttctattgagcctctggggaaccttttgccttgaagagattattggggaaaggggacaagaaggaaggaaacaaatcagcgcagtccaacacaccactttctttcctttctctttctcttccgctttgcatttctatttctgttccactctatttcctcctccccctcctcttcctgttttctttctttccttctttttctttgcttcctagtcttttactgctcttggtatttgtcccgcgtctttccaatctcttcctttttattttttagttctactttttatatctgaccctcctagtagagaaaaggtggtcaatattacagtcgttcaaaaataaaaattaagtacttaactctttctggctctgtgccaag

SEQ ID NO: 11795 - DNA, 503 bp, Homo sapiens
cattatctaaagattgcagataaagaaaatctacgtgtaaaaatagtgactttccaaaggcattactatcaaattaagcgaaaattagaattcatacaccttcatttagtctgtaagagtcctgtttctattgagcctctggggaaccttttgccttgaagagattattggggaaaggggacaagaaggaaggaaacaaatcagcgcagtccaacacaccactttctttcctttctctttctcttccgctttgcatttctatttctgttccactctatttcctcctccccctcctcttcctgttttctttctttccttctttttctttgcttcctagtcttttactgctcttggtatttgtccygcgtctttccaatctcttcctttttattttttagttctactttttatatctgaccctcctagtagagaaaaggtggtcaatattacagtcgttcaaaaataaaaattaagtacttaactctttctggctctgtgccaag

SEQ ID NO: 11796 - DNA, 535 bp, Homo sapiens
tatttgttgatatcctaatctctaggccacattcccayacatggaatacatttgccctggtctttattagattttgaaagtgcattccttgattcatgttttactttctgagaaaggactgtggaatgcaaactgagtggctttaattttatttgagaaaaggcaagaagaaagtgttcttaccaaattcaagcttttattttgcaggtaagcatcacttgtgctgctgcttctgatttataaaagagaaacactattctctttaaaacaacaagtgttaagcaaaatcataaatagctctctacgttttcattcccaattctattggcttggctaatattactggtaatacatacattgattgttacagcactattttggctgcatttaaaacaccacatgaacaatgaacaacagtatcaactaaatatgctataggtgttattatactcttgcggcaaacatcctgaattgaggttcagtgaggaatgagacatcaccaaaaataagtcatcaacaggaccatatcaatgtc

SEQ ID NO: 11797 - DNA, 535 bp, Homo sapiens
tatttgttgatatcctaatctctaggccacattcccatacatggaatacatttgccctggtctttattagattttgaaagtgcattccttgattcatgttttactttctgagaaaggrctgtggaatgcaaactgagtggctttaattttatttgagaaaaggcaagaagaaagtgttcttaccaaattcaagcttttattttgcaggtaagcatcacttgtgctgctgcttctgatttataaaagagaaacactattctctttaaaacaacaagtgttaagcaaaatcataaatagctctctacgttttcattcccaattctattggcttggctaatattactggtaatacatacattgattgttacagcactattttggctgcatttaaaacaccacatgaacaatgaacaacagtatcaactaaatatgctataggtgttattatactcttgcggcaaacatcctgaattgaggttcagtgaggaatgagacatcaccaaaaataagtcatcaacaggaccatatcaatgtc

SEQ ID NO: 11798 - DNA, 517 bp, Homo sapiens
ttttctgcaatccaaagcctctctattcatgacttgaaatgaagggaatgcaccctatgggaagcattcacccaacctgtgcacaaatgttttggctgtgaagtagtggagacatatggaaatcattttccttacataaaacatggctgagataaaacatggctgagataagtcacacctaaacaaaggtttccaggatcttcaagagycagagtagttcagagtaaaggtatagccctactactctacttcttcaatgtcagtgatccaaagaaaatgagaaacttattttttcactcttaaaaatcaacttattatgaaagattattatttacttaagttatttttaattatgcatactattgctatatggtaccattttattttactgattttaaatagaggtaaaggttatatttcacattaaggatactagaagccaattttacctaagttatagccgagaagaaatatattttttaaattacatggaaaaaacctctaaggcagagagggc

SEQ ID NO: 11799 - DNA, 522 bp, Homo sapiens
ataccatgcttacctcaggtctcagaaagaagcacttttgtttctcctggtagaacataccaacagtatcttccaattttattcaagtcatatcacgtgttgtgggaaggacctggtgggaggtaattgaatcatggtggtggttaccctcaggctgctgttcttgtgatagtgagtaagttctcatgagatctgatggttttctaaggggctcttccccctttttcttggcccttctcctcactgccgccatgtaaagaaggatgtgtttgcttcacttccgccatgattgtaagtttcctgaggcatccccagccatgctgaactgtgagtcaattaaacctctctcctttataaattacccagtctcgggtatgtctttattagcagcatgagaacagatgaatacatactgtttttgacwttttagttatctctccagtaaaacaaacttcaaatctctatggtaaagtgagcatctgtcaatagattttctctctttctttcctttcttttttccta

SEQ ID NO: 11800 - DNA, 567 bp, Homo sapiens
gaggctgaagcagcagttagtgagaaggaggcaaaaccagagaagggcgatgctgccattctcattacccgattccgagcctgggtccggccagagctggggcagaggggagaggctgtggaccagatatgataagagttctgatgaaagattggactgggctttggagagaccaagaatgtgatcatgtttaggattgacctagccatttactagctwtgtggccccacaggtcacttaaacctttacgttaattaaacccctccctgcctcagttcaattaaagtacctggggattaaaagagctggtgcatgcacagcccttggtacggtagccagcacacagtaagtgcccagaaagtgttcgctttccgtagtagaagtggtagcagtagcaatagttgtgacagcagcagtagtacttctaccgatagacatcgtgcccaaaagtgaccacccctcccgcctcccccgagaaaaaccccaaatgctatttgggcctaacagagtgcatgtgaaaagaagtagcgggaggaaaagatacttgtttgctacttacatcctgct

SEQ ID NO: 11801 - DNA, 522 bp, Homo sapiens
tcttgatggatgaactggtgatcctcttaaccaattttaaggggcacagagcaggagaagcaggtttagaggacatggtgagtttgagatatcgtccagcagacagttggaccatttggggtctgctggacttggcagttargtggtcagtgataacctcatgtgaagatgtttcgatagaatagtcagtacatgaaagcagtgttgatgataccctatccctgagtggaacatcttataatctgtacatgatccaaaacccaagaactctccacaagctttcctaaggttacactttctgtaaacttttctctcataaaaggcaactcttattgggtttgatagcattttccagaaactcaagaagttaataacatctaagccatttcctctggtatcacccaatattcagttcctaggagctcctgggaattcattagagccacatagtgagagagggaattagccttcttttgccactgccactgctaaagaagagttgtttgattttcataaaaccac

SEQ ID NO: 11802 - DNA, 562 bp, Homo sapiens
tggcccagagactgcagaagaatagccaaccatcagacttagtctaaagtgaattagtctgtttcactggactaagcagattttcacaccggatagcaaacccaaccaggttgttaagaataatattcatcagcattaaaactctcagaaagttagtttacagacaactgaactaatgcacatacctaagaaggtctccaagacttyctctgctcttcaatatttgaacctgtattgaattcttgttcaacttacccccaaggttaagataaatgggggatggaacaactatacgtaggcttagcatttggcatcagctatacagtagtgtttttgtataggctgaagtctacatcagttgtaattaatgtaattatatataatgttgacagattatgacatttgcctattaagacactatacaaacattccaataatttgctggcttttgagtttgtaaaaaataaatgaaacaaaatctcaagggatgttgctaatggtgtaactggaagagaggtttcaaaagcacagcgttcaggaaataacagtcaaagaataatgc

SEQ ID NO: 11803 - DNA, 558 bp, Homo sapiens
gttaacactcattgtatccaatctgcatacatttttatctaggggtgaacaaagcttttattcatgattcatttgactttcctctgtatatgtgactatttctcagttctcatttctaatgctgtgtgtttacgctttattgttttgtttcttttttttctgactcttttttttattttttatttttatttttwatttttttattatactttaagttttagggtacatgtgcacattgtgcaggttagttacatatgtatacatgtgccatgctggtgcgctgcacccactaactcatcatctagcattaggtatatctcccgttgctatccctcccccctccccccaccccacaacagtccccagagtgtgatattcccctccctgtgtccatgtgatctcattgttcaattcccacctaggagtgagaatatgcggtgtttggctttttgttcttgcgatagtttactgagaatgatgatttccaatttcatccatgtccctacaaaggacatgaactcatcattttttatggctgcatagtattccatggtgtat

SEQ ID NO: 11804 - DNA, 539 bp, Homo sapiens
gttggcttagtctcctgcccttactttgcattccacctgtgaagttttagacgccagagattccttcggatttaaattataggtttgttcatgcttttctacaggaacatatggagtatttgcatattgacattttgggttgaataattctttgttactgtgggctattttgtgccttacaggatgtttagaagcatccctggcctctacccactagatcccagttgcacctcctctattcagtttaacaatcacaaaaatgtctccagacactaccacattcatagattcatsagaagtcacccttgggggctgaggctgagttagtgaggaatgttgccagcctcaacgaagtcaggcttctgccaagagagagtatgaacagatgtagggcaggtaactggcagtgttgttttaaagaaatctaaatcctaacttacatagttccgggtaactggataataggataaaaatatgaaaaacactttgtaagtttataagagcccaggtatgaaggtattaaaaagacaacttgagtc

SEQ ID NO: 11805 - DNA, 859 bp, Homo sapiens
ataaatgagctaagaacaacctttgatcttgagtagattttccaactctataagcctctatttccccataaacagaatgagaatggtaatgatacctgccttgttagagcttaagtaatataatgcatgtggcttataggaaaacgttaagaaatgtgatcctttattattatcattattcatgtaacatgaaagctatagatgaagagggatgtctaaccacccagtggagtcacaggtgcaaagctggctagatgagcttggggccaaatgcttttgaaaaggcatcccaggcagggtaaagccatgcaaaggtttggagggatggagtagcatagtgtgttgagggatctctaagtatttcaaatgctggggctcaggatatgtgtgcaagtcatggaggaagaaaagccagaaaaaagtgtggcagaatcagatccatggctttggttgtcaaatctttcaagtcgcgcctacaaacttggaaatgcctccyggcatttcaacttctcgagctgcccctgatgttccatgttctatgggccactaaagcactctgagactcagtctgcccaacagtaacatgctctgctgcttcatgggtttgttgccccagaactcaatgataagaggatctgctgattgtaggtgctatggaagtacatatatccttaattaaatgttgctcatgacaccaaatataatattaacaacaaacctgcatctcaccatgtagatatttcaaatgatataataggtatagatatttgaaatggtagtaatcatgatatttataatagcaataatcttttaagcatttacaatatgccacagaaattaatactttacatatttggtc

SEQ ID NO: 11806 - DNA, 610 bp, Homo sapiens
tgattgcctcacaaagccatgaaaagctaactgaagactatctatacagcaggggaagtacccaaaccaaatatccatcttcatgcatcccagaaagatttaagtcaaaggtggtaatgctgttttctactgtgaaccactgacccatggaaaaatcaatggaaagccacaaacaaatacaaagcaacctggttctttattttccttagagaaatataaagtattaacctgcttcctaaattataaataaggaagccttggaacaaagtcagttaaagtataatattaaaaagattgaagaaaaagagacttgtaagatttagaggaaaaggcagagttatctctttttaatgcttactttcaaagataatcagcttactaattttcttgacttttaggtcaaccttaaccttttaacacattggttgttatctggagggtgcacacctgtggaaagtagtaaaactgtactttcctgggccatctacaakatcttgattcattggggctttatcatatatgtattttttgctccatgggtaattctcaagcaccattctggttcagaatcttggttttaacttatggtctcaacaaggcagccccacca

SEQ ID NO: 11807 - DNA, 636 bp, Homo sapiens
tgtgcagtttttttttaaatttctattttcatgctattactgggattctctgcagtttcattgtctcatttagttcgttcatttattctttcactgatttattcatttattcaacacgtacttatgaacagctactacatgtcaggcactcttctgagtgcttggaatatagcagtgaaaaaaacaaaggccgctgcctttatgaaactggcattctttgagaggcaggtgctagaaataaacaattcttcatcatctggattatcaccacagcctccttaactagtcttggctctagtttctctcstttctaatccatcttctacacagctgccaagagtgatttaaaactcagacaacattaaacacttcctttccttaaaaacatgaaataacatgaaataattttctccagcacttgggaatttgtgtccattcagatttctcaggattgaagaataatgtcttcctaatctgaccataataccttccttaaccttttctcattgttaaaccgaacactatgaggcttattgtaaatgcttccttctatggagaacctatctaatcccttcaagtcaaaattaaacactcagcacgatgtagatggtagcttcattgaatttcacttcttct

SEQ ID NO: 11808 - DNA, 636 bp, Homo sapiens
tgtgcagtttttttttaaatttctattttcatgctattactgggattctctgcagtttcattgtctcatttagttcgttcatttattctttcactgatttattcatttattcaacacgtacttatgaacagctactacatgtcaggcactcttctgagtgcttggaatatagcagtgaaaaaaacaaaggccgctgcctttatgaaactggcattctttgagaggcaggtgctagaaataaacaattcttcatcatctggattatcaccacagcctccttaactagtcttggctctagtttctctcctttctaatccatcttctacacagctgccaagagtgatttaaaactcagacaacattaaacacttcctttccttaaaaacatgaaataacatgaaataattttctccagcacttgggaatttgtgtccattcagatttctcaggattgaagaataatgtcttcctaatctgaccataataccttccttaaccttttctcattgttaaaccgaacactatgaggyttattgtaaatgcttccttctatggagaacctatctaatcccttcaagtcaaaattaaacactcagcacgatgtagatggtagcttcattgaatttcacttcttct

SEQ ID NO: 11809 - DNA, 1390 bp, Homo sapiens
gggtttctccatgtagtcaggctggtctcaaactcccgacctcaggtgatccgcctgccttggcctcccaaagtgctgggtagttttctgaaatttttaaagcaatactgttcaagtctgtttctacatcagaatcacctgtgttactttgtaaaaatactagtgcctaatttcatataaaagtttgagagaagataatttatggatagaaacatatttgtaacatataaagaaaagattagcatccagaatatataaagaacagctactattaaaaaaaaaaacctcagaaaaatgggcaaaatatagattaccaggcagctcaaagaagaaactgaatatcatatgaaacaggtattgggcatcagtgataatcagatgaaattctattttactgtcaccaagttggcaaaaatgtaacagctgacaatatcaagtgttgacaaggatgtgggggatagggaatgataatgccactgctggcattatcacagtacaactactgtgaggagcaatctgaaagtatctagtaacattgtaagtatgtgtaccatacatagcagttccactttcgtgggtgtctccttgagaagatcttgcatatatgcataaggaggatgttcattgtagttcatgagtctgggaaccgagtccagctgcacaggtttgaatcctgacaggaatatgcactagaccatgactttggataacttacttcacttctctgcatctgtttcctcttcggaaaaatgtgagttataggctgggcgtggctgcctcatgcctgtaatctcagcactttgggaggccgaggtgggcagatcacctgaggtcaggagttcgagaccagcctggccagcatattgaagccccatctctactaaaaatacaaaaaatcagctgggcgtggtggtgggcgcctgtaccccagctactcaggaggctgaggcaggagaatcacttgaacccaggaggcagaggttgcagtgagccaagatcatgacatcgaactgtagcctggacaacagagcaagactccatctcaaaaaaaaaaaaaaagaaaagaaaagaaaaagaaaaatgtgaaaatgtgaatactaatagaacccacctgtaagtgttagcagttgaagrtgctgaaatctctgagaaatgctattcatttctgtagttttaattgttgctgatgattttgatggttcctcgaagagaagataaaaataattcctaatcccaatacctagagataaccaccttaaaagattttatcccaaaatttgtaaatatatgtttttctttaaaatgtgattatgctatgcgtataattttggaactttttgtttgtttggagacaaggtcttactctgtcacccaggctggagtgcagtgg

SEQ ID NO: 11810 - DNA, 520 bp, Homo sapiens
ccaattattcttcctaaaacctacaccatggcacagactccttcagtcctatttgtctgcccaacctagccaataccgagacagatggagaacaggtccctctcaagctctcatgactcactttactgctcacctcttagtaatccaaataggaacccagcaatatttaagcttcagcagccttgaaacccaaaccaagttttactcctacacctgagtttgatcgaaatcttcaaagaatgcaaggaaaggctaagatgtagactgttcaaagatgggatctctcattaayttctgtctcttcagtatcagtatgatacctgtaacatacttaaagtagatgaagaaaaaagtgggaaagttggaaggaaggagggaagaaagaaaagaaggaaggagagagggacagagtccggagaaggacctgtatctttaatcctggccaaggattaaagcctggtcctgtctctgttcctggaccttctggcaaggcaaagaagtgagatccctcagcagcctg

SEQ ID NO: 11811 - DNA, 537 bp, Homo sapiens
tcatttcctttgaaaatattttataaggtaattttaaaacataggagattttaaaaataatcacaatacacaaacatcatgcctaaaaaccaagcagatcaaaaatcttttaataatataaaatatgcaggcaatcrttcaaatttccatgattatctcataaatgtgtgttttttaaaaaacaaatttgtccaaatcaggatataaatagtgccaggcatcatatttgatttataggtatcacaagactcactctatactagctctttcctcctgttttatttttaaccatttatttattgatgctattcctcagtcctgataatatgatccatctttgagaatactttacacaaatttgtttttgccaagggcaattcttttgctttaagactatcagttctaatttatatttccattttagcttttaacattcaactttttttcccaaaagggcctctttaaattcagtctatacaaatacttacatccccaataaaattttactccctctttccatcatctcctcccatataa

SEQ ID NO: 11812 - DNA, 537 bp, Homo sapiens
tcatttcctttgaaaatattttataaggtaattttaaaacataggagattttaaaaataatcacaatacacaaacatcatgcctaaaaaccaagcagatcaaaaatcttttaataatataaaatatgcaggcaatcattcaaatttccatgattatctcataaatgtgtgttttttaaaaaacaaatttgtccaaatcaggatataaatagtgccaggcatcatatttgatttataggtatcacaagaytcactctatactagctctttcctcctgttttatttttaaccatttatttattgatgctattcctcagtcctgataatatgatccatctttgagaatactttacacaaatttgtttttgccaagggcaattcttttgctttaagactatcagttctaatttatatttccattttagcttttaacattcaactttttttcccaaaagggcctctttaaattcagtctatacaaatacttacatccccaataaaattttactccctctttccatcatctcctcccatataa

SEQ ID NO: 11813 - DNA, 537 bp, Homo sapiens
tcatttcctttgaaaatattttataaggtaattttaaaacataggagattttaaaaataatcacaatacacaaacatcatgcctaaaaaccaagcagatcaaaaatcttttaataatataaaatatgcaggcaatcattcaaatttccatgattatctcataaatgtgtgttttttaaaaaacaaatttgtccaaatcaggatataaatagtgccaggcatcatatttgatttataggtatcacaagactcactctatactagctctttcctcctgttttatttttaaccatttatttattgatgctattcctcagtcctgataatatgatccatctttgagaatactttacacaaatttgtttttgccaagggcaattcttttgctttaagactatcasttctaatttatatttccattttagcttttaacattcaactttttttcccaaaagggcctctttaaattcagtctatacaaatacttacatccccaataaaattttactccctctttccatcatctcctcccatataa

SEQ ID NO: 11814 - DNA, 628 bp, Homo sapiens
tgtacctcctctatgaaagctgaactattataatgtgaaatgattgtctttggagacgataggtggaattacatccttatgggaaggatatgggggaatctgttcaaggatatatgcatttccactgccaattatgtggaatagtatgagacacagaaagaaacaaaacaaaaatgagtcattggaaagcagaccgaaaccatgaagagacatgttttctttctctgaatcttgctttcattggctttgattctaaggacaccagttattattaggagtgctgtctgcaggttgagaaaaagcagcctctggcattttaaaccaggtttagagctagataaaaatgagtcgcaaacctggtagattgaagccatgttgatggagtggtaggcatcgtatagtgggtaccatgaagatgrgctgctcaatacctgaactttcaaagaagtcaatatccagcatttcctcatactccattagtaagtatggttatatagacttttttatactcttccaatttctttaatatgaggcattaactcagcttccactggagacataaattgctctctaggtatcattcccttatttaatctcccacgtgttagtagtgttatatatcataaat

SEQ ID NO: 11815 - DNA, 606 bp, Homo sapiens
tcattatttttttctttaacttagacatttgtcattttcttggtgattatctcttaaataatcacaaagactttaacatataaggacaataatttattttccatcacatatattaaacaacttttaccctcctgttgtgaatacttctttttatgaatttttttctactaacagtatttcttctttttctttttcttttttttttttttttgagatggagtctcactctgtcacccagactggagtgtagtggcaccatctcaggtcactgcaacctgcacctccctggttcaagcaattcccctgcctcagcctcccaagtagmtgggattataggcacacaccatcatgcccagctaattttttgtgtttttagtagagatggggtttcaccatgttggccagactagtctcaaactcctgacctcaggtgatccaccttcctcggcctcccaaagtgctgggattacatgcgtgagccactgtgcctggccaatatttcaatttttatttggtttcaatcactatacatttcttgtgtcatatatgcctttgccctcaaattttataggttgtattcagaccaagattgtataaatatttatg

SEQ ID NO: 11816 - DNA, 566 bp, Homo sapiens
cacaaaataaaaggcaattgcataatgaaaaaaatatggaaacagagaacagatcaatggttggcaagggtaaggggaggggctccatgaggaattttggtgtgccgcaattgttcttatcctttctttggtgttattgacacaaatctctgcatttgtaacgcttaatagaactgtgtgccaaaaacataatttttcctgcatataaatgacaaaattttcttaaaacattgaaaagatataatagaaatctggaaaaacaatccccaaaaatgagcatattataaatctaggataattctaytgagttctgttttaaggaattgtgtacaaggtacatatggaatcgaagtcagcatgttttcacactatagaactctgtgactgaagtcaaggtcaaaaatgctgtcatcggtcatggaaagttttccaaattttcctgaattataatttatcaaataatccagttaagtcgcttagcatataattatatgaagtcatgtaattatgggtacatgagaaatgtttttttgtatcaacaaaggattttaaaatataaatgacaa

SEQ ID NO: 11817 - DNA, 566 bp, Homo sapiens
cacaaaataaaaggcaattgcataatgaaaaaaatatggaaacagagaacagatcaatggttggcaagggtaaggggaggggctccatgaggaattttggtgtgccgcaattgttcttatcctttctttggtgttattgacacaaatctctgcatttgtaacgcttaatagaactgtgtgccaaaaacataatttttcctgcatataaatgacaaaattttcttaaaacattgaaaagatataatagaaatctggaaaaacaatccccaaaaatgagcatattataaatctaggataattctattgagttctgttttaaggaattgtgtacaaggtacatatggaatcgaagtcagcatgttttcacactatagaactctgtgaytgaagtcaaggtcaaaaatgctgtcatcggtcatggaaagttttccaaattttcctgaattataatttatcaaataatccagttaagtcgcttagcatataattatatgaagtcatgtaattatgggtacatgagaaatgtttttttgtatcaacaaaggattttaaaatataaatgacaa

SEQ ID NO: 11818 - DNA, 522 bp, Homo sapiens
tgcacatatatgtacaaatatattttacaaataatgtaaaacttcatttaataattttcagtacctgtattctgagtttccmtattacaaagactacttgtctgccaattcagggagaaaaattatgttgtgaataattgaaatctgttaaaattattgagattttcagacaattttcagaatagaaaagaaagaaaatttgtaaaattttccatatgattctcttgtctttattctatactatttctaaaatacaggtttttatggggctttaggttcaatgttttcaagcaaccatcacaaaaccctggacaattttagaggtaggggtgaaaacaaaggaaagtggttgttaaccaaatggcagaagctaagcaagccatggaatggatgaatactaaatgttaatgaatagctgttctatgcctccagactcttctgtttgtattaatgaatagaactaattaaaagtagatataatatgatgatgaatttttttaaaaaagaatactgcatattttt

SEQ ID NO: 11819 - DNA, 522 bp, Homo sapiens
tgcacatatatgtacaaatatattttacaaataatgtaaaacttcatttaataattttcagtacctgtattctgagtttccctattacaaagactacttgtctgccaattcagggagaaaaattatgttgtgaataattgaaatctgttaaaattattgagattttcagacaattttcagaatagaaaagaaagaaaatttgtaaaattttccatatgattctcttgtctttattctatactatttctaaaatacaggtttttatggggctttaggttcaatgttttcaagcaaccatcacaaaaccctggacaattttagaggtrggggtgaaaacaaaggaaagtggttgttaaccaaatggcagaagctaagcaagccatggaatggatgaatactaaatgttaatgaatagctgttctatgcctccagactcttctgtttgtattaatgaatagaactaattaaaagtagatataatatgatgatgaatttttttaaaaaagaatactgcatattttt

SEQ ID NO: 11820 - DNA, 522 bp, Homo sapiens
tgcacatatatgtacaaatatattttacaaataatgtaaaacttcatttaataattttcagtacctgtattctgagtttccctattacaaagactacttgtctgccaattcagggagaaaaattatgttgtgaataattgaaatctgttaaaattattgagattttcagacaattttcagaatagaaaagaaagaaaatttgtaaaattttccatatgattctcttgtctttattctatactatttctaaaatacaggtttttatggggctttaggttcaatgttttcaagcaaccatcacaaaaccctggacaattttagaggtaggggtgaaaacaaaggaaagtggttgttaaccaaatggcagaagctaagcaagccatggaatggatgaatactaaatgttaatgaatagctgttctatgcctccagactcttctgtttgtattaatgaatagaaytaattaaaagtagatataatatgatgatgaatttttttaaaaaagaatactgcatattttt

SEQ ID NO: 11821 - DNA, 513 bp, Homo sapiens
tgagttttttgtcattcaactttagttttttcttgaaacttaggtattcatacatacatgaaagaaggcagagagggaaagagagagagagaatcaatcaaattggagtctaaaataatttttataatacatataacaaccttcacaataaaagttgtcttctcaatcaattcttttggactcgatttgattgctttttatgccacaaattgtatctccaaaaaattggcctttcaagagacgcttcttgaaatgactcaatttttctatcactgagtatcaagagtaacagaaggacttctatgctctccaatagtatctgccatggaaatatttctgtttttagatatttttgtgttgtgtgatctattgtaattggaaaaatatcatgttgacttttctttctgtggtttttttccgtatgcatgtttgtgtaaaaatctatttttaaaagattttcttctctgcyagtgcatttttgaagtgtgtcggtacatggtactgcattaatta

SEQ ID NO: 11822 - DNA, 1364 bp, Homo sapiens
taaacagcatctgtaagtacgtataccttttaatgtcttgtaatttcttattttcatataaggcaggagaattcttgaacccgggaggcggagactgaagtgagccgagatcatgccactgcactctagcctgggtgacagagcaagactccatctcgaaaaaaaaagaaaattcctaatttattaaaaattttggctgggtgtggtggctcacacttacaatcctagcactttgggaagccgagatggggggattgcttgagctcaggagttccagaccagcctgggcaacatggtgagacccccatctgtacaacaaatgcaaaaattagcttggcaaggtggcacatgcatgttgtcccagctacttgggaggctgaggtgggaggatcacttgagccttagaggttgaggctacagtgagccatgattgtgcctctgcactccagcctggactacagagtgagactctacccacccccccmaaaaaaatcaagaattgtacacaatttttctgcattccctatgcacagattcaccagttgtttacatttggcctcgtgtactgtatctttcactccctgtccccgaacacattcacatttacttatgtatatgttgttttgtctgaattatctgaaatcaggctacagtcatcaagccacctggctcctgaaaactttcgtgagaatttcttacaaacaagggcactctcttagagaaccacaatactgatcaaaatcaggaaatttaatatccatgaaatactgttctttaatctgcagatcttattcaatttcaacagttgtcacaattatattgtctagagttgtctttcccagttctggtgtctgatcaagaatcacagtttccatgtgtctggtctccttcagtctgaaatgtatggcagcctttctttgtatttcatggcatgaaacatctagaggcagagagcccatttattttatagaatgtatctcagtgtgggtctgtctattgtttcttcaagatagatttcagctgtgcgtctttgtcagggctgccacaaagggaggctgtgtcctcactgcatcattccaggtgagtcctgatgtcagcttgctttatgattggggtgttcccttccatcacttgattgcgatgcaggctgagacgtttttgcactttgagtttttaccattgtgattgtcaagtcatttgtgatgagatgcttcgagactacagaactatcctgttcatcaccattccttgctgcctgctgcttgcctcactccttaatatcatcattgcaaaggtgtgatttttatgctctatttttttttctaaatttatgagttggtctattctgtaagggagagcatttt

SEQ ID NO: 11823 - DNA, 536 bp, Homo sapiens
caaaaattaagaggggggaattgttaggtacagtaagttcctcttcaaaggtttaacttgttcaacttccttgttctttgttcctaagaacaatttccctgtaccttctcgaccctacttaccagcttagttacctgcttagtaacctgccttgtaaacaactcttcctaccagtcccaacctgtaactcacattccccctccctttcttattagagaaaatattcacaatatccagctgagtcagctaagattgtgcagtcctaccccagcccatgttggaatgacacagaggtagggagtgcattagggataaraacccctgctccaccccgtttggtgtgctcttgcaatcatgactaatgcaagcagcatacttgcagaagcaaattgtcttgctgagaaaacttttttgcctgagtgctgcttcttcctcacagcaccgatcatttgtttctaacaatctcgctaaaagcagcctagaaagcagccacttatgcagaaagagtaataatttatgctctacaagtcatataa

SEQ ID NO: 11824 - DNA, 568 bp, Homo sapiens
tgagggaatttacattttaggagttagaaataatggagcaatctaaaagagatctaaatatacctgtttgaaatgtcctatggaagaaatagcatgataaaaataaaaacagagtttatgaaagaagagtcagtggayttttttttccagtagaaacgctgaaaaaaatacagtcactgagaaaaaattctaaaaaaaaaaagttgtaatcaatggtttttaaccttggttacgcatcatagttattgatgtccatctcctgacccacaccgattaaaccagaaattctaggggtgggaccaggcattgatattttgttaatctgccaggtgattctaagctacagcccctatgtgaggtactctgttaacatattagacataactgaagagagaagtattaacaacagcaacaacaaaactagacatagcctgagacagaaaagaggagaaaaaaaagagaatgacaagatgataaacaaacaagttaagaaacatgaaggatgtaataagaaaagtctgattcatacacataatatgcattccagaaggagagaatagagagaatt

SEQ ID NO: 11825 - DNA, 568 bp, Homo sapiens
tgagggaatttacattttaggagttagaaataatggagcaatctaaaagagatctaaatatacctgtttgaaatgtcctatggaagaaatagcatgataaaaataaaaacagagtttatgaaagaagagtcagtggatttttttttccagtagaaacgctgaaaaaaatacagtcactgagaaaaaattctaaaaaaaaaaagttgtaatcaatggtttttaaccttggttacgcatcatagttattgatgtccatctcctgacccacaccgattaaaccagaaattctaggggtgggaccaggcattgatattttgttaatctgccaggtgattctaagctacagcccctatgtgargtactctgttaacatattagacataactgaagagagaagtattaacaacagcaacaacaaaactagacatagcctgagacagaaaagaggagaaaaaaaagagaatgacaagatgataaacaaacaagttaagaaacatgaaggatgtaataagaaaagtctgattcatacacataatatgcattccagaaggagagaatagagagaatt

SEQ ID NO: 11826 - DNA, 564 bp, Homo sapiens
accatcctacatgtctgatgaacaagtggctattattgcaggccatacagatgccattgatacgccagctccccataattcaatgtgacggagcacacagaaacaatcagcaggaaaataactccaaattttaatttttttycccctaaaccatattacacttgtttccttggtttcacaaagttccagcttgttccgtctggtaaatgtgttggtggcaaaagctgtgagacatggtggcagatgaaatctcttgcccttaaatagctgtcagctcaaaactataaacagtaaatactgtgaagcctgtcttaaaccgcagcccaagggagccgcagaaattggatgcctcatagaaatgatctttaagtaaaggttgaatacaatagccttggggatattttcaaatggtggctccagacagagttgtctgatgggaagcgttcgccaggctgggcttcctggagtttgcctgctctgagacacataatgaaaaagagagcttcagggttcatcaggggatggcacagaggctaggaaaatccaaagtattttataatgtcc

SEQ ID NO: 11827 - DNA, 564 bp, Homo sapiens
accatcctacatgtctgatgaacaagtggctattattgcaggccatacagatgccattgatacgccagctccccataattcaatgtgacggagcacacagaaacaatcagcaggaaaataactccaaattttaatttttttccccctaaaccatattacacttgtttccttggtttcacaaagttccagcttgttccgtctggtaaatgtgttggtggcaaaagctgtgagacatggtggcagatgaaatctcttgcccttaaatagctgtcagctcaaaactataaacagtaaatactgtgaagcctgtcttaaaccgcagcccaagggagccgcagaaattggatgcctcatagaaatgatctttaagtaaaggttgaatacaatagccttggggatattttcaaatggtggctccagacagagttgtctgatgggaagcgttcgccagsctgggcttcctggagtttgcctgctctgagacacataatgaaaaagagagcttcagggttcatcaggggatggcacagaggctaggaaaatccaaagtattttataatgtcc

SEQ ID NO: 11828 - DNA, 564 bp, Homo sapiens
accatcctacatgtctgatgaacaagtggctattattgcaggccatacagatgccattgatacgccagctccccataattcaatgtgacggagcacacagaaacaatcagcaggaaaataactccaaattttaatttttttccccctaaaccatattacacttgtttccttggtttcacaaagttccagcttgttccgtctggtaaatgtgttggtggcaaaagctgtgagacatggtggcagatgaaatctcttgcccttaaatagctgtcagctcaaaactataaacagtaaatactgtgaagcctgtcttaaaccgcagcccaagggagccgcagaaattggatgcctcatagaaatgatctttaagtaaaggttgaatacaatagccttggggatattttcaaatggtggctccagacagagttgtctgatgggaagcgttcgccaggcygggcttcctggagtttgcctgctctgagacacataatgaaaaagagagcttcagggttcatcaggggatggcacagaggctaggaaaatccaaagtattttataatgtcc

SEQ ID NO: 11829 - DNA, 588 bp, Homo sapiens
ttgccttttaaggtaacagttcattaaaaaatacattgatctactgctaggtgccaggtattctgctgggcccagggcacaccacgaacaaagcaaagccctgttttggggactttagattgggggtaggatagaggatgccctggtcaccaactgcagcgtactactaggatcctgagtgggaagagtttttaggtgttcttagtcttcttttacccaaggctgatcagtccagtaattatgactgtctccctttacatttcacatgttgatacacaaatcatctaactgctctggaaagtttgggcattttaatggactgcatggagatatattatggtgtggggctttggagtctagttggttttgagtctgttttatctagtggaggctyggttttctcatctgtgagatggcaccaggagtctctctcacagagctttctaagagactgtactgcttttgggagctgacaaagtggtgattagagcccctgagttaatctccacaatgacagattccaatgacctaggtatgtttgagagaaaactacctttgtccccattagtccttaagttgtgaaggggc

SEQ ID NO: 11830 - DNA, 551 bp, Homo sapiens
ttgtgatggtgctttttgtacttaattgttaaaatttggtgttcctgcagggtgggtgggggggtgaatggtgtagacttctattcggccatattgctctgctgctcatttgttttgtttttttgtttgtttgtttgtttgtttgttttgagacggagtctcgctctgtcgcccaggctggagtgcastggcacaatctcggctccctgcaagctccgcctcccaggttcatgccattctccttcctcagcctcccaagtagctgggactacaggtgcccgccaccaagcccggctaattgttttgtatatttagtagagatggggtttcaccgtgttagccagaatggtctcgaactccggaccttgtgatctgcccgcttcagcctcccaaaatgctgggattacgggagtgagccaccacacccagcctcatttgtatattttaatgaaactttattatcagtaaaagcccctatgtcatgcaatagatttccattttgttcttgactaaagttagaggtttccagtggtcagaatgacttttttttt

SEQ ID NO: 11831 - DNA, 543 bp, Homo sapiens
tgactgcttttgtgcctcaagagtaggtttaaattattgtgacagagatcatatgccaagaatgctaaaaaaatgtactatctggccctttattggaaatggaacaaaatatttcaatgtttgttttctatgtgcttctttggaayatattttgaaagtagagcaagaaggactcagtgaagaattggatgaggcagatgaagaaaaaagaaaaatcaagagtggttcaaatttttgacttaagccattaggtggagcacggtacgatttaatgagacagggaaaattggagggaaagtaaaatttcttgtgcgaggaagaggggatgatataaatcaatagttttgttttcagatatcatggtctatagagagtactatttattcatagtactgtatgatattctaccatatgaatagatcactatttgtttatatatattctactattgatagcaattttaacttttttggttttgtggttatgataaataatgcttccatacattacttttcatgtctttccatgaacacggtatatatg

SEQ ID NO: 11832 - DNA, 543 bp, Homo sapiens
tgactgcttttgtgcctcaagagtaggtttaaattattgtgacagagatcatatgccaagaatgctaaaaaaatgtactatctggccctttattggaaatggaacaaaatatttcaatgtttgttttctatgtgcttctttggaatatattttgaaagtagagcaagaaggactcagtgaagaattggatgaggcagatgaagaaaaaagaaaaatcaagagtggttcaaatttttgacttaagccattaggtggagcacggtacgatttaatgagacagggaaaattggagggaaagtaaaatttcttgtgcgaggaagaggggatgatataaatcaatagttttgttttcagatatcatggtctatagagagtastatttattcatagtactgtatgatattctaccatatgaatagatcactatttgtttatatatattctactattgatagcaattttaacttttttggttttgtggttatgataaataatgcttccatacattacttttcatgtctttccatgaacacggtatatatg

SEQ ID NO: 11833 - DNA, 526 bp, Homo sapiens
tcatatattacactgtagtaataaaaataaagtgcacaaaaaatataatgcacttgaattacatcctmtccacccccaaaccatggaaaagctgtcttccatgaaactggtccctggtgccagaaaggatggggaccgctgcccaggaagacacaagcatggggtaggggcaagagctgagggacttcattgccaccttgctgcgtgactcagggagtcccttcatcaatttggatgccactttttaagtctgtaagatgagggcagttagatgacttctaagtctctatcagccctgaaacactagggtgaaacgttatcatcccttaaaaacataataagcaaaacaagaataacaattttaatcaccagataattcaagaaaaaaaattcatctatagtctacataacatttcaaatatgaaataaacagatttctgggattccttttatattttcatttgtgaggggataatctgagataataatctcagagccagccacaccttcatgctgaatcaccacc

SEQ ID NO: 11834 - DNA, 526 bp, Homo sapiens
tcatatattacactgtagtaataaaaataaagtgcacaaaaaatataatgcacttgaattacatcctctccacccccaaaccatggaaaagctgtcttccatgaaacyggtccctggtgccagaaaggatggggaccgctgcccaggaagacacaagcatggggtaggggcaagagctgagggacttcattgccaccttgctgcgtgactcagggagtcccttcatcaatttggatgccactttttaagtctgtaagatgagggcagttagatgacttctaagtctctatcagccctgaaacactagggtgaaacgttatcatcccttaaaaacataataagcaaaacaagaataacaattttaatcaccagataattcaagaaaaaaaattcatctatagtctacataacatttcaaatatgaaataaacagatttctgggattccttttatattttcatttgtgaggggataatctgagataataatctcagagccagccacaccttcatgctgaatcaccacc

SEQ ID NO: 11835 - DNA, 526 bp, Homo sapiens
tcatatattacactgtagtaataaaaataaagtgcacaaaaaatataatgcacttgaattacatcctctccacccccaaaccatggaaaagctgtcttccatgaaactggtccctggtgccagaaaggatggggaccgctgcccaggaagacacaagcatggggtaggggyaagagctgagggacttcattgccaccttgctgcgtgactcagggagtcccttcatcaatttggatgccactttttaagtctgtaagatgagggcagttagatgacttctaagtctctatcagccctgaaacactagggtgaaacgttatcatcccttaaaaacataataagcaaaacaagaataacaattttaatcaccagataattcaagaaaaaaaattcatctatagtctacataacatttcaaatatgaaataaacagatttctgggattccttttatattttcatttgtgaggggataatctgagataataatctcagagccagccacaccttcatgctgaatcaccacc

SEQ ID NO: 11836 - DNA, 528 bp, Homo sapiens
ccatggtggcaacacattcaaccaccaggcacattccattacatctgtgttcaactccacgtggctcgaggccctgcttaaatcaacacagccctcttggtctccaaaggtttagaatatttcaaatggaggccttggaaagcaattctgggacatgagtttggggagtgtgtatcctcctgccctcgtattctgtgaacagcgtgtctgctgatggggcggtgatctggaaagagaggaggatgtgggggcactggtggtgccgcccagcaacaccmgtgaagggctcagcccaggacctcagctcaccctgtcagtgcctcagagatgctgtgcactctggtcacctccatggctccgcagctggctactgcaaacctctgaggcacaaaggcagccctttgtatttgaacatcattctgcaagactgagttcaacatccacaatgcactgacagaatgatgtttactcacatatcctctcctagatttatatctctttttatgatataaatctaaaaagatattt

SEQ ID NO: 11837 - DNA, 528 bp, Homo sapiens
ccatggtggcaacacattcaaccaccaggcacattccattacatctgtgttcaactccacgtggctcgaggccctgcttaaatcaacacagccctcttggtctccaaaggtttagaatatttcaaatggaggccttggaaagcaattctgggacatgagtttggggagtgtgtatcctcctgccctcgtattctgtgaacagcgtgtctgctgatggggcggtgatctggaaagagaggaggatgtgggggcactggtggtgccgcccagcaacaccagtgaagggctcagcccaggacctcagctcaccctgtcagtgcctcagagawgctgtgcactctggtcacctccatggctccgcagctggctactgcaaacctctgaggcacaaaggcagccctttgtatttgaacatcattctgcaagactgagttcaacatccacaatgcactgacagaatgatgtttactcacatatcctctcctagatttatatctctttttatgatataaatctaaaaagatattt

SEQ ID NO: 11838 - DNA, 655 bp, Homo sapiens
tggcacacaggatggttcccaggaaaagtctattgaatcaatgaaagatggttttattgacaaatcaatgtttgtggccatgtctccaatactaagtctgatctttatcttataccatactcctgacaagagcatatttcagaaccatgatgataatttttgtcaccatacacaaaatattacttcattttttttaatttcctctaaaattctcctttcaagtgcagaactcagacaaaatctgtcatttcagtgtcttgcagaaccttcattttcttttcctactctgccactacatagattcctagcctccctcttgtcactatctgaccttcaaaatgatrggactgtcgatctactattcagtcccttcaattctgcccccaaagtttcaatcctgacactgctttaggcataagtgtaagaggtccctgggcatgaaccccacaatcccacagcctcctgctctttccacaccaggctcctcctgcagagcctgagcctggtttgggctacgagcatgtgctcactccctgaccaagctgatcggtgctggcaccaagcactgtgccagacccagatgctagaccaaggggcccatgcccttcattcttccagcatctgctctgtgcttgcctgaaggagcagggcaaag

SEQ ID NO: 11839 - DNA, 1449 bp, Homo sapiens
ctctggaaaattctgtcaaagggaatttccaaacgtacacccacccgcctccacacacacacagacacacagagagagggagagagacargaaagtgagcaatgacaatcctttcctttttctgtaggctgagggacctccctgctttatatctgcattactagaggatgcattccattgagtctgcactgaatgagaccaatctactcccaggcgttccactgcctcctgatgtagagagaagcagctggcagtctctcaaaaattttaagctctttgggggtacactgagaccaaaatttaaaaattactgaaacccttggttgactgaaatgcccagtcagcagtcatttatgatcagataatgataaagtaaaattcagccatgggaaacattaaaccttccagccttaggcacctgataagagcttgcatcgtttccttttttaagaaatcatcaattagagactgtttctgatcataaaatttaatagaattttttgacttacaggcctttgaagatatatacattgagcagcgaaaaaccattaagaccatgttagaatatgctgacaaggttttcacttacatattcattctggaaatgctgctaaagtgggttgcatatggttttcaagtgtattttaccaatgcctggtgctggctagacttcctgattgttgatgtgagtatgctgcactttgctgctttattcattggcatatatgtaatagttctagcaatggtgcctgacacagtgtaggcactcagtaacactgtatcagcccaaatataaattatgtttctcatttcacagtgagaggatgcctcaaaacattttttaccaatttaaatacatatacattcatagataaaaatcaaatgccatcatactatacttattcacttaatttcaaattaatatttaaaatctcaagttatgcaaaataaaatatgaatttagaaattttgctttttgcacactcacatttcgcaaaataacttgtatttaaatttttcacaggcatctttgacattagtatgtttgtcatcactaaagcctgttgagtttaggtcacacagatgaatcattaattacaaagaaatttgaaagtccaaaaagcaagagacaccacttgatttgtatgatatagaagcaaattggctattgaccaagtagccaaagattttattaaaccacattggtgttgaaataaaataagatagagtactaaaatatgagggtttttatataattgaatatgaggcaaatctaccattaaatgtactactactattaaatgtataaaggttacatgcagaattacattaacagtctctggcaataaaggaagacaataaataatatttagaactacataagtgtggacattacaaacaatagaaaatgcaccaaaactataaccattcttttatttgtataatggg

SEQ ID NO: 11840 - DNA, 1449 bp, Homo sapiens
ctctggaaaattctgtcaaagggaatttccaaacgtacacccacccgcctccacacacacacagacacacagagagagggagagagacaagaaagtgagcaatgacaatcctttcctttttctgtaggctgagggacctccctgctttatatctgcattactagaggatgcattccattgagtctgcactgaatgagaccaatctactcccaggcgttccactgcctcctgatgtagagagaagcagctggcagtctctcaaaaattttaagctctttgggggtacactgagaccaaaatttaaaaattactgaaacccttggttgactgaaatgcccagtcagcagtcatttatgatcagataatgataaagtaaaattcagccatgggaaacattaaaccttccagccttaggcacctgataagagcttgcatcgtttccttttttaagaaatcatcaattagagactgtttctgatcataaaatttaatagaattttttgacttacaggcctttgaagatatatacattgagcagcgaaaaaccattaagaccatgttagaatatgctgacaaggttttcacttacatattcattctggaaatgctgctaaagtgggttgcatatggttttcaagtgtattttaccaatgcctggtgctggctagacttcctgattgttgatgtgagtatgctgcactttgctgctttattcattggcatatatgtaatagttctagcaatggtgcctgacacagtgtaggcactcagtaacactgtatcagcccaaatataaattatgtttctcatttcacagtgagaggatgcctcaaaacattttttaccaatttaaatacatatacattcatagataaaaatcaaatgccatcatactatacttattcacttaatttcaaattaatatttaaaatctcaagttatgcaaaataaaatatgaatttagaaattttgctttttgcacrctcacatttcgcaaaataacttgtatttaaatttttcacaggcatctttgacattagtatgtttgtcatcactaaagcctgttgagtttaggtcacacagatgaatcattaattacaaagaaatttgaaagtccaaaaagcaagagacaccacttgatttgtatgatatagaagcaaattggctattgaccaagtagccaaagattttattaaaccacattggtgttgaaataaaataagatagagtactaaaatatgagggtttttatataattgaatatgaggcaaatctaccattaaatgtactactactattaaatgtataaaggttacatgcagaattacattaacagtctctggcaataaaggaagacaataaataatatttagaactacataagtgtggacattacaaacaatagaaaatgcaccaaaactataaccattcttttatttgtataatggg

SEQ ID NO: 11841 - DNA, 557 bp, Homo sapiens
tcattattatctttctttttcaggaattatgaccacaaatttatgagcattttctacaagagattttccataaacaactaaatttaaatggaatatctttccattttcctaaggcctaacaatattaaacacacacaaagaaaaactggtaagaaatctaaggttatcatcaaaaactacgctagcttctactaacaaattaagccattcygcgtttacaataggaattgtggttttaaagacttctatataatacctgcttcttataatcatcccaattcagttccctgcccatcagttcaacaatcctgggtagggcttcctctgctgcctggacatttagaaaggccaggcgagtacgacgtgaaatcatatccacagcagtgcaggcatactccttaatcccatatttcacctgagtttgaattaaagaaaaattattagttgagactcttctttagaaaatgagaaataaagcttcacttaaaaaaaataaatgtgtgcttcacaaaggtaatatttttctttatactctctggtcctccagcaggcatgag

SEQ ID NO: 11842 - DNA, 557 bp, Homo sapiens
tcattattatctttctttttcaggaattatgaccacaaatttatgagcattttctacaagagattttccataaacaactaaatttaaatggaatatctttccattttcctaaggcctaacaatattaaacacacacaaagaaaaactggtaagaaatctaaggttatcatcaaaaactacgctagcttctactaacaaattaagccattccgcgtttacaatakgaattgtggttttaaagacttctatataatacctgcttcttataatcatcccaattcagttccctgcccatcagttcaacaatcctgggtagggcttcctctgctgcctggacatttagaaaggccaggcgagtacgacgtgaaatcatatccacagcagtgcaggcatactccttaatcccatatttcacctgagtttgaattaaagaaaaattattagttgagactcttctttagaaaatgagaaataaagcttcacttaaaaaaaataaatgtgtgcttcacaaaggtaatatttttctttatactctctggtcctccagcaggcatgag

SEQ ID NO: 11843 - DNA, 557 bp, Homo sapiens
tcattattatctttctttttcaggaattatgaccacaaatttatgagcattttctacaagagattttccataaacaactaaatttaaatggaatatctttccattttcctaaggcctaacaatattaaacacacacaaagaaaaactggtaagaaatctaaggttatcatcaaaaactacgctagcttctactaacaaattaagccattccgcgtttacaataggaattgtggttttaaagacttctatataatacctgcttcttataatcatcccaattcagttccctgcccatcagttcaacaatcctgggtagggcttcctctgctgcctggacatttagaaaggccaggcgagtacgacgtgaaatcatatccacagcagtgcaggcatactccttaatcccatatttcacctgagtttgaattaaagaaaaattattagttgagactcttctttagaaaatgrgaaataaagcttcacttaaaaaaaataaatgtgtgcttcacaaaggtaatatttttctttatactctctggtcctccagcaggcatgag

SEQ ID NO: 11844 - DNA, 1149 bp, Homo sapiens
ctaaataaataatccagtcacaagaggacaaatattgtacaattgcacttctatgaggtacttggcgtactcaaactcataggagcagaaagtagaatggtagttgccaaggggttgggagagggggaataagagttactattgaatggttacagaatttcagttgaggaagacaaaaatgttctggagatggaaggtggtgatggttgcatgacaatgtgaatgtacgtaatgccacagaactgtacacttaaaaatggttaaaatggtaaattttatgttctgcatatttaaccataatctaaaaatcaagataaaaggataaactgatataattcaagtctcaaattacgaaagggttaaggaaatattttacatagaatatggaagtatcaggacctttattagcccataccatgtccatgttttagttcaaatccataaatcccattcagggatcacagttttgtgagcagagggcagggctggatttcagtttccactcaacccttggtcatgtgcctttgtacagtaaacatcctgtatatttatatacaacaccacttgaaaagtagttaggtatatatctagcagactctttgtgtaaaaagtcacaaagactccttgaaatgattggaacagttcttactgaagcaaaacaaaataaaacaaaaccatgccttaccaagtataagcaaaacaagctatgttggatgacagataatttctccatcttgatctaaaatgaataataggtttctgctaaaaataaattcaactcaagttaatctggcatattttactatagattcttaaaggctacactcttgacataactataatctgaaagagtagatacccatcacctctacargatgtttaatcaaacccataatccaaacactgtaactgaaataccaacataattaactggcgaggaaagcctaagccttctcagtcttactaactggagacaatacaggatctcaatgctgggattccatctctagctctgccccctctgatgtgtgcattctcttaaatagatttaatctggatggcttctgtggaatggggattaattcctgctttacacaattttaccagtcatataaaacctcaaaacaagttgtaaaaagtgttttaatc

SEQ ID NO: 11845 - DNA, 1289 bp, Homo sapiens
aagcacgtgggagaaatgtagacctgatggctatttgaaatacacatatgcccttgcacactggattcaagcccgatatttacataatggccattttatttaggtagaagttgcaagatttcagctccatctgctcaggtctctgctgaggcagtgatggaatcaggccgtgtgccccggagagtgcagagggaaaatttccaggaaggctgatgcctgggaatgttgattccctagttctctcgtcagaaactggccttccaaatctctaggaggttcttttccttttctgccacatgacgtgattcatgatcatatgccaagagtgacctaccagttcaggaatggcatatctctgcagggagctttgatttttggcagaataactgccttcaggggacatcccctcatggacggcattgtcagaaaaggacggtgttaggtggtagtaaatgactaacctcactgcggcgacatctcatgaacatgaccacatcttgaatgatattcaggcctcaaagcaatgacagccatgcagcagtgccacatttcttactaaacgaaaccatatcctactaaaacttcctactaccagggctccttgcagaaatagctgattctaggtgtgggtaggaaatgtataagatgcatctggaatagcttgttatcccctgaagcaaggaggctgtcaaagactacctggagtcacttcaaaaggacacagaggccaacatgaaggtgctcccagtagcctgaaatgctgcaataagagcatgaaaggacaatgactaaaatgaattgaaacaagtcaaatatataaaaacaaatgggctcttaatgaccttatttttttaaaaaaagaaatgcacatgtaaaaataaactggttataagcaagtcttttccatggatttagattgttgctaatcaaattctaaaccccggaaacacatgaccatcctgtctctctctaaccctgtcattatagagcagaactcagtaagttcagagatgtgtcaatggcaatggtagtagcagggttctttagggatatttttcaagagttgttactcactggaaggaagattataggacttggtgggtagtaagcagtgcaggggcttctggcccccctcactctgcctccagggcacccagtgcatggctgacacagctttatccctctctattgcagttttgttcagaatttgtttccctagtggactgtgagcttccctgggggcaggggctctkctttattttctttagtattcttattgtccaccacag

SEQ ID NO: 11846 - DNA, 2063 bp, Homo sapiens
ggaagaataaatgttcaagaatagtcaagaaaatgtgaaaaaaaggaccttagaaaacattaaaatgaagtgaagtctctgtaataaaaacagcataatattatcatagaagtaagcaaaaagataagtggaactgtatagaatacagttcccaaaaatagattctgcagcctttgagaatttaatagataataaatatatattaatttatcacagaacagtggtttatttaataaataatataggcaaaatcagctatgtattgggaaagaataattttggttcctgcctctcattttacacacaaataaatttcaggtggatcaaaatcttaaaggtaaagaataaaaggatggaactttagaagaaaatgtaggagaccataagtacaagttggagattgatgaagcaggaaacctataagctattataaaaattagtcagatttgatttttataaatattaagacattttaaaaggtgaaatataagacatacaaaagtaaagtacaaataatggattggggaaagtgtgtaatggatctaatagctgaaggatatattaagtacaaagaactatattaattataactgaaaaaagatgattaatagaaaaatgggcagagatataagcaggcaagcacagaacagcaaatccaaatgtcctggcagaacaacaacaacaacaagtctttcagcttcctagtagtcagggagaaaatacattaactaacaatgaattgccactgtgcaccaacgatatcagcaaaaattacaaaggactttcacctattgctggtaagactgtcaggaaaatgggatcctcattcactgttgatgagtatgtgaattgttcaatttttttgaaggcaatctgcaaaatctgttttttttttttaaaaaggaaactaacacctggaaatctaatccctagatacaaaattaccaatacaaaaagaagtatgcactcagatgtttatttcagcgtaattgtggtacccccaaatcctggaaacaaggtaaatacacattagcagggaaatggttaaagaaattgaggtatattggaccaaggaatatcatgcaggtactagaccatcactagagctacactaattgacttggaggaattttatgaaactgttaaactagaaatgcaagatgcagaggagtacgtatatataagataatctcatttttgtgaaatttatgaccacaaaaagccccttgattttacatatatgtgtgtatgtatgttgtatagctgtatgttttaattttataaaaatatgtgtttgttcataaatatacacaaaaaatattatgaaagaattgtcaccataaagtcaatagtggttactgcaggacatgagttttctgtgtctctagtatctttttagtctggagacaggccatggagcagagtgagctctggagtcagataggctggaattgaagtctaactcagctgccttttaactatgaaatttacttaatctcttcatgtctcagtttccccactagtaaaacaaatttataagacctaactcataggtttgttatgagtatttcattaaatgagtcaatatttaaaggacctagatgagggcctggcacacagtaagtactgtataagtctttgttaattaaatgttcacacattgcttaattttgctgtaaccggaaggtattatttatataatcagaaaaaacaaaaaatgccaggcrtggtggctcatgcctgtaatcccagcactttgggaggcccaggagggtggatcacctgaggtcaggagttcgagaccagcctggtcaaaatagcgaaaccccgtctctactaaaaatacaaaaattagccggctgtggtggtgggtgcctataatcccagctacttgggaggctcaggcaagaatcacttgaaccccgggtgggtggaggttgcagtgagctgagatcacgccacttcactccagcctggggaaaagagtgaaactccgtctcaaaaacaaaaacaaaaaacaaacaaaccaaaaaaaacacaaacacacacacaaaaaaaaaacc

SEQ ID NO: 11847 - DNA, 2063 bp, Homo sapiens
ggaagaataaatgttcaagaatagtcaagaaaatgtgaaaaaaaggaccttagaaaacattaaaatgaagtgaagtctctgtaataaaaacagcataatattatcatagaagtaagcaaaaagataagtggaactgtatagaatacagttcccaaaaatagattctgcagcctttgagaatttaatagataataaatatatattaatttatcacagaacagtggtttatttaataaataatataggcaaaatcagctatgtattgggaaagaataattttggttcctgcctctcattttacacacaaataaatttcaggtggatcaaaatcttaaaggtaaagaataaaaggatggaactttagaagaaaatgtaggagaccataagtacaagttggagattgatgaagcaggaaacctataagctattataaaaattagtcagatttgatttttataaatattaagacattttaaaaggtgaaatataagacatacaaaagtaaagtacaaataatggattggggaaagtgtgtaatggatctaatagctgaaggatatattaagtacaaagaactatattaattataactgaaaaaagatgattaatagaaaaatgggcagagatataagcaggcaagcacagaacagcaaatccaaatgtcctggcagaacaacaacaacaacaagtctttcagcttcctagtagtcagggagaaaatacattaactaacaatgaattgccactgtgcaccaacgatatcagcaaaaattacaaaggactttcacctattgctggtaagactgtcaggaaaatgggatcctcattcactgttgatgagtatgtgaattgttcaatttttttgaaggcaatctgcaaaatctgttttttttttttaaaaaggaaactaacacctggaaatctaatccctagatacaaaattaccaatacaaaaagaagtatgcactcagatgtttatttcagcgtaattgtggtacccccaaatcctggaaacaaggtaaatacacattagcagggaaatggttaaagaaattgaggtatattggaccaaggaatatcatgcaggtactagaccatcactagagctacactaattgacttggaggaattttatgaaactgttaaactagaaatgcaagatgcagaggagtacgtatatataagataatctcatttttgtgaaatttatgaccacaaaaagccccttgattttacatatatgtgtgtatgtatgttgtatagctgtatgttttaattttataaaaatatgtgtttgttcataaatatacacaaaaaatattatgaaagaattgtcaccataaagtcaatagtggttactgcaggacatgagttttctgtgtctctagtatctttttagtctggagacaggccatggagcagagtgagctctggagtcagataggctggaattgaagtctaactcagctgccttttaactatgaaatttacttaatctcttcatgtctcagtttccccactagtaaaacaaatttataagacctaactcataggtttgttatgagtatttcattaaatgagtcaatatttaaaggacctagatgagggcctggcacacagtaagtactgtataagtctttgttaattaaatgttcacacattgcttaattttgctgtaaccggaaggtattatttatataatcagaaaaaacaaaaaatgccaggcatggtggctcatgcctgtaatcccagcactttgggaggcccaggagggtggatcacctgaggtcaggagttcgagaccagcctggtcaaaatagcgaaaccccgtctctactaaaaatacaaaaattagccggctgtggtggtgggtgcctataatcccagctacttgggaggctcaggcaagaatcacttgaaccccgggtgggtggaggttgcagtgagctgagatcacgccacttcactccagcctggggaaaagagtgaaactccgtctcaaaaacaaaaacaaaaaacaaacaaaccaaaaaaaacacaaacacacamacaaaaaaaaaacc

SEQ ID NO: 11848 - DNA, 2063 bp, Homo sapiens
ggaagaataaatgttcaagaatagtcaagaaaatgtgaaaaaaaggaccttagaaaacattaaaatgaagtgaagtctctgtaataaaaacagcataatattatcatagaagtaagcaaaaagataagtggaactgtatagaatacagttcccaaaaatagattctgcagcctttgagaatttaatagataataaatatatattaatttatcacagaacagtggtttatttaataaataatataggcaaaatcagctatgtattgggaaagaataattttggttcctgcctctcattttacacacaaataaatttcaggtggatcaaaatcttaaaggtaaagaataaaaggatggaactttagaagaaaatgtaggagaccataagtacaagttggagattgatgaagcaggaaacctataagctattataaaaattagtcagatttgatttttataaatattaagacattttaaaaggtgaaatataagacatacaaaagtaaagtacaaataatggattggggaaagtgtgtaatggatctaatagctgaaggatatattaagtacaaagaactatattaattataactgaaaaaagatgattaatagaaaaatgggcagagatataagcaggcaagcacagaacagcaaatccaaatgtcctggcagaacaacaacaacaacaagtctttcagcttcctagtagtcagggagaaaatacattaactaacaatgaattgccactgtgcaccaacgatatcagcaaaaattacaaaggactttcacctattgctggtaagactgtcaggaaaatgggatcctcattcactgttgatgagtatgtgaattgttcaatttttttgaaggcaatctgcaaaatctgttttttttttttaaaaaggaaactaacacctggaaatctaatccctagatacaaaattaccaatacaaaaagaagtatgcactcagatgtttatttcagcgtaattgtggtacccccaaatcctggaaacaaggtaaatacacattagcagggaaatggttaaagaaattgaggtatattggaccaaggaatatcatgcaggtactagaccatcactagagctacactaattgacttggaggaattttatgaaactgttaaactagaaatgcaagatgcagaggagtacgtatatataagataatctcatttttgtgaaatttatgaccacaaaaagccccttgattttacatatatgtgtgtatgtatgttgtatagctgtatgttttaattttataaaaatatgtgtttgttcataaatatacacaaaaaatattatgaaagaattgtcaccataaagtcaatagtggttactgcaggacatgagttttctgtgtctctagtatctttttagtctggagacaggccatggagcagagtgagctctggagtcagataggctggaattgaagtctaactcagctgccttttaactatgaaatttacttaatctcttcatgtctcagtttccccactagtaaaacaaatttataagacctaactcataggtttgttatgagtatttcattaaatgagtcaatatttaaaggacctagatgagggcctggcacacagtaagtactgtataagtctttgttaattaaatgttcacacattgcttaattttgctgtaaccggaaggtattatttatataatcagaaaaaacaaaaaatgccaggcatggtggctcatgcctgtaatcccagcactttgggaggcccaggagggtggatcacctgaggtcaggagttcgagaccagcctggtcaaaatagcgaaaccccgtctctactaaaaatacaaaaattagccggctgtggtggtgggtgcctataatcccagctacttgggaggctcaggcaagaatcacttgaaccccgggtgggtggaggttgcagtgagctgagatcacgccacttcactccagcctggggaaaagagtgaaactccgtctcaaaaacaaaaacaaaaaacaaacaaaccaaaaaaaacacaaacacacacamaaaaaaaaaacc

SEQ ID NO: 11849 - DNA, 689 bp, Homo sapiens
tcccaatgtcctctgcctgcagggtcacctcaaggtggcaggcttattctattttcccctgggtttgatccagaacaggaggtgggggtttgtaatccttcagataagcttccaaagttgcctgtcrtgctaaaccagtcttaggggaaaaatgtacatatatttactattgtcggcacccacgtgccttggaaaaagcatgtggactttggaaacactcagaccctggtccctaccctgtgtcaccatttactagctagacaaagttggtcaatttaatttatctcagccttttctcatcagtaaattaaggataatgacagcaattccataacctgttgcaaagattcacttattaggcaaccatgtaagggtggagaagggtaaggaggaactcccatttgttgtatacctattcacaagtattgccacaggaatttttctttaatacctattctcatgcacggtgtgtaaacaaaatggctagcatgcaggaggcacccaaatgttaactctcattctctttcatgttctaggatgtttcatgagtaaccggtgtttattaaagttgctgaaatcctacctttgattactctcaatttaattatttgctatgtctataattgatggtttactaactgtatggtcaaattgtccttaatagtttcttccggggttggatagagaga

SEQ ID NO: 11850 - DNA, 689 bp, Homo sapiens
tcccaatgtcctctgcctgcagggtcacctcaaggtggcaggcttattctattttcccctgggtttgatccagaacaggaggtgggggtttgtaatccttcagataagcttccaaagttgcctgtcgtgctaaaccagtcttaggggaaaaatrtacatatatttactattgtcggcacccacgtgccttggaaaaagcatgtggactttggaaacactcagaccctggtccctaccctgtgtcaccatttactagctagacaaagttggtcaatttaatttatctcagccttttctcatcagtaaattaaggataatgacagcaattccataacctgttgcaaagattcacttattaggcaaccatgtaagggtggagaagggtaaggaggaactcccatttgttgtatacctattcacaagtattgccacaggaatttttctttaatacctattctcatgcacggtgtgtaaacaaaatggctagcatgcaggaggcacccaaatgttaactctcattctctttcatgttctaggatgtttcatgagtaaccggtgtttattaaagttgctgaaatcctacctttgattactctcaatttaattatttgctatgtctataattgatggtttactaactgtatggtcaaattgtccttaatagtttcttccggggttggatagagaga

SEQ ID NO: 11851 - DNA, 838 bp, Homo sapiens
aaagaaatttgatcaatcacaaaccccattttccctttgataggctttcatgataggttttgccaaaacttgcagtggctggctgtggtcttggaaatttagatttggggaagcatttattgtcactatgtctgagccaggtcactaggctgtgtgtggtaaccaacattattctcataagatattcactactccttgctcagatagcttaacagcaacctcagctatcaagagtacagcctagaggaagtcaaaggagrtgcgctgtggctgcccagagctcatgccctttactcttcaaaaaattatttcagaaactatttgcttcatagaggcacagttgagtgtatgtatagattgttttctgagaaataatttgaatattatcaaattcacctatttaaagtgcacaattcagtggcttttagtatattcacacttttgtacaaacatcaccactatctaatttcaaaactttttcatcaacccaagataaaccccatatccatcagcagtcattatccattctttctccttccaccccaagttgctggcaacaactaatctatattctttctatggattttcattttctgaacattccagacaaatgggatcatataatatgtggtcttttttcacttagcataatgttttcaaggttcattcatggtgtagcatatatcagcatttcgttgctttttgtggctgcaaaatatgccattgtgtggactgtagaatgggacatggcacttaccgtttcagcagttgcttccactttttaggtattatgaataatgttggtatgaacatgcacacacaggtttttgcatgaatc

SEQ ID NO: 11852 - DNA, 838 bp, Homo sapiens
aaagaaatttgatcaatcacaaaccccattttccctttgataggctttcatgataggttttgccaaaacttgcagtggctggctgtggtcttggaaatttagatttggggaagcatttattgtcactatgtctgagccaggtcactaggctgtgtgtggtaaccaacattattctcataagatattcactactccttgctcagatagcttaacagcaacctcagctatcaagagtacagcctagaggaagtcaaaggaggtgcgctgtggctgcccagagctcatgccctttactcttcaaaaaattatttcagaaactatttgcttcatagaggcacagttgagtgtatgtatagattgttttctgagaaataatttgaatattatcaaattcacctatttaaagtgcacaattcagtggcttttagtatattcacacttttgtacaaacatcaccactatctaatttcaaaactttttcatcaacccaagataaaccccatatccatcagcagtcattatccattctttctccttccaccccaagttgctggcaacaactaatctatattctttctatggattttcattttctgaacattccagacaaatgggatcatataatatgtggtcttttttcacttagcataatgttttcaaggttcattcatggtgtagcatatatcagcatttcgttgctttttgtggctgcawaatatgccattgtgtggactgtagaatgggacatggcacttaccgtttcagcagttgcttccactttttaggtattatgaataatgttggtatgaacatgcacacacaggtttttgcatgaatc

SEQ ID NO: 11853 - DNA, 529 bp, Homo sapiens
gaggacgtggccattcttgcttctgtttccctttacctcgcattctcagccatttcattaggatgtgcctttgctagttgtctcaggctggcttccctggaagcagatgaaggagtggagtctggggcaccaggtgtttcacacttgtracaggaggaggcagaagcaggcttggcagtggagttcaacctcggtcaggcctgcccacctctgcccacctgttggggactccagagcaaggccttccatcagcatgttctgtgctgagctgaaatggccagatcttcacattccctgcctgctcagtcacctgggctgtctgggaaggtgtggcctttagccagtggctctctctgcaggtgagggatggggaggagctggtggctgagggcgttctgcagcctgcgctccccacagcctctgggcaagtccttccaggaggggatgctgagggacaaagcttcctgcttctcaggcgggggtccttgagctccctggaactctgcatctatgattttcatcaaattta

SEQ ID NO: 11854 - DNA, 529 bp, Homo sapiens
gaggacgtggccattcttgcttctgtttccctttacctcgcattctcagccatttcattaggatgtgcctttgctagttgtctcaggctggcttccctggaagcagatgaaggagtggagtctggggcaccaggtgtttcacacttgtgacaggaggaggcrgaagcaggcttggcagtggagttcaacctcggtcaggcctgcccacctctgcccacctgttggggactccagagcaaggccttccatcagcatgttctgtgctgagctgaaatggccagatcttcacattccctgcctgctcagtcacctgggctgtctgggaaggtgtggcctttagccagtggctctctctgcaggtgagggatggggaggagctggtggctgagggcgttctgcagcctgcgctccccacagcctctgggcaagtccttccaggaggggatgctgagggacaaagcttcctgcttctcaggcgggggtccttgagctccctggaactctgcatctatgattttcatcaaattta

SEQ ID NO: 11855 - DNA, 529 bp, Homo sapiens
gaggacgtggccattcttgcttctgtttccctttacctcgcattctcagccatttcattaggatgtgcctttgctagttgtctcaggctggcttccctggaagcagatgaaggagtggagtctggggcaccaggtgtttcacacttgtgacaggaggaggcagaagcaggcttggcagtggagttcaacctcggtcaggcctgcccacctctgcccacctgttggggactccagagcaaggccttccatcagcatgttctgtgctgagctgaaatggccagatcttcacattccctgcctgctcagtcacctgggctgtctgggaaggtgtggcctttagccagtggctctctctgcaggtgagggatggggaggagctggtggctgagggcgttctgcagcctgcrctccccacagcctctgggcaagtccttccaggaggggatgctgagggacaaagcttcctgcttctcaggcgggggtccttgagctccctggaactctgcatctatgattttcatcaaattta

SEQ ID NO: 11856 - DNA, 548 bp, Homo sapiens
ctggactaagagtgaggcggggaagagcagcatccaagcgagcaccctttccctttctatgccttgcactaaagagcggctttcagaatgtaaactgaccaagtcaccaccccctccttttccttggactcttcaatagcttcccattgcttttatgatacaaatacaagtctttcacggggcctacaaacccctgcttggtctgacttctgtctgcctctcctacttctacttctttcagctcctacactccttttatcaccttctttcagctccttgtactgcggggccctccccaccactgagcctttgcataagctgttccctctgcctagaacacccttccctcccctcrttgcctaattaatttctgcttagccttcaggctttactcaagtgttgcttcttcacaaagccttgtttcaacctccctgatgaggctaaatttccctattagagaacctgttgatcctcaaagcagttgtcacagttgcactttcatgtttgtatatgattctgagatgtgcttctctctctccctctagact

SEQ ID NO: 11857 - DNA, 548 bp, Homo sapiens
ctggactaagagtgaggcggggaagagcagcatccaagcgagcaccctttccctttctatgccttgcactaaagagcggctttcagaatgtaaactgaccaagtcaccaccccctccttttccttggactcttcaatagcttcccattgcttttatgatacaaatacaagtctttcacggggcctacaaacccctgcttggtctgacttctgtctgcctctcctacttctacttctttcagctcctacactccttttatcaccttctttcagctccttgtactgcggggccctccccaccactgagcctttgcataagctgttccctctgcctagaacacccttccctcccctcattgcctaattaatttctrcttagccttcaggctttactcaagtgttgcttcttcacaaagccttgtttcaacctccctgatgaggctaaatttccctattagagaacctgttgatcctcaaagcagttgtcacagttgcactttcatgtttgtatatgattctgagatgtgcttctctctctccctctagact

SEQ ID NO: 11858 - DNA, 557 bp, Homo sapiens
cctgcacctggaacctggactcaaaagagatttctaaaggaagtgattttcaaatccaggaccctttagtagagaagaatctgccaggcttcagagagataatgaggacatcattttctgattttaaatgctacaacagatgtttttttaaaaaaaaaaaagattaattaaactactacagtgttttgtagcttgaagatcttgcggtgtgatttcagatagtgtctcaggctggaaatgtcctagattgaggctgcattctgaattcccatttcttgcagattcaatccacccaccttgagtttctccagcttcacccacaactggctgctgctaaccccaccatgaatcagacttctccctgtgtttaatttgcagaaatttcattttctaaatgccttagtgatgaccctggtgaacactcgcattmtgttttaagatagaacagggcaggaaattggaggcttatgactttggagccagacagacatggagtcaactccctaccctgccatttatagctaaataacctaaagcctcctaacctctttaagccc

SEQ ID NO: 11859 - DNA, 557 bp, Homo sapiens
cctgcacctggaacctggactcaaaagagatttctaaaggaagtgattttcaaatccaggaccctttagtagagaagaatctgccaggcttcagagagataatgaggacatcattttctgattttaaatgctacaacagatgtttttttaaaaaaaaaaaagattaattaaactactacagtgttttgtagcttgaagatcttgcggtgtgatttcagatagtgtctcaggctggaaatgtcctagattgaggctgcattctgaattcccatttcttgcagattcaatccacccaccttgagtttctccagcttcacccacaactggctgctgctaaccccaccatgaatcagacttctccctgtgtttaatttgcagaaatttcattttctaaatgccttagtgatgaccctggtgaacactcgcattctgttttaagatagaacrgggcaggaaattggaggcttatgactttggagccagacagacatggagtcaactccctaccctgccatttatagctaaataacctaaagcctcctaacctctttaagccc

SEQ ID NO: 11860 - DNA, 538 bp, Homo sapiens
cccgacaagagtgcctggggctcgtccctcgaggctgcctcgggcgccagcgaaggccttggcgaaggctgaccccaacgagacacgggcgggacagagaacagtcattctggcctgagccggggaactgtgtgtggagaccattgcaaaagatgcctactgctgtgctcaacagggaaacaggaaaaccctccagaggagagatttggataatgcratagaagctgtggatgaatctgcttttttggaaggtacttcgggtcgattgctcagcagtgcaggttcccggccttcatctgcatccttcagctcgcccctctccgcaggcttcagcgttgagaagaacagtcttggcacttgcatacatactcttcctgttctaccctcgctcacaccggtataagcctccatctcaaccgttggcttttccctacaagatcttccacaacgtgtgtccgtcttccagtcaggcctggatgcagccgctgctgcttggagcagagatgaagaaagtgttctgcttaagtggcttactgca

SEQ ID NO: 11861 - DNA, 538 bp, Homo sapiens
cccgacaagagtgcctggggctcgtccctcgaggctgcctcgggcgccagcgaaggccttggcgaaggctgaccccaacgagacacgggcgggacagagaacagtcattctggcctgagccggggaactgtgtgtggagaccattgcaaaagatgcctactgctgtgctcaacagggaaacaggaaaaccctccagaggagagatttggataatgcgatagaagctgtggatgaatctgcttttttggaaggtacttcggrtcgattgctcagcagtgcaggttcccggccttcatctgcatccttcagctcgcccctctccgcaggcttcagcgttgagaagaacagtcttggcacttgcatacatactcttcctgttctaccctcgctcacaccggtataagcctccatctcaaccgttggcttttccctacaagatcttccacaacgtgtgtccgtcttccagtcaggcctggatgcagccgctgctgcttggagcagagatgaagaaagtgttctgcttaagtggcttactgca

SEQ ID NO: 11862 - DNA, 538 bp, Homo sapiens
cccgacaagagtgcctggggctcgtccctcgaggctgcctcgggcgccagcgaaggccttggcgaaggctgaccccaacgagacacgggcgggacagagaacagtcattctggcctgagccggggaactgtgtgtggagaccattgcaaaagatgcctactgctgtgctcaacagggaaacaggaaaaccctccagaggagagatttggataatgcgatagaagctgtggatgaatctgcttttttggaaggtacttcgggtcgattgctcagcagtgcaggttcccggccttcatctgcatccttcagctcgcccctctccgcaggcttcagcgttgagaagaacagtcttggcacttgcatacatactcttcctgttctaccctcgctcacaccggtataagcctccatctcaaccgttggcttttccctacaagatcttccacaasgtgtgtccgtcttccagtcaggcctggatgcagccgctgctgcttggagcagagatgaagaaagtgttctgcttaagtggcttactgca

SEQ ID NO: 11863 - DNA, 590 bp, Homo sapiens
cttattgatgatgttcagcattttgtgggacttttggctgcatattaccgtggactaataccttcagagaacaatatagcaactttacatttctttccggggtggaattaaatggcccacatctatattaattaattaaaacccaatttcaatatgccttaaaacatttctttaaaaatattcaataactcacaagattaaaataagaaaatttataaaatgtcagatcaaataaggctttggagatcattaaattcaaatagccggatttacagatgagaaagatgaggcttatatgacttgacaaaggaccacctagttttcattaattcacactgacagcaaatcaaaaagttacactgaagtcctatctaaaaaccagtcactgtgcttgggaccaggattacatatgtacctttgttgacaatgaattcaattaatctaaataagtgttattgcttgcactaaaagatacacactgagaagaatcagataaaattccttaataactgctaagcatcctcttwcttacaaggaaagctcttttcctttagggagattctatagattaagagtactagctcggggag

SEQ ID NO: 11864 - DNA, 603 bp, Homo sapiens
ccattgtacccaatggagaatttaaagctcaatgtagtttggtggctccaagatcaagccatccatgtttatcaccttatcatagaaaccaaatatcytgaagacttgccctggaatgacttctagaaagaagagattattgtacccagactggaaagctaaacaaaagcgatgtttttcaaaacacatgaattcacaagacccaaggcttatttatggtaaaccgccagcaaatataaaatccataattccagagtgcactcaaatgaggatgagaaatgcaagactcataaaatcttgatatcaggaatggagagccatgaatggtgttttagagaaattagttcaattcttaagtccttagacttcagaaaacattgccacttggagggatctgattagatttcctaattgctttatcacctatcctatcctccctggctggtttgctgagcactatattagagggtcagggaggttcccagcatccttgtcatctgtcttctactctgagtttccaaacacaaaactctccattcaaccattatcaccctgtagttcagctggaggtaaagaattacgcgattgataacagtcttgtat

SEQ ID NO: 11865 - DNA, 603 bp, Homo sapiens
ccattgtacccaatggagaatttaaagctcaatgtagtttggtggctccaagatcaagccatccatgtttatcaccttatcatagaaaccaaatatcctgaagacttgccctggaatgacttctagaaagaagagattattgtacccagactggaaagctaaacaaaagcgatgtttttcaaaacacatgaattcacaagacccaaggcttatttatggtaaaccgccagcaaatataaaatccataattccagagtgcactcaaatgaggatgagaaatgcaagactcataaaatcttgatatcaggaatggagagccatgaatggtgttttagagaaattagttcaattcttaagtccttagacttcagaaaacattgccacttggagggatctgattagatttcctaattgctttatcacctatcctatcctccctggctggtttgctgagcactatattagagggtcagggaggttcccagcatccttgtcatctgtcttctactmtgagtttccaaacacaaaactctccattcaaccattatcaccctgtagttcagctggaggtaaagaattacgcgattgataacagtcttgtat

SEQ ID NO: 11866 - DNA, 574 bp, Homo sapiens
gggccagttactttgccaagcatagccaataatcttggaagtgcacattatcagttagttttgattacagctgaagatgttgggagaataaatgggactggarcaacatattcatcactactccaagggatcctattataaatatatctcctgaaacccaagtgactgttgcaaagaggggaaactctcttattcaatataagcagcaccagtagttagctggtaaatggacacattggttgccagtataggttcccaaaagtcattaatacatatacccttaagcatttattttaaactgagtatatataaatatactttagataacctatcttttgattaatagtcaggactttttctttgataattggttttctcttggacatttttttgttgtatttttagtataaatgacatccattatgtgtttctcccatctctagtttcatgttcttggaaaataagtgagaatataaacatacttgcaaagttatctgtgaaaaatccttctaggtttttatgcttttttttaatacctaattcaacaaggctttttcaactttccaccatgagt

SEQ ID NO: 11867 - DNA, 575 bp, Homo sapiens
ggatttttagtagagatggggtttcaccatgttggccgggctggtctcgaactcctgacctcaggtgatccacacgcctttgcctcccaaagtgctaagattacaggcgtgagccactgtgcccagcccacacrctttttaataatgcaattactcagcagaaataagacaattctttttaactgaatcaagaaataaaaggcagagttttcttctttaagcattttttttaaacttaaatattttaggaaagtctttttataattgatactcaaagtgatgaatgtataaaagaagttattttaatatttaagacaggcctcagcaaggcacatgaggctcttcatgatttggcccttgtctgcctcattccttatcatcactccatatgcagtaagaccacttgcttgcagtccatgttttcacaggccttgtgccccttgtatattgttttcctctgcccagaatgtcccttcctcttgcactgcctgactaggttccactttttcctcaggcaattgcttctttggaaagccttccctaacacttcttattatcaccagagtactatctac

SEQ ID NO: 11868 - DNA, 660 bp, Homo sapiens
aatacctaaagatgtgaacactgactgtgtatattgtgttttcattgcttaaattttcttaaaaattaattttgtaacaaaattgaatagaaatgaacatgattactgatatggttttatataaaaagaggggtggatgacttcttggacagtattgagtttcttgggcaatgctttaaagcactgcatttcagaactttcctgtcccaagtttacagaacaatatgcaaaaaccacaaataataaacaatggcacctccactctggacatatcgtgaagtctataaaccacaactttgaaagctattaaggtgactcacacgcaagaggagcccagggaggctcttccacagacagaccactagatgtcactgccctatcactgtcctttgctcaaatgtggaagcacgagaggttagatgttatgcatgtcctcccttcttttttttyctttttttttttgccaacatggcaaaaccccgtctctactaacagtacaaaaattagccgggtgtggtggcaggcgcctgaaatcccagctacttgggaagctcaggcaggagaatcacttgaacccgggaggcagaggttgcagtgagctgagattgcaccactgcattccagcctgggcaacagagtgagactctgcctcagaaaaaa

SEQ ID NO: 11869 - DNA, 660 bp, Homo sapiens
aatacctaaagatgtgaacactgactgtgtatattgtgttttcattgcttaaattttcttaaaaattaattttgtaacaaaattgaatagaaatgaacatgattactgatatggttttatataaaaagaggggtggatgacttcttggacagtattgagtttcttgggcaatgctttaaagcactgcatttcagaactttcctgtcccaagtttacagaacaatatgcaaaaaccacaaataataaacaatggcacctccactctggacatatcgtgaagtctataaaccacaactttgaaagctattaaggtgactcacacgcaagaggagcccagggaggctcttccacagacagaccactagatgtcactgccctatcactgtcctttgctcaaatgtggaagcacgagaggttagatgttatgcatgtcctcccttctttttttttytttttttttttgccaacatggcaaaaccccgtctctactaacagtacaaaaattagccgggtgtggtggcaggcgcctgaaatcccagctacttgggaagctcaggcaggagaatcacttgaacccgggaggcagaggttgcagtgagctgagattgcaccactgcattccagcctgggcaacagagtgagactctgcctcagaaaaaa

SEQ ID NO: 11870 - DNA, 660 bp, Homo sapiens
aatacctaaagatgtgaacactgactgtgtatattgtgttttcattgcttaaattttcttaaaaattaattttgtaacaaaattgaatagaaatgaacatgattactgatatggttttatataaaaagaggggtggatgacttcttggacagtattgagtttcttgggcaatgctttaaagcactgcatttcagaactttcctgtcccaagtttacagaacaatatgcaaaaaccacaaataataaacaatggcacctccactctggacatatcgtgaagtctataaaccacaactttgaaagctattaaggtgactcacacgcaagaggagcccagggaggctcttccacagacagaccactagatgtcactgccctatcactgtcctttgctcaaatgtggaagcacgagaggttagatgttatgcatgtcctcccttctttttttttctttttttttttgccaacatggcaaaacccygtctctactaacagtacaaaaattagccgggtgtggtggcaggcgcctgaaatcccagctacttgggaagctcaggcaggagaatcacttgaacccgggaggcagaggttgcagtgagctgagattgcaccactgcattccagcctgggcaacagagtgagactctgcctcagaaaaaa

SEQ ID NO: 11871 - DNA, 563 bp, Homo sapiens
atgcaacttgttttgtatgcacatggattatagaaacagaaatgtatcaaagatggtatcttacttggtgagtggttggttagaaagcaactgcttaagatgctgggacaagagcttcttttctagagacagtcttatccacgcccgagctcgtccaacatcagtcttgatctcactcatgttttgaatatgcctaaagaatagtggcaacagcaaagatgtagattttaaggataaccctgactagaaaagaagtaaagagtgaacagtactgggcacagaaaggtttatacttaaagggagcaatggataatatacaattgatgttgattaaatctttgaaggttccatctgaatcatgaagttagtctcacatcataattgccattacaacacaagcacacggacaatgtggtaagataaagcatttaacacttattcactctttcaggctttattatgtccttgtggcagactcatagatatctgtaaataagaatttggttattcctgatgctccaaaaaaaktaatgaaacagggtgaatactcaagtttcttttca

SEQ ID NO: 11872 - DNA, 530 bp, Homo sapiens
tagagccaatatttaaactcgctgtttgactccagagcctgtgccattcaccaccgctctggagttgggtccagagcacgggacgttttttgcatgcctgcagtcgtttagaagctatgaatggtgtgtgtgtgtgtgtgtttgtgtgttttagaaaatgtatgttttttagaaaatgtgaaaactaagtttatttaatctgtattttgaaaagtatcaaaaatgagaaactttttttttttaagaaacgaaaaaggctgggcacaatggctcacacctgtaatcccagcactttgggaggtcraggcagatggatcacctgaggtcaggagttcgagaccagccaggccaatatggtgaagccctgtctctactaaaactgcaaaattagccaggtgtggtggcaggtgcctgtagtcccagctactaggaggctgaggcaggagaatcgcttgaacccgggaggcagaggttgcagtgagccgagatcgtgccattgcactccagcttgggcgacagagcagagctcc

SEQ ID NO: 11873 - DNA, 556 bp, Homo sapiens
ggggcctaattcctgcttcttgtccagaggagagattttagtgggaaactgtgagttctctgcctgagcagactcctcctctagtctaggcatatttctttttttcttttttgggggacagagtctcgctctgtcacccaggctggagtgcagtggcgcgatcttggctcactgcagcctctgcctcccaggctcaagctattctcatgcctcagccttcccagcagctggggctacaggtacacaccaccatgccaattaactgaagactaacttcatccccctatcccctacaagttaatcatcagttaattgtygtatttttttgtagagttgtagagatgggatttcaccattttgtagagacggggtttcgttggccacgctggtctcaaactcctggactgaagtgatccgcccgcctcggcctccccaggcgttgggattacaggtgtgagccaccgcgcccagccctttacgcgtgtttctatctctacacctccctttggttcatccagctctgtgtgtccacactcctggcttgggtgcagccctt

SEQ ID NO: 11874 - DNA, 556 bp, Homo sapiens
ggggcctaattcctgcttcttgtccagaggagagattttagtgggaaactgtgagttctctgcctgagcagactcctcctctagtctaggcatatttctttttttcttttttgggggacagagtctcgctctgtcacccaggctggagtgcagtggcgcgatcttggctcactgcagcctctgcctcccaggctcaagctattctcatgcctcagccttcccagcagctggggctacaggtacacaccaccatgccaattaactgaagactaacttcatccccctatcccctacaagttaatcatcagttaattgttgtatttttttgtagagttgtagagatgggatttcaccattttgtagagacggggtttcgttggccasgctggtctcaaactcctggactgaagtgatccgcccgcctcggcctccccaggcgttgggattacaggtgtgagccaccgcgcccagccctttacgcgtgtttctatctctacacctccctttggttcatccagctctgtgtgtccacactcctggcttgggtgcagccctt

SEQ ID NO: 11875 - DNA, 556 bp, Homo sapiens
ggggcctaattcctgcttcttgtccagaggagagattttagtgggaaactgtgagttctctgcctgagcagactcctcctctagtctaggcatatttctttttttcttttttgggggacagagtctcgctctgtcacccaggctggagtgcagtggcgcgatcttggctcactgcagcctctgcctcccaggctcaagctattctcatgcctcagccttcccagcagctggggctacaggtacacaccaccatgccaattaactgaagactaacttcatccccctatcccctacaagttaatcatcagttaattgttgtatttttttgtagagttgtagagatgggatttcaccattttgtagagacggggtttcgttggccacgctggtctcaaactcctggactgaagtgatccgcccgcctcggcctccccaggcrttgggattacaggtgtgagccaccgcgcccagccctttacgcgtgtttctatctctacacctccctttggttcatccagctctgtgtgtccacactcctggcttgggtgcagccctt

SEQ ID NO: 11876 - DNA, 549 bp, Homo sapiens
gtagttctagcggcagaaaaacaaaggtttatgattataggctttagcaaagtgcaagtggcaccatttcttagcttttctagccccaggaatgaaataagcagaaggacactttctccttaatttcttcctttttatttcattcaggagtacatttggcattaagatgaaaagtttaccaaagatctaagaaagagatgaggcttcaatgagtcatttaacctggcagtccttctatatgagttcyacttcctttaacatctgaatgtcactgcattaaaagacagtagaatttctcccagttatttattggacaacttgcaaactgccacatcactagattttgtaggagatttaagtttttctcttctatttattgactcatctttctcctcctgcattctcatctctaatttcttgtttctgcattataaagatagctgataacatttgaaagtttaataattaattcaacaaacatcctgacaatttactgcatacaagccctgcatacagaaatcttgctttctagtcggggagtgatgcagc

SEQ ID NO: 11877 - DNA, 549 bp, Homo sapiens
gtagttctagcggcagaaaaacaaaggtttatgattataggctttagcaaagtgcaagtggcaccatttcttagcttttctagccccaggaatgaaataagcagaaggacactttctccttaatttcttcctttttatttcattcaggagtacatttggcattaagatgaaaagtttaccaaagatctaagaaagagatgaggcttcaatgagtcatttaacctggcagtccttctatatgagttccacttcctttaacatctgaatgtcactgcattaaaagacagtagaatttctcccagttatttattggacaacttgcaaactgccacatcactagattttgtaggagatttaagtttttctcttctatttattgactcatctttctcctcctgcattctcatctctaatttcttgtytctgcattataaagatagctgataacatttgaaagtttaataattaattcaacaaacatcctgacaatttactgcatacaagccctgcatacagaaatcttgctttctagtcggggagtgatgcagc

SEQ ID NO: 11878 - DNA, 571 bp, Homo sapiens
ccctgtgtacttagaagcaataagrcactactggaagtttcagctctctttcaagggaagcatattctattcagccaagagaggagcaatgaaaattatttcaaatggattaattagtccaggtttctccaagccttcaaaatccgagatttcattatttcagatatcaaagtctcacttttatttgatcagggttctttaacttaaaatacttggcagagctctcaatccaaaggctgctcaaattcagcaactcaaaaaaaaaaaaaaatcaatctcccaactgattttcagtgatctctgaccaaatgctatagtcagtaagggtatttagtttagcattgtcacaggaaggtcaatagttttactctatgtcctgagtgagcatttcacaatgtgagcttggttgctctagctttaagttatccaacaccaccaagatcaaatattccaccccactgtctgacattccttatcccctttaagttggcctattggaattgcatcctatcccagagagtggcatcatgagtgagcacatgggtctgggggaacagacttgatagactgc

SEQ ID NO: 11879 - DNA, 547 bp, Homo sapiens
ttcagaaagtgtaaattgatatgccagctaaagctcccaaaatgaagagagtgctggtccagtatagtctcttgttcagaacgatgatctcctgtgactttagagtttgtgctctgtatgttataaagatctttactaccaaagccttttcttgtgagaaattagggctctgtgtctttattagtaggacatgtgccatctcctcatagttatgttcactgtggttttctcaaaaacaaagccaagcataccttgatcagtgagatttgccattcaaaaaccagagagatgttcatacatgcataattgcatctttagcttttctatctccggcccccagagctgctttggggagttttattcttctagtttgagcagacacttctgtcatttcatttaaagtaaatgccacaatttacaagcccagcatcagttctcctccttggggatactgacagagaggaaatgggggctctttggtcctttccaagcacagcctcaaatgctatattttgaaaatagaaaatacakaaaaatgacatggtac

SEQ ID NO: 11880 - DNA, 526 bp, Homo sapiens
ctgtgagatccgaccatcccattaactttgaagtttctcttgattaatagaagaamaaaggggagggtgaagaaaaggaggaacatgctaaaaaccttatgacaatcatccaaatgtgaggaaagaacaaccgattcaccaactccactttttctattttacaactttctacatctcactcttgattttggccttcctggctgaaacagcctggcagtccctagagcccctgagaagagccctggttctccaaaagacagaggaggagaagccctgcaggatgcgctgaccacttcccagagaactgacagtccgtgctcccaaaagtttgaaccaacagcctaatgtgaaaagaaactgcactgaaaggtaaaggaggaaatggtgatgaactgggcttatgtgagaatgtctatattttcataacacagccccagaatctttctctcagttacagcctcaggcaaaccacgttctggttggtgggttctgcagggatctctcccaccactgagcctctagtccc

SEQ ID NO: 11881 - DNA, 845 bp, Homo sapiens
agtgggaggtaattgaatcatgggggtgtgtttttcycatgctgttctcgtgatagtgaataagtctcatgagatctgatggttttacaaaggggagttcccctgcctacgcgctcttgcctgctgccaagtaagatatgactttgcttttcctttgccttctgccatgattatggggcctccccagtcatgtggaacggtgagtccattaaacctcattcctttataaattacccagtctcaggtatgtctttattctcagtgtgagaactgactcacacaaaggcactgtcctatgcattgtaggttgtttagcagtatccccagcctctacctgccagatgccattagcaccaccactcccaagctgggtcagccaaaagtatcttcagacattgccaagtgtcccttgagggtcaaaatcacctccagttaagaatcacagcagtagaaaccattttttccccctaacttgcaccctgtcttttattttctgcccagggtttcgggagttttccaccatgactattgccctgctgggttttgccatattcttgctccattgtgcgacctgtgagaagcctctagaagggattctctcctcctctgcttggcacttcacacactcccattacaatgccaccatctatgaaaattcttctcccaagacctatgtggagagcttcgagaaaatgggcatctacctcgcggagccacagtgggcagtgaggtaccggatcatctctggggatgtggccaatgtatttaaaactgaggagtatgtggtgggcaacttctgcttcctaagaataaggacaaagagcagcaacacagctcttctgaac

SEQ ID NO: 11882 - DNA, 845 bp, Homo sapiens
agtgggaggtaattgaatcatgggggtgtgtttttctcatgctgttctcgtgatagtgaataagtctcatgagatctgatggttttacaaaggggagttcccctgcctacgcgctcttgcctgctgccaagtaagatatgactttgcttttcctttgccttctgccatgattatggggcctccccagtcatgtggaacggtgagtccattaaacctcattcctttataaattacccagtctcaggtatgtctttattctcagtgtgagaactgactcacacaaaggcactgtcctatgcattgtaggttgtttagcagtatccccagcctctacctgccagatgccattagcaccaccacycccaagctgggtcagccaaaagtatcttcagacattgccaagtgtcccttgagggtcaaaatcacctccagttaagaatcacagcagtagaaaccattttttccccctaacttgcaccctgtcttttattttctgcccagggtttcgggagttttccaccatgactattgccctgctgggttttgccatattcttgctccattgtgcgacctgtgagaagcctctagaagggattctctcctcctctgcttggcacttcacacactcccattacaatgccaccatctatgaaaattcttctcccaagacctatgtggagagcttcgagaaaatgggcatctacctcgcggagccacagtgggcagtgaggtaccggatcatctctggggatgtggccaatgtatttaaaactgaggagtatgtggtgggcaacttctgcttcctaagaataaggacaaagagcagcaacacagctcttctgaac

SEQ ID NO: 11883 - DNA, 845 bp, Homo sapiens
agtgggaggtaattgaatcatgggggtgtgtttttctcatgctgttctcgtgatagtgaataagtctcatgagatctgatggttttacaaaggggagttcccctgcctacgcgctcttgcctgctgccaagtaagatatgactttgcttttcctttgccttctgccatgattatggggcctccccagtcatgtggaacggtgagtccattaaacctcattcctttataaattacccagtctcaggtatgtctttattctcagtgtgagaactgactcacacaaaggcactgtcctatgcattgtaggttgtttagcagtatccccagcctctacctgccagatgccattagcaccaccactcccaagctgggtcagccaaaagtatcttcagacattgccaagtgtcccttgagggtcaaaatcacctccagttaagaatcacagcagtagaaaccattttttccccctaacttgcrccctgtcttttattttctgcccagggtttcgggagttttccaccatgactattgccctgctgggttttgccatattcttgctccattgtgcgacctgtgagaagcctctagaagggattctctcctcctctgcttggcacttcacacactcccattacaatgccaccatctatgaaaattcttctcccaagacctatgtggagagcttcgagaaaatgggcatctacctcgcggagccacagtgggcagtgaggtaccggatcatctctggggatgtggccaatgtatttaaaactgaggagtatgtggtgggcaacttctgcttcctaagaataaggacaaagagcagcaacacagctcttctgaac

SEQ ID NO: 11884 - DNA, 522 bp, Homo sapiens
gctcctaaacgggtaaagaagaaaatttaaactaaacaaataactaatcctgctttagaaatcaagatctgctagggaagaaaaastccctaatccgtacagaggatcatctctattacaaaagtccattagcagaatggtacatgttccctctttatttccacccaccactcctgcctaacaaatataataagaaacagaaaacaggacacatttctatttctataaagagaaaataccgggtcccgaaagctgtcaataaaaaacaatatccaagatccccctctactacatagtcaactcgagactgaaatgtttttaacaaggactttggatagaattaaatacgcccaaataaacgaaactaaatgttgcatttatttctatacgtgaatgttattttagcaagtcagtggcaagctggtcatgtataaaggcactgacgaaacaaatttaatacatggaaaatcaaagagaaaaaaatttcaaaaccttatcactttgaacccttctaaagtaaaa

SEQ ID NO: 11885 - DNA, 501 bp, Homo sapiens
ccatccactgggactcttggatggttggcctcttcaacagttagagcaatgagggccttcggagccttctaaggccggtgtgcactcctggcacatatggagaaactgaggctcgcagaggagaagccttcccaggtctcagcggctagtggcagagttgggacagtaccccagcctggggctccarccacttcaccttgggctggatctcgctttggaggtgggcgtggcctcatggggagcccttctctccagttaaggggagatcctgcgtggacatcaagtccacacaacagcagggtcctcctataaagccccctctgggctgtaacttcaccacttcccaaggcaaaagaaaaccacgaatctccttcccagtctgaattctgtcctgaattcctttaggcacctctgactcctacaaccaagcaggctccctctggccccagggcgtggtgctgaagaacagaacataggcctcaggctggccatgagtaacag

SEQ ID NO: 11886 - DNA, 537 bp, Homo sapiens
tgaaagataaatgaaagaaaaactgaaagctaaagtgtgaagaaccactgccaattgaaaaatcatagtaaatgaagagcatcccactgcaaaataataaacgtggagggtacaaaactcagtctgtacacagtgttaagaagaaaataacagcatgtgcactattctatagcacattttcaatatgctatttccagccacgtgctcagcccagcaagctcttcctagcattgtttttctttgcttcatttcctcttaaatgtgttggatgcactttgttcctgctaactaatctatcttttcagtttcaaatcaaatgaacccagagaatttatttttacattattatcttcagatttagatttgttttgcttttaatcctgtcttcatgaaggggaaagccatgtgtaccagcatggttgataaaccaccaaatcgtgaaactttgcttgctccccaaacccccaaccacacacacatacacacacacacacacacayacacacacacacacacacacacacacacacacacaca

SEQ ID NO: 11887 - DNA, 545 bp, Homo sapiens
ctcccctgatagccttgtttttctggaatggctttgcaatctctgctagcaagcatagcgggtgccccaaccttctccctgaagaggaggatgctgttagccagtaacaatctggcttgccttgggaatgcattagcttttgatttttgtgcttactgcacaaagaggtactgtgtaattattctttctggtgatccagtcgctcaatagatgcccattaactagagattatacatgattggattttcccttttgaagctcccacctaatggctaaatggaaacttaatgagaaggggaagtgggctagttgtgctctgaaaagagtaacaactcatttayggatagcagtctctctaaattccttccaaaacctaaaattataagactggggtataaaatttaaacaacatttgtctcatagtattattcaaaaggatattatagatctatttaaggtatcagtgttttacaagatcctgtttgttgtctttagggaataagcctctctcaaattttccctatttttcctttatgttctacaag

SEQ ID NO: 11888 - DNA, 525 bp, Homo sapiens
ggaagacaatgcaataggatgatacactagtatctaacggcaggagcaagaagataggacaggcgtggaaagtggaagggacagaaagtcacctggagcacagtgagtgagggcagaggaagtggacagataaaatcagagaagaaggcagaggccaggccttctagggccaaggcaggaactcaaagatgatgagtccttgcctacactatgaaggtaaggagaaggattaagtcgttaccaggtctattcctgggtgtctatgtagcattcatgtggcacccaaagccttaataagcactraacaaatggggtagatttatcttatgtcactagagattctgcttagaagggtgagtggtgaatgcctgtcaaattaactgtctagagttctttctgggatggtataaattctttattttttatttatgtatttatttttttgctgagacagagtctcgctctgtcgcccaggctggagtgcagtggcgtgatctcggctcactgccagctctgcctcctggg

SEQ ID NO: 11889 - DNA, 577 bp, Homo sapiens
caccctggtgtgtaacctgagcatggggagggtttcaagctccctggtgactccaatgtgtagccagcattgatcatcacagctctagaaaaaagctctactgagatgaaaatctttgggaatcaaagcgatgtctgcctacacagaagcctcccatcttgggtccwcagactgaggctgatgaggatgctgctcccaagcctgccttccctagccctgcccagcctgcttgacaagtccaatccctgctccccattgtccagcctctaagtgctctccagattcagactgttgaggtgagaagggggtggttctcttatcagctctgcaatcttgcccagaggtgtggccctgagctgggagactggaaacctgagtacttaccctagctctgctgagtggtcttgggcaaggtaatttctgtctctcagtgacagcttcaatgaactgttgccctgggggaaaaaagctggtgtttccaaattgtctgatttttcagaaaaagctggaaatctacggtttaatgagaaatcacttctgcttcttttttttttttttttgagatggagtctcactc

SEQ ID NO: 11890 - DNA, 556 bp, Homo sapiens
cctcccttaacttctgtgactaatttttatttcctttctagatttgcccaattaatactagggtgcagtgtatcctggagaggtagggtgtgtgggggaggaatcccttgggggagatattaggagtgctctgttgtttacaaactcaggtacccgcagggcctagcaagagacttaaatgactgataagaaccgtgagaaacatgttgcttccaggcttgatttcgatttttcgctttttttttttttgagacagaatctcactttgtcaccaggctggagtgcagtgggtgcaatctcacctcactgcaacctccgcctcttgggttcaagcaattctcctgcctcagcctcccaagtagcttgggactacaggccctgccaccacgcccggctaatttgtgtatttttagtagagatggggtttcaccatgttggccaggatggtctcgatctcttgacctcrtgatctgtccaccttggccttgcaaagcgctggattacaggcatgagccactacacccagccgatttttcctttttgattaaagatgcta

SEQ ID NO: 11891 - DNA, 650 bp, Homo sapiens
ctgctgttattaaaaatgtatacaaagggccacatgtcatttgctttacctgctggggcccatgagcatctgagtttgtggcccctcacctttagcgtctcctcagctggtagtagagggtgctacttgagagcaggaaggaaacacaaacaggaagtctagcccctgcttcgggaaactccaaaacaggacctgccaatgccacactgagtctatcagatactaggtatgacctaaggcagtggccatcctctctgtgcctcagttacctaatacatgggatcaggataattatggcacctaccacatgagtgaggctgatatgattaaatcaggaaacaatggcaataaaaatagtaaaagcaggataggaggactgagagcttaccatgcctgcaacatgtccrgcactgttccaagtgcctcagagggatgactcacctgctcctcacagctaccctatagtcgtgagtaatattattacccccatgctacagacgaggaagctgaggctcagaggagtcatgcaacttgttcaaagtcacccagttcaaaattaagggagcagggatatgaacctacacaatctgtttccacagcaaatactcctaactaccaccttatcctgcttgcttgtgcacaaaaggaaa

SEQ ID NO: 11892 - DNA, 476 bp, Homo sapiens
tgcctctcatgtgtaagaaagaacttgatacacagtagatgctcaataagtgcttgactcttgcccaggctcagaaccaacatttgtagtatctatataatatagcctttgtctagaagcaaggatggataaaaaaatgggagatgcttctgctgctgtccgaatatcagccacttatttttctattcttaataggatcttagtaatgaagcaggccataaaacacaaagacagcattaagctatccaacccccatccttctcttctcttcacactcctaaaattccatctcttatacacatgatgagcatatagtatcacagattttccaagrgagtccaatttcaataatgtttgaatgagtaaatatataatttatatgatttaattttatgcaaatttattattttaaaacaattattacattgatgtatactatgtgtatgtagtttgggggtacatgtgataattcaata

SEQ ID NO: 11893 - DNA, 476 bp, Homo sapiens
tgcctctcatgtgtaagaaagaacttgatacacagtagatgctcaataagtgcttgactcttgcccaggctcagaaccaacatttgtagtatctatataatatagcctttgtctagaagcaaggatggataaaaaaatgggagatgcttctgctgctgtccgaatatcagccacttatttttctattcttaataggatcttagtaatgaagcaggccataaaacacaaagacagcattaagctatccaacccccatccttctcttctcttcacactcctaaaattccatctcttatacacatgatgagcatatagtatcacagattttccaagggagtccaatttcaataatgtttgaatgagtaaatatataatttatatgatttaattttatgcaaatttattattttaaaacaattattacattgatgtatactatgtgtaygtagtttgggggtacatgtgataattcaata

SEQ ID NO: 11894 - DNA, 1121 bp, Homo sapiens
taccacatgtaccacaaaactccatacaagggttaaagttgtgtgactaacataccagatacaaaatagtcttccttattgctagcataataagtattagaggtaggggaagaagaagtcaaacatattcaactgctcactcccactttcaaaacattggcatatataggcccttgatcaaagtgtaatgagaaaaatattgcctgatcaaagggaacttttgtaactaataattattcctactgtgtctgatgttactgctaccaatactgattgtttaaccatatgctactctagacactagataatacatgttatccaattacaaaaactgtgtgaagtcaaaattagtatccgtatttaaaaatcagtaaatagacttgtttagattaaacatcctgctcaagggctcacctgacttaaaaaaatcagagccagaattgaaagacagttctatgtgtctcccaaatcctataaccactgagatgtaatatctactattttattctaggaatctgcatactactaagtggaagttaacaatgcacataatacccagtagaaaaacaaaaaggaagcaatcgtaggaatataagatctaaagggtattaaaaatttacaactaagttaatcaacttcagtaattaatccttgcttccaactatgctcattttcttttctctttttcttgtctatttattttacaagtttgaaatatatatagccttgtaaaaatgctgaaactgaacggataacaattttccttatcattcccagaatttatgaagtggttattttcaaccaaattgtctaaatcatggaaatgtcaaaatatcagtgcatgtcctgtcgtaaaaatgaaaataggttctccttggggcttagtgcctctagccaaaaacaaaggatttgcttgctatatttaagtcagcctggttcactggccaaagrgttactgttccctcaaacataagcaagattttaaaactggtgccatctgtgcaatgtatattgcaacactgtgtttatcatatttcttcagttagggtcaaagtaattgagtcaatgccaatcatcttcaacttaaatattcccacttgaatttctttggaaatcaagaa

SEQ ID NO: 11895 - DNA, 478 bp, Homo sapiens
gtggcctgatctccgctcactgcaagctccgcctcccgggttcacgccattctcctgcctcagcctcccgagtagctggtactacaggygcccgccaccacacctggctcatttttgtatttttagtagagacggggtttcaccgtgttagccaggatggtttcaatctcctgacctcgtgatccaccctcctcgggctccccaagtgttgggattaaaggcatgagccacagcgcccagcctaaaattgcttttatacacaatcattagtcaaaacgtatatgctaaagaagaacagcacatacaatgtctatctgcttacatttatcttcacttcaaataggattagtttttaaaattttcccacatcattaaaaaaaaaaaagtaggctaatttcctcactctaatgaatgtgagctcttgtgttagtcaaacaataaaggtactaatgaacatgatacctgggcctcctccctt

SEQ ID NO: 11896 - DNA, 415 bp, Homo sapiens
tgtagtttgtaggtcacaattactgaactttgcaactatagcatgaaagcagccacacacaataaaatatgaatgtgtatctatgtgccaataaaactttgtttacgtgtgtagaaatctgagtttcatgtaattttcatttgtccatggaatgttttgtagttttttcgaaacattaaaaaatgtaaacgttattcctcgtttacacgtagtacaaaatataggtgatggtccaaatttggttggtgtgatttaatttttcaacctctgctccagaccacacattctatgtgtcctmcagtgtgatgcttttttttttttttttctgagatggagtcctgctctgtcactcaggctggagtgcagtggtgccatcttggctcactgcaactccctcctcctgggttcaagtgat

SEQ ID NO: 11897 - DNA, 590 bp, Homo sapiens
gccccggatacaaacgtcagagggtagaggaaaagtttttcctcccctccwgctataagttccttgggtaacaagtgttagttatctctttaacccccatgaacattgcaagtgctcaataaatgttaaatattgactctttcccaccaacagagtatggctatgctgactgacctccccaccccacccaagtctttacccacacacattctgtttactaaagagcagtggtctgtgcatccatctcttttgagcgccattttagtaagctctttctctacagcacagttattttcttacttatgtattttttaaatattgttttttcttttttcttttttttttgagacgcagtctcgctctgtcgcccaggctggagtgcagtggcatgatctcagctcactgcaacctccgcctcccaggttctcgccattctcctacctcagcctcctgaggtagctgggactacaggcgcccgccaccatgcccggataattttttatatttttagtagagacggggtttcactgtgttagccaggatggtctcaatctcctgacctcgtgatccacctgccttggccttccaaa

SEQ ID NO: 11898 - DNA, 562 bp, Homo sapiens
tgtaatcccagctactcaggaggctgaagcaagagaattgcttgaacccaggaggcagaggttgcagtgagccaatatcgcaccattgcactccagcctgggcaacgagagcgagacaccatctcaaaaaaaaaaaaaaaaaaaaaaaaagaaaaactgcttgtaaactaatactaaagtgtgcaagaaaacataagaggcagttaagtgctttttaaaagcaccctgacagtagtactaaatagattaaactacagaaaattacccctaagaaatgctagcagagataaaccaaactcatctttctttggaattaaattcctaatatctacttgtgtccagttactagaaaaggaggagaataattaattcattgtttcagcaataacaattacttrtaatcggttcaaagaaaagttgacatgggaagactagaaagctgacaactatcttactatctctgctttcaaattccaagaagcaaactgaacagagatttactggtaagataaagaaaataaaggggatgatatctgaagactgaaagaaaagaaaagaaaaa

SEQ ID NO: 11899 - DNA, 554 bp, Homo sapiens
tggagtgcagtggcgcaacctcggctcactgcaagctctgcctcctgggttcatgccattctcttgcctcagcctcccgagtagctgggactacaggcgcccgccaccatgcctggctaatttttttgtatttttttagcagagacggggtttcaccgtgttaagccaggatggtctcgatctcccgacctcgtgatccacccgcctcggcttcccaaagtgcagggattacaggcgtgagccaccgygcctggccctgcaatagtttcttatactaaattgcccatttctacttaggcaaatatttaaaaactcaattttcctggctctaatccactccagtgaaaacagtattcctctgtgtttgggtttgcctcaatagtcacctaagaagatgtttaaattagaaatgtgaacaaactacaactagttgttgaaatgcccatctatatggctgagcaggtggtggccctgggaggatggtggcctggatgagcacaacctaaggagcactcttcttgtaatctggaaggcatggtctatatctgacttga

SEQ ID NO: 11900 - DNA, 723 bp, Homo sapiens
cattgcctcactcacattcgccccatcatttatcccccaacctcagggctgggtttttttttccaggtgagggcagaaaatgaatttttacctaacattgttatctaatgataataaatacaactatcctttattgaacgtttactgtatgttgggcacagtgtagatgctggagacacaaacagaacaaagactttactctcatgtagctcagattctagtgtggagaaagaagttaataaacaaacttatcacatatcaygtggcaagagatattaggaaagttaagggcaaaaggggaattgaggccaggggtggtggttgatgcctgtaattccagcactttgggaggccgaggcgggcagatgggttgagtccaggaatttgggacaagcctgggcaacatggcaaaaccctgtctctacaaaaaatacaaaaattagccgggcatggtggtgtgggcctgtagtctcagctacttgggaggctgaggtgggaggatcacttgagcctgtgaggcagagattccagtgagtagagattttgtgagaccctgtctcaaaaaaattaaaaaatacaaaataaaataaaataaaccttaaaggcctaaaacaacagtgatcatttattatctcttaatgatttctgagggtcaggaattcaggaggagttagctgggtggttctgactcaagatttctcttgaggttgcagttaaaagatg

SEQ ID NO: 11901 - DNA, 581 bp, Homo sapiens
atgtgctgtgtttgacctctcccagactgcctggtgtgatgggaagaccctcaatgcccacataccttgggagcctgtcagagccctgtggcaggctgtcctccttagcagcccttcaggtctcttgccaagtgcaggctccagtgatatgccttctagtctataaaatgagtatcattcaggccttccaggtttctttgtgcttggatttgttaagtccaggccatgctgtgtgtatttgycaccatttagtcttgttctcctaacatggctgcttcaaagggtggcttgagaatgccatttccccattacctctccaataaaggctccataaaagattcagtccatctgcttttatgtttcatctgagtgctgcttttaacttttcatttctgagtgcttcctttatgccttaagtagtctcatcgacttcttgcttttgatttattgaagaatccttttgtagttgactttagtgttcattttaaaagatacttctgaaatttttttttgttctgtttaattttaggtctcatttaactgttcactttgaacttttctgttttccttattgggtgcct

SEQ ID NO: 11902 - DNA, 569 bp, Homo sapiens
gggtgtatgtgtgatcttgcggtgtagaaggaaggtatctggttagcgtcggtagttttgtatatttccagcccctagattcccttcatgtacactctgttacttgggtaaaccccagtcttctctgtaaatagtttccttttgattggtgacattgggtatttgttaaaagccacaagctcttttactagtcttaaaccagtaaagaggtacatgagatattcagaaaatcaacttaaattcattattatagaataattttaattttgtatgctttatcttttctttcttttttttagctatataagtaaaatatacattccttataaaacatttgaggccaggcatggtggctcwtgcctgtaatcccagcactttgggaggctgaggtgggagcattgcttgagtccagcagttcaagaccagcctgggcaacatagtgagacccacatcgctaccaaaaaaaaagcaaattttgtagatagtggtaaagagggagaaacaaccatgattgtcctcttaccctgtgacattttagtgaatagtctttcagacatctttctatgcaa

SEQ ID NO: 11903 - DNA, 556 bp, Homo sapiens
ttagtgtaacttggagcccctcatagttactataaatagtagctttaatgtagtaaactttaatatagtagtttatataggcatttctcctacgccatgagttttcatattacagattgaatgtagtatattgtactaactgctatcagttataatcaggaataaggtttgcatgtttagaggtagatagagctgcttgtgtaatacagtaccacattattttgttagcactggtggttggaaactatgctraaagcaaaaatgcaagtaaagccaaagatggtggaggagaccaaggctttgggtgcttgggttaaaggactaacaaggaagcatttagaattatgtctgtcagcattttcttatttctagttcacagtaacaaaatacactgacagctatttaaactgctgggtttttgtttttttgagagtatccctgtcatggcataaactgctgtttttttaaactgaaattcctgcaggaagaataaccttgctgttgcaggctggaaccttttatccttaactccttatttcaatagaaacagttgtct

SEQ ID NO: 11904 - DNA, 361 bp, Homo sapiens
ttgcccaggctggagtgcaatggcatgatctcggctcactgcaacctccccggctcctgggttcaagcgattcttctgcctcagctgggattacaggcatgagccattatgcctggctaatttttaatttttttagtagagatggggtttctccatgttggtcaggctggtctccaactcccgacctcaggtgacctgcccacctcagcctccwgaagtgttaggattacagacgtgagccaccacacccggcaatttttttttctttccaactgtctgtgccttccagatttcccgtttgtcgtactgctctaggttagagattttttcctccctatttctttcttcctttttttgtagc

SEQ ID NO: 11905 - DNA, 872 bp, Homo sapiens
gaggcggggttaggttgggagctggaaacccagcaatgcagagacagagcagatagaaaatctccgccctaccctccgctacgcgccgtctctccaagaaatactaattccacttcctccaaaaataggatgcagaattgttcgaatggctccattcattcctggtgcgggccctttaaggggtggtgcgccccccgccccctttccgcccgcactggctcgcggcgccttcccgccaccagcgcccgctgacttccacaactaaatttggacggagtgacgtagggcagtcgcgcgggccgcttccggttgcccatattaggacagggcccgtgatcgccttagcggccggcggcggggcttccggggggggggcgcggaggggcggggctttgcgctccggccacgcccctccccatccccgacccgggcagccggagcaggctggagccccaggcttcctgactcgcattccagccgggtgggggaagaggagagtttcacttccttccctccaggggccaggaaggcgtgacgccaggaaagcaccccgcagcgggtaggggcgacctgagggctcccagggacgccatctcccagagacgctgcagaacgaccctgcatacacaggagacgacccgctgaggcccccttcatcccatctctccycttcccaattatttcccccatacaaggccccctcccaggttattcctgacccctgccccacactgatcttctcaggccttgggacaccctcccgtcccgcccttcccccgcacgctgggaactcaaaagttattcccccctaaaatacccttcccaaactcgtccccattcaacgatggtgccagactgcgacgacctgccga

SEQ ID NO: 11906 - DNA, 625 bp, Homo sapiens
gatctccttctgtccagactgtggcaaaagtatccaagcggcattcaaattctgcccctactgtggaaattctttgcctgtagaggagcatgtagggtcccagacctttgtcaatccacatgtgtcatccttccaaggtaagaaccagagcattgagcctgtttctgcrgtgggaataaggtgcatacacgtgtgtgtctgcggagggaggatgcctttgcagcctgtctgaccctgtcctgacactggagaagcccaggcctcaggactggacccctctgtctaccatcagtctcttggcctcttattggcctcatggctttgaacactgtctccatgttaacatctccttcatttctatctccagccagcctggactcccctgcttggaggagatatatgtgcagcctgccagcttggcacctgcaggttgagtatcccttatccgaaatgatgaggactggaagtattctgattttggattttttcagattttgggatatttgcattatacttactggttgagcatcctgattcaaaaatctgaaatctggctgggcacagtggctcatgcctgtaatcctagcactttgggaggctgaggcaggcagagcacttgaggtca

SEQ ID NO: 11907 - DNA, 625 bp, Homo sapiens
gatctccttctgtccagactgtggcaaaagtatccaagcggcattcaaattctgcccctactgtggaaattctttgcctgtagaggagcatgtagggtcccagacctttgtcaatccacatgtgtcatccttccaaggtaagaaccagagcattgagcctgtttctgcggtgggaataaggtgcatrcacgtgtgtgtctgcggagggaggatgcctttgcagcctgtctgaccctgtcctgacactggagaagcccaggcctcaggactggacccctctgtctaccatcagtctcttggcctcttattggcctcatggctttgaacactgtctccatgttaacatctccttcatttctatctccagccagcctggactcccctgcttggaggagatatatgtgcagcctgccagcttggcacctgcaggttgagtatcccttatccgaaatgatgaggactggaagtattctgattttggattttttcagattttgggatatttgcattatacttactggttgagcatcctgattcaaaaatctgaaatctggctgggcacagtggctcatgcctgtaatcctagcactttgggaggctgaggcaggcagagcacttgaggtca

SEQ ID NO: 11908 - DNA, 542 bp, Homo sapiens
taagtgcttattttgatgtatatccttagggtaaaattttgtattcacacattgcacacatattcataattttctattaaagagattttaaaattacattttccaactgatatataagatatataggaaaactccatttactttttgttctttgaaatttataaataaaataactttaaaaaattatttgaaataaataaacaatgaaaagtgaaggtctttttttttttttttttttttttttttgagacggagtctcgctctgtcgcccaggctggagtgcagtggcgcgatctcggctcactgcaagctccgcctcccgggttcacgccattctcctgcctcagcctcccgcgtagctgggactacaggcgcccgccaccacgsccggctaatttttttttgtgttttttagtagagacggggtttcaccgtgttagccaggatggtctcgatctcctgacctcgtgatccgcccgcctcggcctcccaaagtgctgggattacaggcgtgagccaccgcgcccggccaagtgaaggtc

SEQ ID NO: 11909 - DNA, 578 bp, Homo sapiens
ctaaatgtctcttcctgacactccccttctggggggctgaggaagctgtgaacagcctggtttgtcacacagcaygatggccaccacactgaagcagcagcaagcagattcatggaaggtgtgctgagaaccagccacctgggagccctactgtccctgggtatcctctggcttctggctgcaaagctggtctttttttttttttttttcattgatatagggtcttgctttctcacccaggctggagtggtggtgaaatcacggctcactgcagcctcaacctcctggtctcaggcaatcctcccacccaagcctcctgagtagctgggactacaggcggcaccaccatgcctggctaattttttaaaaattatttgtggagacggtttcactatgttgcccaggctggtcttgaactcccgagctccagtgatcctcccacctcggcctcctgaagtgctgggattccacaggtgtgagccactgcacctggctgcaaggctggtcttgactgacaacgtcaggcagtagtccagtcgctaggacagacggatcctgaccctcacactggagtgggt

SEQ ID NO: 11910 - DNA, 688 bp, Homo sapiens
aaatcatgaaaagatctttgcccactggaaatttcctgaagtgtcgaaggcccctttagagtaggtgatctcaaattttttagcgcttcccatatcaccgcgtggcggcagaattatgtaggcaggagagacagatggttagcgttttccagggcargtattatgataggacagagagtagggaatttgaggttttggaaaatatatgattgaatctcagttacctagttaaagaaatgaggttggccaggcgcggtggctcacggctgtaatcccataacattgggaggccaaggtgggtggatcacctgaggttgggagttcaagaccagcctgaccaacaaggagaaaccccgtctctactaaaaatacaaaatacctgggcatggtggcacatgcctgtaatcgcagctactcaggaggctgaagcaggagaatggcttgaacctggaagcagaggttgcagtgagccgagatcttgccattgcactccagcctgggcaacaagagcaaaactccatttcaaaataaataaatagaatacaaaaattagctgggcatggtggcgggcacctgtaataccagctactcagggaggctgaggcaggagaattgcttgaacccgggaggtgagggttgcagtgagctgagatcacgccattgcactccagccagggctacagagcaa

SEQ ID NO: 11911 - DNA, 688 bp, Homo sapiens
aaatcatgaaaagatctttgcccactggaaatttcctgaagtgtcgaaggcccctttagagtaggtgatctcaaattttttagcgcttcccatatcaccgcgtggcggcagaattatgtaggcaggagagacagatggttagcgttttccagggcaggtattatgataggacagagagtagggaatttgaggttttggaaaatatatgattgaatctcagttacctagttaaagaaatgaggttggccaggcgcggtggctcacggctgtaatcccataacattgggaggccaaggtgggtggatcacctgaggtygggagttcaagaccagcctgaccaacaaggagaaaccccgtctctactaaaaatacaaaatacctgggcatggtggcacatgcctgtaatcgcagctactcaggaggctgaagcaggagaatggcttgaacctggaagcagaggttgcagtgagccgagatcttgccattgcactccagcctgggcaacaagagcaaaactccatttcaaaataaataaatagaatacaaaaattagctgggcatggtggcgggcacctgtaataccagctactcagggaggctgaggcaggagaattgcttgaacccgggaggtgagggttgcagtgagctgagatcacgccattgcactccagccagggctacagagcaa

SEQ ID NO: 11912 - DNA, 688 bp, Homo sapiens
aaatcatgaaaagatctttgcccactggaaatttcctgaagtgtcgaaggcccctttagagtaggtgatctcaaattttttagcgcttcccatatcaccgcgtggcggcagaattatgtaggcaggagagacagatggttagcgttttccagggcaggtattatgataggacagagagtagggaatttgaggttttggaaaatatatgattgaatctcagttacctagttaaagaaatgaggttggccaggcgcggtggctcacggctgtaatcccataacattgggaggccaaggtgggtggatcacctgaggttrggagttcaagaccagcctgaccaacaaggagaaaccccgtctctactaaaaatacaaaatacctgggcatggtggcacatgcctgtaatcgcagctactcaggaggctgaagcaggagaatggcttgaacctggaagcagaggttgcagtgagccgagatcttgccattgcactccagcctgggcaacaagagcaaaactccatttcaaaataaataaatagaatacaaaaattagctgggcatggtggcgggcacctgtaataccagctactcagggaggctgaggcaggagaattgcttgaacccgggaggtgagggttgcagtgagctgagatcacgccattgcactccagccagggctacagagcaa

SEQ ID NO: 11913 - DNA, 633 bp, Homo sapiens
ctgtctcggggtcgttcgctcaccaaggcgcagcgtgacgtcatcgaggactgcctcatgtcgctctgcaggtggrgcggggcaggcttcagggtggggcaggggcaggggcaggggcaggggcaggggcaggggcaggggcaggggcagggggaggagcaggggcaggggcagcagagcgggcctggacgggggattctacatcttgtgcattgtcccgcaggtacatccgcccgtcgatgctgcagcacctgttgcgccgcctggtgttcgacgtgcccatcctcaacgagttcgccaagatgccactcaaggtgagggcaagcgctctttagcatctcatttccaggccgcacccactggtttgctcttccctcctactgcggggctcatttgtgtcggcactgcccagcccaataaacctgcactagttagggcagcgtccccgtagaaatctcttagcatccttatttgcatactaggattcccagaacattcactttgcttcattgatgcctctagcgttccctaattagcatttaatttgcttaacagtgagccagcccccgcttcaattagcatatatttgcatggagcacaccactttccctaattagcatgtttatttgcatg

SEQ ID NO: 11914 - DNA, 633 bp, Homo sapiens
ctgtctcggggtcgttcgctcaccaaggcgcagcgtgacgtcatcgaggactgcctcatgtcgctctgcaggtggagcggggcaggcttcagggtggggcaggggcaggggcaggggcaggggcaggggcaggggcaggggcaggggcaggggsaggagcaggggcaggggcagcagagcgggcctggacgggggattctacatcttgtgcattgtcccgcaggtacatccgcccgtcgatgctgcagcacctgttgcgccgcctggtgttcgacgtgcccatcctcaacgagttcgccaagatgccactcaaggtgagggcaagcgctctttagcatctcatttccaggccgcacccactggtttgctcttccctcctactgcggggctcatttgtgtcggcactgcccagcccaataaacctgcactagttagggcagcgtccccgtagaaatctcttagcatccttatttgcatactaggattcccagaacattcactttgcttcattgatgcctctagcgttccctaattagcatttaatttgcttaacagtgagccagcccccgcttcaattagcatatatttgcatggagcacaccactttccctaattagcatgtttatttgcatg

SEQ ID NO: 11915 - DNA, 633 bp, Homo sapiens
ctgtctcggggtcgttcgctcaccaaggcgcagcgtgacgtcatcgaggactgcctcatgtcgctctgcaggtggagcggggcaggcttcagggtggggcaggggcaggggcaggggcaggggcaggggcaggggcaggggcaggggcagggggaggrgcaggggcaggggcagcagagcgggcctggacgggggattctacatcttgtgcattgtcccgcaggtacatccgcccgtcgatgctgcagcacctgttgcgccgcctggtgttcgacgtgcccatcctcaacgagttcgccaagatgccactcaaggtgagggcaagcgctctttagcatctcatttccaggccgcacccactggtttgctcttccctcctactgcggggctcatttgtgtcggcactgcccagcccaataaacctgcactagttagggcagcgtccccgtagaaatctcttagcatccttatttgcatactaggattcccagaacattcactttgcttcattgatgcctctagcgttccctaattagcatttaatttgcttaacagtgagccagcccccgcttcaattagcatatatttgcatggagcacaccactttccctaattagcatgtttatttgcatg

SEQ ID NO: 11916 - DNA, 633 bp, Homo sapiens
ctgtctcggggtcgttcgctcaccaaggcgcagcgtgacgtcatcgaggactgcctcatgtcgctctgcaggtggagcggggcaggcttcagggtggggcaggggcaggggcaggggcaggggcaggggcaggggcaggggcaggggcagggggaggagcaggggcaggggcagcagagcgggcctggacgggggattctacatcttgtgcattgtcccgcaggtacatccgcccgtcgatgctgcagcacctgttgcgycgcctggtgttcgacgtgcccatcctcaacgagttcgccaagatgccactcaaggtgagggcaagcgctctttagcatctcatttccaggccgcacccactggtttgctcttccctcctactgcggggctcatttgtgtcggcactgcccagcccaataaacctgcactagttagggcagcgtccccgtagaaatctcttagcatccttatttgcatactaggattcccagaacattcactttgcttcattgatgcctctagcgttccctaattagcatttaatttgcttaacagtgagccagcccccgcttcaattagcatatatttgcatggagcacaccactttccctaattagcatgtttatttgcatg

SEQ ID NO: 11917 - DNA, 633 bp, Homo sapiens
ctgtctcggggtcgttcgctcaccaaggcgcagcgtgacgtcatcgaggactgcctcatgtcgctctgcaggtggagcggggcaggcttcagggtggggcaggggcaggggcaggggcaggggcaggggcaggggcaggggcaggggcagggggaggagcaggggcaggggcagcagagcgggcctggacgggggattctacatcttgtgcattgtcccgcaggtacatccgcccgtcgatgctgcagcacctgttgcgccgcctggtgttcgacgtgcccatcctcaacgagttcgccaagatgccactcaaggtgagggcaagcgctctttagcatctcrtttccaggccgcacccactggtttgctcttccctcctactgcggggctcatttgtgtcggcactgcccagcccaataaacctgcactagttagggcagcgtccccgtagaaatctcttagcatccttatttgcatactaggattcccagaacattcactttgcttcattgatgcctctagcgttccctaattagcatttaatttgcttaacagtgagccagcccccgcttcaattagcatatatttgcatggagcacaccactttccctaattagcatgtttatttgcatg

SEQ ID NO: 11918 - DNA, 526 bp, Homo sapiens
aacccaagaggcagaggttgcaggggctgatatcttaccactgcactccagcctgggcgacagagcaaaactctgtctaaaaaaaaaaawtatgagagtcgccgcaaaaatatcaaataatttaattaaagagtgattcaagaattgttgagcacccagctatagtttgtactttatggtccatggtaggggcttgaaggaaagacatttataaggtgcatgatgaagaaaaccatattcaatcgttggttaggtatagttacgtagtttcttattttgtacaatcgaggtggaaatgtcctagttatgattcagagcttaattggcagtttatagttgtgtaagcttgaattttatttcccttaatatagtaatttaacaaaaagtgcaattaattattttcacacctcacagggaactgatttttccctggcatttttcacatgtgtcccaagcagggcctcaagtgtaccccatgttcctcaattaatcattctttaaaaagcatggcataacactattgaaa

SEQ ID NO: 11919 - DNA, 526 bp, Homo sapiens
aacccaagaggcagaggttgcaggggctgatatcttaccactgcactccagcctgggcgacagagcaaaactctgtctaaaaaaaaaaaatatgagagtcgccgcaaaaatatcaaataatttaattaaagagtgattcaagaattgttgagcacccagctatagtttgtactttatggtccatggtaggggcttgaaggaaagacatttataaggtgcatgatgaagaaaaccatattcaatcgttggttaggtatagttacgtagtttcttattttgtacaatcgaggtggaaatgtcctagttatgattcagagcttaattggcagtttatagttgtgtaagcttgaattttatttcccttaatatagtaatttaacaaaaagtgcaattaattattttcacacctcacagggractgatttttccctggcatttttcacatgtgtcccaagcagggcctcaagtgtaccccatgttcctcaattaatcattctttaaaaagcatggcataacactattgaaa

SEQ ID NO: 11920 - DNA, 526 bp, Homo sapiens
aacccaagaggcagaggttgcaggggctgatatcttaccactgcactccagcctgggcgacagagcaaaactctgtctaaaaaaaaaaaatatgagagtcgccgcaaaaatatcaaataatttaattaaagagtgattcaagaattgttgagcacccagctatagtttgtactttatggtccatggtaggggcttgaaggaaagacatttataaggtgcatgatgaagaaaaccatattcaatcgttggttaggtatagttacgtagtttcttattttgtacaatcgaggtggaaatgtcctagttatgattcagagcttaattggcagtttatagttgtgtaagcttgaattttatttcccttaatatagtaatttaacaaaaagtgcaattaattattttcacacctcacagggaactgatttttccctggcatttttcacatgtgtcccaagcagggcctcaagtgtaccccatgttmctcaattaatcattctttaaaaagcatggcataacactattgaaa

SEQ ID NO: 11921 - DNA, 526 bp, Homo sapiens
aacccaagaggcagaggttgcaggggctgatatcttaccactgcactccagcctgggcgacagagcaaaactctgtctaaaaaaaaaaaatatgagagtcgccgcaaaaatatcaaataatttaattaaagagtgattcaagaattgttgagcacccagctatagtttgtactttatggtccatggtaggggcttgaaggaaagacatttataaggtgcatgatgaagaaaaccatattcaatcgttggttaggtatagttacgtagtttcttattttgtacaatcgaggtggaaatgtcctagttatgattcagagcttaattggcagtttatagttgtgtaagcttgaattttatttcccttaatatagtaatttaacaaaaagtgcaattaattattttcacacctcacagggaactgatttttccctggcatttttcacatgtgtcccaagcagggcctcaagtgtaccccatgttcctcaattaatcattctttaaaaagcatggcataacactattraaa

SEQ ID NO: 11922 - DNA, 559 bp, Homo sapiens
tggaagtgcctaatttagcttcacccctattcttgggcttgtcagttgttttctaagtttcccctcattataaaggatgtgttgattaatatccttatgcgaaagtctttccccgacatgtcagataattttctttggaaaaacttccaataagtagaattgctgggtgagagggaacacacattttatacctatttgatacttattttttatttggcccccccaaaagcttgcacctatttatattaataacacagtgttcacaggactacatatttctagggatgtgttacaaatccattataccagccttttcctttgcaggacaccacaaagagttcttgaacattgcattgcatctgctgacttatatcacacaaggatatcatgaccactattcaattctgcacactcacccaaaaatctgtcatcagaagaaagattaaatwaagagagtcagtcaatgtagtctcttacacacccaaggttgcctaagaagagtctagagaagtaaaccagagcaaagcagagcagaaaagatttcctttgaattgaaatg

SEQ ID NO: 11923 - DNA, 500 bp, Homo sapiens
tgggtgacagagtgagactctgtctccaaaaaaggaaaaaaaagaaacaggacaatttcaatcacctcccttctgtgcctggccccagggtcttgggtacycaacacttgtcactcagctcagttagtcctcactaggtttagagaggagaggaccaagccacagggagtggtgcagctgctaaaacctaggtcctcctctctcaggtctgcacccacaaggccagcatttccctatacacattcaacatcatagcatagcgcttcatatgtcccagacatgtgccaaacatggtaggttagttaggtaatttagtccccatgcccgccctgtgagttagggctctgttttacagatggggaaacagaggcacagattagtcaagccatttaccccaggtcacacagcaatactaacaataagagcagttcactattatggagaacctagaatgtgccaggccctgtctggcaggagcctgttgaatcctgataacagca

SEQ ID NO: 11924 - DNA, 646 bp, Homo sapiens
ccgcacagacaagtccaggggttcatactgagatttctcggacttcctctgggaggacttgccactgggtttctcctcaccaccatccactccgtggactttcatggaaggggggtcagccagggctttgtccttcatgtccttctccttcttcaaggaactgaggacaaaactgtccatgaaagcttgcaaggacccttggaaattcacaccgttgctcacaatgctttgataagctcttccgatctcagagaagtgggtgcttttggaaggaaggtcagtgcctttcagagcatctgaggggacctccgaagacatgcccgtggcctgccccgagtgatctccagaggagagaacccctgatgtccactgctgagatgcagggcctcctctgaagtcgattccagggagacccttgaaggcccccctcaggatgtctggcctgatgaacagagaagctttgcttgacatctcrtccttgtggtcttgatttgggggttgcccagacagcggcccagccccgttctgccgctcccgatggtgtcgctctaagtggtattttaaggatgctgactgcgtgccggcatagtcacagtgcggacacttgtagggtttctcacctgcaagattttgatataagaaaaaa

SEQ ID NO: 11925 - DNA, 501 bp, Homo sapiens
tagaggtagagaatggatcactcagggccaaggaactcagtcagaactcccctgagatgcgactgcattctcatggcaacggcaacccttcctctgattctgctgcaagaattctcccagatgctagcccccatggtgtccagaggctggatagcccctttgggaggctgcagggatgctgagacccattccaacatcaacatgatgattcattccggcatcaacartgtcccctggccagacgtccccagacaggtgccaggacatagtgctacaaagagtacgtactaaacccagaagagacctggcagtttcatttgtctttctgccaatccttggaacaagctaagatgggatttttaaaaagtccagtcaactaaaggcttggatagattgggaggttctgatttttaaaagtttttaaattgtgaaatatgttctgtcttaaaaggtatgtaatatttttatagtttaaaataataaaatgagcagtcgtgaacc

SEQ ID NO: 11926 - DNA, 501 bp, Homo sapiens
tagaggtagagaatggatcactcagggccaaggaactcagtcagaactcccctgagatgcgactgcattctcatggcaacggcaacccttcctctgattctgctgcaagaattctcccagatgctagcccccatggtgtccagaggctggatagcccctttgggaggctgcagggatgctgagacccattccaacatcaacatgatgattcattccggcatcaacagtgtcccctggccagacgtccccagacaggtgccaggacatagtgctacaaagagtacgtactaaacccagaagagacctggcagtttcatttgtctttctgccaatccttggaacaagctaagatgggrtttttaaaaagtccagtcaactaaaggcttggatagattgggaggttctgatttttaaaagtttttaaattgtgaaatatgttctgtcttaaaaggtatgtaatatttttatagtttaaaataataaaatgagcagtcgtgaacc

SEQ ID NO: 11927 - DNA, 553 bp, Homo sapiens
tattcctagtttacagaagcacttcatcgccagtcagagttaatcatggggtgcaaaggagacccgctgccttcacaaagtctccgagaaaataaatgcatgagaaaataaacccaaactttctgaaaccaaccccccgcatgccagctccgaaaccccacagccatcgccgctggacactcacctycttcccggcttctgcctccgaccttctcggtctgggatgcgctctccaaccggcctggagctgaactgcgtctatttatggagaagcgggactccaggccgcgtttccggttccctgcgccgcgccgtgattggtttagggccacagagtccattttcgtaatcggcgttgattacatttcccactgaaaccccacccacaggaaattaatgtattaaacgtgcctactgtgcaaataatacaggttttcccgctctactgagttgtcatattgctgaagtatgtggaggcctcagaaaatatagatctgcaagttttaaccactttgggtcccctcatgccacagacagtaatatcctaacaagt

SEQ ID NO: 11928 - DNA, 548 bp, Homo sapiens
aaactttgggcggctgaccccaactctcctcacgcacagccaatctccttccaattctttcatcagcgttgggactgtcagctcaaacctgacaagtgacaagtctcgggctcatgctgactagataatcaaagtcttgtcagggctgtcaataccctgcagataggagaggacaaagggaggaaaggtttctacagaaaccgctgccttcacacaaacgctgtcgaagcctcttacccaaatcacctgtttgtccctaaacgtcatttactgctgaatctatgggctcaaaagcacaaaccctgaaaatgaaataatagcctgatattatacatagaaaatgcaaatttttctattttgtggacgattatcttgtaatataccatctaagaaatgcatacgtgtattttttggtaacaatcrcagtaacttggtggaagagattttttccagtaaaaaaaaaaatacataaaaaatctaaactgaaatatgccaattatgtagcatagacttacctgtgttgcatctttctggtaacacaagtaaat

SEQ ID NO: 11929 - DNA, 633 bp, Homo sapiens
atgagctaagctttgacacatgattctagaactcctttcccctctgaggcacagattgcaaaataacttctagtcctggggtaggctgaccccttattccagctgcaggtagactctgactcctgtcccgtctcaccactcggcccaggcagaccccccagtgcagtcctgaggcaagtacagcagtggtccaaagtgacaccagagacctgtgccatggccaccycgcatctgtctacaaaggatgccacctttccatgattcctggaaaccttcctttccatatcctttagatgcacatttctcttttaagctcatgatgtgctgagcttgtcccaagtgggttctagacccaactcaatggctctgtgaccttgggcaggtcccctcatgcttcccggtcccagtcacctcccctgtgagaaggggatgaccttcaggctctttgtctttgggacattgttgtggacttcaagggttagccaaagtgaaagctctctgtaaattgcaatgtgcttcaggcatgaagcgtccacacataatgacttgaattaagtgttctttttatttctttttacaaatataaacccaggcgagcataagccaggcagggggtgcaaagccggagtatgc

SEQ ID NO: 11930 - DNA, 534 bp, Homo sapiens
ccacaggccccttgccgcargaccagcagggaaagcttcattcatgagggcccctgacaccccagacccaccgggttggagtttctaggagcgaagatggaatctgtactgttcacaaaccccaccccctcattccgaagtacattctagtttcaggacttctgccttggaatgtggaactttgacttcctccccattctcccatcattcaattgagaaacatggtggggggatcattcattaatcctgattctgaccaatttcccaattgtgaaaactaagatcctggaaggtgaaggagtttaaactcatgacagagggcgggcatggtaatcccagcactttgggaggcttaggcaggaggatcacttgaaatcaagagttcaaaaccagcctgggcaacacggtaacgtggtctctactaaaaatacaaaaactagtcaggcatggtggtgcacatccgtaatcccagccactagggaggctgaggcatgagaattgcttgaagccgggaggcagaggttgcagggagca

SEQ ID NO: 11931 - DNA, 534 bp, Homo sapiens
ccacaggccccttgccgcaagaccagcagggaaagcttcattcatgagggcccctgacaccccagacccaccgggttggagtttctaggagcgaagatggaatctgtactgttcacaaaccccaccccctcattccgaagtacattctagtttcaggacttctgccttggaatktggaactttgacttcctccccattctcccatcattcaattgagaaacatggtggggggatcattcattaatcctgattctgaccaatttcccaattgtgaaaactaagatcctggaaggtgaaggagtttaaactcatgacagagggcgggcatggtaatcccagcactttgggaggcttaggcaggaggatcacttgaaatcaagagttcaaaaccagcctgggcaacacggtaacgtggtctctactaaaaatacaaaaactagtcaggcatggtggtgcacatccgtaatcccagccactagggaggctgaggcatgagaattgcttgaagccgggaggcagaggttgcagggagca

SEQ ID NO: 11932 - DNA, 562 bp, Homo sapiens
tctgcgtgtctctgagccatggagcccactgtggctgacgtacacctcgtgcccaggacaaccaaggaagtccccgctctggatgccgcgtgctgtcgagcggccagcattggcgtggtggccaccagccttgtcgtcctcaccctgggagtccttttgggtaagtggctatgggattggctgggttcgcaatacaagggacatgtgcaaagtcaccgggaagtgacttgatggtgtctccttggccatctggaatcaaagggcagtgtctaggcgtggagatgaaggctgccctaggccaggcgggtgggcggggagtggagcagatgagttcctacgtgtgtcagttttcccgactaaagaagctcccgaaggaagttttcacagctggggtgacagagaaacagagacagggaaatgaccttgttttaaattttggcaaatcagcaaaatacccaaagtagtttttttttttgtttttttttttttytgagacggagtctctctctgtcgcccaggctggagtgcagtggtgtgatatctcggctcactgcaagctcca

SEQ ID NO: 11933 - DNA, 490 bp, Homo sapiens
tcctgcccgctgtgctgctgctggtggcgccgccgctgcctgccgccgacgccgcgcacgagttcaccgtgtaccgcatgcagcagtacgacctgcagggccagccctacggtgcgtgtccccggcccaccctcggggctccccgggctccccggccacgccactccggcccggcgatccccaggccgatccctagctccggcctgggctgcccgacccatgctcaggccccaggcgaggcagagccctgccgccctggacccccgggcgccctggaatccctgctctccttgcctagcgcccagggaccccccgcgctcgctcccacagcccccggcccctgcctaggtctccctgccccggaacccatggccgggccaagcgtcccgcgyccctggagccctaagtcccctctctcctgtccccagctgggccggcgtctgcctgccttgccgagtttctccctcctgggccccctccgccccttagg

SEQ ID NO: 11934 - DNA, 602 bp, Homo sapiens
cagctgacaatgactgcccagggccaatacccagctgtcccagagcaccctccaggacctagctcactacccctaaaaccaaagatccacaatctgagggcctatgtcaccctccagtcgtcattcagctgccactgctacgacaccgctcctgcccgccctttakctgagtgccccagacgtctgcatcatgacaccctgccctgtttcccccacgaggctctaagaccccggaaggcaggaatctccctcacaaccagacacccctggggctcagcactggtcgagcagggaaggcactccaacagttgtcaaacagatgaactgtcctcagcccttggtatccagttaatccctacccaatcttcctgcagtgtctctggcacctgtccctgctttttattccgtcaggcaaatccaaggccatattagctcatgcctgccttttatcaatggcctttcttctgcccaattcaagtcgatattgtcatgctcagaaacctctgagggctctccatattttgagagtgaagtatgaacagtctcctgtttcaggacatcaacaataaccacagcaacctgtgctttcgcccttagttccc

SEQ ID NO: 11935 - DNA, 602 bp, Homo sapiens
cagctgacaatgactgcccagggccaatacccagctgtcccagagcaccctccaggacctagctcactacccctaaaaccaaagatccacaatctgagggcctatgtcaccctccagtcgtcattcagctgccactgctacgacaccgctcctgcccgccctttatctgagtgccccagaygtctgcatcatgacaccctgccctgtttcccccacgaggctctaagaccccggaaggcaggaatctccctcacaaccagacacccctggggctcagcactggtcgagcagggaaggcactccaacagttgtcaaacagatgaactgtcctcagcccttggtatccagttaatccctacccaatcttcctgcagtgtctctggcacctgtccctgctttttattccgtcaggcaaatccaaggccatattagctcatgcctgccttttatcaatggcctttcttctgcccaattcaagtcgatattgtcatgctcagaaacctctgagggctctccatattttgagagtgaagtatgaacagtctcctgtttcaggacatcaacaataaccacagcaacctgtgctttcgcccttagttccc

SEQ ID NO: 11936 - DNA, 1165 bp, Homo sapiens
gtgctggggtgactggggacgggcctgttttcggggtgctggggtgactggggacgggcctgttttcggggtgctggggtgactggggacgggcctgttttcggggtgctggggtgacatgtcacggtggtggttgcccagctctgtgcaggtaccaaaggcccctgaatcgcagtttacagggagactcatctgctatgtgagttgtaacttgataaaagctgttactaaaaaagaagatcctgggatgctgttcaaggcccagccccaggagccacgcggggaggacggccgcccacccctgccagcctgcagacccggccaccgctccagtcctggccaacgccgccccctcctgggagaagccttgggatccacaacctccctttttaaaacagggaagggccgggcgcggtggctcacgcctgtaatcccagcactttgggaggccgaggtgggcagatcacaaggtcaagagttggagaccagcctgacaaacatggagaaaccccttctctactaaaaataccaaaagttagcctggcgtggtggcgggcgcctgtagacccagttactcgggaggctgagggaaacaggtttgtcggaagccccacagccagcatggacagaggtgggctgggactcaggcgggctctgagcgtttcttcattatgatttattggtccctccctgtccctcccacccgtcctcacccaccccactgcacccctggaggggaagggtcctgtggagacagcgagggggtccccatcaccccagggcatcaggccgatcggccggtgaccttcctgatccaggacacgtaaggcgccacagcggtggccacgggaggcttgaagatgtcagtgcagaccctggagctgaaggacaggactcyggccaacacccggcctttgccacacaccaggggcccgcccgagtcaccctgcagggacgacacaccgcagctcagcctctgcacctgctgaggggacgaggggagcagggcccgccgaggggagcagggccaggcctgttatccccaggctcaaggagacacaggggctgctcccggcccacgcgtgtcccctccccatctcccgctggccctgtgaaccctgctccttcttcccccgccggaccgtcttggctggagcagaagtca

SEQ ID NO: 11937 - DNA, 1165 bp, Homo sapiens
gtgctggggtgactggggacgggcctgttttcggggtgctggggtgactggggacgggcctgttttcggggtgctggggtgactggggacgggcctgttttcggggtgctggggtgacatgtcacggtggtggttgcccagctctgtgcaggtaccaaaggcccctgaatcgcagtttacagggagactcatctgctatgtgagttgtaacttgataaaagctgttactaaaaaagaagatcctgggatgctgttcaaggcccagccccaggagccacgcggggaggacggccgcccacccctgccagcctgcagacccggccaccgctccagtcctggccaacgccgccccctcctgggagaagccttgggatccacaacctccctttttaaaacagggaagggccgggcgcggtggctcacgcctgtaatcccagcactttgggaggccgaggtgggcagatcacaaggtcaagagttggagaccagcctgacaaacatggagaaaccccttctctactaaaaataccaaaagttagcctggcgtggtggcgggcgcctgtagacccagttactcgggaggctgagggaaacaggtttgtcggaagccccacagccagcatggacagaggtgggctgggactcaggcgggctctgagcgtttcttcattatgatttattggtccctccctgtccctcccacccgtcctcacccaccccactgcacccctggaggggaagggtcctgtggagacagcgagggggtccccatcaccccagggcatcaggccgatcggccggtgaccttcctgatccaggacacgtaaggcgccacagcggtggccacgggaggcttgaagatgtcagtgcagaccctggagctgaaggacaggactctggccaacacccggcctttgccacacaccaggggcccgcccgagtcaccctgcagggacgacacaccgcagctcagcctctgcrcctgctgaggggacgaggggagcagggcccgccgaggggagcagggccaggcctgttatccccaggctcaaggagacacaggggctgctcccggcccacgcgtgtcccctccccatctcccgctggccctgtgaaccctgctccttcttcccccgccggaccgtcttggctggagcagaagtca

SEQ ID NO: 11938 - DNA, 1165 bp, Homo sapiens
gtgctggggtgactggggacgggcctgttttcggggtgctggggtgactggggacgggcctgttttcggggtgctggggtgactggggacgggcctgttttcggggtgctggggtgacatgtcacggtggtggttgcccagctctgtgcaggtaccaaaggcccctgaatcgcagtttacagggagactcatctgctatgtgagttgtaacttgataaaagctgttactaaaaaagaagatcctgggatgctgttcaaggcccagccccaggagccacgcggggaggacggccgcccacccctgccagcctgcagacccggccaccgctccagtcctggccaacgccgccccctcctgggagaagccttgggatccacaacctccctttttaaaacagggaagggccgggcgcggtggctcacgcctgtaatcccagcactttgggaggccgaggtgggcagatcacaaggtcaagagttggagaccagcctgacaaacatggagaaaccccttctctactaaaaataccaaaagttagcctggcgtggtggcgggcgcctgtagacccagttactcgggaggctgagggaaacaggtttgtcggaagccccacagccagcatggacagaggtgggctgggactcaggcgggctctgagcgtttcttcattatgatttattggtccctccctgtccctcccacccgtcctcacccaccccactgcacccctggaggggaagggtcctgtggagacagcgagggggtccccatcaccccagggcatcaggccgatcggccggtgaccttcctgatccaggacacgtaaggcgccacagcggtggccacgggaggcttgaagatgtcagtgcagaccctggagctgaaggacaggactctggccaacacccggcctttgccacacaccaggggcccgcccgagtcaccctgcagggacgacacaccgcagctcagcctctgcacctgctgaggggacgaggggagcagggcccgccgaggggagcagggccaggcctgttatccccaggctcaaggagacacaggggctgctcccggcccacgcgygtcccctccccatctcccgctggccctgtgaaccctgctccttcttcccccgccggaccgtcttggctggagcagaagtca

SEQ ID NO: 11939 - DNA, 1225 bp, Homo sapiens
aatatgccagagaacaacgaggccagtcgctcactgactatggaagatgagtccattatttaatcactctggccttcggyttttcagctctaaaaatgagaatattcctttcctcaatgattattgttatgattcccggagataacgtgcatgaaagattttagtgcaggcctttcttccttccgttgacaacccagaatgttgcttgatgcacaggggaaatagagtgatcaagaagagcctttataaatgagagttgatgttgagtaatcattttgggtattatcaatacccatggccataacacccccaccatgtggaacaacacagggaacacgacttcttactcaagctacaacaggagaattcttccttggatctctcttacacagacaacattgtctgtttttcatcaaaatgctagaaatgagagctcaacatttgtaagctcttgcttcgttcaataaagattgtgtatgggaaatccactgcttctctcccttcgtagatgtaggaatctgcctcagacattgtacaaatgggcagagaggggaatggaactgagtcttacccattacgtttaggatttcagggctgcaggtcatctgtttacctaagatggagaggccaagtcctctctcatggtagctttgaagctggtgtcagggaaaggtcagtgcctgtgaacagtgatggaaggtgtgtaaaggaggaggcagggtttagcacaaggggtaactaaatcttaacttctgggatactgggtggtggtggggttactatttccaatttatagcaagatgtaagtgatatcagctggaggacaactttactggtctatgtgggtgtattagtcggttctcaagctgctaataaagacatacctgaggcagggtagttaataaaggcaagtggtttaatggacttacagttccacatggctggggaggcctcacaatcatggcagaaggtgaaggaggagcaaagtcacatcttgcatggtgacaggcaagagagagcatgtgcaggggaactcccatgtataaaaccatcagatgtcgtgagacttattcactatcacaagaacagcatgggaaaaccctgcccccgagattcagttacctcccacccacttcctcccatgacatgtggggattattacaattcaagatgaaatgtggctggggacacagagccaagccatatcagtgggatagatatcatt

SEQ ID NO: 11940 - DNA, 550 bp, Homo sapiens
tgccctactagcaatgtttacaacagttttcgtggtcagacctcaaagatgaccattttcactttatattcgccaatataagctttagacttcttcggtacatggtccaacatgtttgcataaaataagttatttttttgtatatagtcttagacttttaaaaatatgcttcattgcctttctagaatgtcattgaagtagagggaaagtggtaggatccaaagacgcatcaagtgaacagcacagggtgttgaatgaaaatttaaattgactcaaaaactcattttcaatgttctgcccttttctttagaaagaaatgaaaagagaacaaagggttgtttgttgactaagtgccaaaaacttctgtcacaaatttcatgaactccaaatgattgttggcagacttgacctgcctatgaaaacacgctgaaagcatcatcaccatttcactacttgtttttagacacccatgtctctgggttatgcttccattccagggacaaggacacrtctgagcatttcacagtacgaatctggtgaaatactccag

SEQ ID NO: 11941 - DNA, 511 bp, Homo sapiens
atacacatatagtatttgaaatggtttctggcatatggtcaagggttaaaaactacaaaagtgatcctatgaatatgacttgcctctatgcatcatggtttttccaactacaaaataagagcttgaataagacaaattttgaatgtaattttcagtcttcaaatcttgactatttttgtttacactcgctgaaaatacttgaaatcagtagaaaaaaagtgtattcattcatttattcattcattcaatacacatttatcttgtccctactatattctaggtggtgtactagatgctgataatactatgatcaaagcctatccctgacttctaggagcggatctagaaaaatagcataaggtaattgtcaagagctcagcctctagaatcacgctctctgaattttagggttttatgacgttggacaatttccttaattctcagtgccccaacttcctctcctttgaaatgggaatgatagttacaatcccgtaaatttatygtaaggatc

SEQ ID NO: 11942 - DNA, 664 bp, Homo sapiens
ggaaaatgtttccagtatgaatagttgacttgctggttctgagacccaaatggttcttttgaccaccttccccggtctccccagtccctacttaaggttagaagaaagcagagctgccaacttggatatagcttccatgatttggaagctgtaaaagaagtgatccttgaaaaccatttcaacaacaaagttctgttcatgaaacagctggtatttttgtgagttatcacagacttgtgacttatrtaaggatggaaattaaacacacacacacacacacacacaagcaacatttttgaggggaaaaaatcccctcatgttaccctaagaaaagggaaatatttgtatgagtcaaaagcatctggctttgttttattggagcctaacattttccagttcttaccattttcatattgcttgccctaggcctttcaggtatccttggcacattggccttggggacattttcagaaggagaaagacatgagaaacaaataaatacatatatgcatatttcctctaggaatgatggttttgtagtagtcttgtgctaacttaaaaagcaaagtaatgacatgttccttctacgggtaactcatgtcattactgaagaaattgaaagcaagtgacaaaaattaccaattgggccattaaatagtcattt

SEQ ID NO: 11943 - DNA, 553 bp, Homo sapiens
gatggtttaaaaacaagagtttctctgcacaagctctgtttttgcctgctgtcatccacgtaagatgtgccttgctcctccttgccttccgccatgattgtgaggcctccccagccatgtggaactgtaagtccagatggctggacttcttttgtaaattgcccagtctcaggtatggtctttatcagcagcgtgaaaatggactaatacacttacagatcaaaygatgcccgaattcctcttcagtcgatagaatgtctttgacctacataaaatgttaagcttcaagatttgtcttttgattgtaaaaatggggacattttatatatgccatataatcaaaaatagatgttcaaattattacctgaatgctaagcattaaatggttttatatacagcatgagaatatgagttttatctcatttggtcctaccacagctccatgcagaaggttatgttgttaacctcacttctagtgcttagaaaagtatgaaagcactgaggtttggagagggtaagcaacttgtctaacatcacccagctactaagcagc

SEQ ID NO: 11944 - DNA, 1263 bp, Homo sapiens
gagcagagcagcctgctaggaacacataatagattttatgatatttcttttcctttttttttttttttttagatgtagtctcactctgtcacacaggctggagagcagtggcatgatctcggctcactgcaatctccacctcccgggttaaagcaatcctcctgcctcagcctcccaagtagctgggattacaggtgcccaccattatgcctggctaattttttgtatttttagtagagacagggcttcaccatattggtcaagctggtcttgaactcctgacctcaggtgatccacctgcctcggcctcccaaagtgctgggattacaggcgtgagccaccacacccggaccaattttatgatatttctaaagaaaccttgttctggcaagaagagtactaatatttatttgtatgtctaatttatgtacctgtgacttttagtcatggtattactgaatttccttcgggtgcatatccgcaactaggcttggaatacataagacttttttccttaaggaatactatttaatagatgagaaaaacatgatgaacacaaatacaaatatagtatataaagacaagagcagataaatcatttttccaaaagccgaagaaaaagagtggctaatatccaaaaaagctttagttgagtaggaagaccagaaactgagatttaatggcagggatgatgtgacaggctgagcagggagaagaaaactgtggcagagataactgttttttctccaggatccagtctcccctcttccctttgttataaaactctcaggcttagctgggtatgtggccacctggagtcaagactacacttcccggactccatttcttccaggtatgggcctgtgcttaagttttagctgatagaatgtaaatgaaaacattgtgtgccattttctagaaatgtccttagtgagagtggcctgccttttctctacccttcctgccccttgctggctggaatgctgacaaaggggcaacagcaagaagagttttcttgaaatttgggatagaaattatgtgctgagggtggtrgagcagccagaccaaaggagccttagtctctgacaccatgcagtggcatccgcacctgaaataagtaccctcagatttcatttccataacagagaaatgaatgcctatcctgttgaagccctgctttggggattttctaccaagtgaaatagcatctactcataatagacacgtaacttaatggcaaaatcaactgcttaatagaaaatc

SEQ ID NO: 11945 - DNA, 1068 bp, Homo sapiens
gtaaagttgcctgggtttctaaacctttttcccaaatgttcttatagagttctttaaagtagcaactttttagacatctagtaayactttttaattccgtgaagaacaatgataaccaaaatattttctatgatatatggaagtatataattaaatcagaaaccttatcaaaggctggctatttctgttcaccatcagacttgaaaactaggaatttatttttggttgactttgtattttttttcttatgtgtcataagtgtgattatcaaggtagtaaaagaacatcttttcatcacaccagaactgtaaaatatgagacgtatttatctggctagccatttggacaattctttatatacatgtgattaaatccactttcatattctatacatatgacccttccctcttcctttctgagtttgtttctttttgaacatggtttatcctccactgcaaagtttatgtatctggtgtttcttaaaaaaaaatagtcctgtcatagtgcaggcatacatagtgcaggcatatttgttttctcctctttctgaaaatagaaattcaaagacaatttcaagaaagcaggtaagctgtcaattctctgaatagctaaggcactattcttaatgacttcccaatagtaagcactactaactattgctaagcccagtttatgctcctcccaaatcttcccattctcatacacaagatgatttgaggtgctattgaatcagtccatacaacttggacgagaagcataggacaagtgcaagagacagcagggtttagaagttctatgacttgatttgtctgtctttccactctccagctaagactccagagcctcccgtgattcctacctcccccaatcctctcaaagtaaagtgagaggaaaaagccatggggactgctggcagtcatcctcactattcccaaggtaagagccatatttgcagccccttattttgaattctacagaaatcagcttgacctacagtgaccctaaataaggttaagctttctgactatttttcaaatgaaagggctagctgtaaattctagattttag

SEQ ID NO: 11946 - DNA, 1068 bp, Homo sapiens
gtaaagttgcctgggtttctaaacctttttcccaaatgttcttatagagttctttaaagtagcaactttttagacatctagtaacrctttttaattccgtgaagaacaatgataaccaaaatattttctatgatatatggaagtatataattaaatcagaaaccttatcaaaggctggctatttctgttcaccatcagacttgaaaactaggaatttatttttggttgactttgtattttttttcttatgtgtcataagtgtgattatcaaggtagtaaaagaacatcttttcatcacaccagaactgtaaaatatgagacgtatttatctggctagccatttggacaattctttatatacatgtgattaaatccactttcatattctatacatatgacccttccctcttcctttctgagtttgtttctttttgaacatggtttatcctccactgcaaagtttatgtatctggtgtttcttaaaaaaaaatagtcctgtcatagtgcaggcatacatagtgcaggcatatttgttttctcctctttctgaaaatagaaattcaaagacaatttcaagaaagcaggtaagctgtcaattctctgaatagctaaggcactattcttaatgacttcccaatagtaagcactactaactattgctaagcccagtttatgctcctcccaaatcttcccattctcatacacaagatgatttgaggtgctattgaatcagtccatacaacttggacgagaagcataggacaagtgcaagagacagcagggtttagaagttctatgacttgatttgtctgtctttccactctccagctaagactccagagcctcccgtgattcctacctcccccaatcctctcaaagtaaagtgagaggaaaaagccatggggactgctggcagtcatcctcactattcccaaggtaagagccatatttgcagccccttattttgaattctacagaaatcagcttgacctacagtgaccctaaataaggttaagctttctgactatttttcaaatgaaagggctagctgtaaattctagattttag

SEQ ID NO: 11947 - DNA, 1068 bp, Homo sapiens
gtaaagttgcctgggtttctaaacctttttcccaaatgttcttatagagttctttaaagtagcaactttttagacatctagtaacactttttaattccgtgaagaacaatgataaccaaaatattttctatgatatatggaagtatataattaaatcagaaaccttatcaaaggctggctatttctgttcaccatcagacttgaaaactaggaatttatttttggttgactttgtattttttttcttatgtgtcataagtgtgattatcaaggtagtaaaagaacatcttttcatcacaccagaactgtaaaatatgagacgtatttatctggctagccatttggacaattctttatatacatgtgattaaatccactttcatattctatacatatgacccttccctcttcctttctgagtttgtttctttttgaacatggtttatcctccactgcaaagtttatgtatctggtgtttcttaaaaaaaaatagtcctgtcatagtgcaggcatacatagtgcaggcatatttgttttctcctctttctgaaaatagaaattcaaagacaatttcaagaaagcaggtaagctgtcaattctctgaatagctaaggcactattcttaatgacttcccaatagtaagcactactaactattgctaagcccagtttatgctcctcccaaatcttcccattctcatacacaagatgatttgaggtgctattgaatcagtccatacaacttggacgagaagcataggacaagtgcaagagacagcagggtttagaagttctatgacttgatttgtctgtctttccactctccagctaagactccagagcctcccgtgattcctacctcccccaatcctctcaaagtaaagtgagaggaaaaagccatggggactgctggcagtcatcctcacyattcccaaggtaagagccatatttgcagccccttattttgaattctacagaaatcagcttgacctacagtgaccctaaataaggttaagctttctgactatttttcaaatgaaagggctagctgtaaattctagattttag

SEQ ID NO: 11948 - DNA, 514 bp, Homo sapiens
ggataccctgaaataagaggaaattttaatgctgaaatctttttaatagaaaaattaacaaacatgcttcaaagttttatgctaagaagatagggagcacaaacaacattgccattttattaaatgttattttataaaagtgcctaaagttgcaacattttaaaataaaatcakatcatggtatagttagaaaacacaatttaaaacaaaaacaaaaactaatggtgtagggtccagccctacaggacttagcaggtattctccccgcttgcggagacaagagattgtaagaaataaagacacaagacaaagagataaagagaaaacagctgggccccggggaccactaccaccaagatgaggagaccggtggtggccccaaatggctgggcgtgctgatgtttattgtatacaagacaagggggcagggtaaggaggataagtcatccaagtgattgataaggtcaagcaagtcacatgatcatgggacagggggcccttcccttttaggtag

SEQ ID NO: 11949 - DNA, 593 bp, Homo sapiens
ggcctaggtgaagagaggaaagattttccaggcacagggaatagcatgtacaaataggaaaagaattgtgaaactgaatggtatatgaaagaaatcataaaactttaaaaactgttatagcaatctgatactgctgcaacattcatgttattgtattttttaaaatgtctgtttgtagctgattagatattgttagaaaccaacattgtccttcactataaacagcttgagaagcgttgacctctggctgggaaacaaggctcaagtagtagagggtactagatcacaggaagccttgtttcccaagrtaaatcatgaaggattgcatgaggctagaatgaagtactaactttcttcattcactaatgacatcaaaagtcctttatccacaaagaagggaacaacagacacctgggacttcttgagggtagagggttgggaggagggtaaggactgaaaaatactatgcttattacatgggtaaaataatctgtaccaaaaaacccatgacatgcagtttacctatataacaaacctgtatacatatacccatgaacctaaaataaaagtttaaaaaaaagaagataaaaata

SEQ ID NO: 11950 - DNA, 527 bp, Homo sapiens
ttcctttccatatcccttccaaagcctgttagaatatgttctgaggtaattatttcaaaaggagttcataggaggtcaactttgagttcttgcttgtttggaaaattctttattatgcctatgattcatttataatatgtctgggtatatagaattcagaatgctttttgttttgttgttgttggtttttggcttgtttgttttctgtcatttgtttgaatccattgctgcttgttgttctaggagaaagtgttacagctgagaaatacggcagtggtcttatgttcattcaattgtagtcaatttgattttttttcttggaaattttaggcatgcttgcgtatgtgtaaaaatgccctgaggtttaaattaatgacttgtgtatttacaaccagtatactttcttccctttactatatgtatatgtgttaagcttcaattaaggggttaagaaaagtaaagttttatacaatacaataaagctgtaaattttaaatttyaaaataaattttaagaaacatatgaaa

SEQ ID NO: 11951 - DNA, 537 bp, Homo sapiens
attagggtttctgttttgtcttctttttttcaattttctgcctctaattaaataaaaagtacraaaagaaagcagaagaatttttaagagatattactggggcagagagaccttttttaaaaagacgcaatcttagaagctgtctttttttgcatctggtatactgtcaagttgatgatatgaattcctcaaggaatataatagattttcatatagtttatgcaggtatgagataaatgatttttagtgatacaacattgaaaaagtgaatatcagatactctacatagttgttctctgacatatatttaaaactcagtgctcccaaggtagtttaacaagctgtgtgctgtccagaaagatgtgaacaatgtgagcatttttttcagagaaactgtaatccagttattaattggatagctgaatgaggatgagaggattatagctttcatcttgtggcttatcaaaaccagtatctgcatcttgcccgctttttaaattttaattagaattgacagcagaagtcaaatcctttagg

SEQ ID NO: 11952 - DNA, 558 bp, Homo sapiens
ataagatttctttccttaaatctctggagagatataagttggtaagaacgtcctgataggaaatatgtccaacttaatgaatggtacttatatatttttcttcttaataaagctttaaaattaggataatcagtatgtttaacagaaatcattcgttaagaatcacagccttatgacattacattttattaaataatcgaacatacttgcaacaaatgctaatactgtcaactcagtcacagcaagtttttttttctgagaattattaatgtgaaattttaacttcaggctgatctcttttccattcagtatccaagaaggatcactggccacaagaaactgcctgtcatttgaaagtaaagtttaaatgcaaagaaaaccggtattttataatattcctatagaaaatgcttaaaaatatcaatcttaaacaaaatcaaaggagataaaaataaaggatactattttcattaaagatggataaaatccagaattgaggaagaggtgaggaaataagtattcattctcatacactgctgacrtgaacataaactggat

SEQ ID NO: 11953 - DNA, 555 bp, Homo sapiens
tttagtagagacggggtttcactgtgttagccagggtggtctggatctcctgacctcgtgatctgcccgcctccacctcccaaagtgctgggattacaggcgtgagccaccgcgcccagcccctgatcatttcttttttgtgggtgtgtgacaacccaggaccttgtatattaaatttactatatcttcgatcatacacatttatcttagagagtgtgaaatttccaaagtacaaacactgtgtgttttatttcttgatcttcatgttttatttcttgttctttgaagttgagcaaaatgcctggcacactatatgttgtccttagaactcacagagcggttagtatttttgagcatcagcrtctgtccctgatccagctccatctccgttgttcttattttttcctcataaagtttaaatgaattagaaatttgtttttattgagttttgaaaagtcaagcactttgtgtgtgtgtgtgtgtgtgtgtgtgtgtgtgtgtgtacatgaaagaaaatcagacagattgaccatctttgatggtaactcaaaggga

SEQ ID NO: 11954 - DNA, 555 bp, Homo sapiens
tttagtagagacggggtttcactgtgttagccagggtggtctggatctcctgacctcgtgatctgcccgcctccacctcccaaagtgctgggattacaggcgtgagccaccgcgcccagcccctgatcatttcttttttgtgggtgtgtgacaacccaggaccttgtatattaaatttactatatcttcgatcatacacatttatcttagagagtgtgaaatttccaaagtacaaacactgtgtgttttatttcttgatcttcatgttttatttcttgttctttgaagttgagcaaaatgcctggcacactatatgttgtccttagaactcacagagcggttagtatttttgagcatcagcgtctgtccctgatccagctccatctccgttgttcttattttttcctcataaagtttaaatgaattagaaatttgtttttattgagttttgaaaagtcaagcactttgtgtgtgtgtgtgtgtgtgtgtgtgtgtgtgtgtgtacatgaaagaaaatcagacagattgaccatctttgayggtaactcaaaggga

SEQ ID NO: 11955 - DNA, 555 bp, Homo sapiens
gagctgaaatcyctgctaataatcacctgctgtttgtttccctctgaccatctgcattagatccacctgttgaagggagatcttgtttaaaacctgtgtcccactggatacctaactaactagaatctctaggggtgaatccctggaacttttcattctaatagttccctcaggtgacctgtgtgcacgttgaagactgagagccactgtaatacaggtaactttcttaaatgggtgtactgtgtgtgtataggacataggcataccctgtgcctaaaggactttagaacagccattcttagaaggagtggagtctatgccattacctagaaagctggagtgggatcaggcttttatatccaagaacttaaaggagaagctggcaagtgctgtcatttccgtcaggggacagattcctactgagcccacacaggggcagtccctttaaggagggattggcctcatgggaggatgtctgcagagatgtctgtgaaggctgggttcaaagattatagagtgggctgggtgcagtggctcatgcctataatcccagca

SEQ ID NO: 11956 - DNA, 555 bp, Homo sapiens
gagctgaaatctctgctaataatcacctgctgtttgtttccctctgaccawctgcattagatccacctgttgaagggagatcttgtttaaaacctgtgtcccactggatacctaactaactagaatctctaggggtgaatccctggaacttttcattctaatagttccctcaggtgacctgtgtgcacgttgaagactgagagccactgtaatacaggtaactttcttaaatgggtgtactgtgtgtgtataggacataggcataccctgtgcctaaaggactttagaacagccattcttagaaggagtggagtctatgccattacctagaaagctggagtgggatcaggcttttatatccaagaacttaaaggagaagctggcaagtgctgtcatttccgtcaggggacagattcctactgagcccacacaggggcagtccctttaaggagggattggcctcatgggaggatgtctgcagagatgtctgtgaaggctgggttcaaagattatagagtgggctgggtgcagtggctcatgcctataatcccagca

SEQ ID NO: 11957 - DNA, 555 bp, Homo sapiens
gagctgaaatctctgctaataatcacctgctgtttgtttccctctgaccatctgcattagatccacctgttgaagggagatcttgtttaaaacctgtgtcccactggatacctaactaactagaatctctaggggtgaatccctggaacttttcattctaatagttccctcaggtgacctgtgtgcacgttgaagactgagagccactgtaatacaggtaactttcttaaatgggtgtactgtgtgtgtataggacataggcataccctgtgcctaaaggactttagaacagccattcttagaaggagtggagtctatgccattacctagaaagctggagtgggatcaggcttttatatccaagaacttaaaggasaagctggcaagtgctgtcatttccgtcaggggacagattcctactgagcccacacaggggcagtccctttaaggagggattggcctcatgggaggatgtctgcagagatgtctgtgaaggctgggttcaaagattatagagtgggctgggtgcagtggctcatgcctataatcccagca

SEQ ID NO: 11958 - DNA, 555 bp, Homo sapiens
gagctgaaatctctgctaataatcacctgctgtttgtttccctctgaccatctgcattagatccacctgttgaagggagatcttgtttaaaacctgtgtcccactggatacctaactaactagaatctctaggggtgaatccctggaacttttcattctaatagttccctcaggtgacctgtgtgcacgttgaagactgagagccactgtaatacaggtaactttcttaaatgggtgtactgtgtgtgtataggacataggcataccctgtgcctaaaggactttagaacagccattcttagaaggagtggagtctatgccattacctagaaagctggagtgggatcaggcttttatatccaagaacttaaaggagaagctggcaagtgctgtcatttccgtcaggggacagattcctactgagcccacacaggggcagtccctttaargagggattggcctcatgggaggatgtctgcagagatgtctgtgaaggctgggttcaaagattatagagtgggctgggtgcagtggctcatgcctataatcccagca

SEQ ID NO: 11959 - DNA, 580 bp, Homo sapiens
aataataccatttaagttggagtaccagataaagttctttgaaccgtttttcaaaattcctagaatgggtttcatctaaaagattattgcaagaactacagggtatgcccatgatatgtgcacagcttcatcctattttaagaggcagccaggtgtcygtagtgacagatggctgtcaatatttaaaaattacctattaaccatactacaccatatttctgtaactatattttatttccaaagctaactcaaggtaatggtaacagtaatcaagtttttgagctaaagatttcacaaactcataactttataatgactgaggcatgacagaatgaggagggtttttgatcctctttttgagtcataaacagctttgtattattccttctcacttcagggcacagtcctgggagctgttaatagtttcttgggcttcactgatattttgattttaatattgctcagagaatcttcaagaaaacacaaaatggaaaggatcttcggtattaataaggagcatttttgtttcttctgtcgtgtccatatcccagcctgcttctcacttccacctagataaggg

SEQ ID NO: 11960 - DNA, 448 bp, Homo sapiens
tctaagtcccttatgaaaaaaatataaaactttgagagaaaacatgaaagaatacataaacttatcrattcttccacaaagaaaactaaagtcaatgcaattccacttacaaactcaatacttctttttgtgttggaggggagcattctcatgaatattctaaatttgtcacagagcaaaaggccaagtcaagactcttatgaagaaaaaggttgacagacagacatgaagatttaacacaaagctttagtatttaagaaaacatgatattggtataggcacagacaaacacatcaaggtaacagagacataagaaatccatgcatataaagagaaacttgatttacaatagagctagcactactgaatagttaaggaggttagaataaattggtacacaatgctaatatgataatttaggtgcaggggaaaggaaactgtacttcta

SEQ ID NO: 11961 - DNA, 686 bp, Homo sapiens
tgctattgctttgtttttatcctcctgagcctctctatagctatggcacttgaatttccttcttcctcttggtggcttttgttctgtcttatttcctgatgccctttctaggtccctaaacattagtgcaaagagggcaccagagcagaggggaacaattctctctacactcaagtggaatctctgagctgagggacccagagaggtggagtagccagcagggccctgatgacccgcacctgaactcccacgggtctgacggctgctgtcacaagagcctggggccgctggtctgagtgtgctggcgatccagccaggctcaggacgctgaggaggaggtaaccgagaccaggcttctcccttgtcaacaggcagacagatcccggggatcttgttaaaacacagaggctgattcagcaagctgggcgggggctgcagattctgcatttctaataagctacggagtgatacggtgctgagggttggaggcccacactctgagctcaaaacggagaccacagrgatatgcaatgtgtgcagagaagggggaggatggcacaggctgcagcagtggggcgggtgcttggctacacttggaaaggaagttctcacagtgtctacagcaggaacccagacagtttctgagccatcctggggctactacagggactgggaaaattgcacca

SEQ ID NO: 11962 - DNA, 536 bp, Homo sapiens
gaagaaataacatgtggggaaaatatttaaataaacaaaaccacagagataatgaaagcctttggtacaacattgatatgcaagaacatacttcaggttcactcaagaggaagtgagctttcatgcaaaggcatcagtaatggactttctatttccttattagaattaaccttgatctggaagaaaaaacttttttctttactgttgaatacatatttcactccatctaatgtattccactaaaaccttttttwaaaaaagtggcacttgtgctggaatttattattcctgcaacgggcattactagaaacaaaatagctgagagaactatttattttgaaggaaacaagttatttctacagatcataatggttttatagggaatgctagaatttccttcccagcaggtattttcaaataggatagattctccccactacagaagagtttaggcaaaatctgccaatggcagaaaaatgaactagattattccttaaaattcactccaagcctattctttcatgcctctagtttcc

SEQ ID NO: 11963 - DNA, 767 bp, Homo sapiens
caggtctcaggtactttattatagcaacagaaaaacagaccaaaatattgccctactagaattattagagcactaattacctactgtaaccttgttgtataccttttcctgtgtattttctgatcgaaatcaagcatcaaaaggttgagttgcaaatacaggcattcatctataatccttttgaagagaggtgtcttgtgttaaaatcaggtgttaactttctatttttactgtgcactgcatgtaggtgctcaataaatgttgacaataatgtctaaaagggacttctataaatttcttcacaaatgagtagcatgtgaaagcaacactgaggataaatttcctgaagaaaactttaattttaaaactatatttttctgttactaacattgaaactaataaaattgttataaatcccctgacaaaaattaaaaccctctcatttgtctaaaactctcatttgcttaatttaccttgagttacttatgtaaaaaaaggaaaaatgctaaacacattaaaaactaaacaggtaaaaataagcttttcatttgaagcaatagtatacattcaccttgttctaattgtgtactctaacattttactattcaaattatgtcacaaagggaatctactaaaagaccattgaggcaattcttaactgaaagtttatgattccactatatgtaaagcaggattaattaatagttattaacagtaattgtcattatcgcayaaccaacacagcatgcttatttactggggaaata

SEQ ID NO: 11964 - DNA, 632 bp, Homo sapiens
cttgtgaagaaggggcctgcttccccttcaccttctgccatgattctaagttccctgaggcttccctagtcatgctgaactgtragtcaattaaacctctttcctttataaattatcctctcaggcagttctttgtagcaatacaaaaacgaactaatacactgatgaatatagttttccatttaccctggataagacctcagaatccatcttaacacagcatgtcagaaagccatgccaaatagatgattaccactctgtgagccctagttgccaactctgtcatagattattgatctgaggagagaaggagaaagaagtttcacagatacaacatttggcattcctgaaataggccttgctatttgcccaacatataactaagacgtgaaattctagtaggtctgaggaaatagtggcacctgttggtgccattccagaccaagacatagacttcattcaggcttggatgataaatggtctattgcagataaagatatgtatttcaaacaaagcgttttttatttactgaaattattaaatttataacttctgatttgaaaataagaatcttatctatcacacttttatcttatgggcattactgtcaagcctatctttatgttacatag

SEQ ID NO: 11965 - DNA, 580 bp, Homo sapiens
taaaaaatgaatttaagtccgtattcactcattgggaaaaaattgaggtaatcaaataaggtgtaaaagctttgtgtagaaattatttgaaaaaaaattacagctacattttaggctaacaaaggtttccttcataaatgctgaactgtgcaaagctattgcaagtgctttctgaaataagctcagaaaataaaagggatagaaaatctactttatgacagaactatgtgtttcttttgaattgaaaaaagtttacatggacagtatcaatgtaaacaaatactttttcttccttgtttgtaaatcaatatgaactaattgatttatgatttgtamgcattgtaaacatggtcctcaattagttcccacatagatactcagtggttcaattagttcccacatagatactcctacatttacaatttgggcacattgtaaatgtggtcctcaattagttcccacatagatacccagtggcaacaacaatagcatccacactgtgaaatgtaggaatatattgttaatatgttataacttattgcaaatgagaataagtaaccaaacaataaatatttctgaa

SEQ ID NO: 11966 - DNA, 557 bp, Homo sapiens
ttcttcttgtgtttcttcttctcttcttctggggagggatgaaggagatcttttgcgagaggcatgttctcctgtgggtaggtcgtcactgccagaaagggacatttaattaaatcatatctgcttatatttggttagaaagctwccagtgatattttttcatgaagtttttccatatctttgtatggaaatacacagagtcaatatatttttattactagaatattttctttctttctttctttttttttttttgagacgaagtctttctctgttgcccaggctggagtgcagtggtgtgatctcagtgtactgcagcctccacctcctgggctcaagcagttctctgcctcagcctctcgagtagctgggattagaggtgcccaccaccacgcccgggtaatttttttaaaaaaatatttatttatttatttatttatttatttatttatttatttagagacagagtctcgctctgtcacccaggctggagtacagtggcgcaaccttggttcactgcaaactctgcctcccaggttcaagtgagaatcaagtga

SEQ ID NO: 11967 - DNA, 671 bp, Homo sapiens
gtatcatatttttttttgcaatgagagcgtattgcttttataacaagaaaaataagaaaacaataaaaataagttattttttaattcttaaaggagtgaagtagacatcaagatctcaagatctattgcagttgagagaaaagatatctcagtaggtgagggatggggtaggcagggaagtcctgtcaccaaagttgagctttggaagggaagggggaggtcagggtggagaagggaagaaacagttcttgagcccctactgtttggtgaatgttcacatgtgttatcttctttaatccccaccatgaccagataaggtaggtaccaacatcatgctgttttacaaatgtgaaaaatcaagactctaataaatgaaataaccatgtaagtaacattagtaatcttgaagacagaagactggaggtttgcttactggaggttgccagctttttctactggatgagtttcataatatgctggctctcattcgtatatttatttgtgtaacgactgtgtgtaatgtttgtgtaatgactagactggaagctctgtgggagcagggactgtgtgtgtttagttcactactgtgtctayagcccttagcaaagaacttggcacacaccaggctctcaattaatattgctcactgtattcaaatatatcaggggtca

SEQ ID NO: 11968 - DNA, 558 bp, Homo sapiens
cctgtaataaattaataaaatccagagtaaatgaacctgggagaagctgattaacttgtaataacaattacggaatctttactagaaaaaacagatatgcacctttccttataggatatagatttaacaaggttgatttcccaggaatatttactcaatcattataatagacctttctgtgtaatctgttagcagtgctgatattagctgcattactttatgtggaaaccattttggggattcattgaaatctaaatttaagtttaagaattattaatttggttaaagtaagawttattctaggaatttaaacatattaaattattttcagagcagacaggcatataaaaataggattaaagttttgttgaaggtataaattttttgaaacagtcattgtaactatcatttttggagggctcatgacacacctggaactgtactgaggatttgcattcattgttttcaacaaagtcctatgagctttgatctgttaaattaaaccttataaaattagtgacattttacaattttttgacgtaaaagttgaaattataa

SEQ ID NO: 11969 - DNA, 556 bp, Homo sapiens
atgtgcagggagatgttttaagagtgtttgtgtacatgtgtgtgtttgggaggatgagagaaaagaaaggtctcaaatttcataattctcttccagtgtattgaaagttaagatactttgttaagaacatgaggactgtcttaagggatatgcatatggctactctttcaggctaagtatagagaagtggctagccaaggaactgggtgtatttgaaacgtgcttataattttccttgcagcttacatttaagaaygtttcatgtgtttgggtgtaaaagcaaagaacaagaaaggccgaggcaaagagtgatgttgttctgttccagctttttaaggaattcctgcccacagttctgcctaaatattttcataattcctagtatcactttagaaatattgctgggagggcagataagaggtgaacttggcatcatatgaccatgagactttttcgaatgaatgttgttacaaaataataaagtcatgcaaacaagcataaaaatggagaaaatgaatttggtgtaatctaaaaataaagtcttaaatatgaaaaa

SEQ ID NO: 11970 - DNA, 556 bp, Homo sapiens
atgtgcagggagatgttttaagagtgtttgtgtacatgtgtgtgtttgggaggatgagagaaaagaaaggtctcaaatttcataattctcttccagtgtattgaaagttaagatactttgttaagaacatgaggactgtcttaagggatatgcatatggctactctttcaggctaagtatagagaagtggctagccaaggaactgggtgtatttgaaacgtgcttataattttccttgcagcttacatttaagaatgtttcatgtgtttgggtgtaaaagcaaagaacaagaaaggccgagkcaaagagtgatgttgttctgttccagctttttaaggaattcctgcccacagttctgcctaaatattttcataattcctagtatcactttagaaatattgctgggagggcagataagaggtgaacttggcatcatatgaccatgagactttttcgaatgaatgttgttacaaaataataaagtcatgcaaacaagcataaaaatggagaaaatgaatttggtgtaatctaaaaataaagtcttaaatatgaaaaa

SEQ ID NO: 11971 - DNA, 505 bp, Homo sapiens
ggcaacaaagcaaaatcctgtctcaaaaaaaaaaaaaaatgtccctgtccagcaactagccaaacaacaggaacctcagctttataaccataagcaaatgcactctgccaactactcatggaagcttggaaacgcatctttccccagctgaatctccagattagggtacagcccaacagatgccttgtcrtatcactagcagagaatccagcctcactatgccagcttctgacctgcagaactgtgagcaagtaaagagtgttgctttcagctgctaagtttaaggtgatttggtagacagcaatcaaaaattaatataccccatatttgccaggataaatcccgttatagttttataaatgtattttagaaaccgcagaatctcagaatcataaaatcacaaaggcttatttttcactcgtactaacatctagtgggagtcatcagaagggctccacttaaaatagtcactcaaggccgggtgtggtggctcacgcctgtaatc

SEQ ID NO: 11972 - DNA, 527 bp, Homo sapiens
taagaatagaattgctgctgtactttgatctaaaatcattgtgcaaatctaaagggagatatatttttttttaacaagagcacaaatccacatttatttattgacttttcattagtttattgaggggtacagcatcactcagattctgtgtccaatcgccttagcaggaagattgcatcagaatttggcatgaaccatgccactgtttccatgggcccaagttacctttccccagattactctggttttgtttggtttgcctccaggagtcactgtgttgttctttgctttgtatacataagtgcatctcttgcccaaatagaattctgtttcatctagggcataaacaccttcagttttaagaagagctgtgtgctccctttagtcccggagaccccacttatagccggcaaaaatggccttggaccacagccttccagacatagttcttttaacaagtcctgttcccagcaggcctamtccagttatttgcccccaaatttcagcagcaggtgcttcactcctct

SEQ ID NO: 11973 - DNA, 527 bp, Homo sapiens
taagaatagaattgctgctgtactttgatctaaaatcattgtgcaaatctaaagggagatatatttttttttaacaagagcacaaatccacatttatttattgacttttcattagtttattgaggggtacagcatcactcagattctgtgtccaatcgccttagcaggaagattgcatcagaatttggcatgaaccatgccactgtttccatgggcccaagttacctttccccagattactctggttttgtttggtttgcctccaggagtcactgtgttgttctttgctttgtatacataagtgcatctcttgcccaaatagaattctgtttcatctagggcataaacaccttcagttttaagaagagctgtgtgctccctttagtcccggagaccccacttatagccggcaaaaatggccttggaccacagccttccagacatagttcttttaacaagtcctgttcccagcaggcctactccagttatttrcccccaaatttcagcagcaggtgcttcactcctct

SEQ ID NO: 11974 - DNA, 527 bp, Homo sapiens
taagaatagaattgctgctgtactttgatctaaaatcattgtgcaaatctaaagggagatatatttttttttaacaagagcacaaatccacatttatttattgacttttcattagtttattgaggggtacagcatcactcagattctgtgtccaatcgccttagcaggaagattgcatcagaatttggcatgaaccatgccactgtttccatgggcccaagttacctttccccagattactctggttttgtttggtttgcctccaggagtcactgtgttgttctttgctttgtatacataagtgcatctcttgcccaaatagaattctgtttcatctagggcataaacaccttcagttttaagaagagctgtgtgctccctttagtcccggagaccccacttatagccggcaaaaatggccttggaccacagccttccagacatagttcttttaacaagtcctgttcccagcaggcctactccagttatttgmccccaaatttcagcagcaggtgcttcactcctct

SEQ ID NO: 11975 - DNA, 529 bp, Homo sapiens
caatatgaattaattttatagacattatgctgcatgaaacaagtcatttacagaatacttactgtgggattgcatttatttaacctctgcaataagcaaactatagtaaaaaaaaatcagtaaagcatttgcctttgtgaattgaggaggatttatggagaaggatcatggaggaaaaaaytttttggtgcggcagctatatcttaataggagtgtagcttacacgggtggataaatttgtcaggcctcttaaaattcacttcagatgtgcacattttacttcatgtaaacttttctactaaaggaattttaaacactgatgagtataaaagggtcaaatatcccaacaatgtactatttcactttcatccagttctttatgcagagtaaaacataagttttctttatttgataattggccataagctggaaataaatgcaaaatgcagtctccttgagagccttgtaattctatgaaggaatcattattagcatactctagatccagtctttggcaggaaggggcaga

SEQ ID NO: 11976 - DNA, 551 bp, Homo sapiens
aaattatgtcagtgatgtctcaccaaatagtaaaacaataaagggaaagaaattataaaagaagaaacaaataaaagtcctggagttaaaaagtataataaatagttttttwaaaaaaaattcattgatgttcaactttgatttttaaaaaaattattctacatttctaagaagctcaataaactccaaataggataaactcaaggacatccacaccttggtacatcatagtcaaactgtcagtgccaaagatggaaaaggttgaaagcagaaaggaaaaaaaaaaagatacactacataaaaaggatcttcaataagattaatagctgacttctcatcagaaaatataaaggtcataagtcaagaaaatggcatattccatattctaaacattaaaaaaaacacttgcaaccaagaattctacatccagcaaaaactctttaaaatgagaaaaatacaggtaatttgtcctaactagaactgtttaaagagaaattctgaaagaaactttttaggctaaattgtaactcaaatccacacacaaagataag

SEQ ID NO: 11977 - DNA, 538 bp, Homo sapiens
agcaaaagaagaatatacattcttctaagtgcacgttaaatattttccaggaatgagcatacatttgaccataaaacaagcctcaataaatgtaaaagaactgaagtcatgtagagtatattcgttgaacacagtggaattaaactagaaatcactaatagaaggaaatctgggaaatttacaaagggcrtgaaaattaaacaacaccctcctacatcagaaagtgggtttgtagttacctggggtctagggattgggaagatggggaatgactgccaataggtatagagtttcttttttggggtagtaaatgttctaaagttagatttcacaatgattgcacaactctggatatattcttaaaaagcccattaaattaattttatgttacatgaattatctcaataaagtggttacacacacacacacacacacacacacacacggtgtagttgctctgaacaagcggtccctatgtgagttgagttctttctcctattagcaaagagtaaaaatatacccaataatcaacactcca

SEQ ID NO: 11978 - DNA, 538 bp, Homo sapiens
agcaaaagaagaatatacattcttctaagtgcacgttaaatattttccaggaatgagcatacatttgaccataaaacaagcctcaataaatgtaaaagaactgaagtcatgtagagtatattcgttgaacacagtggaattaaactagaaatcactaatagaaggaaatctgggaaatttacaaagggcatgaaaattaaacaacaccctcctacatcagaaagtgggtttgtagttacctggggtctagggattgggaagatggggaatgactgccaataggtatagagtttcttttttggggtagtaaatgttctaaagttagatttcacaatgaktgcacaactctggatatattcttaaaaagcccattaaattaattttatgttacatgaattatctcaataaagtggttacacacacacacacacacacacacacacacggtgtagttgctctgaacaagcggtccctatgtgagttgagttctttctcctattagcaaagagtaaaaatatacccaataatcaacactcca

SEQ ID NO: 11979 - DNA, 538 bp, Homo sapiens
agcaaaagaagaatatacattcttctaagtgcacgttaaatattttccaggaatgagcatacatttgaccataaaacaagcctcaataaatgtaaaagaactgaagtcatgtagagtatattcgttgaacacagtggaattaaactagaaatcactaatagaaggaaatctgggaaatttacaaagggcatgaaaattaaacaacaccctcctacatcagaaagtgggtttgtagttacctggggtctagggattgggaagatggggaatgactgccaataggtatagagtttcttttttggggtagtaaatgttctaaagttagatttcacaatgattgcacaactctggatatattcttaaaaagcccattaaattaattttatgttacatgaattatctcaataaagtggttacacacacacacacacacacacacacacacggtgtagttgctctgaacaagcggtmcctatgtgagttgagttctttctcctattagcaaagagtaaaaatatacccaataatcaacactcca

SEQ ID NO: 11980 - DNA, 516 bp, Homo sapiens
tgaaaccttctatgatttaggaaagacaactattgattttgattatctaagcacagtgaatataatgttgcttaaagtgacttattacttgggaagtcaatgaatggagtgaatgaggcagaaaccaaatttaataagaagtaaattaagttcaaagaatacaataaagtagtaggaaatagttgtgctgtgttgttctccaaagaaggattacattcaagagaaaaataacagacaatcccaataatgccaaaaccagaaagctaaaaagacaagaaacatatgccaggtacaattagctgcctctcagagttcatccaatacacagtgtttaaccccaaagcccttctgagctctgtactcaaataggacattgggagaatccagattcatacacaatraacacactaagataaataaacacaggcttatcaaacttaactacttgttttgatgtaaaagaatggataaaactatgaagaaaagatgatttgccgcatattctcaaaaacatag

SEQ ID NO: 11981 - DNA, 530 bp, Homo sapiens
cttttagtaatgattttttatatatataaattatgtcaatcaaaaacatactttcactaaataaattcatgaaacaagattcaactctctgcttcctacaaatgaccacattatgatctggaacacgcataagccatacatgaaagaataaaaaaaattaagtgcaaaatcaaatactgtcatggtagacaaaatatatattatatcaaaaacttcctcaagagagaagaggaaaaggacaataacaacaacaacaataaaagcaacaaaaaacaacatayatcaataaaagcaacaacaataaaacaacatgcaacaataaaagcaacagtaatgtatgtgccttacatcacagttcccaaaatatgaagcagcattttacagaattgaaacatgaagtagccagcacataacagtagatgacttttttatcagacttttagtaatgtaaattaaaaaacaaacataagatgaataagtaaacagaggatttcaacaacacaatagaacaattagacctaacagtcaca

SEQ ID NO: 11982 - DNA, 569 bp, Homo sapiens
ttttacttaaaacctggactttaagccaggttgggcctgggaatagtggcagcaaaagcagcagccaaatgtatacacttcagatgtctacactcatgggcacaggcatattccacacttgctggaacacgagacgcctgagaggcacctgtttcccagctactaactgatgtccacacaccccattcacgtgtcttcatttaggtctctgcatcgtatatttgctcagccagtgcaaacacatcttctagggggcaacattaattgcagcacctgccccacttgttctgggagggagtcaagaggaatctggtcagctcctaatcccccaggacaaaggtgatgccctcttttcaggacttacatccagcagcrtcatctcgggatgggtttttcaaacacaagcagcatgaggtagcaagcatggtgtgacaggctcagggccatgggcagccggcttctggagaagcagcacagggcaggcacatctgtgggtggcaccatgacaagccaagacagcctcagcccctaatcccaacagctccagcccagatggcattcaaatcttc

SEQ ID NO: 11983 - DNA, 1430 bp, Homo sapiens
  misc_feature (1)...(1430): n = A,T,C or G
atttttgttgagacaaagttatgctttcttgctcagactgaagttcagtggcatatcacagctcactgtagcctcaatctcctgggctcaagcaatcctccccccttagccacccaagtagcttggactacttggacacgtaccacaacacccaaggagcttatgattcttccaccttggcctccmaaagtgttggaattataagcaggagccactgtatccaatgtgtaatttttgttgtttgtgtatgctttaattactttctctttttctttactatgtttttttttccccagtggttatcatgagacttatgtaaaacctcttgtattttaatagtctagtttaagatgataacaatttagagtattctgaatttcagtatgtatttaccatttttagtgacatttatactttagtatttttcatattgttagttagcatttcgtcatatcaatgtgaagatttcttccagaccatggctggagaaggaaagaaggtgtgttttgcctgattcagggactatagagagaaccaagttctgcaggcctgtcacctaagtctcagatgagtatgaattctcttgtgtttttcacagatttttgcagtggcaggaccaagttcaaatgagttatagccaagtctacagtaagatgtggcagtattctgttttgaaccgaggaccatgattggcaagcttgccacttggtcaagtgcttaccctctaaagatgtcttccttggtctttgcctccagctgggtgtcacaaactctgaactggattccaaggctttcatgaatgcacttatgtttcctgtggcagctgcattatgttgtgggggatgtggatgcagaacctcccattctgtcatcttgcttatgttactctcctttatgtttcactttctcaaatgaatgtcaagctggtgatttttagattcaaaaattctaaaataaattgctcaaatttccacattatgtaagctattaataaaatgtcttgtaggtgctacatatttattaaaatttttggttgtaattttaagctcactgcaggcagaaaggaatcattaacatttatattcttttctttagtctgtatctaaatgatggcatattttaattccagatatttactttatactgcagtaatgctcgtcatattttgcaaaatgtatgttgttcttttatttggaaatataaggcttttttagctcctgaaatctatattnatagtcatataattttattatgttttgtggtaagaagtgcagcaacatattgagaacataataaaattatcctgtatttttaatgattatttattaaattcctctcattagagcctgttattaatgattgtaatgtattttctgtataattttactgcaatttattaaattctaatgacttaaattgtctgcttttca

SEQ ID NO: 11984 - DNA, 1430 bp, Homo sapiens
  misc_feature (1)...(1430): n = A,T,C or G
atttttgttgagacaaagttatgctttcttgctcagactgaagttcagtggcatatcacagctcactgtagcctcaatctcctgggctcaagcaatcctccccccttagccacccaagtagcttggactacttggacacgtaccacaacacccaaggagcttatgattcttccaccttggcctccaaaagtgttggaattataagcaggagccactgtatccaatgtgtaatttttgttgtttgtgtatgctttaattactttctctttttctttactatgtttttttttccccagtggttatcatgagacttatgtaaaacctcttgtattttaatagtctagtttaagatgataacaatttagagtattctgaatttcagtatgtatttaccatttttagtgacatttatactttagtatttttcatattgttagttagcatttcgtcatatcaatgtgaagatttcttccagaccatggctggagaaggaaagaaggtgtgttttgcctgattcagggactatagagagaaccaagttctgcaggcctgtcacctaagtctcagatgagtatgaattctcttgtgtttttcacagatttttgcagtggcaggaccaagttcaaatgagttatagccaagtctacagtaagatgtggcagtattctgttttgaaccgaggaccatgattggcaagcttgccacttggtcaagtgcttaccctctaaagatgtcttccttggtctttgcctccagctgggtgtcacaaactctgaactggattccaaggctttcatgaatgcacttatgtttcctgtggcagctgcattatgttgtgggggatgtggatgcagaacctcccattctgtcatcttgcttatgttactctcctttatgtttcactttctcaaatgaatgtcaagctggtgatttttagattcaaaaattctaaaataaattgctcaaatttccacattatgtaagctattaataaaatgtcttgtaggtgctacatattyattaaaatttttggttgtaattttaagctcactgcaggcagaaaggaatcattaacatttatattcttttctttagtctgtatctaaatgatggcatattttaattccagatatttactttatactgcagtaatgctcgtcatattttgcaaaatgtatgttgttcttttatttggaaatataaggcttttttagctcctgaaatctatattnatagtcatataattttattatgttttgtggtaagaagtgcagcaacatattgagaacataataaaattatcctgtatttttaatgattatttattaaattcctctcattagagcctgttattaatgattgtaatgtattttctgtataattttactgcaatttattaaattctaatgacttaaattgtctgcttttca

SEQ ID NO: 11985 - DNA, 1430 bp, Homo sapiens
  misc_feature (1)...(1430): n = A,T,C or G
atttttgttgagacaaagttatgctttcttgctcagactgaagttcagtggcatatcacagctcactgtagcctcaatctcctgggctcaagcaatcctccccccttagccacccaagtagcttggactacttggacacgtaccacaacacccaaggagcttatgattcttccaccttggcctccaaaagtgttggaattataagcaggagccactgtatccaatgtgtaatttttgttgtttgtgtatgctttaattactttctctttttctttactatgtttttttttccccagtggttatcatgagacttatgtaaaacctcttgtattttaatagtctagtttaagatgataacaatttagagtattctgaatttcagtatgtatttaccatttttagtgacatttatactttagtatttttcatattgttagttagcatttcgtcatatcaatgtgaagatttcttccagaccatggctggagaaggaaagaaggtgtgttttgcctgattcagggactatagagagaaccaagttctgcaggcctgtcacctaagtctcagatgagtatgaattctcttgtgtttttcacagatttttgcagtggcaggaccaagttcaaatgagttatagccaagtctacagtaagatgtggcagtattctgttttgaaccgaggaccatgattggcaagcttgccacttggtcaagtgcttaccctctaaagatgtcttccttggtctttgcctccagctgggtgtcacaaactctgaactggattccaaggctttcatgaatgcacttatgtttcctgtggcagctgcattatgttgtgggggatgtggatgcagaacctcccattctgtcatcttgcttatgttactctcctttatgtttcactttctcaaatgaatgtcaagctggtgatttttagattcaaaaattctaaaataaattgctcaaatttccacattatgtaagctattaataaaatgtcttgtaggtgctacatatttattaaaatttttggttgtaattttaagctcactgcaggcagaawggaatcattaacatttatattcttttctttagtctgtatctaaatgatggcatattttaattccagatatttactttatactgcagtaatgctcgtcatattttgcaaaatgtatgttgttcttttatttggaaatataaggcttttttagctcctgaaatctatattnatagtcatataattttattatgttttgtggtaagaagtgcagcaacatattgagaacataataaaattatcctgtatttttaatgattatttattaaattcctctcattagagcctgttattaatgattgtaatgtattttctgtataattttactgcaatttattaaattctaatgacttaaattgtctgcttttca

SEQ ID NO: 11986 - DNA, 1430 bp, Homo sapiens
  misc_feature (1)...(1430): n = A,T,C or G
atttttgttgagacaaagttatgctttcttgctcagactgaagttcagtggcatatcacagctcactgtagcctcaatctcctgggctcaagcaatcctccccccttagccacccaagtagcttggactacttggacacgtaccacaacacccaaggagcttatgattcttccaccttggcctccaaaagtgttggaattataagcaggagccactgtatccaatgtgtaatttttgttgtttgtgtatgctttaattactttctctttttctttactatgtttttttttccccagtggttatcatgagacttatgtaaaacctcttgtattttaatagtctagtttaagatgataacaatttagagtattctgaatttcagtatgtatttaccatttttagtgacatttatactttagtatttttcatattgttagttagcatttcgtcatatcaatgtgaagatttcttccagaccatggctggagaaggaaagaaggtgtgttttgcctgattcagggactatagagagaaccaagttctgcaggcctgtcacctaagtctcagatgagtatgaattctcttgtgtttttcacagatttttgcagtggcaggaccaagttcaaatgagttatagccaagtctacagtaagatgtggcagtattctgttttgaaccgaggaccatgattggcaagcttgccacttggtcaagtgcttaccctctaaagatgtcttccttggtctttgcctccagctgggtgtcacaaactctgaactggattccaaggctttcatgaatgcacttatgtttcctgtggcagctgcattatgttgtgggggatgtggatgcagaacctcccattctgtcatcttgcttatgttactctcctttatgtttcactttctcaaatgaatgtcaagctggtgatttttagattcaaaaattctaaaataaattgctcaaatttccacattatgtaagctattaataaaatgtcttgtaggtgctacatatttattaaaatttttggttgtaattttaagctcactgcaggcagaaaggaatcattaacatttatattcttttytttagtctgtatctaaatgatggcatattttaattccagatatttactttatactgcagtaatgctcgtcatattttgcaaaatgtatgttgttcttttatttggaaatataaggcttttttagctcctgaaatctatattnatagtcatataattttattatgttttgtggtaagaagtgcagcaacatattgagaacataataaaattatcctgtatttttaatgattatttattaaattcctctcattagagcctgttattaatgattgtaatgtattttctgtataattttactgcaatttattaaattctaatgacttaaattgtctgcttttca

SEQ ID NO: 11987 - DNA, 1430 bp, Homo sapiens
  misc_feature (1)...(1430): n = A,T,C or G
atttttgttgagacaaagttatgctttcttgctcagactgaagttcagtggcatatcacagctcactgtagcctcaatctcctgggctcaagcaatcctccccccttagccacccaagtagcttggactacttggacacgtaccacaacacccaaggagcttatgattcttccaccttggcctccaaaagtgttggaattataagcaggagccactgtatccaatgtgtaatttttgttgtttgtgtatgctttaattactttctctttttctttactatgtttttttttccccagtggttatcatgagacttatgtaaaacctcttgtattttaatagtctagtttaagatgataacaatttagagtattctgaatttcagtatgtatttaccatttttagtgacatttatactttagtatttttcatattgttagttagcatttcgtcatatcaatgtgaagatttcttccagaccatggctggagaaggaaagaaggtgtgttttgcctgattcagggactatagagagaaccaagttctgcaggcctgtcacctaagtctcagatgagtatgaattctcttgtgtttttcacagatttttgcagtggcaggaccaagttcaaatgagttatagccaagtctacagtaagatgtggcagtattctgttttgaaccgaggaccatgattggcaagcttgccacttggtcaagtgcttaccctctaaagatgtcttccttggtctttgcctccagctgggtgtcacaaactctgaactggattccaaggctttcatgaatgcacttatgtttcctgtggcagctgcattatgttgtgggggatgtggatgcagaacctcccattctgtcatcttgcttatgttactctcctttatgtttcactttctcaaatgaatgtcaagctggtgatttttagattcaaaaattctaaaataaattgctcaaatttccacattatgtaagctattaataaaatgtcttgtaggtgctacatatttattaaaatttttggttgtaattttaagctcactgcaggcagaaaggaatcattaacatttatattcttttctttagtctgtatctaaatgatggyatattttaattccagatatttactttatactgcagtaatgctcgtcatattttgcaaaatgtatgttgttcttttatttggaaatataaggcttttttagctcctgaaatctatattnatagtcatataattttattatgttttgtggtaagaagtgcagcaacatattgagaacataataaaattatcctgtatttttaatgattatttattaaattcctctcattagagcctgttattaatgattgtaatgtattttctgtataattttactgcaatttattaaattctaatgacttaaattgtctgcttttca

SEQ ID NO: 11988 - DNA, 521 bp, Homo sapiens
aatagaataagtaagattctagggaaagtttttgcttcattgccaaatttagaagcagaataggactatgaacctctttcccgttataaacagagggatttaaatagctgctctcttgggtctcttttagacccaagagttctatgaatctcttgcacatataataatgaatgatagcattctctaccatgactatcaactattaactccctttacctgaaattctgacgttgaaaattgactctgttgtattttggggaatggaagactagatggcaaagaagtagtacagcttttgtgatgaagtcttgcaagaataacaaatgaaaggaaaatgtctcagagaactggtgaagacaaagggtacaggrtaaatagagctgactattggtcaaatgctgactcaggaggctggaaatagatgtaaaggaggccttgcaagaaggtcagcagggagttaaaaactcctgcactataaaatgcaaaagacattgggaaggaaaactagactaagaaaagat

SEQ ID NO: 11989 - DNA, 556 bp, Homo sapiens
tatatatatatatatatatatatatatatatatatatatatatacttaatagatttcatgaactccttgaaatggtgtagaaaattccatgtcaatgaatgtgtgcaatttgggcagaaagagttcctagcatgcattcaagtctcaaaggaatatgaatcttacaaacggcttggaacctttgactgatatgaagagcctctcagaagaggttctattaaagctgatccttctctagccaggagaatctatgggtcacacattcaaagcagaatayagagcaagtttctaaggcaggaataagcttggtgagatgcaagtgagtagaagagtgaattgagaagttttcacatactcacaggtaggcaagagatggaacaaggagctttttttaccccgaagtaagaaatgcagattaaaaagaaaattactgggaattcctcacaggaatttaaggggccctatgtgatattatttaaaaacatcacttattcttgtgaggagattgtaagaaggcaagaagaaaagtgcagaaccccacttaaaagtttcttct

SEQ ID NO: 11990 - DNA, 676 bp, Homo sapiens
aaaaattagccaggtgtgatcgtgggcgcctgtagtcccagctacttgggaggctggggcaggagaatcgcttgaacccaggatcaagtggtgcgagccaagatcgcaccactgcactccagcctgggtgacagagcaagactccatcaaaaaaaaaaaaaaaagaatgtggatgggcatcacccaattcatcaggacctaaacagaacaaaaaggcacaggaaaggtgactttgttcccttttcttgagctaggacatccatctttaccttccctcacacatcagcactcatggaccaggggcctatgaactggaacagaacttacattattggcttcccttgttctcaggccttccaacttaggctgaattacactaccagattttctgggtctccagcttgcagacaagagaycatagaaattctcagcccctataatcatgaaggccaatttctattgtgtgtgcattggccggtgggggtggggtgtcctattggttctgtctcttgggagaattctgactaatgcactggctatttcacaaaaattttatagaaagaacaataattgttattttaaaattcaggctagaatagcaagaacaaaagataaacagtttttgaaaaaaactgtagccattaccacattctccaagtgggtgtagtatttatct

SEQ ID NO: 11991 - DNA, 635 bp, Homo sapiens
gaactttatttactgtatataaaaataacatcccaggtctttcaaaagagcaagaatagtgctccttgttaaccagaaacctgatctgaaacacagcctctacttggctctgaacctggtgagtataactcttcttacctacaaactttagcttgtcctggccatgcttgtttgtctggctaaatgcatatgccatctgtcttagacctggtgactttcctttattaaaatgatctgtctataactgtcctttctactaccttgtaatgcatttgaggaaagagctgtctgggccacctttacagctctagcattcatattgtgactggcacctgacagtaaatatcaatgcaatgttaatcatcacgaactgcagggaaattacatttatgtttgcaaatacccctgaggggtaattctacaaaggtgacacaaagtgaaaataattatctaagaatcagagtaatttgcatgctttctggctggtaatctaagtataccaaatctactgtaatcttgatgtcttccaagggaataagacatggaattatacaattttggagctcaatgggtccttayagttaatttgatcttttacttgacaggtgatgaaactgatctggagcacttaagtg

SEQ ID NO: 11992 - DNA, 508 bp, Homo sapiens
agtagagacggggtttcaccgtgttagccaggatggtctcgatctcctgacctcgtgatccgcccgtctcggcctcccaaagtgctgggattacaggcgtgagccactgcgcccggccacatccctttttaatattgcattttaggtagcactttgtatgttttgaagtgattaggaacacagattctggagtttgacaccccttgaacaaaaagatggctccacctcttatgatttggggcttaaattaagcaaattattaaatctatttaagcatttgattctttcaatctataatgaagaaaaamgcaacctatgtcattatgaagcttagctttccctaatacttaatagccactcagttaatgttgtctctgttgttagttagtattaatagcattataaaatttcccttgttatatccattttcagatgccagatataatccctaatttaaacttgtcctcggtgctaattaattttcatccttaacaaattgcttcacctt

SEQ ID NO: 11993 - DNA, 529 bp, Homo sapiens
ataacttttaaatgagggcaggtcataatgttaaaactagaaaggggacagagaatggagaatcagagaaataggatgaaagtaatagtacataatgtcaataaaaccaagccaccactgttaactacaaaaaaaaaaaaaaatgaagtaggacaagtttgtttgtttgtttgtttgttttttagacattttacttacaatggctaagtcactgttaatttttcagagactgttttaatagactggcaaagcattgtaagggcttaccttattagtgggtgaggaggattaagtaaaaagtttatattctgtgccatttccctctgagagaaaatctacagatgggtgagaatattaggattttttagaaaagaaagataggaagttgagaacattctttcaaaaagcttctgtttctttcctggcaaagtagaagcacaytgaagggcctctactgaagaaagaatacaatccctgtagcttttgccactcacatttcaaatccaaatgaataacaataaaataataa

SEQ ID NO: 11994 - DNA, 536 bp, Homo sapiens
tggtttattttcctctgcatttaatgtccctgtggaccacaggttacttggattagtaactaaaaccctctgggattacacactcctgccctctaatttttatagatagggagagagggtggtttcttttttgctctgtctttggctgcagagagacataaatcatacaaataatctcacagctcaattctaccttactataaagtccatggctccagaactgtagtctatycttcctcatctagcaaagacagagaaggttcctctttccacgtaaagctggtaagaaggtagatagatatatttatcgtgttgacttttactttgttacctattcacaaatagtcatatgggtttatagaaaagtcagataccatgagggtttgccctgtcctcatcgatccacataacatgtagatatacaacctctaataattcatacttaaatattttcataatgtttctcagattgaattgaaaatcagacaactggagatttaaaagaaaccacagaatactagcataaagggaacagt

SEQ ID NO: 11995 - DNA, 536 bp, Homo sapiens
tggtttattttcctctgcatttaatgtccctgtggaccacaggttacttggattagtaactaaaaccctctgggattacacactcctgccctctaatttttatagatagggagagagggtggtttcttttttgctctgtctttggctgcagagagacataaatcatacaaataatctcacagctcaattctaccttactataaagtccatggctccagaactgtagtctattcttcctcatctagcaaagacagagaaggttcctctttccacgtaaagctggtaagaaggkagatagatatatttatcgtgttgacttttactttgttacctattcacaaatagtcatatgggtttatagaaaagtcagataccatgagggtttgccctgtcctcatcgatccacataacatgtagatatacaacctctaataattcatacttaaatattttcataatgtttctcagattgaattgaaaatcagacaactggagatttaaaagaaaccacagaatactagcataaagggaacagt

SEQ ID NO: 11996 - DNA, 536 bp, Homo sapiens
tggtttattttcctctgcatttaatgtccctgtggaccacaggttacttggattagtaactaaaaccctctgggattacacactcctgccctctaatttttatagatagggagagagggtggtttcttttttgctctgtctttggctgcagagagacataaatcatacaaataatctcacagctcaattctaccttactataaagtccatggctccagaactgtagtctattcttcctcatctagcaaagacagagaaggttcctctttccacgtaaagctggtaagaaggtagatagatatatttatcgtgttgacttttactttgttacctattcacaaatagtcatatgggtttatagaaaagtcagataycatgagggtttgccctgtcctcatcgatccacataacatgtagatatacaacctctaataattcatacttaaatattttcataatgtttctcagattgaattgaaaatcagacaactggagatttaaaagaaaccacagaatactagcataaagggaacagt

SEQ ID NO: 11997 - DNA, 536 bp, Homo sapiens
tggtttattttcctctgcatttaatgtccctgtggaccacaggttacttggattagtaactaaaaccctctgggattacacactcctgccctctaatttttatagatagggagagagggtggtttcttttttgctctgtctttggctgcagagagacataaatcatacaaataatctcacagctcaattctaccttactataaagtccatggctccagaactgtagtctattcttcctcatctagcaaagacagagaaggttcctctttccacgtaaagctggtaagaaggtagatagatatatttatcgtgttgacttttactttgttacctattcacaaatagtcatatgggtttatagaaaagtcagataccatgagggtttgccctgtcctcatcgatccacataacatgtagatatacaacctctaataattcatacttaaatattttcataatgtttctcagattgaattgaaaatcagacaactggagatttaaaakaaaccacagaatactagcataaagggaacagt

SEQ ID NO: 11998 - DNA, 537 bp, Homo sapiens
agcgcaagcaattcgacacagctgctcatgtaacatccggtcttcacaccatgttttwtttttttcttcttttttagacggagtctctcactgtcaccaggctggagtgcggtggcgcaatcctggctcactgcaacctctgcctcctgggttcaagcgattctcctgcctcagcctcccaagtagctgggactacagacacacgccaccacgcccagctaatttttgtatttttagtagagacggggtttcaccatgttggccaggatgatcttgatctcttgacctcgtgatccgcccacctctgcctccaaagtgctgggattacaggcatgagccacctgcccagcctcttttggttttcatagtccccataaaaccagtctcatcttgctttagtgtatatagtgcattccagtcttctggagagttctgtcctcattgtttttctcttataattctagtctctgaagttgtttacctatagtgttggatgaaaatgataaatatacattgataactttatattcctggcaa

SEQ ID NO: 11999 - DNA, 537 bp, Homo sapiens
agcgcaagcaattcgacacagctgctcatgtaacatccggtcttcacaccatgttttatttttttcttcttttttagacggagtctctcactgtcaccaggctggagtgcggtggygcaatcctggctcactgcaacctctgcctcctgggttcaagcgattctcctgcctcagcctcccaagtagctgggactacagacacacgccaccacgcccagctaatttttgtatttttagtagagacggggtttcaccatgttggccaggatgatcttgatctcttgacctcgtgatccgcccacctctgcctccaaagtgctgggattacaggcatgagccacctgcccagcctcttttggttttcatagtccccataaaaccagtctcatcttgctttagtgtatatagtgcattccagtcttctggagagttctgtcctcattgtttttctcttataattctagtctctgaagttgtttacctatagtgttggatgaaaatgataaatatacattgataactttatattcctggcaa

SEQ ID NO: 12000 - DNA, 537 bp, Homo sapiens
agcgcaagcaattcgacacagctgctcatgtaacatccggtcttcacaccatgttttatttttttcttcttttttagacggagtctctcactgtcaccaggctggagtgcggtggcgcaatcctggctcactgcaacctctgcctcctgggttcaagcgattctcctgcctcagcctcccaagtagctgggactacagayacacgccaccacgcccagctaatttttgtatttttagtagagacggggtttcaccatgttggccaggatgatcttgatctcttgacctcgtgatccgcccacctctgcctccaaagtgctgggattacaggcatgagccacctgcccagcctcttttggttttcatagtccccataaaaccagtctcatcttgctttagtgtatatagtgcattccagtcttctggagagttctgtcctcattgtttttctcttataattctagtctctgaagttgtttacctatagtgttggatgaaaatgataaatatacattgataactttatattcctggcaa

SEQ ID NO: 12001 - DNA, 537 bp, Homo sapiens
agcgcaagcaattcgacacagctgctcatgtaacatccggtcttcacaccatgttttatttttttcttcttttttagacggagtctctcactgtcaccaggctggagtgcggtggcgcaatcctggctcactgcaacctctgcctcctgggttcaagcgattctcctgcctcagcctcccaagtagctgggactacagacacacgccaccaygcccagctaatttttgtatttttagtagagacggggtttcaccatgttggccaggatgatcttgatctcttgacctcgtgatccgcccacctctgcctccaaagtgctgggattacaggcatgagccacctgcccagcctcttttggttttcatagtccccataaaaccagtctcatcttgctttagtgtatatagtgcattccagtcttctggagagttctgtcctcattgtttttctcttataattctagtctctgaagttgtttacctatagtgttggatgaaaatgataaatatacattgataactttatattcctggcaa

SEQ ID NO: 12002 - DNA, 730 bp, Homo sapiens
ggcaacagagcgagactctgtctcaagaaaaaaataaaattttttaaagactggctcttgtgctgtcgcccagaatggaatgcactggcatgatcatagctcactacaacctcaaactcctgagcacaagcaaacctcccacctcagtctcctgagtagctgagactataggctcatgccaccatgcctggttaatttcattttcatttttttgtagaaatggggtcttgctatgttgcccaggctgatattgaactcctggcatcagccgtcctcccacctcagcctcccaaggtgctggaattacaggcatgagccaccatgctcagccttacatatactttataaygaacatactatattaatacatatatacttacatataataaatatacatacattagatatgtacattcattttttaaagaaaataaatggaataaaaaaccaaaaatgtttagagattactgggctaaaccaagtaaagtgagtttgtttcaggaagaagcaatgctgagtggattggcattcaattactgtggttaagttacacagataataagttaaaaaatttgcatatggaacagcagttgctcggaaattttataaggccacaatattctagtatgatgaacaaaggaggtctcattaattatgtgtcattttactaaacagtaaaaaatatacacatacacacacacacacacacacacacacacacacacacatc

SEQ ID NO: 12003 - DNA, 544 bp, Homo sapiens
accttggtaatatgcagctaatttattgctcctctgagtagaatacaatccattgagtgaaaatgtctacatttatttatacctcatctaactgtaaacagacctgtgactaaaatcaaatggccagttcacaaaagaataatttagaaaaaattagaccattttaagtcattttattttcaagcaataccaaaatatcaaattgactcagttaaccatttattctggctacatgatattaaaaagtttgactaaatttttcagagtttattaatattttcactgaatttccagatgttctgctttcccatattggtgtcactatatatctttattttctccttacactctgatttctatgtatagtttattgttgggagatagctgcagggcaggacagatattaaaactatatagcatctcataagatgtgaagctgaatatctttttttagattaggtaaccttttcatagctttgggggaaaacatggatagtactcatgtgtgtgtgtgtgtgtgtgtgtgcgcgcgygcgtgtgcgtg

SEQ ID NO: 12004 - DNA, 879 bp, Homo sapiens
caggcacagtatctcttcaactcatctgctgtgcaaagtgaactttatctgtattttagaataaagaaaacgattcagcaacatctgcaaagtaaagaactcagctacctgctgaacttggcaatgacctagccccrcccctcttgttgtcttatttattccagctgacattttaaaattaagtgtttgatacatgccaggcccacttcttttacgtgtatatttcttttaatcctcactaggaagagactgagactcagagaatttacatgcttccccagagtaacccaagtcaatggcaaagtaaaaaatttctgtctccactccctgggtgtctgccactatgtcacactgaatccttcattcccaaagaattccagctatattctcaggactaattagcaaaaatatgcactttatacctgcacagtctccctcgtttctcctctctccctccttcttatgtgtgcacacacacacacacacacacacacacacacacgtggcttttaactatgatgtttatcttactaggtataaatcatgtcaaggtcaagattacaaatttaaatcttgatcatctcacacccattaggatgggccctataaacgaaaacaaaatgacagttgttggtaaagacatggagaaattgaacccttgtgccctattggtgggaatgtaaaatagcggccgctatggaaaacagtttggaggttcctcaaaaaattaaacagaattattgtaatgattctgtaatcatcctacttctgagtatatatccgaaaaaaatttaaagcaggatctcagagatatttgcacaccatgttcatagcagcattattcacaatagccaagaggtggaagcaacccaaatgccc

SEQ ID NO: 12005 - DNA, 555 bp, Homo sapiens
tgcagaggagggagtgggtgcccctagagaaggaggtgggccttggaggctgagaagggcagtgaggtttgagacggctgcagagggctccagagacaggcctccagctcacacctcgagggcgaagagattcttctggagtggagaggaagagcctctgcacccatccccatcctcccagtcctccccacggagaccacaactcaagacccagctgtcccctcccagtgactcaggctttggctgccctcctgcccacatccaagccctgtccagtgccccataacaggaagggctgtggtgtgagagaggaggagggaaggctgccccgccaagggcctycatgtccaaggagccatctaggtggaggagtcctttgcaccctcctggccgtgtcaccctctgccacctcagaaatgtgggtttggcctgaggtgggactctgtcctcctccctctgcactgagcatggaaggccacttgtttctcattagcaaactgcaggatgtcaccaccatagggtggatgtgcatttttgtcctctttgctggaacgg

SEQ ID NO: 12006 - DNA, 531 bp, Homo sapiens
ctctcagggaaattccaggtggatgtgaagttccctaggtctgcccaagtgctgagttctgaatccctgtcctagtgttccggccacctctgatcgttcgcagctgtgccttggtggccgctctgatttgtattcatayggacacaatagcatgcctggaagtattcgcaccaaatcgtgctgcacaggcgtctccaaatttgatctgcaagtttgaaaaaggaacctcttcggggccacactctgagagtgtcttctgcatcttgcacgctgtgtgaagttttttgctctcctggcccagggagattaagacataattttctaaaatggaaaaaaatgtcaggatgttaacaatttggtgaacccttttaagaggagaatccacttcactggcacacggagatgtctaataaaagtcagtgagtgccgtgacgttgagctaagtgccctaaagccagcctttcttcattccagctatacttggcattctcctggctgtctctgctggggagggtccggagccgctaatta

SEQ ID NO: 12007 - DNA, 531 bp, Homo sapiens
ctctcagggaaattccaggtggatgtgaagttccctaggtctgcccaagtgctgagttctgaatccctgtcctagtgttccggccacctctgatcgttcgcagctgtgccttggtggccgctctgatttgtattcatacggacacaatagcatgcctggaagtattcgcaccaaatcgtgctgcacaggcgtctccaaatttgatctgcaagtttgaaaaaggaacctcttcggggccacactctgagagtgtcttctgcatcttgcacgctgtgtgaagttttttgctctcctggcccagggagattaagacataattttctaaaatggaaaaaaatgtcaggatgttaacaatttggtgaacccttttaagaggagaatccacttcactggcacrcggagatgtctaataaaagtcagtgagtgccgtgacgttgagctaagtgccctaaagccagcctttcttcattccagctatacttggcattctcctggctgtctctgctggggagggtccggagccgctaatta

SEQ ID NO: 12008 - DNA, 577 bp, Homo sapiens
ttttcttttccctattttacccctttgcttttaaatgcttgttttgggcttaatgataaaagattttgttttgtgtgctgacactacatgttcctacatgtctcagagcaaattttragctttcaagcacatgaggagcctcttcccctgtgctgactttccaagtgagcaaaaaggaagccagtaccaagcctgttgcatgttcatgtgccctccagggaggatcagaggctcaggttctttttttttttttttttttttttttttttttgagatgtagtctcgctctgtcacataggctggagtgcagtggcgtgatctcggctcactgcatgctccctctcccgggttccagcgattctcctgcctcagcctccctagtagctgggactgcaggcgcccgccatcacgcctggctaattttttgtatttttagtagagacggggtttcaccatgttagccaggatggtcttgatctcctgacctcgtgatccgcccgtcttggcctcccaaagtgctgggattacaggcatgagccaccgcgcccggttggctcaggttctttccaccctttgt

SEQ ID NO: 12009 - DNA, 531 bp, Homo sapiens
agaaaaggtaacttgcacatatatgcacacaaaatcacacmgccaggaaagggcagagctgagacatcaacccaagtctgcttaccgcaaaagctaagactgcttgaccactttgtacaactgcttctctctcatctggcaggcaggacagttgctgctgcatcccaggcatctgtgacatccaccggctcttccttaaccagacatgctaggccaggacccatacctggagccaggacttccaagaagctcccctccctgtctacccttatgtcctctgcaggaggccgtgatggtgtcagtacccttttccagcatggtccagggtcaaggcactttccagaacactgtcccactgggccactgtcagtgaggaaattgcaaactctcagggagctgaaaactgtactttataaattctcagctctcagagtgggaggaaacctcaggttcagctagacaggcctctctcaggtgcagaaatctcagcccgccacactgcctctggtggctgtccagcatgagcttgtt

SEQ ID NO: 12010 - DNA, 776 bp, Homo sapiens
tccccactcagcatccccctcactaccccaaggccccagatggttcccagggccctcctgcctgcccaggcctgctatcctctggctctcttcttcccaccttacccagcttccccttgcacaacataacaacattttcattttcccaggagtgttcaagaaaacattcctgagcggagcagagaggtgggagaggagctgtgattttactcactgaaggagtgcccttacactgcaggtgttgcagagcaggtctcagaacaaggcttagcagaggaacctgtggtgctgcttctaaggcccaagctgccaaatctgggcattaggaggtccagagctgagcacaatctagtctctggcagaggcagctgagctcagcaggtgtgccagcaactctctacgcggcaccatccacactccagatrctgccttcagcctcaagctctctggctgcaaagtagccctatcagacctgttccaattccactcccatccccatattttcctacactgtctcagaggaatttgagcctacaagaaggtttattgaaataatcagaagggtgaagagaaagagagaagaaagaaacaggaaggcatgggggctggcaaagaggacagcaaggcccaagggcttcagactgtctggctagataacccgaagccattttacttgagccattctgaacctccatatccacatctgtcaaatgggaataagaatatcatagttacccagcctgggtgacagagtgagaccctgtctctttaaaaaa

SEQ ID NO: 12011 - DNA, 556 bp, Homo sapiens
tcaccatgttggccaggctggtcttgaactcctgacctcaggtgatccatccgcttcggcctcccaaaatgctgggattacaggcgtgagccaccgcgtctggcctgtttttaatttttagagacagggtctcgctttgtcacccagactggagtgcagtggcacagtcataccttaatacaccttcctgcacctcggctcaagtgatcctccagcctcagcctcccaagtagctaggattacaggtgtgtgccaccatggccagctaatttttaaattttgttttyggtagagagagggtctcattttgttgcccaccctggccttgaactcctgacttcaagccatcatctgtccttggcctcccaaagacctaggattactagcatgggctaccaagcccagctggtatctgagattaatgataatttatttccttttttccaactttaagatttttagtttgttttcctgctttattgccaaacattccattatatatttaatgtctttaagattcatagtgctttctctctctctcttttttcttattctt

SEQ ID NO: 12012 - DNA, 699 bp, Homo sapiens
ctgtcaaacaatgtttcagttttatttcatcttaatgaaaawtttaaaacccacagcttactttattcatactcaatggtgaataataaaagctttacctctaagaccaggatcaaagcaaggatgcctgctcttgccactcctattcaacatagtaccggaaatcccagccagtgcaatcaggcaagttaaagaactaaaaggcattcaaattggaaaggaagaagcaaaattatctctgttaacaggtgacatgatcttacatgtagaaaatgcttaagattctttaaaaaaagtcctggtaaaactaataattgaattcaggcaagttgcaggatacaaaatgtttctagacactagtaataaaaaaatcctaaaagaaaatgaagaaaataactccatttagaacagtatcaaaaaaataaaatgtttaggaataagcttaaccatggagtcagaagacttgcatgctgaaaactacaaaatattgttgaaattacaaaaataaatggaaagtcattcaataaatgtggattggaagacttaatattaagatgtcaatactactgaaagagatctacagattcactgtaatccctatcaaaacccaaaggcattttggccaaaatttaaaaatccatcctaaaattcacatggactctcaaggcaacacaaatagccaaagcaatcttgaaaaga

SEQ ID NO: 12013 - DNA, 759 bp, Homo sapiens
ttttttttaattagtcaggcatggtggcatgcacctgtaatattagctacatgggcagccaacacggctgtggtggcctattactgtgccactgttctctagtctgggtgacagggcaagaccctgtctctcaaaggaaaacagggctgggcacagtggctcacacatgtaatcccagcactttgggaggcacaggtgggcaaatcaattgagctcaggagttcaacaccagcctgggcaacatggcaaaatcccgtctctataaaaatcacaaaaaattagccggacctggtggtgtgcacctgtggtccaagcaacttgggggcactgaggtgggaggatagcttgagcccgggaggcagaggttgcagtgagctgagatggcaccactgcaatccagcccaggtgacagagccagaccctgtctcaaaaaacaaacgamcaaaaaaaaaaaaaaaaaaaaaaaaagacagagataaatggaaaaaaaaattttcaactgagtatcagctctttcaacctatatttttaaagaagcaaatcaagttattttatataaagaaactacatctagtctgtctataaccactcccaaaattacatgtaactgaagaaatcactcatctagaagctatttttcaacaaagtttttttcaagtagcaaaatggaagctctgtagccatcttgaaagacatttaagtcgggccagcagattttttattgttgtgtttttgtaactagtaagttttactttttta

SEQ ID NO: 12014 - DNA, 759 bp, Homo sapiens
ttttttttaattagtcaggcatggtggcatgcacctgtaatattagctacatgggcagccaacacggctgtggtggcctattactgtgccactgttctctagtctgggtgacagggcaagaccctgtctctcaaaggaaaacagggctgggcacagtggctcacacatgtaatcccagcactttgggaggcacaggtgggcaaatcaattgagctcaggagttcaacaccagcctgggcaacatggcaaaatcccgtctctataaaaatcacaaaaaattagccggacctggtggtgtgcacctgtggtccaagcaacttgggggcactgaggtgggaggatagcttgagcccgggaggcagaggttgcagtgagctgagatggcaccactgcaatccagcccaggtgacagagccagaccctgtctcaaaaaacaaacgaacaaaaaaaaaaaaaaaaaaaaaaaaagmcagagataaatggaaaaaaaaattttcaactgagtatcagctctttcaacctatatttttaaagaagcaaatcaagttattttatataaagaaactacatctagtctgtctataaccactcccaaaattacatgtaactgaagaaatcactcatctagaagctatttttcaacaaagtttttttcaagtagcaaaatggaagctctgtagccatcttgaaagacatttaagtcgggccagcagattttttattgttgtgtttttgtaactagtaagttttactttttta

SEQ ID NO: 12015 - DNA, 652 bp, Homo sapiens
cagctctctcttacctgccattttactcctggtgtatgttcattgcatttcttagctggatattaattatgatattagactagagcaatattaatttgtttatgtaacagcatagatttatagccagtaacttctactttggggaaggaggtgcaaaaggtagagtgtgaccacagatgtgtgagttgaatatatgagtatggcacagctgctaaggggagatggtactttggaaggcagccccaggaaaactttgtgtatttggttgcaattctgaagcttccaggaaatccaagcatcaacagagttttaaggcttctgttgaatgatacatcacattaaccaactgaaagacaaaaaccacataatcatgtcatttgcagcaaaagcatttgtcaaagttcaatactctttcttgatwaaaaaaacactcttaatggtttaggtatagaaggaaagtttctcaatatattataataaaggtcctttattaaaaacacacagctaacatcacttagtggggagaaatggaaagcttttcctctaagatctggtacaaggcaaggtggcccactcctcctgcttctgttcaacatggtactggaagtactatcaagagcaattagacaacaaaaagaaataaaaggtatcc

SEQ ID NO: 12016 - DNA, 551 bp, Homo sapiens
gagatataaatataacaaagtggaaatcttccaaagtggatattttcttaggatataaacaaaccttcattataggctgaaccaaattaattatgcatttcatgtagtcacttaattctttcaaacatgtgcctgacacagtactagatactagagatgcaaaaataatctaccttgaaaaagacaggtgtcattcacatataattaattataattgcatcaaatgctaccagaaaaagaatgatatgcattgctcttttgaaaattccttgttctagccaagaaaaggaactaaatttgaagcaagaaagaggtaaaagtaacttcttgccaggctgacattcctattccgttcaacttttctatttattatgccctagacttaatcaytgagaccttcgattctctcatttaggaatgtctttgcctccttcaggattagctcgaatactagtttcttgttgacacttactgggataggcagtaagaactaatcatttcttttctttacctctggtgtgttatatcttttatagttcttaccacattta

SEQ ID NO: 12017 - DNA, 562 bp, Homo sapiens
tctttcttccttcattactttgtgaattacacaatattgtattagctcaaactcttcttaaatttgtctgtaatttttgtatagycttatttccccaacatgccctgccctcaggatgctcctagtctaaatgatgaaactgaaagtatcttgatagtaattcattgtgtcacctgtccaggttatgtcctttacaacttctgtacatcatccaataaacaggcagcttttttttttggcatagtgcagaaaaaaagctatgctgttttggagttatactctttaggttcaaattctggttctgccagcatagttttatgaccttgaggaagtcattttatctttgtaatctcctgtttctttatcttctcaaaaggatagcttaaggttgaatggcagatacaaaagtatagctagacagggaaataagttctagtgttctgcagcgctatagagtgactataactagcaataatttaatgtatattttcaaatagttaaaaagtggattttgaacgtccccaacacaaagacatgatagctgtttgaggtgacagatatg

SEQ ID NO: 12018 - DNA, 833 bp, Homo sapiens
atctgccgtgagcctagcaatcatcttaaaactggctcagaggacctattacttgcatctcagaactggctcagaggatctattactttctttggtctcagccatgttttggctagttgacactctcagataaggaattccattgaatattgaaagacggttgacaagttggtctcaggtgatgtggtagattgatgaaaaatggctccaatttcccacacattttgcagtgactttgcagctcccctctatttcctgaatctgtactggccttgggctttggccaagaacatgtggcagttccagactaaattatgatgcctggactagcctgctggaggaggggaccacatggggcaaggcaagcagcaaatccacctaggtaaatgctggctgactaccattgagaccagccactgaccaaaactgccccattaacccataaacacatgaggaaggataaattactattgtctgagccacttattttggggtagattggtatgtagcaataactaactgatacagatgccaacaaatacctctaggacagaggtccccaagagtgcgaaccttattgtgaattgtgcatgcgagggatctaggttgcacgctccttatgagaatctaaataatgcctgatgatctgaggtgggacactttcatcccgaaaacatcctccccgcgccccscttccccagcgtctgtggaaaaattgtcttctatgaaatcagtccttggtaccaaaagggttggggactgctgctctaggaggcagatgagtaataaagtagtggtttgttcacatgaacaggaatgcttaggtgtcgata

SEQ ID NO: 12019 - DNA, 833 bp, Homo sapiens
atctgccgtgagcctagcaatcatcttaaaactggctcagaggacctattacttgcatctcagaactggctcagaggatctattactttctttggtctcagccatgttttggctagttgacactctcagataaggaattccattgaatattgaaagacggttgacaagttggtctcaggtgatgtggtagattgatgaaaaatggctccaatttcccacacattttgcagtgactttgcagctcccctctatttcctgaatctgtactggccttgggctttggccaagaacatgtggcagttccagactaaattatgatgcctggactagcctgctggaggaggggaccacatggggcaaggcaagcagcaaatccacctaggtaaatgctggctgactaccattgagaccagccactgaccaaaactgccccattaacccataaacacatgaggaaggataaattactattgtctgagccacttattttggggtagattggtatgtagcaataactaactgatacagatgccaacaaatacctctaggacagaggtccccaagagtgcgaaccttattgtgaattgtgcatgcgagggatctaggttgcacgctccttatgagaatctaaataatgcctgatgatctgaggtgggacactttcatcccgaaaacatcctccccgcgccccccttccccagcgtctgtggaaaaattgtcttctatgaaatcagtccttggtaccaaaagggttggggactgctgctctaggaggcagatgagtaataaagtagtggtttgttcayatgaacaggaatgcttaggtgtcgata

SEQ ID NO: 12020 - DNA, 586 bp, Homo sapiens
accctgctgagggtcttgtggtgggcatggccatgtgccactcagatcccccttcaaggcgggcctggatgccgcagctgtggggagtgcctcacctgcaagtgcctcaccccaccccagaccaggccaaccttcacagactgattgaggctggtacataaaggcctggggtttcagcctatgtgggaccattctgaggggctgttttagccctagaggtcaccrcggagttggccgaggttgtccttgggcctaaatcccagcttgatttctcagtccacccctgcctccttctcctcccttcctcaggcgttgctctaaagagcgcttgctcctaagcctcctgcacatggaactccaccatggaatctgcttcccaggaactcaccctgggaccagcccctctgagactcaagtcaacatttggtcctagggctgcaaagaggaggtgctaagaggccaaaggctacttccacctggagaacgggccctgcgtgccagctcccccaaggcctggccaggatgctctgctcggaggcctgtcctgacttcctctgctcattgccacctgaaattacctaaccaa

SEQ ID NO: 12021 - DNA, 586 bp, Homo sapiens
accctgctgagggtcttgtggtgggcatggccatgtgccactcagatcccccttcaaggcgggcctggatgccgcagctgtggggagtgcctcacctgcaagtgcctcaccccaccccagaccaggccaaccttcacagactgattgaggctggtacataaaggcctggggtttcagcctatgtgggaccattctgaggggctgttttagccctagaggtcaccacggagttggccgaggttgtccttgggcctaaatcccagcttgatttctcagtccacccctgcctccttctcctcccttcctcaggcgttgctctaaagagcgcttgctcctaagcctcctgcacatggaactccaccatggaatctgcttcccaggaactcaccctgggaccagcccctctgagactcaagtcaacatttggtcctagggctgcaaagaggaggtgctaagaggccaaaggctacttccacctggagaacgggcccygcgtgccagctcccccaaggcctggccaggatgctctgctcggaggcctgtcctgacttcctctgctcattgccacctgaaattacctaaccaa

SEQ ID NO: 12022 - DNA, 538 bp, Homo sapiens
aaagaatttgtagttgggcacggtggctcacgcctctaatcccagcactttgggaggccaaggtggatggatcacctgaggtcaggcgttcgagaccagcctggccaacatggtgaaaccccatctttactaaatatacaaaaaattagccaggcgtggtggtgggcacctgtaatcccagctactcgggaggttgaggcaggagaattgcttgaacccaggagacagaggttgcagtgagccgagatcatgcccttgtactctagcctggacaacaaaagtgaaactctgtctttwaaaaaaaaaaaaaaaaaaagcagagaattttctactgtccccagatattagtcttgtacaccaatcaataaaggaaaactcaagattgtgagttaaaaataatcatgtctataatgacaactctcaactaactacatacagaatacttactttttaatgggggcaaagtacttttcttcattctaaacttgatagtgttgagtatggggatgtcaactcattttaattgttaggacaaatt

SEQ ID NO: 12023 - DNA, 491 bp, Homo sapiens
aaactccgtctctactaaaaatacaaaaatcagctgggcatggtggcaggcacctgtaatcccagctacttgggaggctgaggcagaagaatcgcttgaatccgggaggcggaggttgcagtgagccaagatctcaccattgcactccagcctgggtgacaagggcaaaattctgtctcagaaaaacaaaaacaaaccaaaaaaccagagagatctgcccaagatcacayagccagaaagtgatggaaatgggatttgaaccctggcagcctgactccatcggctggggggatttggcctggattttgacctgcttctaaaattaacaggaaagcagtaggggttgggggagggtcgggggaggagaatcagcagggagcaggaatttgatggagatcatgtgatcccaatggccttgatgtgttttttttttcaagaagtaggagactaggtgccaagcattaggcccaggtaggaagggagtgcgggga

SEQ ID NO: 12024 - DNA, 530 bp, Homo sapiens
tgacaagcatgagatttctcatgttgggttttttttttaatttaattttttaaaggaacatgaacagttgcaatgataatcgcggaccttcagtgatggtgtctcccagcaacaagccagatcccgctgtagcccaccctctgccctggcaagatgaaagtggagtagggggctttgttgcttcagagcagcagtcatggagccctggcctggccctgatggatgtttctcatccctgatgccctgaaatgggcccgccaagaagccccgactcttttgggctgtccccacatgtgggctgtccccagagctctctcctctccatgacagcagtccttggygtcatccgagtctctggcctggggctctcagggtcatgcttctggcacagctcaggctcccctgggtgccctgccctcagcaggagactgcaccctgggaggaagggaggtgcagctggagaggaggaatggtggggagccccagggcagggtggctcgaggcaggcagtatctggatggctgccagaa

SEQ ID NO: 12025 - DNA, 530 bp, Homo sapiens
atccttccatcactctgacacatacatgcgaacacaccataattttgtccaaaagcagcactggtcttcctgtccattctggcagcagctgctggatggctctgggcaggaacagaagaggaggggtctgtggggtttgctgttgatagtgaccctcagcctggagttgctggagctgccctgctcycccagccaggggttagggctgaccatgtggaccactctgcctgcctcaaccccatcgcaacaggctccccagttttctctctgagagcagtttcagaatagagtcaaggggtttgaaggatagtaaaggttcacagaaggggggtgggggataacacctggaagcttttggataccagcatgaggaggaggagcacagcctgtcttccttcctgtggttcttccgtcccactccttcctctccctcacttgagctgccccacaaagtgagcgcttccctggccttgctctgctgaactcacaaaggtggtttgcccttggctactgtgtccctccctacaggc

SEQ ID NO: 12026 - DNA, 544 bp, Homo sapiens
aattaccagccattgttctggaggtcataacatttgtgacttccccaattacttctgyaaataacattactattgtagaacttaagcttggccttttgagatgtcttttcagacttttgcatttctgatgaccgggtgactccactgggaccagagactcaaccctcaacaggtcctgtggcccccacctagaagtggactcagcgcacaaagaccatttccacacccctatgactgtatccccaaccagtcagcagcagccattccctagcccctcctgccaaactatctttagaaaactctagcctccaatttttggggaggctgatttgagtaaccaaaaattccagtctcctgtttagccagctttatgtgcattaaactctttctctattgcaattcccctgtcttgatccattggctatctgggcagcaggcaaaatgaaccaatcatgcagttacatcctctctcctcactcccctttttatcttcttctcttcttttgacctcaaattcaagttcttcccattggattgcaacacc

SEQ ID NO: 12027 - DNA, 544 bp, Homo sapiens
aattaccagccattgttctggaggtcataacatttgtgacttccccaattacttctgtaaataacattactattgtagaacttaagcttggccttttgagatgtcttttcagacttttgcatttctgatgaccgggtgactccactgggaccagagactcaaccctcaacaggtcctgtggcccccacctagaagtggactcagcgcacaaagaccatttccacacccctatgactgtatccccaaccagtcagcagyagccattccctagcccctcctgccaaactatctttagaaaactctagcctccaatttttggggaggctgatttgagtaaccaaaaattccagtctcctgtttagccagctttatgtgcattaaactctttctctattgcaattcccctgtcttgatccattggctatctgggcagcaggcaaaatgaaccaatcatgcagttacatcctctctcctcactcccctttttatcttcttctcttcttttgacctcaaattcaagttcttcccattggattgcaacacc

SEQ ID NO: 12028 - DNA, 1357 bp, Homo sapiens
tgaaatatattttgatgttttccacttgaatttgtagctatttaaattttaataaaagatactttgactttttatagatcaacatctaagccactcaattcaattactcaagaaaataattcattacatatataggcttgttgtaatattttgtttattagtgttcttatgcaaataaaatattgctattgacaaactaaatctaaattaattaaatagtaagttaataaatttctatactgccacctttttgattgtttttgtagagatgtttttaatataaaatctctgaaaccatgagttttcagcctggcactccaattctcatgaagtaattgttacaatgataagtcgggctacttcagacatagcttcaatgtacaagctgaaatttattcaaagtattgtgctgtagaacctaatctggtcaaattaaaaaaaaattcttttaatttacctggcatattgggtttataaaattaattcatgtttttccagcttatgtgagatcattggttcaacaggaaattttaattcctaagtgttttatttccttgtraggaacatgcagcaaaggccttaaagtattccatagggctccagccattcaaaagaactgcaaaggaacctacaaaaaataactcatcataagaaggttggttgatttaaattagagtcaagagagtttactttgtagaaacaacaagtggaagtagcattaagtcactcttttctattggaagaacattgttccattagagttggtagctaactatggtggtgcgccacagcatcaccacgtgttcctcgattcacatctaaagatgcttcagaacttcacagtgaccagccgtccagggcgggagtcaactttaggtcacacctcccagaattggacagagcaacattgccgtcttactcaaggagtatgtattaaatacagtcagggatgtaatttctcccagtgggtagaaatttgttttgtatatgatggtgtccacttttcctatgagaatagataagcagaggtatggtacacagtggttcctatgaagtgtctattgagtcgactggttgtcaggaacttgtaaagaacctaacaatcatcacagaaatgaagttttggatcaattcaagtgtttgagtgaaatggaacatagaatggggtagtggagaaagaaatatattaaataaatataattatggtttcatcaacaattatagaagtgacattggaatagctacatatctcttcttgattgttcttctatcatctatctatcatctatctctcgatctatctatctgtttagctagcgagctagctagctagctcactatctaatctatcatttcc

SEQ ID NO: 12029 - DNA, 560 bp, Homo sapiens
atggttgacacctcacgcaggcactcgcatgcctgaaacggaccaggccatgcagggagcagatgctcaccggggacagaggcctcgcaacccaccagggacagatcgtggcaactgaaggggccctgttcaggagagctagatgtcagggaggcagcagcaggcgttcctatgggctggggagctctgggttcctccaccgccccccgaccccaactcccttgggccctgggcacttctaccctctgggacagtcgtccccaactctcttggtcctgccccygccagtaaaataatctggacacgctcctccaggatttgcttataaattagacccctgtgccactgcgctatgtgttctaaaatgtatgcaaaaataggcttctttaagcccaggaagtcaaggctgcagcgagccaagagagcgccagtgcactccaacctaggcagcagagtgagaccctgtctccaaaaaaggaagaaagaaaaccactagatacggtgatggttgtacaccttagtgaatttactaacaatcattgaattgtctatgtaaaatg

SEQ ID NO: 12030 - DNA, 521 bp, Homo sapiens
atcaccttttaggaaacgtcaagtgtttttgacctctcattcctgtgtagaactgtccctcctctgtacccttaatatttactacttagtttattaatttcttgcctgttaataacacttttcacggtaaaacaaatatctattgctttactataagtcaggaattgtgttaggtgctttaagggtaaactctcttataaccagcctagcattgtctccattttacagataaggaaataaggtaaaagtatgaataaataattagtatccagcatagagcaaaatgcaaaataaattattagaagtaattaatattgtgtgtttatatattgacctaatgtctctttgaggtaagaacagaggcctattcatctgtgtagtcccagcactgacacagtgcctaaggtctaatagctgcttgatatatctcrgtgaaaggtgcaattgattgaccagtttgtctgaatcttcctaagagtttagagtagagcaaaagtgattcagattagatagacagcaga

SEQ ID NO: 12031 - DNA, 526 bp, Homo sapiens
agtctttgtgtaacaaatgttttcatttctcctgggtaaatacccacgagtggaaattcctgggtctcaggttaagtgtatgtttaactttgcaagaacctactgaaccattttctaaactttctgtacctttttaaattctcatcagcattgcactgaaggttttgttcagctacatttaaaaatgttagactcaacatctacctcattctgagccgggaggttgagaataatgaatgctacatttcgttgactctaagatgccatcaattttaagatgcgccattattttacatactgctaagaaagaaaagcatttcacaaatgatgacacaatgcttttatatcacttagaaaaaattttgcatacttattaaaatagcccatatatcacccttatacatacataaaatggaaaatacaaatgaaaaaaaatataggtcgggtattcctagaatgtgtattcacctttagaatcttctgattttttttttgactccagtcctcagtattyatatttttgtcc

SEQ ID NO: 12032 - DNA, 810 bp, Homo sapiens
atacagtttaccttcacaaataagcaaaacctatgtatgtaaatcatttccaaactgagaaacaccattaacctttagttccttatgttgtataacttccactgttgacccccatttattgtgtagattttagagataaagaaaaaaaaatgttggggagcagttttcagacctttctgaatcaactactttataataagatctacaacttaaattttttaaatggtcaaatatgtatttcagtgtaaccattcttactcattttgagaattaaaaatttaagaccagtgattttccgagttttagggcttttgaagaaagaatgagcaggatgatcatataaattaagactatgaataaaaatggggatgttcatattttactgttttttccgagtgattatatatacaatatcttaaagaggatgactattgtctaatagtaattatgttacacattttctcctcttgcactgagtaggaatgtatattcttttactattaataaactacgttttctgggcaacacttaattttcttcacaatgtcaattttacgtaaagaaaataaaatggagatggctcattaaacaaagttcttgtgctcaggagtagccattaacctataaataatcctaacaatacaccatcttatggtgctggcttaagaagcctagaaagcctttacaatacatatgattkagctcaataattgtaaaataatatctcatcctataattagtgataattttcctcaatgacaaaataagaaggtcaagaatggttatagagaaagggtgttcaatcactct

SEQ ID NO: 12033 - DNA, 541 bp, Homo sapiens
taaaacaacaaagtttaccagagcaactgaattcacctctggcctagagctcatgaattatctctgaaagactaaaccttgcattcaaacacaaaggcattgataattctaagcttaccttgatttgggaatcattgtgttatataatgytatagctactataaaataatcccatatatacagatcattataatatgaaaccttgcagcaacttaatcacctgacatatttggagaataattcctctattacatgctagcattacaaaattaataatgtgcattttagtttgtatgatcatcctttttttttctttttttttgagacaagttctccctctgtcacccaggctggagtgcagtgacactatcatagctcactgcagccttgagctcctgggctcaagcaatcctcccatttcaccctccgaagtagttaaggctacaagagtgtgccacctcatttggctaatttatttatttatttttttagtagagatgggactttgctatgttgcccagcctggtctcaaactcttacc

SEQ ID NO: 12034 - DNA, 509 bp, Homo sapiens
acccgatcagaaaataaagtacaatagccactaggtggcgatcgagtattgccgaagggacagcaaacgataagctgagtctgaagtgtggccagaaagatgtgaaactaagcagcaaactagcccgaatatgaaatgttgagagcaacccatgcggtgagtgtcwtttatggatagtacagatgcagcagccaaaaggagagcagacatatattctctctctagagaatataggtgatttaaacacgtttcccccagaactttagtgaaacagcgctggaacaaccagcgatagttaaccaggtagtctggaagtgccatagtattcactgcaagaaaagggaaactgaaattaatgaagcagacaaacctctctccgggccatggcaaaagaaatgttgatggctgatgtaataccttggttcttatcttcttagcttaaaagaatttaaacaggaaacatgcagcaaaagaagtacagcatagagtaatttattgcacacaaaaaa

SEQ ID NO: 12035 - DNA, 538 bp, Homo sapiens
ggtgaggataacccgcctgatttgggcaaaggtaaggtgcctacatagggtaataccctcctcaatgctcagcccagacctgtcctccaggtccacctctgtactcactctctgtggcaaagagtcggcatagcataagaactcagcaatgctttggacactgggaagtccacaccgctctgtccctccctccaggtctatgcaccccggatcccggtatatgctgagattatggttctgaagcccaccgacaaataggctgagagcagttaacggactacagctccmagcatattaggtggggcatgtacaactttgccccttcttccagggctatgccttaccccggagactggcgcatgctgggattgtagtcctgtagccatttgaccaaagggctgggagtgtttatgagaatacaactcccagcaatcctagggaggagcacacagccccgcctcttcccccagtgatacgcattgtccctgagacaggtgcatgctaagattgtagtcctgaagctctgcgaccaaagggc

SEQ ID NO: 12036 - DNA, 538 bp, Homo sapiens
ggtgaggataacccgcctgatttgggcaaaggtaaggtgcctacatagggtaataccctcctcaatgctcagcccagacctgtcctccaggtccacctctgtactcactctctgtggcaaagagtcggcatagcataagaactcagcaatgctttggacactgggaagtccacaccgctctgtccctccctccaggtctatgcaccccggatcccggtatatgctgagattatggttctgaagcccaccgacaaataggctgagagcagttaacggactacagctcccagcatattaggtggggcatgtacaactttgccccttcttccagggctatgccttaccccrgagactggcgcatgctgggattgtagtcctgtagccatttgaccaaagggctgggagtgtttatgagaatacaactcccagcaatcctagggaggagcacacagccccgcctcttcccccagtgatacgcattgtccctgagacaggtgcatgctaagattgtagtcctgaagctctgcgaccaaagggc

SEQ ID NO: 12037 - DNA, 538 bp, Homo sapiens
ggtgaggataacccgcctgatttgggcaaaggtaaggtgcctacatagggtaataccctcctcaatgctcagcccagacctgtcctccaggtccacctctgtactcactctctgtggcaaagagtcggcatagcataagaactcagcaatgctttggacactgggaagtccacaccgctctgtccctccctccaggtctatgcaccccggatcccggtatatgctgagattatggttctgaagcccaccgacaaataggctgagagcagttaacggactacagctcccagcatattaggtggggcatgtacaactttgccccttcttccagggctatgccttaccccggagactggcgcatgctgggattgtagtcctgtagccatttgaccaaagggctgggagtgtttatgagaatacaactcccagcaatcctagggaggagcacacagccccgcctcttccccyagtgatacgcattgtccctgagacaggtgcatgctaagattgtagtcctgaagctctgcgaccaaagggc

SEQ ID NO: 12038 - DNA, 606 bp, Homo sapiens
gctgacagagtgagactccgtctcaaaaataataataataatacagtctctgggccaggcgcagtggctcacgcctgtaatcccagcactttgtgaggctaaggcgggtggatcacttgagcccaggagttcgagacaagactgcgcaacaacgtgaaaccccaactctacaaaaaaaatacaaaaatcagccagccgtggtggcargtgactgtggtcccagctactcaagaggctgaggttggaggatcccttaagcccaggaggcggaggttgcagtgagctaagatgatgccactgcactaaagcctaggtgacagactgagaccctgtctcaaaaaataaaactaaaaataaaagaatacagcctctaacacaaatactagtcctgttatttcaatggcaaatatggtttgcaggcttgaacgtggaggacgtgcaaaacataacaagtaatcaatgtaaaagctttaaatgtaaaagcatgagcttgcattccttctgcagctcttcacccagttgtcagcccttcacccattccttcagctcttcacccaggtgtcaggtatgaggttaggtgctagggagacaggtgcatgagactca

SEQ ID NO: 12039 - DNA, 337 bp, Homo sapiens
tgctatgtgatgtgtctgctcccactttgccctctgccatgattgaaagccacctgaggccaccccagaagctgtgcagatgccagcaccatacttcctgtacagtctgcagaaccataagtcaattaaacctcttttctttatcaattacccaatctcaggtatttctttatatcgatgccaaaacagcccaacacataatctttgccatagtccctactacttcctgttttattacagccagtctgctkgactcacttaagttactgtctggttcccagaggcatttgaatttgactacccctgttttaaagaagtattacagagcatatagttg

SEQ ID NO: 12040 - DNA, 519 bp, Homo sapiens
gctccacatccatctggcttcggtggaaaaagccagatttcaccacagtcaagattgtcaactacactgtgcgcttcagcccctgggggctcaggaatgcctccctggtcacctattacaccwggtggggactaatgcctttactaatgtaaagaagggaggaagaataggtggggggtggtggtgggaaggcagcaggtggtgatcagggaagggcccctgggattcaggaacatgtcatggctcacctgttacgctgaggccacacagaggggctgcacagggtccacgtccttgcctgctgaccagatggtagcaaggaggccatccaatcccgtcccctcacaacagagccttgttctcaaactccggagaatgtgacacaggacagacctgtttctccaacctcagagggctcccagtctgatggtgaagagaaccccacccctgtcctcagagctgctccctctaccctgttagatggggagacagagcctgaggagcctgaggtttggcgga

SEQ ID NO: 12041 - DNA, 480 bp, Homo sapiens
tgtgttggtgctttactttaaagaaaaaaaatkgaaacttttgaaggttttcagctttatattacaggtttaatcccctaacatgatgtaatttcttccgttcatagtttgttcttcaaggaccaatatttctccacgacaactcacagagtgatctggagatagggaaacaggatggaatttcccccaaaaaaatgataaccaaggaccttctcaaaatcactgtaacctttgctgtacttccttcttcataaaaatgtaaagatattctgaaaaagtaactgacaaacaggtataagtgctatcaaatatatgtttataagcatattatattaataattaaaaagaggccaggcatagtggctcacgcctataatcccagcactttgggaggctggggcaggcaaattacttgaggtcaggagttcgagatcagcctagcttggtgaaactccatctctaccaagaaaagcaaaagtt

SEQ ID NO: 12042 - DNA, 480 bp, Homo sapiens
tgtgttggtgctttactttaaagaaaaaaaattgaaacttttgaaggttttcagctttatattacaggtttaatcccctaacatgatgtaatttcttccgttcatagtttgttcttcaaggaccaatatttctccacgacaactcacagagtgatctggagatagggaaacaggatggaatttcccccaaaaaaatgataaccaaggaccttctcaaaatcactgtaacctttgctgtacttccttcttcataaaaatgtaaagatattctgaaaaagtaactgacaaacaggtataagtgctatcaaatatatgtttataagcatattatattaataattaaaaagaggccaggcatagtggctcacgcctataatcccagcactttgggaggctggggcaggcaaattacttgargtcaggagttcgagatcagcctagcttggtgaaactccatctctaccaagaaaagcaaaagtt

SEQ ID NO: 12043 - DNA, 520 bp, Homo sapiens
aactctcaaataatatcaatttatctagccaaacctaaaagcaatcttactcctagaatgactatctggaagctttatacattaaaaaaattattgttgaatatgcttctgtgtcgactaatgacttaatttatcttccaaactgggttagttttgttagaggcagcagtagcyggatggaacattggaacaataggaataagacaggattatcccacacaacccaaggcccacgaccaaccaaccttgacccaaatgggttggaagctcagacggaaagtcatagttcctgctctctaggggcgcatatcctgaggaagggggaggagggatgatatggtggaacattctgggactgtgagctccatatttggggatgtaggtgtgtgtgttacgggggtggacttggaattcctctctgtctgtgtgggttaaaatgagagctccgagcgctgatagctctcaaaactctggatcatctttaaagacctgtggcacacagaccactggacaaagttct

SEQ ID NO: 12044 - DNA, 520 bp, Homo sapiens
aactctcaaataatatcaatttatctagccaaacctaaaagcaatcttactcctagaatgactatctggaagctttatacattaaaaaaattattgttgaatatgcttctgtgtcgactaatgacttaatttatcttccaaactgggttagttttgttagaggcagcagtagccggatggaacattggaacaataggaataagacaggattatcccacacaacccarggcccacgaccaaccaaccttgacccaaatgggttggaagctcagacggaaagtcatagttcctgctctctaggggcgcatatcctgaggaagggggaggagggatgatatggtggaacattctgggactgtgagctccatatttggggatgtaggtgtgtgtgttacgggggtggacttggaattcctctctgtctgtgtgggttaaaatgagagctccgagcgctgatagctctcaaaactctggatcatctttaaagacctgtggcacacagaccactggacaaagttct

SEQ ID NO: 12045 - DNA, 536 bp, Homo sapiens
agagatctttaaaatattttgttagatttattcctagcaccttatatattttgttactcttgtaaaaagtatccttttttttttttttttttttagaaacggagtctcgctctgtcgcccaggctggagtgcagtggcacgatctyggctcactgcaagctccgcctcccgggttcacgccattctcctgcctcagcctcccgagtagctgggactgcaggcacctgccaccacgcccggctaatttttgtatttttagtagtagagacggggtttcaccgcgttagccaggatgttctcgatctcctgacctcgtgatccgcccgcctcggcctcccaaagtgctgggattacaggtgtgagccaccgcgcccggccagtatccatttttaaaaactacattttctctttgttgcttgggtagagaaataaaatcaatttttaatttatcttatatctgatcattttgttaaaccctcatattaattttaatgctttaaagatgtttagagggaaatattttataaatacacaaa

SEQ ID NO: 12046 - DNA, 536 bp, Homo sapiens
agagatctttaaaatattttgttagatttattcctagcaccttatatattttgttactcttgtaaaaagtatccttttttttttttttttttttagaaacggagtctcgctctgtcgcccaggctggagtgcagtggcacgatcttggctcactgcaagctccgcctcccgggttcacgccattctcctgcctcagcctcccgagtagctgggactgcaggcacctgccaccacgcccggctaatttttgtatttttaktagtagagacggggtttcaccgcgttagccaggatgttctcgatctcctgacctcgtgatccgcccgcctcggcctcccaaagtgctgggattacaggtgtgagccaccgcgcccggccagtatccatttttaaaaactacattttctctttgttgcttgggtagagaaataaaatcaatttttaatttatcttatatctgatcattttgttaaaccctcatattaattttaatgctttaaagatgtttagagggaaatattttataaatacacaaa

SEQ ID NO: 12047 - DNA, 562 bp, Homo sapiens
aagactagaactttcctttaaaataacatgtggtgctaaggataaacttttccacctaactagcttaaaatatgtatgttaggagaaaaaatatactgtatttaatacatagcataactgatttaraaaaagtcgactgggatatttgatgctagcgatatgaaaagctgagagttctttattttattgttttctttaatttgatatacttttctttcttattcactagcttctgatgtactttttattatttttttttctattctgactagtttaagtgcccttgtcaacagttcagttgctgaatgaagcaaagtgttagttatagtgtgaaaatctggtgtgctgtcagaaaagggcaagacattaacttgcgaattttgacttccagtgttccatagctcaatgatggctgaaaagcctctcttatgaattactgttaggggtaacatggcagaagcatttatgaagctttgtaattatgcatgatataagccttcatcatacagaactatgcttctgcagtgtttgtgatggtgttctttctttaaaaaataattaa

SEQ ID NO: 12048 - DNA, 838 bp, Homo sapiens
gttacttataaataccgagtctcgagtattttgttatagcagcatagagacagtcatttaattccatatggatatatttaacatcagttaattaagctaagggttggaattatgattggaatatggtctcagagactcagttcacaataaagagtaaaaagagatctagaatgagtttctgaataattgtggaaagcctttttggtgaacttcactagactgaagaatctagccctaaatttcaatttatgatcaagggcctttagattgtgaagttttataaatatttctaagatagggattaagaaggaattcaaggggaaaacttttttgatttttcatttaattggatcatcacaactctcttcagtgttgggagagtgagcagaagcaagttcctggctttcctggtagattgctgtcagtcatgtcagcatctgtcccaaaaactcatattgcagaagaggatcaggaggattagtaagctagtttctaacatttactgccttttatcctcaaaacctaaagctttctttgcctcacttactgactgmaagacaaaaaagagaatgtcttcttattttatatgttgggtttggtaatggtggtaagtagggtagagtcaaagtttgacacaaactatatattttttagttcctctgggtgagatgtgagatcgttaatttgagaaacttctagctttttgaggtagatgtttactgctataaattttcctcttaacactatttttgctgcatcccagagattttggcatgctgtgtctctgttttcattcctttcgaagaatttttgggtttttgccttaagtttgttgttt

SEQ ID NO: 12049 - DNA, 636 bp, Homo sapiens
agacccctgccggttttgagaccctgtctcgataaaataaaaaatgtaaaaagcaagacaaagatacacctctctcagcttttattttattttattttatttaatctctctctcatttcacttgtttctttttatccctacatccaagtcccagtcctctctctccatacagattttttttttttagctttattaagggggtaatttatacacagtaaaatttactgttttgaaatatacaagtcggccagatgcggggcctcacacctgtaatcccagcactttggaaggacgaggcgggcggaccacgagttcaggaaatcgagattatcctggcaaacacggtgaaaccccgtctctactaaaaaaacatacaaaaaattagccaggcgtggtggcaggcgcctgtagtcccagctactcgggaggctgaggcaggagaatggcatgaacccaggaggaggagcttgcagtgagccragatcatgccgctgcactccagcctgggcgacagagtgagactccgtctcagaagaaaaaaaaaaaaaagaaaaaaaagaaatatacaagtcaatgggtttcgacaaatgcacacagtcatgtggccactaacaaaatgaagatatagtacacctc

SEQ ID NO: 12050 - DNA, 636 bp, Homo sapiens
agacccctgccggttttgagaccctgtctcgataaaataaaaaatgtaaaaagcaagacaaagatacacctctctcagcttttattttattttattttatttaatctctctctcatttcacttgtttctttttatccctacatccaagtcccagtcctctctctccatacagattttttttttttagctttattaagggggtaatttatacacagtaaaatttactgttttgaaatatacaagtcggccagatgcggggcctcacacctgtaatcccagcactttggaaggacgaggcgggcggaccacgagttcaggaaatcgagattatcctggcaaacacggtgaaaccccgtctctactaaaaaaacatacaaaaaattagccaggcgtggtggcaggcgcctgtagtcccagctactcgggaggctgaggcaggagaatggcatgaacccaggaggaggagcttgcagtgagccaagatcatgccgctgcactccagcctgggcgacagagtgagactccgtctcagaagaaaaaaaaaaaaaagaaaaaaaagaaatatacaagtcaatgggtttcgacaaatgcacacagtcatgtggccactaacaaaatsaagatatagtacacctc

SEQ ID NO: 12051 - DNA, 854 bp, Homo sapiens
ctaatgaacactgtgaatctcactgatccagatttatttgattgaacttttgtgaaataataggataactatcatttattgagcatttactatcaaccatagtattagcatttataaatagagaaattgatacatgaggtggtcaaataacttgcttcagttaggttcacatgacaccaaggcccatgctcttaaccattacaagatcctggctttatgtttgctccaggatgttattctgcaaattctacttatacatgccactcttattccctatattaccagtcaggaatactacagattacctctctatgaaacaagaaaagcaggagccttcaaaggatacaraggtctccctcactgcccttgggaagcttctggtttcggtggcgataaagggaaattcactgtctaaatgccacaaacagatccttcttgaaattatcagcaaagaggatgtgatagggcatcgtgttaaagatccagatacatattttccaatgatattatgggaaggtgcaataggcttcttttttatttcttctaagagaagcttgcttttgagccctaaatacttgttggcctgcttttataagcaataggatattctgtatggatatctggttttatatctgttaagaaatggagatgataatatgccccctcccatttttttaaattgtcaaatacataatatgttgtaaaccttaattctggcagcataggttacttatggatgggttttctttttttgttgttttgttctgattttttattttttatttcatgtaaaagaaacccaaaagtagtttattgacatacataactgaaaaatgtaggcttcaggaacagct

SEQ ID NO: 12052 - DNA, 854 bp, Homo sapiens
ctaatgaacactgtgaatctcactgatccagatttatttgattgaacttttgtgaaataataggataactatcatttattgagcatttactatcaaccatagtattagcatttataaatagagaaattgatacatgaggtggtcaaataacttgcttcagttaggttcacatgacaccaaggcccatgctcttaaccattacaagatcctggctttatgtttgctccaggatgttattctgcaaattctacttatacatgccactcttattccctatattaccagtcaggaatactacagattacctctctatgaaacaagaaaagcaggagccttcaaaggatacaaaggtctccctcactgcccttgggaagcttctggtttcggtggcgataaagggaaattcactgtctaaatgccacaaacagatccttcttgaaattatcagcaaagaggatgtgatagggcatcgtgttaaagatccagatacatattttccaatgatattatgggaaggtgcaataggctwcttttttatttcttctaagagaagcttgcttttgagccctaaatacttgttggcctgcttttataagcaataggatattctgtatggatatctggttttatatctgttaagaaatggagatgataatatgccccctcccatttttttaaattgtcaaatacataatatgttgtaaaccttaattctggcagcataggttacttatggatgggttttctttttttgttgttttgttctgattttttattttttatttcatgtaaaagaaacccaaaagtagtttattgacatacataactgaaaaatgtaggcttcaggaacagct

SEQ ID NO: 12053 - DNA, 590 bp, Homo sapiens
aaacctgaagcagcagcactaagagttccatgttctgtgtcagatttaaaaaacagacaaacaaacaaacaacaagccaatcccaatcacacagacctacagcattaaaggaagggtggagagatgatgtcctctctctcggtactttgccattcgcacaggaagtttctgttgtttctctaaatacagaactgaacagcaggcttctacctgataaggctacatccagcaggatccaatagatccaatccaatctgataaaatgtagggattgagttcaggtatagttcagtcctgttatacaaccacccaaggaaagaaactcactgaaactttacttacacagaaatgcaataatatgaattttgtgatagtccagacacaagccaartcgaagtttactttatggctttctctgattcaatcacaccatatatctataggtatcaactagtggaagcaagcaaggaatgtttaaatctggccctactaggttataagttaaaagcaggaaactaataaaaatgggaaaggaatgtttgaatctgtcccttctagactgtaagctacttaagatcagaaaccattgt

SEQ ID NO: 12054 - DNA, 762 bp, Homo sapiens
ttttcttattgcctgctatacatgctgaatagggtgttgcagaagccttgaacccagaactgccaacatgtggaaagaaaataagttccaagaaaatctttcttgctctagcaaaaagtacaggaaaagggtggtctcatgaacagaaaacatggggggcaatacctgccctacctcagcaaaaagccaacagaacgacttcccctctctgcatggtttcagtggggccaacggggaaatggtcttccatttcccattcagcaccagagtgatgtcaacgatctagtacgagctgagcctccatcccacacatctggcagcaattagacttaataaggtggtgtgagacaaggctagtcaccactctgctttacttcctcatatggtttggctgtttccccacccaaatctcatcttgaattgtagttcccataatccccatgtgttgtgggagggacctggtgggaggtaatttaatcatgggggtggttaccctcatgctattctcgtgatggtgagtaagttctcaagagatctgatggttttataaggggcttcccccttcactcagctctcatttctctctcctgccaccatgtgaagatggatgtgtttgcttcmctttctaccatgattgtaagtttcctgaggccatgtaaaactgtgaatcaattaaacctttttcatttacaaattacccattctctttacagcagtgagagaatagactaatacactccccaacaatggtgtcagcagggg

SEQ ID NO: 12055 - DNA, 552 bp, Homo sapiens
ccagttttttacaacaggtatatttcacatcctctctaataaatctttgttttctccaaaaccttgcatatattatcctctgttttcacctagaaattttagagttttagcatttatatctgggggtataatacattttcatttcatttttgtgtattctgtgagggaggaatacaatttaattcttatcaagcaaaatttatttaacagactttcctttcagactatgtatgtaaaggtccacttctagactttttttttcacaytggcctatttttatgttcttagttcaatacaacactgttttggttactgtagcttgtaaattttgatttcaattagtatgaatcttccactttgttcttcctctataagattactttcggctaagatttttgtgttttcatacaaattttagcaactccttagcattttttatttttaaaagcatgttaggattttcactggaactgcattataactatattgaaatcttgacaggattcatttatcaaattcataagcatgatatatattatttaagtcctcttt

SEQ ID NO: 12056 - DNA, 540 bp, Homo sapiens
caagactttccttaatttagtaatttttagaagtatacatggtcaaattttaattaacaaaaataatttaaaaggtctttgaaagcaatggttagggaaggcatatcactagtagtttttaattttttcttttgaaaagggacttacaccctcttctgatgtctatcaggggttatctctaatgctagattacactgggaatcctggctggtaacttattcttttctacctgtgtgcaactgggtaaatagactcttgcctctttccagttgtgttctagaaaccatcattcaagagtggagcgccaaatgtggacaaagaaaacgggagaattgcaaagctaatatttctgaaagatttatgtttaactttgataaaaacttgtccagaaatacaaacaagtatgttttgacaaacattaattactccagttctctakttttaaaagtgcagaaattcatctctgaagaatttccactgccaatgtgttggagtgacatgctcattggtccccagtcctagttctcagcatcttcaacc

SEQ ID NO: 12057 - DNA, 1088 bp, Homo sapiens
cctctaattacctgtaatccataagacagtgtgaggacagttctgggagcaggtgagttcgagaagcaccaagacgcatcatttgcctgtcctgtgtgtggtctaagaggtgcctggtgcttcactgcagagcacgcagctccttgctccagccacctgcaccacaagcactgcttctgatgtcataagcgtggcctcgaggagatgcttaggagcccccaggccagtgcacgtcccctccccggctgaaggtccccaccatggcaggggctggccacgcaccccggccactccgggacacgtccaacacacgtccccctccccagctgaaggtccccaccatggcaggggctggccacgcaccccggccactccaggacacgtccaacacacatcyccctccccagctgaaggtccccaccatggcaggggctggccacgcaccccggccactccgggacacgtccaacacacgtccccctccccagctgaaggtccccaccatggcaggggctggccacgcaccccggccactccgggacacgtccaatacacgtccccctccccagctgaaggtccccaccatggcaggggctggccatgcaccccggccactccaggacacgtccaacacacgtcctcctccctggctgaaggtccccaccacggcaggggctggccacgcaccccggccactccaggacaggctgccgcagctggggagcttctggttccccttctttgctgttgcaaaccgctctctctcattttaaaatgtcctgtatgaagcgaaggcactgaacacactccagcctgcaacgcagaagtgcacattggcgtggagcatttgaaaggcattttctccttggaaactgaaaggtcaatttgtcaaactccactcctcagggttccaagaaaggttcttcagcccttgttttccagccataacagggtaaataaatgagactctcatctgcgggtctcctgtggattctgccggggggcggggcttcggtggaaagggagcatggctgcgcagtaataatagcggcaggctgggaaaagctaatgtcagctccaatttccaa

SEQ ID NO: 12058 - DNA, 578 bp, Homo sapiens
attgtctcactgggtaacccttatgaccaaaccatgacaaacatctataccattacttgccaagtttggtaatgttatctctgataataaatagaatatggtttgcactggctagtcttggctgataaaattacttttatttgtttgggaaattagcaaaaactcaggattggaaacgaattggtacattcacttctctgcttggccgagaagttaactgctttggatatttgatttgctttgttttgtttttaacatccagctaaaaawgaaagcaaacatgttttttaatttgggcttttgaattgggagattgctgttaatgaattagagcttaactcctcagctataaaagagaactatataggatgacagcaaaatcttaggagaaacgttttatacccttcagatggtaatgccattgccccaccatacactaaacttttcttaatagctgatgaatacactttcccactttatttctcaatccccttgacctggttgacttattccattaaaactatcttatggtccggacagtaatattagagaataactgtttctcgttttagggtgag

SEQ ID NO: 12059 - DNA, 498 bp, Homo sapiens
gggaaagtctgggaaactctgtccttgccaaatgttaatttttcttttcttttttattttccttagatttatttgatagcccatatagggtttgaacccacgacaaaattaatttatctatttatttttatctcctttatattattaagttttttaaataatttcaacttttattttagattcgggggtacatgtagaggtttgttrcatgagtgtattgcatgatgctgatgtttgatgtatgaatgatcccattaccaaggtactgagcatagtacctaataggtagttcctcagtcttttccaccctctttttctcccctctctagtagtcctcagtgtctattgttcccatctttatgtccatatgtaccccatgtttagtttctacttatgtgagagcatgtggtatttggctttctgttcctgtgtgaaatcacttggaagtttcccgaggataatggcctccagctgcatccatgttgccaaaaaggacat

SEQ ID NO: 12060 - DNA, 578 bp, Homo sapiens
atgcaagtgaactcacagcctttcagaatcggtcctgcaagatgaaacaatcagtggcaagtgatcccaagcagggccctgcttagtaatgcactctaaggtttgctcttgctcctgcttccctgcaataaactccatagtttagtattagcacgttagccttttcctcaggctctgtttcctgaggaacccacgccaagacacccagtgttaagaatgcttgccacatctatgtgtagaagtatgcatttgttatctattgctgtgtaacaaattatcccaaaatttagtgtcttaaaacaacaaacatttgttatttcagtatctatgggtcaagaattaaggagcagtttcgctgggaggttctggctaagggagtctcctgcagttgcagtcaggctagctgcagggttgccatcatctggaggctttgctggggctggacaatctgctttggagatgaccactcacatgactgttggcagaagrcctcagttccttcccatgagggctctccataggctgtttcagtgttcccacaatctggtagttgtgagtcactttacctagagcaaaca

SEQ ID NO: 12061 - DNA, 228 bp, Homo sapiens
acaaaaaaaaaaagccctgtaaatgttactttagcctcagtaattccactcctgataatccatcyccaaatactaataaagctttatatgaagagactccattaaagtattacttatgagtaaaaagttgaaataaccagtgcaatgtgtgttttaaggatgttcagctatgctgtagagaacaagacaacaaaaccaaatgggacagatgaaacgcctaaggtgtgt

SEQ ID NO: 12062 - DNA, 560 bp, Homo sapiens
ataattgtgtaaacttttaggcctgctgtacaataatccttccctgctgtgtggtgagcactttggggccctctggatgctagatgtgatatgaatgggaagcattattattatttatgccttataatatgtcaactctatgtcctctgccacaacagacacttatttcaaatgtgcagtaacagcccccaagtgatgtattgtcaaaatatttttgaaatgaaaaagcaaaattaaccataaactgcccccttgtctccatgaaaatggcactgtaacactaccaaggaaaagcaatgttaaataataaaagctacaacaaaataaaagtcaaaaaaaattggaagagctctgtgtttggaagaagtatgctttggtaaatcacaacaatgacaatttcgctttccaattaaagtgtaatagtgaaagagcaaaccatcaccccagggtatcctcaagaacagctcawtgaattctggcttacttaaaaagaagttttcagtggagctgtttttcttgcaaaagattttagaaaaaaacacagcctttttttttttttt

SEQ ID NO: 12063 - DNA, 678 bp, Homo sapiens
aataataataataataataataataatartaataataatagtagtagtagtagtagtagtagtagtagtaatagtaggccgggcgcagtggctcacgcctataatcccagcacttttggaggccgaggcaggcggatcacgaggtcagatcaagaccgtcctggctaacacagtgaaacccgtctctactaaaaatataaaaaattagctgggcgtggttgcagacgcctgtagtcccagctactcgggaggctgaggcaggagaatggcctgaacctaggaggcggaccttgcagtgagccgagattgtgccactgcactccagcctgggcgacagagcgagactccatctcaaaaaaaaaaaaaaaatagtaacagtaataaaataaaaattatttgtgaaggatgtgagctttcacctaaagccacagcaaatgaaacaatctttgtaggtgcagcctcatcctcagatgcttctggtctctgccacctcgagctcttcaacattcatttgtgttctttgctgttttgttttctttttctttcttttttttttttaacccgacacttcagtagctgttttgtatacttaaacatttgaataaaacttaatttttaagcatctaattacatcactccagtttcagggcttgtgtgtgcaagctcccagtgcaggtg

SEQ ID NO: 12064 - DNA, 678 bp, Homo sapiens
aataataataataataataataataataatartaataatagtagtagtagtagtagtagtagtagtagtaatagtaggccgggcgcagtggctcacgcctataatcccagcacttttggaggccgaggcaggcggatcacgaggtcagatcaagaccgtcctggctaacacagtgaaacccgtctctactaaaaatataaaaaattagctgggcgtggttgcagacgcctgtagtcccagctactcgggaggctgaggcaggagaatggcctgaacctaggaggcggaccttgcagtgagccgagattgtgccactgcactccagcctgggcgacagagcgagactccatctcaaaaaaaaaaaaaaaatagtaacagtaataaaataaaaattatttgtgaaggatgtgagctttcacctaaagccacagcaaatgaaacaatctttgtaggtgcagcctcatcctcagatgcttctggtctctgccacctcgagctcttcaacattcatttgtgttctttgctgttttgttttctttttctttcttttttttttttaacccgacacttcagtagctgttttgtatacttaaacatttgaataaaacttaatttttaagcatctaattacatcactccagtttcagggcttgtgtgtgcaagctcccagtgcaggtg

SEQ ID NO: 12065 - DNA, 678 bp, Homo sapiens
aataataataataataataataataataataatartaatagtagtagtagtagtagtagtagtagtagtaatagtaggccgggcgcagtggctcacgcctataatcccagcacttttggaggccgaggcaggcggatcacgaggtcagatcaagaccgtcctggctaacacagtgaaacccgtctctactaaaaatataaaaaattagctgggcgtggttgcagacgcctgtagtcccagctactcgggaggctgaggcaggagaatggcctgaacctaggaggcggaccttgcagtgagccgagattgtgccactgcactccagcctgggcgacagagcgagactccatctcaaaaaaaaaaaaaaaatagtaacagtaataaaataaaaattatttgtgaaggatgtgagctttcacctaaagccacagcaaatgaaacaatctttgtaggtgcagcctcatcctcagatgcttctggtctctgccacctcgagctcttcaacattcatttgtgttctttgctgttttgttttctttttctttcttttttttttttaacccgacacttcagtagctgttttgtatacttaaacatttgaataaaacttaatttttaagcatctaattacatcactccagtttcagggcttgtgtgtgcaagctcccagtgcaggtg

SEQ ID NO: 12066 - DNA, 678 bp, Homo sapiens
aataataataataataataataataataataataataatagtagtagtagtagtagtagtagtagtagtaatagtaggccgggcgcagtggctcacgcctataatcccagcacttttggaggccgaggcaggcggatcacgaggtcagatcragaccgtcctggctaacacagtgaaacccgtctctactaaaaatataaaaaattagctgggcgtggttgcagacgcctgtagtcccagctactcgggaggctgaggcaggagaatggcctgaacctaggaggcggaccttgcagtgagccgagattgtgccactgcactccagcctgggcgacagagcgagactccatctcaaaaaaaaaaaaaaaatagtaacagtaataaaataaaaattatttgtgaaggatgtgagctttcacctaaagccacagcaaatgaaacaatctttgtaggtgcagcctcatcctcagatgcttctggtctctgccacctcgagctcttcaacattcatttgtgttctttgctgttttgttttctttttctttcttttttttttttaacccgacacttcagtagctgttttgtatacttaaacatttgaataaaacttaatttttaagcatctaattacatcactccagtttcagggcttgtgtgtgcaagctcccagtgcaggtg

SEQ ID NO: 12067 - DNA, 570 bp, Homo sapiens
acaagaataagctcaagctttttgatggaagcaaataaaagattgagttcccattggataaactgagaaggttgagggtagagcaggatttgaagaggaaatttaagagttaaattttaaatgagttatgtttgaaatatgtgttagatacctaagtgcaaaatcaagtatgcaatttagtatatgactttgacatttaagaggagctgagatatatactgaagaggttttcaagatactaatggtattttattatagaatagtcaattagctcaatagaaaagtgaagataatatgcacaagatagcagacactaagctctgggtttctacagcttgaagtgttagggagaaatytgggaaccaactaaggatactgaccataagctgtgaacaggagaaaaaacaaaaaggctggtgacttgcatgccaaagaaagaatatcaaggccgagagaatgatcaattatgtcagatgatactgataggtcatataaacatctagaaaactcttctgtgcaggttcaaaacaaacaaataaaaattgaccaccaaatgcttcaaccaaaagt

SEQ ID NO: 12068 - DNA, 583 bp, Homo sapiens
gaacaggcccttgatctcagtcttctcaaactttagcccaagtttttaaccactctgctacacttaaagtgcaacttaatatctacagcttattatgaagttaatctctccartattttcctttaaaaatatccctgggcattgttagggcccatacataaagaacgtaaaatacttacaaatataaaatgcaagggtgaggataatagtggctactctctgtagagggcttcaacggtcctgtgtaccgtctggagtgtttcacatgtattatctcgtttaatcctcataaaagaaatctgctaggcctcattattccccattaaggatgtgagaaaaggtttgtcaaagttagttaaatcatctgaagtcccatgttatttaaaggcataaactcaaagtggaagccgtgtacttctgattccctgtttcaagggtcaaactcccaactggtctaaaacacgctccctctgcccgcactcctaccatccaccgcacccattcccacaattgtcctgctgaccccagccagccatcattccctctgactccagatcgggctccaggactcattggtattctc

SEQ ID NO: 12069 - DNA, 557 bp, Homo sapiens
acctctctctttctctctttgtctctctctctctctctctttatttcttctctccatatccagtcctatctccctttccttcctgccttcttttaaaaatacatttgtctttctttcattcctcaaattcttattgagaactgttatatgccaagcactgaaaactgggggtatcatggtgaacaagacaaactcactaatctcatagaatttacatgttaagtgaccactttatatagtcagacttgtgttcacaacccctaattggaaattatcatctggatgacattctacagctgaatcaaacacattttttaatctaccaagtttaactcacccccaaatttctgagcccttatgaattcctttgactayttcattcttcatagctagtcacacaaaaaaagtttattttacctctgaattttttgaacttatatatttgcttttggttgcttttctttctatctcaatttggtcattctctgacatggtttgaatttgtttccctgcccaaatcccatgttgaattgtaattcccaatgttggaggagggg

SEQ ID NO: 12070 - DNA, 557 bp, Homo sapiens
acctctctctttctctctttgtctctctctctctctctctttatttcttctctccatatccagtcctatctccctttccttcctgccttcttttaaaaatacatttgtctttctttcattcctcaaattcttattgagaactgttatatgccaagcactgaaaactgggggtatcatggtgaacaagacaaactcactaatctcatagaatttacatgttaagtgaccactttatatagtcagacttgtgttcacaacccctaattggaaattatcatctggatgacattctacagctgaatcaaacacattttttaatctaccaagtttaactcacccccaaatttctgagcccttatgaattcctttgactacttcattcttcatagctagtcacacaaaaaaagtttattttacctctgaattttttgaacttatatatttgcttttggttgcttttctttctatctcaatttggtcattctctgacatggtttgaatttgtttccctgcccaaatcccatgttgaattgtaattcccartgttggaggagggg

SEQ ID NO: 12071 - DNA, 536 bp, Homo sapiens
aaaaccctgatctaggtgaagcaaagaaaaacaggctcctggaaatcaaatataaaattaaatatcataaggaaacttactggctgggtaccatggctgaagcctataatcttagcaatttgggaggctgtgtcaaaaggattgtttgagctgaggagttggagtccagcctgaatracatcgtgaaaccccatcttactaaaaattaaaaaggaaaataacagctgggtgtgatggtgcgtgcctatagtcccagctactcaggaggctggggtggaaggatggcttcagctcgacagtttgaggctgcagtgagccactgaactccagcctgggagacagagtgataccttgtttaaaaaataaataaataaaaacaaaaatgaaaacaaaaaaggaagcttactatggttattatttaaaataaaaaaaagaataacccactgattagccaccttatatggagcttagctgtggcctggtgctgatgaggttgggggttgccgaggatctttgacaatggaggtagagcctaa

SEQ ID NO: 12072 - DNA, 542 bp, Homo sapiens
gagggcaggtcccacaaaggccgcaagatgtcgctttctgacagcctgttgcttgcagctaatcctaccacagcagaaggcaaagagggtgaggaggggtgttgaccatattttgatgtaataaccagaagtgcatctgttaggatatacaacaattgatgcacctagatcaacagagattcccttataatatccctaaacttaaaacgtaratcttttttcttcttcattttcttttttccctggagcaaccctgagtatgttggtgttggtgcagatgtgggataccgaactaaaatttttccatcattacgttcagtcttcacagacatctggcaggatgccctgaggagtattataatccctattttacagatgagaaagccaaggcccctaaaaattgcaattggcaaatgaaaattccagtggccacgtttcttgacacccaacaccccagctgaggtttatgcactctggccctctccccagtcctcatagggaggtggttgggggcaggctttgactattttgctttttggaaa

SEQ ID NO: 12073 - DNA, 511 bp, Homo sapiens
ctgaggcgggtgaatcacctgaggtcaggagttcgcaactagcctggcgaacatgatgaaaccccgtatctactaaaaatacaaaaaattagccaggcatggtggcacacgcctgtaaccccagctactcaggaggctgaggtatgagaatcacttgaacctgggaggtggaggttgcmgtgagtcgagattgcaccattgcactccagcctgggcaacaagagcaaaattccttttcaaaaaaaaaagaatagggatgttgaatatttgattttaagtcatttgtgttgcatgaagtaaaagcctctgtcttccctttatttcactccctcctgcaaaatgtccctaaacctttggttacatttactatacaagtaaaagctttgtgagttttagtggaaataaagaaaaacagcaaattctatgtttaggtagagaccagagtaaggataaaagaagcagcagccacaagatgcagagggaaaaatatgttctctggccaagcgcggtg

SEQ ID NO: 12074 - DNA, 541 bp, Homo sapiens
atggtggtctcttcacacggacgcacatgaaagttagtagctgacatctgttaaatgcttcttgtgctaaacacttgacacattttgtctcacatagtcacataacaacactatgggataggtgccataattatacaaagaaactcagrcacagagaggttaactctaagttaaccttgagtgatggagtgagtgatggagccagaattcaaatccaggtgacctgacccagaaacattagaaaatatacgaaaatactgccaagatttgatatctaatatcccatggaactttcttttctctacccattaaatgactttgctacatttcttgccaagcataccaagaacataaaacacagaagtctagtttttcttttctcttggttataaatttataaaaatcaaactaaaaatagcccccatgttgtttcattcttaaaatatacaataactttaaaagaaagtttctctggaactgaagttccttctgcagaatctgtttcacattcagaatttcagatggaatataaaataggaga

SEQ ID NO: 12075 - DNA, 541 bp, Homo sapiens
atggtggtctcttcacacggacgcacatgaaagttagtagctgacatctgttaaatgcttcttgtgctaaacacttgacacattttgtctcacatagtcacataacaacactatgggataggtgccataattatacaaagaaactcaggcacagagaggttaactctaagttaaccttgagtgatggagtgagtgatggagccagaattcaaatccaggtgacctgacccagaaacattagaaaatatacgaaaatactgccaagatttgatatctaatwtcccatggaactttcttttctctacccattaaatgactttgctacatttcttgccaagcataccaagaacataaaacacagaagtctagtttttcttttctcttggttataaatttataaaaatcaaactaaaaatagcccccatgttgtttcattcttaaaatatacaataactttaaaagaaagtttctctggaactgaagttccttctgcagaatctgtttcacattcagaatttcagatggaatataaaataggaga

SEQ ID NO: 12076 - DNA, 516 bp, Homo sapiens
gctgggaccccagaccctgtgctttaagggaggaggatgactcatcaaagaggaagaaaaggaaaggcagtcatcttcaatgtcatctccataccagcgcatctkgtcctttggatctatgtgtcaataaagacatcttttgtgcttgaaaaaaatgaattattttcttgaattctaactcaaaatctataaaaggtaaaattattggtgttctatgaagtaatttattgataattttccattgctcctgaagaagtaaatatatatatatatttctgcttccataattcttaatttatatgaacattattaaaattatggtgttatcttccagaaactttgtatttttgtttttattaaaatagcaaatactgtgaagcaaaacctatgtattttactttttaactaagtttaccaaaagcatctctattttcactttcaactgaatggactttgaaaagctttgcttttttcccaaagattaggtaaaaaactcaaactctaatttaagagttg

SEQ ID NO: 12077 - DNA, 533 bp, Homo sapiens
actttggttatgtttcgggttttatttgatattgtctatggaatctgttaatcattctttaaaggaaagaggaagygggtagggaataaagtatggagccatccaaaaacgaaaagatctgggaagatgctgtgctgatttaatgttaagaaatgttcagaaagtaaacccttgatgtcttggtttttattttagaaatattatcttgttgacaatatactaaagtgcatacaactgatttaaaataaaaataaggtatatgaaaatatgtaagatgcagctgaagcagaggtgagaggaaaatttttattactaaatgtttatattagaagtgataaagtcctcaaccaactaaattcctacctcaaacaacaaacaaaaacaagaaataaaaagagcaaaataagaccaaatcaagaagcagcatattctggtataactttcaaattatcctttaaaaatagtcataagttcagaatctggtgtacaaattctatattatgtctccttacctttgaaatgcattttttttt

SEQ ID NO: 12078 - DNA, 992 bp, Homo sapiens
taccccccactcaaaaaaaatcatgtttttaggagaatgatctttaaagtatttccatacccctccagggatttgaaaaaaaaaagtgtttaaggctggttccattcctccagagcggctctagcagatgggaaatatgtacaagtaataaaaccagagataatttcgtataagaatgtcaccacccaatgggttcaccttgcccactgcctagacagagctgatttatcaagacaggggaattgcaagggagaaagagtaattcacacggagctgactgtgcaggggactggagttttattattactcaaatcagtctcygccagcattcagggattggagtttttaaggataaattggtggtttagaggctaaggaagtggcgagcgctgattgatcaggttggagatactatcgtagctggtcaagatgagtttttcttgctgtcttctgttcctgggtgggatcacagaactggttgagccagattaccagtctgggtggtgtcagctggtgcatcaagtgcagggtctgcaaagtatctcaagcactgattttaggttttacaatagtgatattattcccaggaacaatgtggggatgttccgattcttacagccataggctgcatggcccctaaaccataatttctaatcttgtagctaatttgttagtcctacaaaggcagactggtccccaggcaagaaggggattttttggggaaagggctattatcaattttgtttcatagttaaactataagctaaattccttcccaaggttagttaggcctatgctcaggaatgaataagcacagcttaaaggttagaagcaagatggagttggttaggtctgatctctttcattgtcataatttcctcagttataaatttttgcaaaggcaatctcaggtagtgtcaaagtagtctccagagaagagatatgcactcttcccagactgaatggggtaatcatcccactcatagaatata

SEQ ID NO: 12079 - DNA, 511 bp, Homo sapiens
cacatagaacatttatgaagcaggttcaccatcttacatgggcacggtttgtggtaccccaaaacaattacaatagtaacatcaaagatcagagatctcacagaacaccataacagatacactaataataaaaaagtttgacatactgagagtattacaaaaatgtgacagagataagaagtgaacycacgctgttggaaaaatggcactgatagatttgctcaacatgtggttttgtaaaacacgcatctgtgaagcacaattaaatgaggtatacctgtacatgtaaagaaagtggtaaggttcctgacatataagtgcacaatgaaggttagctatcattagcaatattgtttattgtcatattattaacagaaataggttgagacactcccaggttgtctaggtctggaaagttgtttacacaacttttcatatgacaatgaaaattatcacatgaaaaatttttatgtgttagtgttccataatcagcatttaagatattccttga

SEQ ID NO: 12080 - DNA, 511 bp, Homo sapiens
cacatagaacatttatgaagcaggttcaccatcttacatgggcacggtttgtggtaccccaaaacaattacaatagtaacatcaaagatcagagatctcacagaacaccataacagatacactaataataaaaaagtttgacatactgagagtattacaaaaatgtgacagagataagaagtgaactcacgctgttggaaaaatggcactgatagatttgctcaacatgtggttttgtaaaacacgcatctgtgaagcacaattaaatgaggtatacctgtacatgtaaagaaagtggtaaggttcctgacatataagtgcacaatgaaggttagctatcattagcaatattgtttattgtcatattattaacagaaataggttgagacactcccaggttgtctaggtctggaaagttgtttacacaacttttcatatgayaatgaaaattatcacatgaaaaatttttatgtgttagtgttccataatcagcatttaagatattccttga

SEQ ID NO: 12081 - DNA, 1353 bp, Homo sapiens
tgcaattccaaaaatctccaaagctttgaacataaaaggttttccccaatccatctggtagcaaaacttgaagtaacctgagtccttgatggccaaacctgaccttgactgacatgaagctacttaaaatctgtatcactcctcttggagctttgctatctgatacaacagccacatgtgtctatttaaattcaaatccattaaaattgtataaaattaaaaattcatattcttagtcatactagccacatttcaaatgctcaatagccctatgtggctagtgttaccatatcagatagacatttccagcatcacagaaagttctgtataacactgacttagagtgaactcatgtttccttatacacctattcatatccgacatgggttgttaccccagaacccacatattagagcgtaagtatttttcctcaaaatctgaaaaaagagattccaaaatcacatctggcccagatgatcacagataatggattgtggacctgcactgttttcatcagtaataaaagtgatattttggtcttccttctgtgttaagactgtaccttcctataaactgataaagaatcaagacagagaagaggagggcctttacactctaataacagggagagaatctcgcaggttcctttcatctccatatgcatggrctatttaggctaatcacagtaaaggattttatgtgggttttaaaatcatctttccaaggagctataagtgctgttctggcagaagtacagtagctaaatgactagaaaacttccaaggattgatgaagatgtcacagatggaatttctatgttgggtgggaggtggaactagatgaagtccaaggcccatccacttaaaaaaatctgggataatgctatcacctcccccacatgggtccttctccagcatcttccatgaggtggggactagtcagaggcagatacacttctggacaagaatgtgtcaattagagtccagcacattttgaaatttccttgaatgcctcggactacctcttggtgggagcaaagtgggtcagcatagccatgttccctgccagctgttcatactctttaagtctgacagccagaagatgctggacagtgcttatccccctatctgtattgtcttgcccacgtggtgtgagatatttcacagagatctgtcaagagcctaggctggacaagagaatatcaagtgttgtcagggtcctataggctctactctttcactctgctatatgaattctggcaagtggtataatttgatacagcctcagtaatctcatccgtagaatagatggaacacccctggtccactaccctcagagggttgtttgaggata

SEQ ID NO: 12082 - DNA, 576 bp, Homo sapiens
cctctctgtgcttcaactgcatgtcaagattctgcatctgactttttcatctgccccagagagctcttagattgcaagtataacatccaaacrgataacacctccttgagcatcagagaccagagatggagacgcagccaatgtggatgcctcgaagccagatgctgagtgaggaggagccaggtcttgagccttcctccctccaaccccacagccccttctgtaggtcatccacagcagcctccagaggtcagacctgtggccaggggcattcctcatggtcccttagtgcccatgggtacatttaccaagcacgctgctgattcattattcaccagcgtgagcaaatgggccggcttcccatggctgctgtaacacattttcacatactcagtggcttgaggcaacacagattcctccttttacagctcttgagatcagaagtccttaaatcaagctggcggcagggcccagggattctgggtgggaaccactgccttgcctcttccagcttccagaagccactcacactccttggcttgtgggctctgatataatttgactgtgtccccaccc

SEQ ID NO: 12083 - DNA, 1172 bp, Homo sapiens
gagcctcatcagctttctgaaaccttaatttcattttataatcatgaaagctctgccttccaggacatgagatcatcaggcatgtctttctaacaatcacctgtcatcactctctgctacaggtgcctctgaaactaacacgcactccttggcctgatgctgcctctcagggatctcctggctctttctgctgcctgctgctggtgggtgagggtcccaggataagtgcagcttgcaggacagttccaccttggggatttacggatttcaaaggcaagcagaatttctgtttgcactaggatgcagtaggccccttgggagaacaatatagagatcttggagatgggtgctctgacactggggaacccagactaagattaccaggcaaagagtctggggagaggttcagagcctcctcccagygctagtaacacgtagtaaaaatatacaggctcacacacccaataactcaggggttaacaggtttcaggcacagctggatccaggggcttggcaacgtcatcaggaactgttttaattctccatctcagtccagggcccgccccactaatcctgcactcacacaatcctgagtgatagtgccttaaatttttgcatcccaggtccctcactggcctcactacagtcccggcactgctgccatgtccattcttaggcagggtcttctctttatggtaacacaatgtccacagagctccagaccttcatacatacagatctggttctatgggaagagaggtcccccttccccagtagctcagagtatcagaatttggtctacttggctgattgtcacaccccatcctgggttcccagggccctgctacataaaaagaccatgggatgagggttgggaaggggtcattttcacaaagaaaagctgtggactggattcagggcagcaaaagcaacagatgtcctccttggccagtgattcaccatgaggtaaaggcaagtccatgtctggggccactctgacattcgatcatccacagaggaagggtggatctttgagaggggatgctggcctctttctgatccaaactgcagggagtgatttttttctagttctttaagagttcattgctcttgaattctaccatccataaagccgtagggcatggaaacaactcccacaagttctttgcaaa

SEQ ID NO: 12084 - DNA, 546 bp, Homo sapiens
ggagagggggccgcgggtgtcttgtcctgtcccagggccaaacccctaggagtcctgtcctcaggacctccttgagccgacttccacggagggaggtggagcttcargatgcctgctgtgttctccagactcccgttcagatccgattttggacccctccgagtgagataggataggctcaccacatctggtgaggcaggcagggccttgctgcaacacagaatgatcccgtaggtctcaaggcctacttgtactgttgtacataatgtatataattgacttttattcactcgacaaaatttcctaaaaatacatccaaatgattgcattaattaatattttgttcctttgatgactgagtagtatttcatggtttctggtataaattcaccacaaattaaacattcacctgggcttattgaccttttcaactgtaacaaattaagctgttgtagacattcgtgaacaagtttttgtgggaccacagtttcatcactccaaattaaacacccacaactgcaattgctgggatctatggtctatgca

SEQ ID NO: 12085 - DNA, 546 bp, Homo sapiens
ggagagggggccgcgggtgtcttgtcctgtcccagggccaaacccctaggagtcctgtcctcaggacctccttgagccgacttccacggagggaggtggagcttcaagatgcctgctgtgttctccagactcccgttcagatccgattttggacccctccgagtgagataggataggctcaccacatctggtgaggcaggcagggccttgctgcaacacagaatgatcccgtaggtctcaaggcctacttgtactgttgtacataatgtatataattgacttttattcactcgacaaaatttcctaaaaatacatccaaatgattgcattaattaatattttgttccttkgatgactgagtagtatttcatggtttctggtataaattcaccacaaattaaacattcacctgggcttattgaccttttcaactgtaacaaattaagctgttgtagacattcgtgaacaagtttttgtgggaccacagtttcatcactccaaattaaacacccacaactgcaattgctgggatctatggtctatgca

SEQ ID NO: 12086 - DNA, 2260 bp, Homo sapiens
acattatttagtgtaatctatgtgacaatcctctgagatatgtgttactattccaatttaaacaagaggaaacaggttcaaggaaggtaagttatgtgctgagggacacacaagagggggtggagctggatttcaagcccactgggtgtacagaactgagccttttcaccatgggggcaaatccctcctgaggacagggctggaaaggccatggagatcatcttgtgcttggacaagcctctcaccagtcaccacagggccctgactcccattcctaccttcaagaagctcagcaggctactactcgtgttcatgttgggtcactacatacggttttatttgaaggaaggaccccagagttaaactcatttgaaaacccctgataaattcagtcccctccctctttttacaggtgaggcccggagagaagatatgacttgcttaaggtcacacacttagtttctctgtcaatctttctaaatctaggacgagttctcttcccactgtatcaggctgcctcaacaaacagggaagtacaaaaatagccaaatccaggaaggagggcaagtggtctgtgtctcctccaattatttcatgggacagccaagcctattttcttgatttcccttgtgcccctcctgtcggatatctgctttgggacccatctcttttgggcttgcagagagaacgggctgcaccagctctctaccctctgcatcacccagatggtcaaacatgcaaagggaaaggagagctggggccagagtcaaggcaggcaaagagactcttcaaccccctccagtctttccacatttatatttttggaatttcaggctccctcctcccccgggacctttcctagtagcccaccagggagaagaagagggaaaactgtcataaatttctcctatttatacaagatgacagagtttcttgtgccagaaaaaacacagaaagggagctgtcaggggagaagggacccagccctatatcttctggggtcaatttatctttctgaatcatggcttgggggctaccctaacattgcctgtatgaaatgcaggctttgacttggggcagccaggccagacagcccctgagctttgtttctgatcacagttttcctgcttcatctcaacttccccctaccccttaygctgtctttttaaaaaacaaccttcttgaggtataattcatgtgtcatacaattcaccatttgaaatgtacaattcaatggttttagtatattcacaggtatgccaaaccatcaccatagttaattttagaacattttcatcacctcaaaaagagatcttgtaacctttagctatcacctccctatccccccatattccttcttgcccttaacaatactaatgtactttcagtctctgtagatttccctattccggactttcatatgaatggcatcatataataagagacctactgtgactagcttctttcattgagcatagtgttttcaaggttcatccatgttgtggcatttatcagtacttcattccttttcaaggctgactaatattccattgtatggatatatcacactttgtttatccgttcatctattggtgaacatttgggttttttccaccttttggatattatgattctctctttcctcttattgtctagacatcttggatagtatccagtgaggcctgtgggcaagaatgggtgtttcttatatttgggaacacctaatatccatgaaagcagggtcttggcacatgtctgctttcatattaagtatatgtactagctggaattttcctccctctgttgttactgagttggggctgctccctcctttatcaattctccctttttatcatgattgctgtgttggaaacttgctgactcttcagactaggggattcagatccttctcttggggcttcagagacatggagtggatgaatgaatgtcttcccatgagggaggagttccctgagtctggtctcaagtgattatccagtgcctcacagtggaaggaaggtctgtgaagactccagggtcgagggaaagttatgttcttggaggtatgactgagcccagaatccaggcctccagtgtccatctccttgcctggcccatttcagtcttcagacatgctttgaggtcaatccagtcactcacccagcaacagacactgcctctgccctcatggaccttgcagttctagtggtgagagtaagatgaatacaagtgaacaaaatgatggcaagttgttcaagct

SEQ ID NO: 12087 - DNA, 2260 bp, Homo sapiens
acattatttagtgtaatctatgtgacaatcctctgagatatgtgttactattccaatttaaacaagaggaaacaggttcaaggaaggtaagttatgtgctgagggacacacaagagggggtggagctggatttcaagcccactgggtgtacagaactgagccttttcaccatgggggcaaatccctcctgaggacagggctggaaaggccatggagatcatcttgtgcttggacaagcctctcaccagtcaccacagggccctgactcccattcctaccttcaagaagctcagcaggctactactcgtgttcatgttgggtcactacatacggttttatttgaaggaaggaccccagagttaaactcatttgaaaacccctgataaattcagtcccctccctctttttacaggtgaggcccggagagaagatatgacttgcttaaggtcacacacttagtttctctgtcaatctttctaaatctaggacgagttctcttcccactgtatcaggctgcctcaacaaacagggaagtacaaaaatagccaaatccaggaaggagggcaagtggtctgtgtctcctccaattatttcatgggacagccaagcctattttcttgatttcccttgtgcccctcctgtcggatatctgctttgggacccatctcttttgggcttgcagagagaacgggctgcaccagctctctaccctctgcatcacccagatggtcaaacatgcaaagggaaaggagagctggggccagagtcaaggcaggcaaagagactcttcaaccccctccagtctttccacatttatatttttggaatttcaggctccctcctcccccgggacctttcctagtagcccaccagggagaagaagagggaaaactgtcataaatttctcctatttatacaagatgacagagtttcttgtgccagaaaaaacacagaaagggagctgtcaggggagaagggacccagccctatatcttctggggtcaatttatctttctgaatcatggcttgggggctaccctaacattgcctgtatgaaatgcaggctttgacttggggcagccaggccagacagcccctgagctttgtttctgatcacagttttcctgcttcatctcaacttccccctaccccttacgctgtctttttaaaaaacaaccttcttgaggtataattcatgtgtcatacaattcaccatttgaaatgtacaattcaatggttttagtatattcacaggtatgccaaaccatcaccatagttaattttagaacattttcatcacctcaaaaagagatcttgtaacctttagctatcacctccctatccycccatattccttcttgcccttaacaatactaatgtactttcagtctctgtagatttccctattccggactttcatatgaatggcatcatataataagagacctactgtgactagcttctttcattgagcatagtgttttcaaggttcatccatgttgtggcatttatcagtacttcattccttttcaaggctgactaatattccattgtatggatatatcacactttgtttatccgttcatctattggtgaacatttgggttttttccaccttttggatattatgattctctctttcctcttattgtctagacatcttggatagtatccagtgaggcctgtgggcaagaatgggtgtttcttatatttgggaacacctaatatccatgaaagcagggtcttggcacatgtctgctttcatattaagtatatgtactagctggaattttcctccctctgttgttactgagttggggctgctccctcctttatcaattctccctttttatcatgattgctgtgttggaaacttgctgactcttcagactaggggattcagatccttctcttggggcttcagagacatggagtggatgaatgaatgtcttcccatgagggaggagttccctgagtctggtctcaagtgattatccagtgcctcacagtggaaggaaggtctgtgaagactccagggtcgagggaaagttatgttcttggaggtatgactgagcccagaatccaggcctccagtgtccatctccttgcctggcccatttcagtcttcagacatgctttgaggtcaatccagtcactcacccagcaacagacactgcctctgccctcatggaccttgcagttctagtggtgagagtaagatgaatacaagtgaacaaaatgatggcaagttgttcaagct

SEQ ID NO: 12088 - DNA, 687 bp, Homo sapiens
attatgctaagtgaaagaagccggtcacaaaggaccacatgttatgtaattccatttaaataaaatgtccaaaatagaccaatacatagaagcagaaagtagatttgtggtggcccagggttaggggagttggggggaaatggagggatatggtrtttacttcagggtaatgaaaatgatctaaaatttattgtggtgatgtttgcataacagtgcaaatatactgaaaaacattgaattttacactttaaatcagtggcttctgtggtatgttatcaatatttctcaataaaacttcaaaaaaaaaagcgcctatgtgtctttttgtgtattattcctccagagtccagtccatagtttttacatttgatgaagaaattaagattttgtttcttcttcttctattttttttttttttgagacagaatctccctctgttgtccagactggagtgcattggcacaatcttggctcagtgcaacctccaggattttttttgtatttttagtagagacagcgtttcaccatggtggctagactggtctcaaacttctgacctcaagtgagtcccccaccttggttcccaaaattgctgggattacaggcgtgagccaccgcacccagcccaagatttagtttccgttgttttgatgccctagggccatcttattctaccttaatttctga

SEQ ID NO: 12089 - DNA, 687 bp, Homo sapiens
attatgctaagtgaaagaagccggtcacaaaggaccacatgttatgtaattccatttaaataaaatgtccaaaatagaccaatacatagaagcagaaagtagatttgtggtggcccagggttaggggagttggggggaaatggagggatatggtgtttacttcagggtaatgaaaatgatctaaaatttattgtggtgatgtttgcataacagtgcaaatatactgaaaaacattgaattttacactttaaatcagtggcttctgtggtatgttatcaatatttctcaataaaacttcaaaaawaaaagcgcctatgtgtctttttgtgtattattcctccagagtccagtccatagtttttacatttgatgaagaaattaagattttgtttcttcttcttctattttttttttttttgagacagaatctccctctgttgtccagactggagtgcattggcacaatcttggctcagtgcaacctccaggattttttttgtatttttagtagagacagcgtttcaccatggtggctagactggtctcaaacttctgacctcaagtgagtcccccaccttggttcccaaaattgctgggattacaggcgtgagccaccgcacccagcccaagatttagtttccgttgttttgatgccctagggccatcttattctaccttaatttctga

SEQ ID NO: 12090 - DNA, 687 bp, Homo sapiens
attatgctaagtgaaagaagccggtcacaaaggaccacatgttatgtaattccatttaaataaaatgtccaaaatagaccaatacatagaagcagaaagtagatttgtggtggcccagggttaggggagttggggggaaatggagggatatggtgtttacttcagggtaatgaaaatgatctaaaatttattgtggtgatgtttgcataacagtgcaaatatactgaaaaacattgaattttacactttaaatcagtggcttctgtggtatgttatcaatatttctcaataaaacttcaaaaaaaaaagcgcctatgtgtctttttgtgtattattcctccagagtccagtccatagtttttacatttgatgaagaaattaagattttgtttcttcttcttmtattttttttttttttgagacagaatctccctctgttgtccagactggagtgcattggcacaatcttggctcagtgcaacctccaggattttttttgtatttttagtagagacagcgtttcaccatggtggctagactggtctcaaacttctgacctcaagtgagtcccccaccttggttcccaaaattgctgggattacaggcgtgagccaccgcacccagcccaagatttagtttccgttgttttgatgccctagggccatcttattctaccttaatttctga

SEQ ID NO: 12091 - DNA, 687 bp, Homo sapiens
attatgctaagtgaaagaagccggtcacaaaggaccacatgttatgtaattccatttaaataaaatgtccaaaatagaccaatacatagaagcagaaagtagatttgtggtggcccagggttaggggagttggggggaaatggagggatatggtgtttacttcagggtaatgaaaatgatctaaaatttattgtggtgatgtttgcataacagtgcaaatatactgaaaaacattgaattttacactttaaatcagtggcttctgtggtatgttatcaatatttctcaataaaacttcaaaaaaaaaagcgcctatgtgtctttttgtgtattattcctccagagtccagtccatagtttttacatttgatgaagaaattaagattttgtttcttcttcttctwttttttttttttttgagacagaatctccctctgttgtccagactggagtgcattggcacaatcttggctcagtgcaacctccaggattttttttgtatttttagtagagacagcgtttcaccatggtggctagactggtctcaaacttctgacctcaagtgagtcccccaccttggttcccaaaattgctgggattacaggcgtgagccaccgcacccagcccaagatttagtttccgttgttttgatgccctagggccatcttattctaccttaatttctga

SEQ ID NO: 12092 - DNA, 687 bp, Homo sapiens
attatgctaagtgaaagaagccggtcacaaaggaccacatgttatgtaattccatttaaataaaatgtccaaaatagaccaatacatagaagcagaaagtagatttgtggtggcccagggttaggggagttggggggaaatggagggatatggtgtttacttcagggtaatgaaaatgatctaaaatttattgtggtgatgtttgcataacagtgcaaatatactgaaaaacattgaattttacactttaaatcagtggcttctgtggtatgttatcaatatttctcaataaaacttcaaaaaaaaaagcgcctatgtgtctttttgtgtattattcctccagagtccagtccatagtttttacatttgatgaagaaattaagattttgtttcttcttcttctattttttttttttttgagacagaatctccctctgttgyccagactggagtgcattggcacaatcttggctcagtgcaacctccaggattttttttgtatttttagtagagacagcgtttcaccatggtggctagactggtctcaaacttctgacctcaagtgagtcccccaccttggttcccaaaattgctgggattacaggcgtgagccaccgcacccagcccaagatttagtttccgttgttttgatgccctagggccatcttattctaccttaatttctga

SEQ ID NO: 12093 - DNA, 687 bp, Homo sapiens
attatgctaagtgaaagaagccggtcacaaaggaccacatgttatgtaattccatttaaataaaatgtccaaaatagaccaatacatagaagcagaaagtagatttgtggtggcccagggttaggggagttggggggaaatggagggatatggtgtttacttcagggtaatgaaaatgatctaaaatttattgtggtgatgtttgcataacagtgcaaatatactgaaaaacattgaattttacactttaaatcagtggcttctgtggtatgttatcaatatttctcaataaaacttcaaaaaaaaaagcgcctatgtgtctttttgtgtattattcctccagagtccagtccatagtttttacatttgatgaagaaattaagattttgtttcttcttcttctattttttttttttttgagacagaatctccctctgttgtccagactggagtgcattggcacaatcttggctcagtgcaacctccaggattttttttgtatttttagtagagacagcgtttcaccatggtggctagactggtctcaaacttctgacctcaagtgagtcccccaccttggttyccaaaattgctgggattacaggcgtgagccaccgcacccagcccaagatttagtttccgttgttttgatgccctagggccatcttattctaccttaatttctga

SEQ ID NO: 12094 - DNA, 510 bp, Homo sapiens
gtagggatatgtctgatcctaaaggggaaaggcctccagtagctcacacagtaccttttggacagttagagggaataaagagtttcctttctaaggaaacattaatccatctctccaaatactayaatctctccaaatactaaatcactaaatttataacggcctaaattgatggtgtctctgacaaatggttgtcctcttagctatgacgtccctgtacagggaagaagtacataactttttttttttctttcaggcggagtctcattcttgttgcccaggctggagtgcaatggcacagtcttggctcactgcaacctccatctcccgggttcaagcgattctcctgcctcagcctcccgagtagctgggactacaggcatgcaccactacgccagactaattttttttttgcatttttaggagagacagggtttcaccattttggccaggttggtcttgaactcctgacctcaggtaaacctcctgcttcagcctcccaaagttctg

SEQ ID NO: 12095 - DNA, 510 bp, Homo sapiens
gtagggatatgtctgatcctaaaggggaaaggcctccagtagctcacacagtaccttttggacagttagagggaataaagagtttcctttctaaggaaacattaatccatctctccaaatactataatctctccaaatactaaatcaytaaatttataacggcctaaattgatggtgtctctgacaaatggttgtcctcttagctatgacgtccctgtacagggaagaagtacataactttttttttttctttcaggcggagtctcattcttgttgcccaggctggagtgcaatggcacagtcttggctcactgcaacctccatctcccgggttcaagcgattctcctgcctcagcctcccgagtagctgggactacaggcatgcaccactacgccagactaattttttttttgcatttttaggagagacagggtttcaccattttggccaggttggtcttgaactcctgacctcaggtaaacctcctgcttcagcctcccaaagttctg

SEQ ID NO: 12096 - DNA, 576 bp, Homo sapiens
gaaccggctatttacacgggcttggggactcagggagaagtgtaacttgaagaacctgtcgttaggagatgatcttggaaaggagggcaaatccccagcgacccagaggattttcaggggctgctctggagcggaaggtttcacttttccaggggcctgaattccttgacgccccccacctgccccacaggggtgagggctagagctttcaacggcacctgtcgcagctctccagtaggagaggaccgaaaccagagacagtgtcctcctcttctaggaggaggggaattataattttttttttttttaaacagagtcttgctctgtcacccaggctggagtgcagagacatgatttcggctcactgcaacctccgcctcccgggttcaagcgattctcctgcctcagcctcccgagtagctgggattgcccaccactacgyccagctaattttttggtatttttagtagagacgggatttcaccatgttagccaggctggtcttgaactcctgacctcaggtgatctgcccgccttggcttcccaaagtgctgggattacaggtgtgagccactg

SEQ ID NO: 12097 - DNA, 506 bp, Homo sapiens
cctatgttatgtcccctaagatatcccttctctcttacctttggggatagtcctaagcttccatcatggcactcaaagtccaaccttatttgtaycctcattctctgagcagacaccaccgtattctgtttcacagagaaaatgtgactgctggggataattctttcaacttcctggcctcttcctatacatgatctttctctgtattcttgcctattgctcttccatgttgatagaagtgtctgttctccttgtcagtgtctcggccttggatctgtcccctagtctattctgcctgtgtaaggaccttccctgaccagctgggccaccatctcctgcttctccaatccctcactctagactgactcttaacctttggtcaacaatacttgagcttttacattcataatggagcatctgtgttgaaccttgttcttttctagacactaccctccgttctgtcttccatccatggtgacttttctagaaagagcatctatcacact

SEQ ID NO: 12098 - DNA, 631 bp, Homo sapiens
tgttatttatttatctattcatttattttttgagatggagtctcactctgtcgtgcccaggctggagtgcagcggcacgatctcggctcattgcaacctcggccttctgggttcaagcaatgctcctgcctcagcctcctgaatagctggrattacaggcacccaccaccatgcccgggtaaatttttttgtatttttagtagagatggggtttcactacattggccaggctggtctcgaactcctgacctcaggtgacctgcctgcctcggtctccgaaagtgttgggattacaggcgtgagccaccacacccggccctgattatatgtttctttctaactttcaactacaacttttgttaaaatatagtttcctataatactcttattactcacttttctcccccttcctttttgaaataattagactacccaagtagtaactccaaattaaatctattccaaattgacagacaggagccacatctcaggatcacagtgtgtagttaggtcggctcaacccaccagcaatattgaaaaatgatatatatcatagacctacatgacaggagaaaaactgcaccgtcttgatttgccaaatcattcatgctcttaatttcattaaggtatt

SEQ ID NO: 12099 - DNA, 631 bp, Homo sapiens
tgttatttatttatctattcatttattttttgagatggagtctcactctgtcgtgcccaggctggagtgcagcggcacgatctcggctcattgcaacctcggccttctgggttcaagcaatgctcctgcctcagcctcctgaatagctgggattacaggcacccaccaccatgcccgggtaaatttttttrtatttttagtagagatggggtttcactacattggccaggctggtctcgaactcctgacctcaggtgacctgcctgcctcggtctccgaaagtgttgggattacaggcgtgagccaccacacccggccctgattatatgtttctttctaactttcaactacaacttttgttaaaatatagtttcctataatactcttattactcacttttctcccccttcctttttgaaataattagactacccaagtagtaactccaaattaaatctattccaaattgacagacaggagccacatctcaggatcacagtgtgtagttaggtcggctcaacccaccagcaatattgaaaaatgatatatatcatagacctacatgacaggagaaaaactgcaccgtcttgatttgccaaatcattcatgctcttaatttcattaaggtatt

SEQ ID NO: 12100 - DNA, 631 bp, Homo sapiens
tgttatttatttatctattcatttattttttgagatggagtctcactctgtcgtgcccaggctggagtgcagcggcacgatctcggctcattgcaacctcggccttctgggttcaagcaatgctcctgcctcagcctcctgaatagctgggattacaggcacccaccaccatgcccgggtaaatttttttgtatttttagtagagatggggtttcactacrttggccaggctggtctcgaactcctgacctcaggtgacctgcctgcctcggtctccgaaagtgttgggattacaggcgtgagccaccacacccggccctgattatatgtttctttctaactttcaactacaacttttgttaaaatatagtttcctataatactcttattactcacttttctcccccttcctttttgaaataattagactacccaagtagtaactccaaattaaatctattccaaattgacagacaggagccacatctcaggatcacagtgtgtagttaggtcggctcaacccaccagcaatattgaaaaatgatatatatcatagacctacatgacaggagaaaaactgcaccgtcttgatttgccaaatcattcatgctcttaatttcattaaggtatt

SEQ ID NO: 12101 - DNA, 631 bp, Homo sapiens
tgttatttatttatctattcatttattttttgagatggagtctcactctgtcgtgcccaggctggagtgcagcggcacgatctcggctcattgcaacctcggccttctgggttcaagcaatgctcctgcctcagcctcctgaatagctgggattacaggcacccaccaccatgcccgggtaaatttttttgtatttttagtagagatggggtttcactacattggccaggctggtctcgaactcctgacctcaggtgacctgcctgcctcggtctccgaaagtgttgggattacaggcgtgagccaccacacccggccctgattatatgtttctttctaactttcaactacaacttttgttaaaatatagtttcctataatactcttattactcacttttctcccccttcctttttgaaataattagactacccaagtagtaactccaaattaaatctattccaarttgacagacaggagccacatctcaggatcacagtgtgtagttaggtcggctcaacccaccagcaatattgaaaaatgatatatatcatagacctacatgacaggagaaaaactgcaccgtcttgatttgccaaatcattcatgctcttaatttcattaaggtatt

SEQ ID NO: 12102 - DNA, 518 bp, Homo sapiens
ggtcactcacttactctatgccagatgctgtgctaaggccaacttgaaggttgactggggtgagaagatgaaccgaggttctgagtagagcagctgagacaggcagggcagggtgaaggcacccaccatggtgcatgtcccccagctgctacaggggctgcaggtcattctcagaggccttctggggctcctgggcctgctgcttctccagtgcagagccgagaacccttgggagcccgtatcccatgccctgggaacactgagagcagtggtcctccaagtgcttgtagtttaaattttccttctggcttctggctttcagaccttcctacagaggtacaggagcccatcccaggcctcagaggaaccgcatatgcctggcctgctagggyctggctggttcagctggagccaccctccgtggggctctgcctcggtcaccctgcatttggctttctccacctccaactgcgtcctctgctgtctcacagacttcctcaggaagcacttccctggtg

SEQ ID NO: 12103 - DNA, 518 bp, Homo sapiens
cagtccacttcagggttctgtgatccaaggaaggaagcttgtggttcaccctgtgcacgatgtgaacaaagctggtgctttgttgtcaagagatctggagagactatggtgtcagcagcccaccctggctgctgtgtgcagagtggacctaagcaggtgggactggatgtgggaagaccatgtggctctcgaggcagtctgcctgggtgtgatgggcttctaaaccaggccattggtggtgagcttaggaagacaaaggaggcaagacatccatrggggttaaaatcagctggatatgggacttaaggaacatgtgagggatgcaggggacaagaggatgtgaagggaggacacagagcttgtgctggctccaggcttgggctcagacaactggaaggtaatgagagaagccaatttggaggaaggtaatgagtttggttttggatgtaaatttaaagtcctgcaggacacccaactgactaacaaggaatgaacagtctgctttaaatgttagggca

SEQ ID NO: 12104 - DNA, 523 bp, Homo sapiens
tagtcataataacattaacttcaaaatctgtaggatgaaatctagggtttgagtttccctaatcctttgcagagctgtaacttagctggaaaattacatttccattgaacattctataatgctcagaggcactgcaatcaatgagcgtgaaaatgccaagcacatcccatcctgacacttcttattaagcatagaacattcttgagtgaaagtaatatcacagagtaatttggctattaaggcaataatagcatatcttgtcctggtgataaatttaccttttgttaacagtttttctcccccwttttaatagctgcattaagaacggtgcataggaagtttcttggaacatactgcctgttccatattggtttttttctatctgattctaacattatgtcaaaggctggatgacatagttctattcttagagctagcaaatccaaagatttcaaatcagtattaaaaagaaaaacctaaagacttcttcagtaagacctattgatatagtccaagtgttatt

SEQ ID NO: 12105 - DNA, 447 bp, Homo sapiens
caggtggagaaggcagggaatagatgtctcagctgtaagccctagactcatataggttagatttttcctgagcaggagaagaggtcatatgtaagaagagggagagaaagtggttagattggggaggtgctgttcagtcacagagacgaacctagacttgttcattctacctttgtgctagggagagcccaaattctgccttgaggggactcttgggccagtcttcagggagtttgttgagatctctggtctcacgttcagtttctgattttggtttarctcttcagctcttcacaaatgtgactcacttttgccccacttgggctgatggtttaggacacatgacatctacctggctacagagttcttctcacaggtatgacctcagactcgctgttgcttggagttcagagaagcagcccaatgggagggttatctgaagaattc

SEQ ID NO: 12106 - DNA, 524 bp, Homo sapiens
gatatggtttggctgtgtccccacccaaatctcatcttgaattrtacctcccataattcccacaagatgtgggatggacccagtgggagataattgaatcatgggggtgtttgccccatactgttctcatggtagtgaataagtctcatgagatctgatggttttataaggggacactccttttgcttggctctcattctttcttgtctgctgccacgtaaaacatgtctttccccttctgccatgattgtgaggcctccctagtcatgtggaactgtgagttcattaaacctctttttctttattaattatccagtctcaggtatgcctttatcagcggcacggaaatggactaatacaacttagcattccagaatgtgtgcccttgtgtggtcatgtactcttaatgccaactctgaggccagaatgaagacaatcttattagtgcagagggggcaactaatgcatttaacaattcagagctaaactgtgttccatttttaatatgctatcagtagaaaatc

SEQ ID NO: 12107 - DNA, 542 bp, Homo sapiens
ctagggccaaatctttgcctgtggataaagaagtatactagctttgaattactaaatcccttttatttcctagaaaaaaaaaacatccagcagcccatcatgrcaatagcacaagatgactggactaaaggaacgtgatatggataaacagtgagtgtgtctcagccttgaagctggaagagagtgagggaatagagagaggagttggaaaccgaatgagcctaattcttgatagctgaacttgtcatgggatttcactccacagactttcagatgactttgtgtgaaagttggcttttctttcttaataggacagtgtgtgaatgtgtaaagtcgtaaatatattattttacatacagctatctccaacttttcagtcttcttgatgtaagaaactctttactcatttgacttcatgtcattcacataaaagtatatgtattaaaaatgagttaataccgtgccactatatataactgattaatacttttttacatatgcagccatactgttatataaactgatatagaaatatgtctccc

SEQ ID NO: 12108 - DNA, 516 bp, Homo sapiens
cctgtggctaaaattatataacgtgttgacataaagttgacagccagtctgaagttctccctaatacatttaatattcccccttgaataatctaatgcattgctaaaccaaaaaataactgtactcaaaaatatggcacaaacacaccagatgtcaaggatcctcaattttgctattgcctcagtacctttctgtaaatactatttacaatcctttgataccatatcatagaacatgatttttcagaaactataaaataatggagttttataattaacagatgttaggactaaagggataatttctaagtaatggaaaaatatttcaaatgactacaatggctaaytaaaactctcaggttgtttatttcctattagtagaattcaaatattcctcttttatagataataactcaactcttactattcccctcattcacagtctcctcataaaaacagaggacacaaagaatagtgacgtcatttattgtttgaaataacaacataaaacatgaaa

SEQ ID NO: 12109 - DNA, 591 bp, Homo sapiens
tacattgtaagtttcctagaaggtaaatgagatgtagtgctcttcacctgtatttgatcgagggccacacttttggaagagcatctctatctttctttcagaaatggtacttttatgagtatgctttgagaaaactctacattaaagaactatgaaattgttaactactatttgatgagtaaatactatgtccaaggcatatgatgggataaaaatagatgggctcactgttacttrtctttctagagctcatgattaatgatgaagatgagctattaacacataaaagtaaaacgaaggccaaaagtaaatgtcaagttgcaactgcgtgattcaaacacaaaatattttagtgattcagtggattggcatggttccctccaataatggaaataaaagggctgagaacttgtggcaaggatggagggtatttcaggcgttggaaggatcagcaaaggttaggtaggaaaatacgaggtatctggaagatagttaatactgaaggtgcatgatgagaagagaaagactatcttggaggagttatttgacatcaaattccaaatgatctagactgaaacataagttttattg

SEQ ID NO: 12110 - DNA, 612 bp, Homo sapiens
gatggaagctgcctggggtcttaggctggagctgcccctcacagcttcttgacagctctgggcggggcagggtgggcttctgcagggggtccacaaatctctgcctcttgagtcaccaaagaggggtgcatccagggtgcactgggggaaaccgaggcccgttcacaccgcagcacccccctcgacctgcctccccagggatttgggtgccatgttcaccctctcasaaggctttggggaacgagcagatggctcggaaatccctgccaagatcaatttctccaattgatttgacaccgggcgctctccctgcagggccggcagccacgaggggcagacagaggcgccagtgccctcactctcgggtgaagacgcccttgacccccagcccattcgacccggccacaagcctcgggccaccctgctccccaccttgtccagcctgaagcccccaggaccccggtccctgtccgtcccaggccccagcctcatggccctgccgagctccccagtctggtcccggccacccacagcccacatctgtgcctttggtcatagcctcgtccccatcaggtgcacaccctccccacaaaccagacctgccggcacagc

SEQ ID NO: 12111 - DNA, 627 bp, Homo sapiens
ctaaaacacaaaaaattagccaggcgtgatgatgcgcacctgtaatcccagctactcaggaggctgaggcatgagaatcacttgaacctgggaggtgaaggttgcagtgagccaagattgtgccacagcactccagcctaggtgatgaagtgagactgtgtctcaaaaagagaagaaaaagaaaaaaaaagacttgaattgatactattgttcaacaacaagggcacactgggacattttggaaaatggattatttctgggacatgtaagcaaataaaacgcttgacacaagctagaatggaagctctgtgagggaaggggctggggtctgttgttcacagctgtacttttaatgcctagagcatttgtaaaacaaatatatgaacgaatgaacttaaatagccaagcttatatggagggatttatagattcacaaaatattagactacgtgacctctgttaacccagtcaactctgaaacctaatgctatgaaatgcttttctaaaagttaaatagtcccctgttctgaagcaaaggctatgaaatagcctacatttatgctwcatgatctgctccaatacgacactctcctagctcgctaaatagctattctttgcatgacaaaa

SEQ ID NO: 12112 - DNA, 444 bp, Homo sapiens
aaatcgcattgggataggagaattaagcttgcaccctctttccatggtataccatattcagttctcatttgacattcaaaatccttctgattaaaacatgcttcttttcagatatgctcatgatctcmcacacctaaaactgtgtttccatctttctggctatctaggtggggagatgaaatgaacctttttggattattcaaaacaaagttttcaggcttgcttcatttttattacataagtggcaaatatattcttcataagtctggcctggttcttactctttaaagcatctcaagatccttgccttgttgagagtaatcagaattacatgatagtcatgaccaataggctcccaaagaaaggcaggaaagtttcttggaattcaaagatacatatactataatgcaataatttcttttaattaacaaagacattcatttc

SEQ ID NO: 12113 - DNA, 543 bp, Homo sapiens
ccctttccctccccaccaccttcatctgggcctctgcctctgcctccctctgacacscctgctcctctttctgtctctcagggagcctctgtctccccccgtcaccctccctttctgcttcttctctccctgcggtgtctctgtttctgggcatctccgtggcctgtctctgtgtccctcaccccgccctcccccttcccaagccctctccggacatccctccactcccccggcccttcccaggggctcagtcctcaggaagcctccccctctctgggctcttcacagccatgtaagggagggcacatttcttgtcgccccgacctaatatcttaatgcaaggccattattcacccggagtccaggcagagcaggactctcccctcctcgtttgtcatccagagtgaagcctctgcactgctcctccgggatcagattaagggactgacaggctggccaggagcaaatggagctgccagcgctgcccccactcctcactccctgctgccgcagcctcccagtctccgggtccctgaagtgtgg

SEQ ID NO: 12114 - DNA, 542 bp, Homo sapiens
cattgctgcctggacaccaactctccactttccacatcagcccagttcccatagtaaccgcsagcttgctgtctcctagcaactaagtggttctcagaggtgaggcagagtattagagagtagttgacatttgaggccagagcactgggttcaaatcccagctatgccatgtcatagctgtgaggtctttggcaagtcacttaacctctctgaacctctgcctctttgaaccttctcctgtctgtgaaatggggatgatactgttcatggattaagcattcaaaattaagttgccaatgggtgaaagcgggaagggccaagcaaaggtgtggaagtaatgtgaaaagcccagtgggtcagtgtcacaacctggtagaagcagagggaggcgaagcctgagtttggggtgggatccctggtgtgggtgagcctccctatctcaagggactccatctcgagggaccccagcctggcccacttggcagccccaccagactcttccgccctttgcatcaccacaatcctcactgtggtactttcat

SEQ ID NO: 12115 - DNA, 517 bp, Homo sapiens
gaatgggcacacattcatggcatttttcagaattagatatgtaagcaggagtccagatgtaagatgactaaataaattcattattattaaatttgaagacacagccatggatcaatgtcgtttaactacgtgtggagcttcagttaaattaagcttgaacatatgacaaaaatgttgagatctcaatcatgtggcaagacatttggccaatgacatgatggtggtagctggcaattggttagaccttattagaatactaygtcaaaccagctaaataaataagcaacatattacttatttattttcctagaaatcttagccagactgtgttctaccagttaaatatttaagatacagtaagtaactcaaatgtgactgttgaatcccgtggattctcagctagattcaaagttcaattgttgatcaacttttccttagattccataaacccaacaaattcttttcacaaaattgaatttgctttgattttctgtcatttataaaacaaatagccaaa

SEQ ID NO: 12116 - DNA, 517 bp, Homo sapiens
gaatgggcacacattcatggcatttttcagaattagatatgtaagcaggagtccagatgtaagatgactaaataaattcattattattaaatttgaagacacagccatggatcaatgtcgtttaactacgtgtggagcttcagttaaattaagcttgaacatatgacaaaaatgttgagatctcaatcatgtggcaagacatttggccaatgacatgatggtggtagctggcaattggttagaccttattagaatactatgtcaaaccagctaaataaataagcaacatattacttatttattttcctagaaatcttagccagactgtgttctacmagttaaatatttaagatacagtaagtaactcaaatgtgactgttgaatcccgtggattctcagctagattcaaagttcaattgttgatcaacttttccttagattccataaacccaacaaattcttttcacaaaattgaatttgctttgattttctgtcatttataaaacaaatagccaaa

SEQ ID NO: 12117 - DNA, 556 bp, Homo sapiens
tttttttttttgagacagagtctcactctgtcgcccaggctggagtgcagtggcgcgatctcggctcactgcaagctcctcctcccgggttcatgccattctcctgtctcagcctcccgagtagctgggactacaggcgcccgccaccacacctggctaattctttttatatttttagtagagacggggtttcaccgtgttagccaggatggtctygatctcctaacctcgtgatctgcccgccttggcctcccaaagtgctgggattacaggcgtgagccaccgcgcccagccaacctgggactatcttaacccctaggactatgtaaaggatttttggaagttacattaactctttctagctataataagacctatttgacatttgaaaatcatcataatgataatttactaaatggtctctgaaaataacaatgcagtttccaaaagaactcattttgttatcctgtaagccatctcctatggtataaagctcagcatgaatacataggtatattacattttctcaggccataagtacctggggcaataatgg

SEQ ID NO: 12118 - DNA, 556 bp, Homo sapiens
tttttttttttgagacagagtctcactctgtcgcccaggctggagtgcagtggcgcgatctcggctcactgcaagctcctcctcccgggttcatgccattctcctgtctcagcctcccgagtagctgggactacaggcgcccgccaccacacctggctaattctttttatatttttagtagagacggggtttcaccgtgttagccaggatggtctcgatctcctaacctcgtgatctgcccgccttggcctcccaaagtgctgggattacaggcgtgagccaccgcgcccagccamcctgggactatcttaacccctaggactatgtaaaggatttttggaagttacattaactctttctagctataataagacctatttgacatttgaaaatcatcataatgataatttactaaatggtctctgaaaataacaatgcagtttccaaaagaactcattttgttatcctgtaagccatctcctatggtataaagctcagcatgaatacataggtatattacattttctcaggccataagtacctggggcaataatgg

SEQ ID NO: 12119 - DNA, 536 bp, Homo sapiens
acacacacttttatatcatcattttatcatttttaatggttatataatattctattctcaagatgaattgtaattcatttattcaatcctgaatattgttggacatttaggttgcttgcagcttttcacaattaaaagaataccctaatgaatatccttgtatatacattttgctttcttgtccatcattttttttaggataaatttcttagagtagaattgctaggtacatacacatttttgaagcacttgctatatattttcaaagtgtattccaggaatattgttctcatttacacttttascaacagaatctaagagaacctctttccctagacccatgagaggcacttttaaaatcctgggtatcatctttgcccttggacttccaaccaggacatgctgcttttctgacagcaggttacagaaagtgctctgcacctctcatgtgtaccaaacaaaaaaagacgggcaagcagccataaactgggggaataactgagatgggctgtcagaacctggtgaaattttgctcc

SEQ ID NO: 12120 - DNA, 521 bp, Homo sapiens
actgtaaggaataaatgtttaagccaccaggcttcggtacttggtgacagcagccaggggagactaagatgttaagacaacagctgaaatattaactcatgctagctgcattccaccgctcgcctctgctccaggctctgacgtttttgagatggtgagcagcatggcttggtggcccccaggaaggaccgggcctgatgaccacagaggtctcccmagcactgtctgctgcctgaggctccggggcctttgcccagtcttgggcatggagaagagcccagtaatgactggggttgaatttcccacaagcctggaggattggggcttagaattaagtaaaagaaaacaaagtacaacctttcttgcataccagagtcacgcactaacatgtggctgacggtgttgatttagacatccctggctgctggcatctccagccccagcatgaggaggtgccgtgtttgctaaaacctggtcaacatagttgagcagaggcccccaaattcccaaggagtggaccc

SEQ ID NO: 12121 - DNA, 521 bp, Homo sapiens
actgtaaggaataaatgtttaagccaccaggcttcggtacttggtgacagcagccaggggagactaagatgttaagacaacagctgaaatattaactcatgctagctgcattccaccgctcgcctctgctccaggctctgacgtttttgagatggtgagcagcatggcttggtggcccccaggaaggaccgggcctgatgaccacagaggtctcccaagcactgtctgctgcctgaggctccggggcctttgcccagtcttgggcatggagaagagcccagtaatgactggggttgaatttcccacaagcctggaggattggggcttagaattaagtaraagaaaacaaagtacaacctttcttgcataccagagtcacgcactaacatgtggctgacggtgttgatttagacatccctggctgctggcatctccagccccagcatgaggaggtgccgtgtttgctaaaacctggtcaacatagttgagcagaggcccccaaattcccaaggagtggaccc

SEQ ID NO: 12122 - DNA, 521 bp, Homo sapiens
actgtaaggaataaatgtttaagccaccaggcttcggtacttggtgacagcagccaggggagactaagatgttaagacaacagctgaaatattaactcatgctagctgcattccaccgctcgcctctgctccaggctctgacgtttttgagatggtgagcagcatggcttggtggcccccaggaaggaccgggcctgatgaccacagaggtctcccaagcactgtctgctgcctgaggctccggggcctttgcccagtcttgggcatggagaagagcccagtaatgactggggttgaatttcccacaagcctggaggattggggcttagaattaagtaaaagaaaacaaagtacaacctttcttgcataccagagtcacgcactaacatgtggctgacggtgttgatttmgacatccctggctgctggcatctccagccccagcatgaggaggtgccgtgtttgctaaaacctggtcaacatagttgagcagaggcccccaaattcccaaggagtggaccc

SEQ ID NO: 12123 - DNA, 545 bp, Homo sapiens
ccataacattttctaaaaactagaaaggatacattacttaaaacaggacaatgtctgttttacaaacataactatcaaaaattaatatatattaaacatctttcacgtgagataaaaatgattttagaaaagtagtttgtgtttatttgctcctgtctcttgccttctcaattacttttttaaaaatgtaattaaatgtatgttatkaagcctccaggttcatgattaaataattttaacatctttttccatgctctatttcaatgattattaatgaagctagcattctattttgtaatattattttcatgtatttagaattaattccatttacaggtttcggtggtcaatgctatccattaatttcatttttctgagtctaaagttctagaattatttttgttcttgaaggtttaatcatagttttattgctttcttctaggactaaaattcaaaatgtattttattgctccttaaatctgtctttttcccagtgtatttctgcattacccataacttgactgagcgaaacatgactgtcttat

SEQ ID NO: 12124 - DNA, 1950 bp, Homo sapiens
gtttttgataaactcaccagtttaaattgacaaagataaagtaattgtataatttaagttgytatagttattggattagttatttctctatgtgaaagcttgactcagagaactctgtgatgccaaaaacctagcagaggaagacaaccagttattctgtcacttgataatggcagctttttatcctccaacccaaggtcaattgcattgtctttggtgaaagatagagaactatcgctaaaaaagattttactgggcagcaattctgaatctatttcctctgatgaaatgtcgatagctttctaggacaaaatgtagtttttctagaaacgaaggtgaaattggtttgaaaatgtactccacaaatcaattcctttcaatataaaacatttgagaaagaaaaattaacaagtaatccaatatgctgttatgtttccatctttttatttgaattcatcaaacatattacattttctccaaaaaaccaatttagggaagcattgatgttcttctaatggttttagagtcataaaatgtgtagtaaaaagtcagctgctgtgaacctggaaatccttgaaaactaacaagagataagatcttctgaaagaacagactcacagagctatatatgttatgaggcattatagaaaacaaataagaacatgaaaaatacttatgtactcaaaataatacaacttgacagatgatagtttaggactatggtcaaaaatatatttataatatattgaatcatcaaattctgacttcttaatttcttttggcaataccattcaattgtatgagagctttttttgttcactttttaaaaatgcaatactttttttctcaaaatagtaaaaatgtaacccaaccaaaacagaaaatataaatattaattttccttatgaaaatgttaaaccccttattagattttttgtaagtggtattagtagctagtcaattccctgaaaattgtttgcagtgcagatggtcacacactataaggaatttcctgtgtaatccagtaagttcctgaaggtagagttgcactgaaatgcatatgtgaaaactgatttcaaatggaaacatagtgaggaaaagaaggaaagtgagcaagtaaaggaaatgcaggggaaaaaagccacaaataagcctagattatccctgtgcagaaagacagatcccaggcaccaagaaaagctcaagtgatcgtggtccctaaatcagcacagtagagatgggtggttaaatagtgagccactcttttacagcatacacagacccaccaggatgaccctcctaaaatagcaagaggtttttggaggattatttcaagttccaacagctggcaagggtgattctcagcttcatgggctccaccacccctaagtggaaggagcctttgaaggcctggtgacctaatttatttccttgcacaaacatgttctgtaaaaatttgcagatgtgttgaggcttctggtacaccatgaactgatatgaactaaaggattggattcatggaagcaagcccctggacttgggcaggagggacctgagtgtctattctacctgcagagccacttggatccccactaatgtttacacacatgaagctcatggagcaagctcagttctatcatttggcaaaaagagaaggattcaaattcataagcgagtgacatccagccctttctggaaggaataacaattttcaaggccaccaccaaagaaaaggaagatgtcataagcatcagtgttttgcttaccaaaagagggagggcacaacatgggttgacctagcatctctgcttccatataacccaacttacagaacagacttctgtgaatgtcccgaccaatagtccttcatcttctgcctcaagaaaatcttttttcttctgtcaaggttagtttttctccatagtgcagcatattggtgtagtttcatat

SEQ ID NO: 12125 - DNA, 1950 bp, Homo sapiens
gtttttgataaactcaccagtttaaattgacaaagataaagtaattgtataatttaagttgttatagttattggattagttatttctctatgtgaaagcttgactcagagaactctgtgatgccaaaaacctagcagaggaagacaaccagttattctgtcacttgataatggcagctttttatcctccaacccaaggtcaattgcattgtctttggtgaaagatagagaactatcgctaaaaawgattttactgggcagcaattctgaatctatttcctctgatgaaatgtcgatagctttctaggacaaaatgtagtttttctagaaacgaaggtgaaattggtttgaaaatgtactccacaaatcaattcctttcaatataaaacatttgagaaagaaaaattaacaagtaatccaatatgctgttatgtttccatctttttatttgaattcatcaaacatattacattttctccaaaaaaccaatttagggaagcattgatgttcttctaatggttttagagtcataaaatgtgtagtaaaaagtcagctgctgtgaacctggaaatccttgaaaactaacaagagataagatcttctgaaagaacagactcacagagctatatatgttatgaggcattatagaaaacaaataagaacatgaaaaatacttatgtactcaaaataatacaacttgacagatgatagtttaggactatggtcaaaaatatatttataatatattgaatcatcaaattctgacttcttaatttcttttggcaataccattcaattgtatgagagctttttttgttcactttttaaaaatgcaatactttttttctcaaaatagtaaaaatgtaacccaaccaaaacagaaaatataaatattaattttccttatgaaaatgttaaaccccttattagattttttgtaagtggtattagtagctagtcaattccctgaaaattgtttgcagtgcagatggtcacacactataaggaatttcctgtgtaatccagtaagttcctgaaggtagagttgcactgaaatgcatatgtgaaaactgatttcaaatggaaacatagtgaggaaaagaaggaaagtgagcaagtaaaggaaatgcaggggaaaaaagccacaaataagcctagattatccctgtgcagaaagacagatcccaggcaccaagaaaagctcaagtgatcgtggtccctaaatcagcacagtagagatgggtggttaaatagtgagccactcttttacagcatacacagacccaccaggatgaccctcctaaaatagcaagaggtttttggaggattatttcaagttccaacagctggcaagggtgattctcagcttcatgggctccaccacccctaagtggaaggagcctttgaaggcctggtgacctaatttatttccttgcacaaacatgttctgtaaaaatttgcagatgtgttgaggcttctggtacaccatgaactgatatgaactaaaggattggattcatggaagcaagcccctggacttgggcaggagggacctgagtgtctattctacctgcagagccacttggatccccactaatgtttacacacatgaagctcatggagcaagctcagttctatcatttggcaaaaagagaaggattcaaattcataagcgagtgacatccagccctttctggaaggaataacaattttcaaggccaccaccaaagaaaaggaagatgtcataagcatcagtgttttgcttaccaaaagagggagggcacaacatgggttgacctagcatctctgcttccatataacccaacttacagaacagacttctgtgaatgtcccgaccaatagtccttcatcttctgcctcaagaaaatcttttttcttctgtcaaggttagtttttctccatagtgcagcatattggtgtagtttcatat

SEQ ID NO: 12126 - DNA, 533 bp, Homo sapiens
tacagatggttccacatcttctaygcatgaacttctcccatggcccagccatcacagcaaaataaaaaccataaaaaggctcttgttctctcccttactgcttcatctttttctacacttttctcacgcattgttccagcaggcctgaattaccaagtattgctgccagttaccaactcaccatatcccaacatagaacagccctgacacaggtcccaggagctactgttattacctgggcatttcagataaggacactgaaactcagaagagccaaatcacttgtccaacattgtacagttgtcctaatgttgtggaagcaacatgcaaacccaaggattagaccctaaggccatgatcttttccctttgccttgatgtcttttctgacagtttcctgaaaggacaggtgacatctgtggctttgcacaaaactatctcctcctttttaagctagctgagcccaccccggccctctactccctcccacgtctggcccttgtggtgccccttgccctccttggtgctctgcat

SEQ ID NO: 12127 - DNA, 574 bp, Homo sapiens
tccgttctgtgaagagtaagcactcttcctgtaacctgttactattaataaatttagctaattaatattttttattccaatattttttaataaatgtcattcacatattacactaaaatcaaaaccattcatagaaagttgaggtggaatcagtatgagttgaaactagacttctgttgcattatacgtgaacaatttgccaaattgccagtgaactgtctggaggcccattttttaatacatggatgagctaatgtcgatgtgcagatgtggtaaagggaakggttcaccttgcattagccttgactcaccacaataaattttaaatgttaccagaaatagttgtcctctttttgtaagtgacctacatgccgtaacttcaacatttgcatgtccaaatgccttggtggagggcattctgcttgcctataaaggtctgtctcttgagggaaggatgccctgcaaggacagggaggcaaaattggaacctgatgatgtcataaagagccatcctcaagtggtgatcttgtactttccctgcaacaagagacctcataatgacaaagtcaaattg

SEQ ID NO: 12128 - DNA, 559 bp, Homo sapiens
acgtctctcaggagacgccttgtggtgccctggcccctgagcggcctcccctggcgggcrcagtccgtgctgtgggagcagctgcctctgggcactcggaagcccacagtgggctctgactctggtgcagctcaaatataccatccaccagagggatctagttactttccactcacccaaagtttggctgctgggttcgctcggcagcttcctctcttcccttcccaatccagacactttctgaggggtaagcgcaggcccaaactccctctgctagactgctgctttcagagcctcgctccctccagctcactgcgcgatctgactcagacctcttggcctatggcccactgagggccagtgggaggcctgtctcactgagatgacaggttctcatgagaatcagcgaggcccagtgattctgtgcccccagaggcagcctcaggacactctcttcctgccactggatttcctggagaccagattcaagcacaggaaaagtctgaccttatctgtgcacgagctgctcttggaaagaacgtaatttttctccctgctc

SEQ ID NO: 12129 - DNA, 528 bp, Homo sapiens
tgatgagcaaagaagtgatgagatgtttttcttgaagtggaaaaagttattaaatacatccctcatcctacataaggtgagacacagacctgtgcagactaacatccctcacgcaaacacctctggcaggacacgtggggcaccctctgagcagctctgaccatcgaggtgagacctcctgtgtgctgggcaggaccctgaaaacacgggaggagcttctggagcttaacctgtgtctggggcaaggcccttccctctctggaattataccccaatccatcaaatccccctgccccagcactcctcccacacggacccctcacatcccacgctaggccacgctgtcaccagcacaacgctgctgtcaccaactggtgaggcctacagtgatgcgyctcctatgccatgtatgacacccaatgactgagtgctgtacacacaaggaatatcctcccgcggcgtagggcaccccaggcaacctgccttcaggtggtgaaaagtgcagcaagggccgaatgggcactggga

SEQ ID NO: 12130 - DNA, 528 bp, Homo sapiens
tgatgagcaaagaagtgatgagatgtttttcttgaagtggaaaaagttattaaatacatccctcatcctacataaggtgagacacagacctgtgcagactaacatccctcacgcaaacacctctggcaggacacgtggggcaccctctgagcagctctgaccatcgaggtgagacctcctgtgtgctgggcaggaccctgaaaacacgggaggagcttctggagcttaacctgtgtctggggcaaggcccttccctctctggaattataccccaatccatcaaatccccctgccccagcactcctcccacacggacccctcacatcccacgctaggccacgctgtcaccagcacaacgctgctgtcaccaactggtgaggcctacagtgatgcgtctcctatgccatgtrtgacacccaatgactgagtgctgtacacacaaggaatatcctcccgcggcgtagggcaccccaggcaacctgccttcaggtggtgaaaagtgcagcaagggccgaatgggcactggga

SEQ ID NO: 12131 - DNA, 528 bp, Homo sapiens
tgatgagcaaagaagtgatgagatgtttttcttgaagtggaaaaagttattaaatacatccctcatcctacataaggtgagacacagacctgtgcagactaacatccctcacgcaaacacctctggcaggacacgtggggcaccctctgagcagctctgaccatcgaggtgagacctcctgtgtgctgggcaggaccctgaaaacacgggaggagcttctggagcttaacctgtgtctggggcaaggcccttccctctctggaattataccccaatccatcaaatccccctgccccagcactcctcccacacggacccctcacatcccacgctaggccacgctgtcaccagcacaacgctgctgtcaccaactggtgaggcctacagtgatgcgtctcctatgccatgtatgacacccaatgactgmgtgctgtacacacaaggaatatcctcccgcggcgtagggcaccccaggcaacctgccttcaggtggtgaaaagtgcagcaagggccgaatgggcactggga

SEQ ID NO: 12132 - DNA, 274 bp, Homo sapiens
tgacaacaatgaaaataatacctgacatttattgaacacttatatttgccagcttttataataaacactttatatgcattaattctttcactcttcaccatgatattatataatcrctttttcaggaaggaagcttggacggactgggtaaattgccctacagtacacagcttgtaagtagcagaatggcataatgagcactttatctgatgactaagaatgtacaatgacatctgtgtctccaccaggaagaagctctgtaacccagatcaat

SEQ ID NO: 12133 - DNA, 550 bp, Homo sapiens
gatcaagtgctggtgtggagttatttatggaatgaaggaataatgattctttgatcacattagtagttaatgtttgagtatagataggtggaggaaggttgcaggagggaggaagtgttcctctcccaaaaagggagggtgaagatctagagaaataaagaggtagaaaagggagaaatgaggaaggctttctctgatggcctcattctcagtgaagaatgacacaaagtcattctggagggggcaggggaggtgcaaggtggaggcctgaggaaaaggtgtcagatagtgactgtggggaatttttgagggagctaactggagatgaatcattccatggtcatgatttctgcatatctggaatgcacctactccaggctcaggctcaaatggaaactgaaaatygccccaactaatggcctgacatagcaaaaccaagctcatcctcccccactccagctcagacaaatcacatgcattgcttgtccccatttcctgccataagctgtccccttaacactattctgttggtctcactcccacttcaccc

SEQ ID NO: 12134 - DNA, 641 bp, Homo sapiens
aagaaagaaaaaagtaatggcagtagtagcaggagtagtagtagtaacagataaaacctatcattggcagcaacccaggcaagcatttatttctatatcttgctgatggggttgatggggttagcaattgctatagtctccctagtaggggatttaggagacagatgaaaaactgttagactatttacgtatttaaccaaaaggttccattttggggtattcatcctatggaaatagtcatgaaagtaggtaaagatttagttccagagatgtttattatagtttcttgtgaacattcttatttgaaaagaagataagtgcccaataatatcagwttgattacagtacactcaagcggttagcacagatattcatcatagctgtacttgataacagttgttactattatcatgttcttgtgtgagaggtaaagggagataagattaaactttttgatgttataaacaccatcacatacttcaatctaatattttagaagaatatttaatactattttaggtttactgttgaattacatcaacagatgtttgtaaaacacagagcaaaaagtagagtaagttatacaagatcaatttagtcacatctctatgtgagtatgtttgcatcaaataaatactgga

SEQ ID NO: 12135 - DNA, 645 bp, Homo sapiens
ctaaagatttcacgtgaaagggtggtgattgatttgagcaagcaggcggtacgtgacaggggctgcatgcaccggtggtcagagagaaacagaacagggcagggagtttcaaaatgttcttctatacaatgtctggaatctatgartaacatcggtttctaagttatgagttgatttttagctactgggtttaggccaggcaggcccaggcctggtttcgggcctggcgccgggctgcctgtctttgattttacttccttgttgttttttcttaaaacaggtactgagtataaaacaatataaaacaatatgagagggtctctctcttccctcaccacatatgtgagaaaagagaaaatatggctaagtcatgtacttaactgagtattaaaacacatgtcttaccagaaatagcaatttttcaagtgtgtgaaacacattaaaaataaactttgaaactccaaaaatctttaaaatatgtaaattcatttagactttactagaaaaataaagttatctctctgaaattttgttgttaaatatttgtagaaaaggatgtaaagtggaatgaggtctagagagagaattttgatggatgtgtgtatttgagtcagttttcatcccactgaatctttagtcaaatca

SEQ ID NO: 12136 - DNA, 545 bp, Homo sapiens
tatctgacttggtgctcaagttttactgtacttggcagccatcttcatatgcacttgtgtctttgtgacagatatttacttatttcattaatgtcacattcacgattttgtttctcctcctctttgaagtcttctggtgttttaagagagaagagggcattaaagtcttacccttttattttmaatgtggaagttgccattgcatgcctgttgatgggtaggtcaccagccctgaggtcctctaaggtgggtgtcttatgtcagaggtggaagcaagctgaggcaaaggccctttagagaaggtgggttattcagagcccctcatcacatactacttttgccttgatgaggacttccggagcctactcatggaacctgcttcattaatgactgaccttgacctgtctataacatgcaatcacttgccctacaaagaaccccaaatacaaagtgtggcaggtgagcctcaacattgatctgtctttccgtcaacaataactgcccttggttttctaattaagccgtttagagtacgagtgacttag

SEQ ID NO: 12137 - DNA, 524 bp, Homo sapiens
agatggaaatggatcattaatgatttattttcagtttaaaaagtagcagatagcataatactttcatgaatatttaaacttaatgtragtgtgctgtatcaattgtgtcctgagaccttattaaaagtaaagcattcctatttcaagtgcaaacaaatttagaacatatatagtgtttagtgaaaataattacatgcacacatgctctactatgccatcttgaggagagggtggcattcaacattctgctcctgagatgtttgactcagtaaaccgctgtccacagtgtccctgtaaaacacaacaatatgcttctcatcagctgctctgattcgagccttaagaataaaagattgtcaactacccaagttgctgtgccacaacataatgtgcagatggtcaggctcagtaggaagcagctgggagaggccagtggggctctggagagcccagaggtcttggagagggacctgcatggtatcatggggaagaaagaaaaaagttctagactcttccaattttgt

SEQ ID NO: 12138 - DNA, 568 bp, Homo sapiens
gctttacattgctccaaaacaagtcgtcttttgctttcttcttctacatttaaggatcctgtgattmtactggaccaacccagattatacaggacaatttcctcactttaaggttggttgattagcatccataatcccatttgcaatcttaatttcccttttccaggagacgtaaaaatttggggataatgatgtggctatctttggtataccatttttctgcatatgacagaagaggaaaacagttttaagctattctaatatacatatgtaaaaattgttttaaaattatttaaatataatatggcttgaattaaaatatttaataaaagtgattcagaacaactggaggtaataggacttacagaatgaaaaactaagttccccaataaaccctctccacaggaaaaaaaaaaattacccagagaaacttaaaaaaaaagtcaaagtttaaaaattgtcctcacagcatatcaagtggagaaacatgtcttcaggaaaatatattaaatctttataggaaagaaaaagtctgtggcatctgatccaagttttactccattatccc

SEQ ID NO: 12139 - DNA, 568 bp, Homo sapiens
gctttacattgctccaaaacaagtcgtcttttgctttcttcttctacatttaaggatcctgtgattctactggaccaacccagattatacaggacaatttcctcactttaaggttggttgattagcatccataatcccatttgcaatcttaatttcccttttccaggagacgtaaaaatttggggataatgatgtggctatctttggtataccatttttctgcatatgacagaagaggaaaacagttttaagctattctaatatacatatgtaaaaattgttttwaaattatttaaatataatatggcttgaattaaaatatttaataaaagtgattcagaacaactggaggtaataggacttacagaatgaaaaactaagttccccaataaaccctctccacaggaaaaaaaaaaattacccagagaaacttaaaaaaaaagtcaaagtttaaaaattgtcctcacagcatatcaagtggagaaacatgtcttcaggaaaatatattaaatctttataggaaagaaaaagtctgtggcatctgatccaagttttactccattatccc

SEQ ID NO: 12140 - DNA, 594 bp, Homo sapiens
taaacatgttctgtaaaawggcaaaaaaaaaaaagatgtgatttcatatggaaacaaaaatgtattgtgaccatctccttttgagaatcctgaatcagtacatctatgcaatcaatggctgtttagtattgagttatatactagatgctggacaggctgctaatacctatttgtgtttcattaaatgaaatgccctacagaaatgcctcctcttaattaatgtaagtatatttgaatactgattgcagcattaagctggactcttcaattatctgtagtgtgtgtgtctagtttaccacgaacggattttcagggtagctccatatttccatctcataagttatataaataaaaaatactgtaagaatcaaattatgtccttagcatcttcaacaataatgaaagtacaagacctatgccagagaagatttaggagaaggttgtcaagaaaaaaaaaaaagaaaaaaaagaaaagaaaactctgacgttctctcaaaatgctgaaatcctgccgataataaagcaatccactgtccagttctgcattaagcacctacgtaattgcattcacctttgcactgggcactgtgaaca

SEQ ID NO: 12141 - DNA, 594 bp, Homo sapiens
taaacatgttctgtaaaaaggcaaaaaaaaaaaagatgtgatttcatatggaaacaaaaatgtattgtgaccatctccttttgagaatcctgaatcagtacatctatgcaatcaatggctgtttagtattgagttatatactagatgctggacaggctgctaatacctatttgtgtttcattaaatgaaatgccctacagaaatgcctcctcttaattaatgtaagtatatttgaatactgattgcagcattaagctggactcttcaattatctgtagtgtgtgtgtctagtttaccacgaacggattttcagggtagctccatatttccatctcataagttatataaataaaaawtactgtaagaatcaaattatgtccttagcatcttcaacaataatgaaagtacaagacctatgccagagaagatttaggagaaggttgtcaagaaaaaaaaaaaagaaaaaaaagaaaagaaaactctgacgttctctcaaaatgctgaaatcctgccgataataaagcaatccactgtccagttctgcattaagcacctacgtaattgcattcacctttgcactgggcactgtgaaca

SEQ ID NO: 12142 - DNA, 1186 bp, Homo sapiens
atgaaagatctagaaataaggagatattgccccaatcttaaggagctygcagcctagctgaggacacaaacgttagggtagatacacagtacgtgctgataaggaaagttgaaggatgtatgtcaaaggaacatgcgaaagttgagaaataataagtaaaacatcaatgcaacagtgatcgtatggaggggaaataccatggtttcatatgtttctgagggtctttagttctgagactcattcacagaactggtctctgtagggttttgtgatagtatttaaggttatcagttaatctatacaattatatagggcagtagaaaaaggttttgaatcttgatataagatgtgagttttaaataaatattggtcagctctagttaagacggaatgaagttttctcctctttctctcccttctcctcctccttctttttgccattgtcatcaaattcctgaattcagaacctgcttctatcacttgttagctattatttaaggagaatcacctagtttctttatacagtgccttgtttttcccactgcaaaataatgtctgtatcatagggttgttgtgaggattaaataaatcaaaagatattagaaaactagagcctggcacatcatactcagaaggaaagcaatgctatacctatatcatacaataagaaaatgattttacttttctaagcatgcatgccccaaacttataaagttttttgcataatatcgaatattcaccgtaagagcccaaaggacaaatgattgcacagaaagaggaaatgttgaagagcataaaattctataatattctggaggtcttctctctctacccttttcccacaaatgtgaattttgaggtcggaatattaatctactgattaatagattagtgctttcttgcaaatgttaaaatattaatttcaggaacactgtgataagggtgtcgataatttttttaacataagaatcaatattctctagtataaccagagagataggaatcaatatatattagtttaatgtcaaagctagacctgcagttttaaaaataggaaatggccttctgagtggaaaatgaaatgatttcttcttaaagtggaaggccttttcagggcctaactgataccctagtgatgatcttaggttgtaccacatctcttgagatattttattgttatttagca

SEQ ID NO: 12143 - DNA, 1186 bp, Homo sapiens
atgaaagatctagaaataaggagatattgccccaatcttaaggagctcgcagcctagctgaggacacaaacgttagggtagatacacagtacgtgctgataaggaaagttgaaggatgtatgtcaaaggaacatgcgaaagttgagaaataataagtaaaacatcaatgcaacagtgatcgtatggaggggaaataccatggtttcatatgtttctgagggtctttagttctgagactcattcacaraactggtctctgtagggttttgtgatagtatttaaggttatcagttaatctatacaattatatagggcagtagaaaaaggttttgaatcttgatataagatgtgagttttaaataaatattggtcagctctagttaagacggaatgaagttttctcctctttctctcccttctcctcctccttctttttgccattgtcatcaaattcctgaattcagaacctgcttctatcacttgttagctattatttaaggagaatcacctagtttctttatacagtgccttgtttttcccactgcaaaataatgtctgtatcatagggttgttgtgaggattaaataaatcaaaagatattagaaaactagagcctggcacatcatactcagaaggaaagcaatgctatacctatatcatacaataagaaaatgattttacttttctaagcatgcatgccccaaacttataaagttttttgcataatatcgaatattcaccgtaagagcccaaaggacaaatgattgcacagaaagaggaaatgttgaagagcataaaattctataatattctggaggtcttctctctctacccttttcccacaaatgtgaattttgaggtcggaatattaatctactgattaatagattagtgctttcttgcaaatgttaaaatattaatttcaggaacactgtgataagggtgtcgataatttttttaacataagaatcaatattctctagtataaccagagagataggaatcaatatatattagtttaatgtcaaagctagacctgcagttttaaaaataggaaatggccttctgagtggaaaatgaaatgatttcttcttaaagtggaaggccttttcagggcctaactgataccctagtgatgatcttaggttgtaccacatctcttgagatattttattgttatttagca

SEQ ID NO: 12144 - DNA, 1186 bp, Homo sapiens
atgaaagatctagaaataaggagatattgccccaatcttaaggagctcgcagcctagctgaggacacaaacgttagggtagatacacagtacgtgctgataaggaaagttgaaggatgtatgtcaaaggaacatgcgaaagttgagaaataataagtaaaacatcaatgcaacagtgatcgtatggaggggaaataccatggtttcatatgtttctgagggtctttagttctgagactcattcacagaactggtctctgtagggttttgtgatagtatttaaggttatcagttaatctatacaattatatagggcagtagaaaaaggttttgaatcttgatataagatgtgagttttaaataaatattggtcagctctagttaagacggaatgaagttttctcctctttctctcccttctcctcctccttctttttgccattgtcatcaaattcctgaattcagaacctgcttctatcacttgttagctattatttaaggagaatcacctagtttctttatacagtgccttgtttttcccactgcaaaataatgtctgtatcatagggttgttgtgaggattaaataaatcaaaagatattagaaaactagagcctggcacatcatactcagaaggaaagcaatgctatacctatatcatacaataagaaaatgattttacttttctaagcatgcatgccccaaacttataaagttttttgcataatatcgaatattcaccgtaagagcccaaaggacaaatgattgcacagaaagaggaaatgttgaagagcataaaattctrtaatattctggaggtcttctctctctacccttttcccacaaatgtgaattttgaggtcggaatattaatctactgattaatagattagtgctttcttgcaaatgttaaaatattaatttcaggaacactgtgataagggtgtcgataatttttttaacataagaatcaatattctctagtataaccagagagataggaatcaatatatattagtttaatgtcaaagctagacctgcagttttaaaaataggaaatggccttctgagtggaaaatgaaatgatttcttcttaaagtggaaggccttttcagggcctaactgataccctagtgatgatcttaggttgtaccacatctcttgagatattttattgttatttagca

SEQ ID NO: 12145 - DNA, 514 bp, Homo sapiens
gaaaattagaaacaacatttattaataagtgccaggtttcaaggactcctgatccatccccatgacataaatcctggaatctgcagcatgtatatttgaaatacattaccataaaatatttataattactttttaaattctcttggacttgtcttggtgtcagaaatataatatttatttattattatttttctcttggctcatttctctttgtgcattttcagagaataacacttgacctaaacatttgcatttttaatttatttataataaaaagaactgataatttgccagccgagacattgtgcwgatcttcaccacaagaaatagatgctatgtatctatgtgtgtgtgtacatactgtgatgcaaacaaagaaagtaaaatgtggagcaactagatagtttgtccaaggtcacactgaaggaaagccaacacccaggaatctcactctgttgcctgtttgcttaacaataccttaagctgcccatctatcaactgcagctcagttcag

SEQ ID NO: 12146 - DNA, 534 bp, Homo sapiens
agattggggagagaacaaaacaggagtgaatatttccctggaaactagctgctccccaattcaattctactgcagacattcagaatgaaggggacattcagctgaggaacaggagtgcactggctgttaaaatctcaggttgtaacaacaattttgcttcattttccctaaataatttttaaacaattgttcttaggtggttttctaaacttcgggtaatatctgtgaattagtaaatgttctttaaaagatkagataatatttttattttgtttaattatatgtgtttttaaactaattttgtgggaaaaataatttctttccttccctgttataccaaatacagcctttagctcaagacataagtaattccaggaaaactggaatttaagttcaatatgttacactaagtacatttgaaagttcatgcatttttattttaatttaaaaaataaatttgctttatgcctagagaaatcagcagaccagacctccctggatacgccttctgctgcactcatcctcttgaatgcc

SEQ ID NO: 12147 - DNA, 534 bp, Homo sapiens
agattggggagagaacaaaacaggagtgaatatttccctggaaactagctgctccccaattcaattctactgcagacattcagaatgaaggggacattcagctgaggaacaggagtgcactggctgttaaaatctcaggttgtaacaacaattttgcttcattttccctaaataatttttaaacaattgttcttaggtggttttctaaacttcgggtaatatctgtgaattagtaaatgttctttaaaagattagataatatttttattttgtttaattatatgtgtttttaaactaattttgtgggaaaaataattyctttccttccctgttataccaaatacagcctttagctcaagacataagtaattccaggaaaactggaatttaagttcaatatgttacactaagtacatttgaaagttcatgcatttttattttaatttaaaaaataaatttgctttatgcctagagaaatcagcagaccagacctccctggatacgccttctgctgcactcatcctcttgaatgcc

SEQ ID NO: 12148 - DNA, 534 bp, Homo sapiens
agattggggagagaacaaaacaggagtgaatatttccctggaaactagctgctccccaattcaattctactgcagacattcagaatgaaggggacattcagctgaggaacaggagtgcactggctgttaaaatctcaggttgtaacaacaattttgcttcattttccctaaataatttttaaacaattgttcttaggtggttttctaaacttcgggtaatatctgtgaattagtaaatgttctttaaaagattagataatatttttattttgtttaattatatgtgtttttaaactaattttgtgggaaaaataatttctttccttccctgttataccaaatacagcctttagctcaagacataagtaattccaggaaaactggaatttaagttcaatatgttacactaagtacatttgaaagttcatgcatttttattttaatttaaaaaataaatttgctttatgcctagaraaatcagcagaccagacctccctggatacgccttctgctgcactcatcctcttgaatgcc

SEQ ID NO: 12149 - DNA, 534 bp, Homo sapiens
agattggggagagaacaaaacaggagtgaatatttccctggaaactagctgctccccaattcaattctactgcagacattcagaatgaaggggacattcagctgaggaacaggagtgcactggctgttaaaatctcaggttgtaacaacaattttgcttcattttccctaaataatttttaaacaattgttcttaggtggttttctaaacttcgggtaatatctgtgaattagtaaatgttctttaaaagattagataatatttttattttgtttaattatatgtgtttttaaactaattttgtgggaaaaataatttctttccttccctgttataccaaatacagcctttagctcaagacataagtaattccaggaaaactggaatttaagttcaatatgttacactaagtacatttgaaagttcatgcatttttattttaatttaaaaaataaatttgctttatgcctagagaaatcagcagaccagacctccctggatacgycttctgctgcactcatcctcttgaatgcc

SEQ ID NO: 12150 - DNA, 1342 bp, Homo sapiens
ttaaaagctcatactgaaaacaactaactgaaaatgtatatatttttacaatgaaagctattaaataaggaatgcattacaactatagaagggccagtgtgcacattactcgtatttagtcagagacaattcctagaaggagtctagagaagtttctgaaaattgattttaaaataaggtaatagtttattttattacacagaaattatttggctgtaaagccagcaaagaaaaggaacagagcctacatcagagcttttacatgaaggaaatactgaaattggatacgacacatcaaaaatatttaaatatgaaactacagagactctggctgagttgcagcctctscagttcacatgctctctaacagaactcagtcttgatgagtgtttgcagaaaattgtcttcattgtcaaccacactccacaaaatgatggctaatttgacttttacagatttaaaaatttggaaagcatttgagattgcctgccaactccacagaactcttttcattaatcagtaaataaagttttatttaattttttcacaaagagaactttgtggtcatgaacgcctgctgtctgctccattaaaaataaagaagtcttctaaagagactctctcaaacatattcaaatacaggacttgggaagatatttcattctaatttaggagtacataattaatgtatttctttgcagctagcgtttaatgtcattgcttttatggcttatgatgtagtttgtttctttttatttaacagaaaggtcaatgtgactaataattagaactatgactgagagaagaagactgtaattagactatttttcagtgaataataaagtgtcagaaaaaaagaaagtgaaacctttgtgtcagcaaaactggtttacataaggacaggaaaagtgattcttttatatagatgcacacttacgtgaccttcccataatctaacttattgataatttaataattataaatatacataaagagcatggtctagatattcaaaataaagcaatggttctcaaccaagagtgattttgcccataagagatttggccatttctggaaacatttttgcttgttatgactggaggagtgccactaacttttagagggtaaagtccaggaaagctgccaaacatcttacaatacccaggcagtgcctcacaacaaagaattatccagttgcaatgtcaatagtgccgattttgagaaactcaaaagttataaaaccttttgattttgaaattaatgagtaagctttgaagtagtccagagtaattggagctctgtgctgaaatgtctatctattgacattatattgtgagatgca

SEQ ID NO: 12151 - DNA, 659 bp, Homo sapiens
gattaagaagtcaaaaccttaatttttaataacatgggtagatggacagcctagcataatggctaaaagccagggctgtgaaatcagactccctgattttggctttgctatgcaatggttgaatgacctctgtaaaacctctatttcctcatctgtaaaatgagataataatggtccttacctaataggttattgtaaagattaaatggcgtgttccagatagagcattcttgatagatttcaataaatgttagcaattcaaatttcataataatatcaagaagggtttcaggagataaaaatatatcaggggtcttgtttacctgcctttgcaactgtgcgtaaatacttccaggaaggccagcactgactctggtcattactcctattctagctccagaatctgtcccaagatatgaccctgtctcgtagggctggttgaagaccatttagaaggggatagtctctgagcaatggttcaaaaagccaggtcatccaggaaatccctgttgagaagctccaaagamccagttggacatcattccctgccatacttgcctttaaaaatgtatggttcgttgtcaggcagctggtgagcaccaggagcagtggtctctggtctgggcactgggacagggggcctgctggccaggtccaca

SEQ ID NO: 12152 - DNA, 473 bp, Homo sapiens
cagacaaccctatggggtattactattcccattttcaaataggatagttaaggtctaagtgaattaagttactttctccaggccacagggttagtaagtggcagagggctgggwcttgaagccaagtcaaccttacctcaagacctgaactttttattaccatgttgttctccacctagttttagggccaactgtggtgtgtgaactgtgaatcatagtttttaatgtttttcttcaccactttgtcaattttactgcaagttttattcacatagcatcttttacttagatattttataattctacttggcagaccctttgtcatctttctaatcattattatcaacattttaaatacttactttatcctatggtatgcacaaaaatgcttagggatgagaaacaggaagacagggtagtcacagaacttgtctaaagtcacattgctaataaggacaagagcccagagtgaa

SEQ ID NO: 12153 - DNA, 515 bp, Homo sapiens
aagcacaagacttcaaataaattttagttttgcagcagacagctccaaaatattctgccagccttctatttcaccacccttctgccccaaaatccagagtgctcacccttcatggctgtaggggatattctgatgaaaagttgagaaggattaatttaatctatcctcttactgctgctttgtaaargtaaccacccaagaaaagataagctgagatgatgtgttgcaggtgctgccagctcctctactaaatgatgtgggagtgtcacatggagggcagtgacatcaaatcgtgttgactctgaacccatacacctgccttgctaacttctcatgccatttctgaatgcctggtcctcatttgtgggttctgtttgaggtggcatctattctttttgcctgccagtcatccaatccatcctttcttctgataatagctcctgttttttctccacccttctcctacttggtctgtgagtcttggctgtgactagtcctgacccctggattcaggg

SEQ ID NO: 12154 - DNA, 526 bp, Homo sapiens
caaaggtttatatatatgtattaatacaatctttgaaatttaatttctaatattggaaaaaagaaagcaacctaaaaatctaataagagaattaaatggttaaatagaatgctgaaccacactaaaacaaaacaaaacaaaaaggaaaaaacttttcaaaggacaktgaaagacatgagatgttactgatgtcatatgtaaaataagtaagattcaaagatgcaagagaggttcagttggagaaagaaattcaaatatcaaaagctaaatcctggagttttataacatatattgtatataatccgttaacaagaaataatagaaattaaatgggccaaaaatctaaaagtaatagaccctgagtggtacaattatgtattactcttgttttcatctctttttttattttcccattttagacagtgaatctatatttgttcagtcattaaaatgtgttaaatatcttagttagcatgatgtttgttattcactgaaatatatgaagtcaatttctaggacagatgag

SEQ ID NO: 12155 - DNA, 526 bp, Homo sapiens
caaaggtttatatatatgtattaatacaatctttgaaatttaatttctaatattggaaaaaagaaagcaacctaaaaatctaataagagaattaaatggttaaatagaatgctgaaccacactaaaacaaaacaaaacaaaaaggaaaaaacttttcaaaggacagtgaaagacatgagatgttactgatgtcatatgtaaaataagtaagattcaaagatgcaagagaggttcagttggagaaagaaattcaaatatcaaaagctaaatcctggagttttataacatatattgtatataatccgttaacaagaaataatagaaattaaatgggccaaaaatctaaaagtaatrgaccctgagtggtacaattatgtattactcttgttttcatctctttttttattttcccattttagacagtgaatctatatttgttcagtcattaaaatgtgttaaatatcttagttagcatgatgtttgttattcactgaaatatatgaagtcaatttctaggacagatgag

SEQ ID NO: 12156 - DNA, 526 bp, Homo sapiens
caaaggtttatatatatgtattaatacaatctttgaaatttaatttctaatattggaaaaaagaaagcaacctaaaaatctaataagagaattaaatggttaaatagaatgctgaaccacactaaaacaaaacaaaacaaaaaggaaaaaacttttcaaaggacagtgaaagacatgagatgttactgatgtcatatgtaaaataagtaagattcaaagatgcaagagaggttcagttggagaaagaaattcaaatatcaaaagctaaatcctggagttttataacatatattgtatataatccgttaacaagaaataatagaaattaaatgggccaaaaatctaaaagtaatagaccctgagtggtacaattatgtattactcttgttttcwtctctttttttattttcccattttagacagtgaatctatatttgttcagtcattaaaatgtgttaaatatcttagttagcatgatgtttgttattcactgaaatatatgaagtcaatttctaggacagatgag

SEQ ID NO: 12157 - DNA, 645 bp, Homo sapiens
caagatttatttttgtaaatgactgagatttatgtaaatgtgtatctctgttgtgttttatatatggggtgtctataagggcatttatccctatgaaggatgtcaaatactttcttctaatatatgtttagacatattgcagaggggtccttgttatttgtaattgagttaggtcatttactttgtgtctggtctcacctgtagcatgggaagaggacagcaatgatgagctgcatgtagtaggtacctgtgtatcaagaactgttggtatgtattgctaattygcatacaaagagtttgtctgtctgcattgtagtttgtgtttaatatcatttgttaaattcacaaatacaacatattgaataaaatatttatatgaaggcatattaaaaaacatcaaacaactttatgtaacaaaatggcattgcattactcaccaatatagagaaatgtcatgtaaataagttggtaaactcaatttccccctttaccatgccaaagaaaattttagctctttgatgatacctctcttgctatttgtttgggataagacttcgccatttttttcccctcagaaattaagtttgctgttattaagtaagaagtgcaatctgtcactactgatgttccgtatagtaaatctga

SEQ ID NO: 12158 - DNA, 542 bp, Homo sapiens
tgattatgatcaaaatgtgccaaatttaaacatgctattataaatcacaagtgtccacaatgaaatcatttcattcatccttggtagattttcttattgtgcaatgatgttattattacatcttattaagcagctgcgagacatctaatctttcaaacaattagtggcatttatttggtgccaccctttaccgatcagatagtcaccatcctgtatcactccagctaggcttttaggtgacaattttgttttcccttaaagagcaagttatatctgacttatgaataaatacagaaaaacataaggctctttgacataacatgaggcaggccaagtaatccgtgaagagagtcttacgtagtaaggatgggcagaaagcaaaggtctaacttaatgacrcacaaagagtcatcttttaccttcagctagagctgaggagaagtatacatgtctctgtttcctcgtaacttggctaaacaaatgaatttataaccaattatgaggactcaataaattaggatagcagtggctatgacacggct

SEQ ID NO: 12159 - DNA, 542 bp, Homo sapiens
tgattatgatcaaaatgtgccaaatttaaacatgctattataaatcacaagtgtccacaatgaaatcatttcattcatccttggtagattttcttattgtgcaatgatgttattattacatcttattaagcagctgcgagacatctaatctttcaaacaattagtggcatttatttggtgccaccctttaccgatcagatagtcaccatcctgtatcactccagctaggcttttaggtgacaattttgttttcccttaaagagcaagttatatctgacttatgaataaatacagaaaaacataaggctctttgacataacatgaggcaggccaagtaatccgtgaagagagtcttacgtagtaaggatgggcagaaagcaaaggtctaacttaatgacacacaaagagtcatcttttaccttcagctagagctgaggagaagtayacatgtctctgtttcctcgtaacttggctaaacaaatgaatttataaccaattatgaggactcaataaattaggatagcagtggctatgacacggct

SEQ ID NO: 12160 - DNA, 542 bp, Homo sapiens
tgattatgatcaaaatgtgccaaatttaaacatgctattataaatcacaagtgtccacaatgaaatcatttcattcatccttggtagattttcttattgtgcaatgatgttattattacatcttattaagcagctgcgagacatctaatctttcaaacaattagtggcatttatttggtgccaccctttaccgatcagatagtcaccatcctgtatcactccagctaggcttttaggtgacaattttgttttcccttaaagagcaagttatatctgacttatgaataaatacagaaaaacataaggctctttgacataacatgaggcaggccaagtaatccgtgaagagagtcttacgtagtaaggatgggcagaaagcaaaggtctaacttaatgacacacaaagagtcatcttttaccttcagctagagctgaggagaagtatacatgtctctgtttcctcgtaacttggctaaacaaatgratttataaccaattatgaggactcaataaattaggatagcagtggctatgacacggct

SEQ ID NO: 12161 - DNA, 493 bp, Homo sapiens
aaattcttccactgtcatgcttcgtgatcaataagctttgcttctgaaatgccagagagaaacaagatttttcttatgtaggattaactccccacaagtcagctttggatgggagttgggaagctgcttagctcttccagtaccgcaaacttctcttaggaatttagaattacaatatrtgcaagtgccctgaagctcatagtttaagcttctaaaagttactacgttaccgcaaaatatctcaaaacacaaaccctatcttgatttttttttaaaagcacaatgaataacaaattttttttttttttttttttgagacagagtctctctctgtcacccaggctggagtgctgtggtgctatctcagctcactgcaagctccgcctcccaggttcatgccattctcctgcctcagcctcccgagtagctaggactacaggcgcctgcccccacgcccagctaattttttgtatttttagtaaaagagggggtt

SEQ ID NO: 12162 - DNA, 608 bp, Homo sapiens
atctgccttataaataataagttctagaattttgcttggtatctaaaataaacttactggtttatagacacctttacctgttttggaattcatgtctctctttctctttaacagaaaatgagcttcacttctcagaaacatgaaattggttatggtggatcaatgttcctgctagtaaccaggaaaaaaaagcatatraattacaaaaataatacacttaaagataccagagagctgtgaagtcaatgaggactcgatgaactaaaatttcagagtcaaaagaacatttccagctgggcgcggtggctcacagctgtaatcccagcactttgggaggccgaggtgggcagatcacaaggtcaggagttccagaccagcctggccaatatggtgaaaccctgtccctactaaaaatgcaaaaattagcagggcatggtggcgtgtgcctgtagtcccagctacttgggaggctgagacaggagaatcacttgaacccggaggcggagtttgcagtgagctaagatcacaccactgcactccagcctgggtgacacagtgagagtccatcccccaccccctcaccccacccccccaaaataagagacttt

SEQ ID NO: 12163 - DNA, 608 bp, Homo sapiens
atctgccttataaataataagttctagaattttgcttggtatctaaaataaacttactggtttatagacacctttacctgttttggaattcatgtctctctttctctttaacagaaaatgagcttcacttctcagaaacatgaaattggttatggtggatcaatgttcctgctagtaaccaggaaaaaaaagcatataaattacaaaaataatacacttaaagataccagagagctgtgaagtcaatgwggactcgatgaactaaaatttcagagtcaaaagaacatttccagctgggcgcggtggctcacagctgtaatcccagcactttgggaggccgaggtgggcagatcacaaggtcaggagttccagaccagcctggccaatatggtgaaaccctgtccctactaaaaatgcaaaaattagcagggcatggtggcgtgtgcctgtagtcccagctacttgggaggctgagacaggagaatcacttgaacccggaggcggagtttgcagtgagctaagatcacaccactgcactccagcctgggtgacacagtgagagtccatcccccaccccctcaccccacccccccaaaataagagacttt

SEQ ID NO: 12164 - DNA, 516 bp, Homo sapiens
tgttcatctaagtgtgtgtgtctgtgtgtgtgggtgtgtttgtatgtatacacactacatatctatatccacaaagacacaaagacacacacttacataaacatatagaaatagatatgtagtatgtatactacattcattactatatatatgtatattttatacatatatatatatttatatatataatgaatgcttttcaggcatgaaaaccctgaaacatgagtcagacttcacttcccactgatttcctttgcaatgatgtgacctcttctgcaaagcatgggtactcttgctaagatgacatccttcatacccagccctgcatctgcattgccactgcctctattcatcagtatcatctccagtctccacagamaggtcaacgtcccctgattccataccgatcttcccatttgtctcctgacttttgaaaatattaatactttttaaagctatctaaggtttcacatgacagtctaccacctgcacacagcttgtaccaacaccctatct

SEQ ID NO: 12165 - DNA, 691 bp, Homo sapiens
tatatatatatatatatatgtaaaacttaagaagcattttgcttccaaagcagcaacttgtaaaaagtatctgtatttaaaatagaatttactggaattctgatcgtttattctgtggatctgtttttcatctgctttcttagtaacaatcagaatcataggtgcaaaagagtagagggggagaaacatacactagggagagtcccaaaactatcacgaattargaatgatgttaaaaagatgacaatgaaagtgctttggtaagtaaagatgtccagagaaagaaaatgaatgaatggaatttcacaagcattacccctgagggtataacaggagcatcagaagacgtcagagaatttttgggaggacttcagatggctccaaattcctgaaaaaaccctacactctgtagaggaagaatatatagagaagaaaggacagagtaaatagttctcatcaatattttgaatgagagaccaaaaacacaaacacacacaaggaaaaagagacaagttccaaatgttctggaggctttgcaatactgcagtggtttgctacaaaagtctttcatgaagttcccagtaaaaaccaccatgacaatggtatctgactatactgtcccttccacacccagtcataattttctctcttaaaattggatttatatttccccatactacaactgtaaaaa

SEQ ID NO: 12166 - DNA, 691 bp, Homo sapiens
tatatatatatatatatatgtaaaacttaagaagcattttgcttccaaagcagcaacttgtaaaaagtatctgtatttaaaatagaatttactggaattctgatcgtttattctgtggatctgtttttcatctgctttcttagtaacaatcagaatcataggtgcaaaagagtagagggggagaaacatacactagggagagtcccaaaactatcacgaattaagaatgatgttaaaaagatgacaatgaaagtgctttggtaagtaaagatgtccagagaaagaaaatgaatgaatggaatttcacaagcattacccctgagggtataacaggagcatcagaagacgtcagagaatttttgggaggacttcagatggctccaaattcctgaaaaaaccctacactctgtagaggaagaatatataragaagaaaggacagagtaaatagttctcatcaatattttgaatgagagaccaaaaacacaaacacacacaaggaaaaagagacaagttccaaatgttctggaggctttgcaatactgcagtggtttgctacaaaagtctttcatgaagttcccagtaaaaaccaccatgacaatggtatctgactatactgtcccttccacacccagtcataattttctctcttaaaattggatttatatttccccatactacaactgtaaaaa

SEQ ID NO: 12167 - DNA, 526 bp, Homo sapiens
tcatgtctcaaaactcttttggtaaaatcttcacaagttttgttttgttttgctttttaaggaaagccacatttagcaacagtattaggtagactttcccatctgaaagattaagataaatgatctctttcttttctttttaggccactggagaatgcacrgcaaccgtggggaagaggagcagtacgaaattctccgtggctacccagacctgccagattactccaggtggctggtttatcctctggcactgccctggtgggaaattaaccatttctgtgagccaggaacacaatcttgaccaggctctgcttgctcccagagggtggcagtagtaaagccatttgcagagttagggagcattgggtggagcggcagagcccggaggttgagccaggctcgtgaccatcatccccttaggactatcccaactcttcccgtgtgctgcattgtacccagtgtgtgcaagggctcaacagaaggaccagaagacataagacctgccctccattgcaggcagcatccc

SEQ ID NO: 12168 - DNA, 624 bp, Homo sapiens
tgggctaggttacaatcagagcaactctgctggtactgtcacaggatccttaagtgtagcttttccagccagaaacctctctggccagtggcacctttgcctgagtttggacctactgggctcattccacccacctggcctggcaggctgagctcggtttgtgctactggcctgaatcctacgcctgccaaggctgagccaggcatggagcagcgaagggtttgggagtgagtgagcatgggccactgcycacagccaggcatgctggctactgttgagaggtgacagcatgctggcagccctcgcagccctcgctcgctcttggcgcctccttggccttggcgtccactctggccatggtcggggagcacttcagcccgccaccgcgctgtgcgggcccctctctgggctggttgaggccggagtcggctccctcagcttgccaggaggtgtggagggagaggctccggcaggaaccggggctgcgcgaggcgcttgagggacacctagagttccagatgggcgtgggcttggcgggcccagcaggcccgggcagtgaggggcttagcacccgagccagcagctgtggagggtgcactgggtccgccagcagtgccggcccac

SEQ ID NO: 12169 - DNA, 624 bp, Homo sapiens
tgggctaggttacaatcagagcaactctgctggtactgtcacaggatccttaagtgtagcttttccagccagaaacctctctggccagtggcacctttgcctgagtttggacctactgggctcattccacccacctggcctggcaggctgagctcggtttgtgctactggcctgaatcctacgcctgccaaggctgagccaggcatggagcagcgaagggtttgggagtgagtgagcatgggccactgctcacagccaggcatgctggctactgttgagaggtgacagcatgctggcagccctcgcagccctcgctcgctcttggcgcctccttggccttggcgtccactctggccatggtcggggagcmcttcagcccgccaccgcgctgtgcgggcccctctctgggctggttgaggccggagtcggctccctcagcttgccaggaggtgtggagggagaggctccggcaggaaccggggctgcgcgaggcgcttgagggacacctagagttccagatgggcgtgggcttggcgggcccagcaggcccgggcagtgaggggcttagcacccgagccagcagctgtggagggtgcactgggtccgccagcagtgccggcccac

SEQ ID NO: 12170 - DNA, 462 bp, Homo sapiens
aggatcacttgagcctgggaggtggaggttacagacagcccagatggcaccactgtactccaacctgggtgacagagtgagacccggtctcaaacaaacaaacaaacaaaacccctctcttcatatccytatttgaattgttttttctttataggatccattagcaatgtacaattaaaggacaatcaagtttcaaaacttaaaaagtcctttcagtggaaatatcagggctccatgaaggacaggcacaatactttcaatatatacagtgcttcattctgtgaaataaaatgtatttccgaaatacagtttatttctgaaaacagaaacgtatactaaaagattgcagtatcaaatctcctctagtcaatgggttattaccagcgaggttcaatgacttccttgttttaacaagcattccttttgtgagaaaacatttgtgttcagtcttaaactaccggt

SEQ ID NO: 12171 - DNA, 544 bp, Homo sapiens
ttttcggtgtgtgagtgtgtgtgtgtgtatatgtatagaactaaattaaactgataatttgaatgcttacacttccattagttcaatttgtgtatgtgagccctcacacacatacatacacacacacaaactgttccagaacagtgacttagtgaaaaactggatttccactctgtcagacaaatttcggaaagcactgaagtagggcatttctgattgattttaccgttcccggaattttattttcctttatcacttagaccccttctgtggggatttaataaataaacgtcttttgtagtgtatgttatttcattttatttttataatttatatgaattttaattttaacttgacaaataaaaattatatatatttatggcatacaacatgatgtttcatacgtgtatacattgtggaatgacaaaatcaagctaattaacacactcgtttcctcacatactgattttaatgtgatgaggacatgtctaaaatctactcttatagcaattttcaagtatacaatacatasttatacactgta

SEQ ID NO: 12172 - DNA, 579 bp, Homo sapiens
ccctgaagaaataagtccttccactttgaccccatggaggattgcctgtgaggaacttaaacgagtctaccagtgtctagacacgggggcaggtctgtccggcacagcagctccctcaaggaggagaagagtgaggagaaaggaaactcaagtctcaccattctgtcctgggagagaagaggaggatctcatctctcatctgtccaaacaagkcaaggagactttctctcatctttccaagcaaggcaaggagactttttatcattaggaaacaaaaagaatttagaaggaatgaaagcagcccgtaaggtgaattcctaaggactgcccattgaaactgacaaaattgcccttgtttgatgagaggaatgagcagagcattgatgtggtgaacaaggatctagtgagactttcccagcatgtttctaccaaagctttatctaagcttctcagaacactctcctaataagcagatgtttggcctttcagaaagtcaacaagcaaaatgccttgagtgtcccaaaacactgatgccatgatgtgggctcctgactggcctccttttcctttgactggacc

SEQ ID NO: 12173 - DNA, 579 bp, Homo sapiens
ccctgaagaaataagtccttccactttgaccccatggaggattgcctgtgaggaacttaaacgagtctaccagtgtctagacacgggggcaggtctgtccggcacagcagctccctcaaggaggagaagagtgaggagaaaggaaactcaagtctcaccattctgtcctgggagagaagaggaggatctcatctctcatctgtccaaacaagtcaaggagactttctctcatctttccaagcaaggcaaggagactttttatcattaggaaacaaaaagaatttagaaggaatgaaagcagcccgtaaggtgaattcctaaggactgcccattgaaactgacaaaattgcccttgtttgatgagaggaatgagcagagcattgatgtggtgaacaaggatctagtgagactytcccagcatgtttctaccaaagctttatctaagcttctcagaacactctcctaataagcagatgtttggcctttcagaaagtcaacaagcaaaatgccttgagtgtcccaaaacactgatgccatgatgtgggctcctgactggcctccttttcctttgactggacc

SEQ ID NO: 12174 - DNA, 573 bp, Homo sapiens
caaaagctggactgmaagaaggactttgtgacttgggatgtgacgggcacggagatggagtggggggtggtggcagcgcaaggtgtgcaggtgacagcaggtgtgtgcctccgacgtgggcgggggagacactcggagggtgcaggagggcgcagcgacggaaggcccggctccagggcttccttctcgtatgggcagcgcagaggaggcggccctcactcagtgtcctgatctcaggcgggggcactgtttgcatggggaggggcttcctgggcttcccatctctggcgggaagcgctccccgacgcattctctacctaggggacacccccaaggcaggagcccgggccgacggagaggacttaacgacactatcggaccctctgggaaaagaggggagacgtcgtgacccaggccccgccccaccttgccgcctcgtgcccggcgctaagacccagcgggcgcgccgcccgcccggggcccggccctgtccccttccgtccgcggggcagccagctcagctccggagagccggcggcgcggcgggcatggctcgggtggcgtgggggctgc

SEQ ID NO: 12175 - DNA, 554 bp, Homo sapiens
cccagccctacgaggtggggtggagggtcaggaggaggcttgtagaggagggctagtagaggaggggagatgttgggggcgccctgactccccctgccacgccccttccaggccgtgttcctccgggctgtgaagctctacaacagcggggatttccgcagcagcacggaggacatggagcgggccttgtcagagtacctggcagtctttgcccggtgcctggccggctgtgaaggggcccatgagcaggtggacttcaaggacttctacccggccatagcaggtatctgccacccagaccacggtgggcrgtcctctcacccacagggcccggtaaggcagatgtccccttcatgcacgtggagcactgcgaatgcggaggagccagccgggaggaaggccttgtctgttgagaaagacgctgggtgcaggggccccagctgggagtgtccaaggggctggatcagtgagtagaggcagtgacatccctaaagggtttgggaagcttgggttcataggccttccaggcagagggcagtgcagatgcaaaggtg

SEQ ID NO: 12176 - DNA, 641 bp, Homo sapiens
aaaaggacataatcaccaagtactaattttttctttcaataatttttctctttctcttcattcctcctctcaagaacctggcttgaaattccacctcctaatcaactccatgaagtccccagactaaacagtcaccctttaagtttttgcccctgtaattcattgttaaatcaaattttctaagatactgttttcaattcatcattatataatgattcctgatctccttatttgattttatgccaaatttctcattttggcttttagaggtcaccatcagtaggccccttctccacagtttgatctctttctgctcccagcactgactctctgtcccctttcatagagtcctcatccttatcacatgcccaaggcattggtaaaggtaaatgtcatcctggctcagccacctggaatccctcaagctttttaaaacccaaatstgatcatgctcctcctctgcacttcatcctgtgatagctcttttgcctttagaataaaacacaatctctttgccaacatgtttatagagtcaactatgttttaaacatcgtagtaggcaaagatgagcaaggtacagtcctggcttttaaggtgctcagagtcttagaggatgtgaaagtgacctataaacttggccc

SEQ ID NO: 12177 - DNA, 581 bp, Homo sapiens
tgaagggcagagttgcctcattttgagaaaagagagcagggctttattactccagtatcagttagttgttggttataaactttatgttcccaccacttttctagctgagtaggctccactgagtgagaccaattctccaaagaagaaggcagctgagagccgttagcaagcaacactcacaccacctgggggattgaggcactgacctcgtgaaggggcctacacaaagcaccaacaaagctgactataccatcctaacccctttccattcacttgaccaccccctacctcaccaacattaccttagtccaaaccaccytctcccaccttgactactgtgaactctcttgtcagtagttgtacttcttcttcccataagaaataagaaataaaagaattagggttgctttctgagatataccctataagatcaagacaagataaattagaaaattaaattggaaagtcatactcataggagcagaatggctcccctcagccaacctagattgatgaggttgagtggaacagcacacccaaagaaagaatattccaaaggagcagttgatcagctaaggaag

SEQ ID NO: 12178 - DNA, 538 bp, Homo sapiens
ttaataaaaatatatcatttactgagagttcatgattcattagtcttcctaataagggtttttctatgcatttaatcattcaaacctcacaaatccccatgaaataggcactagtgtctatatttaaagataagaaaactaagactggtcaggaaactgtccaggattatccggttactaagggggaaattaccrgccaccaagttctgattaaatgtatggaaaagaggccagaaaatatttatggagtatccatatgcactaggttatattctgggttcttagttctaatgaaaaaaactaagtccttgcttcagtgagtttatgtcttaatgtgtgtggatagatagtgaaccagttagtatatacaatgtaacatccagcagtactagcaaagaactgggtaagaggatagaggggtttcccatagtgcgatgagggaaggcctgtctgagaagtgacatttaaccagagattagaagaaagcgtagggatgagtaatggaatttctaggactgtccctgtgacagcctcttca

SEQ ID NO: 12179 - DNA, 501 bp, Homo sapiens
gaattcataaaagtttaaacataattgtgaattgcccatttttctatagggtaccagattattttgctttagaagaggaaagaatttgttactagatgactttttttgaattttctttattttccaattgtttaggatgaggagatggaaaaggcttattttcaaactacaaaattaaataatgtttactgttggactcgtctagagaagaacttaaatatggcaggtccttgaatagcatcatttcattataacattaataagggaaaaataaaaaccgattcgtggccagggccactgtccgtgtggagtctgcaggttctcccgtgcctgtgtggattccttctgggtatctactatttcctcccacatctcttaggtcagttcaccagcatgtctaaatagtactgtgtgagcgagtgtgggatcatgccctgtccaaggctggtgttccccttgcactctgagctgctgaaawgggctctagccacctgcgaccct

SEQ ID NO: 12180 - DNA, 541 bp, Homo sapiens
gaaataatttttaaaaatcaaaaagaaatcctgaagctgaaaaagtataaatgcatgacctgaaatcaggttatttaagtattttttccactcagactgaatgttcatatttcacatgttaaaagtaatttccacaccaaacctgcctggagatgtaatattctattcagtgtatgtcccatattacctttttattgttttttccattttttatctccaacttttaagttcagaggtacatgtgcaggatgtacaggttacataagtaaacgtgtgccatagtggtttgctgcacagaycatcccattactcaggtattaagcccagcatccattagctattcttcctgagcctctccctcctcccacccccgccttctgacaggtcccagtgtgtgttgttccccccatgtgtccatgtgttattatttagctcccacttgtaagtgaaaacatgagatatttggttttctgtttctgcattactttgctaagaaaaatgggctccagctccatccatgtccctgcaaagaacatgatct

SEQ ID NO: 12181 - DNA, 521 bp, Homo sapiens
tatgtacgtttctaagcctttgttcagtgtcattctctgcaactcttatgaatctcttgagcatctcaattcaytgaaaattagcattacattaaccactcccaaaagtaatgaatatccaaacctaacattttcccctttaaaaagcatcccccctattaagggcttcacacttaaaatagaaggctgcttcagtgagagcatgtaagtttgtaaaaagcaaacagagcaagattaaaaagtgtatgtaatttaaatgaaacaaattattcatcgttaggatctcttcatgtttctagaggttaattatccttgggactgataaattgctggagccccagctcactgtacaagcatctccacactagttcattcaataaatatacattaagtacctactccttaacaggtactgttctaggaactgaagatagaacactgaataagacaatgttgttgccttcaagaagcttacattgtagtggaagaagccacgtaacaaatgcacagtttgtcaaaca

SEQ ID NO: 12182 - DNA, 521 bp, Homo sapiens
tatgtacgtttctaagcctttgttcagtgtcattctctgcaactcttatgaatctcttgagcatctcaattcactgaaaattagcattacattaaccactsccaaaagtaatgaatatccaaacctaacattttcccctttaaaaagcatcccccctattaagggcttcacacttaaaatagaaggctgcttcagtgagagcatgtaagtttgtaaaaagcaaacagagcaagattaaaaagtgtatgtaatttaaatgaaacaaattattcatcgttaggatctcttcatgtttctagaggttaattatccttgggactgataaattgctggagccccagctcactgtacaagcatctccacactagttcattcaataaatatacattaagtacctactccttaacaggtactgttctaggaactgaagatagaacactgaataagacaatgttgttgccttcaagaagcttacattgtagtggaagaagccacgtaacaaatgcacagtttgtcaaaca

SEQ ID NO: 12183 - DNA, 521 bp, Homo sapiens
tatgtacgtttctaagcctttgttcagtgtcattctctgcaactcttatgaatctcttgagcatctcaattcactgaaaattagcattacattaaccactcccaaaagtaatgaatatccaaacctaacattttcccctktaaaaagcatcccccctattaagggcttcacacttaaaatagaaggctgcttcagtgagagcatgtaagtttgtaaaaagcaaacagagcaagattaaaaagtgtatgtaatttaaatgaaacaaattattcatcgttaggatctcttcatgtttctagaggttaattatccttgggactgataaattgctggagccccagctcactgtacaagcatctccacactagttcattcaataaatatacattaagtacctactccttaacaggtactgttctaggaactgaagatagaacactgaataagacaatgttgttgccttcaagaagcttacattgtagtggaagaagccacgtaacaaatgcacagtttgtcaaaca

SEQ ID NO: 12184 - DNA, 521 bp, Homo sapiens
tatgtacgtttctaagcctttgttcagtgtcattctctgcaactcttatgaatctcttgagcatctcaattcactgaaaattagcattacattaaccactcccaaaagtaatgaatatccaaacctaacattttcccctttaaaaagcatcccccctattaagggcttcacacttaaaatagaaggctgcttcagtgagagcatgtaagtttgtaaaaagcaaacagagcaagattaaaaagtgtatgtaatttaaatgaaacaaattattcatcgttaggatctcttcatgtttctagaggttaattatccttgggactgataaattgctggagccccagctcactgtacaagcatctccacactagttcattcaataaatatacattaagtacctactccttaacaggtactgttctaggaactgaagatagaacactgaataagacaatgttgttgccttcaagaagcttacattstagtggaagaagccacgtaacaaatgcacagtttgtcaaaca

SEQ ID NO: 12185 - DNA, 1482 bp, Homo sapiens
tgctaattgctctgatttgaccatatacctctatacatggttcaaaaatacccaccctatatccacaaaatgtgcgattatcatgtgtcaactaaaaataaaagggaacaaatagaaaagagatagaggtctctatactgtgtgcttgtttggcccgtcaccctcatagttgtcctcaagtcattcctgaagggcatacctttgagtttattgtgctcggagtccgctgggaagagggaatctgggaagagtttggggaaggtgagtcccgcatacttgggccgattctccacatagtttcttactgtgggttgcaatttcttcatgaattctggacatggtgttcctagttgttcaattaccttattccactggtcaatatctgagaattgaacagttaagggaaaaaagaagagcagaccactagcctttcaacaattgggagactaactcttctcaaagtcctcaacagtcattaatgcaactgtagttttaataagcaacaaagaatgaaaatataaaatcagacttgcaggctatgagtcttcttgaaattttaaattcacttttgaaacttatatacttttggaaaactagcaattatttaacaaaataagatatcatgaaatagtctttggggtgtacagataaaaagtcattcagataacacaagatgaatctcatattctgcagataaacttctatataaatcatgtgattcagaagaaaaatatataatgacacatcatagtgacatttttatcctgaagttacctcaattatttatatttttaaaatgacaaatacacaaatattttagattatattcatttacattttcctaaactatctttaagatattttttcttctctaaaaatctggaatttttttctatttttatgcatatcaacataacttttatagtaaaacaactcattagttctttgtcagattcctaaaaatcatatttattaaacaaagaagccacctatttcatacctattgttttactgatgatatcactgaatattgttttcaatgaaatataagggtgaacagaggaatattcaatttaaaacaacagatttctatccaagtacatccaagtttagaaagtacattaagcatggggaataccacagaaaaaatattacctctctatgaaaattaatacccttttaaattggagctagctctttttgcagacatactcaatgattgagattctcttttttatctgtcattaatattcgatatatcagagccttgataatgataaacaccatctactctgaagaaycaactggaaacaactgatttaaacagatttcctcgccatgtgccagtgaataatagagatcttggaaattcccttaaatccaatactgcaagcagtattctctcctacattgcttattcttctacaactgttctttggtgttaagttagttaactcatttccactaaggtaaggtgtgaca

SEQ ID NO: 12186 - DNA, 662 bp, Homo sapiens
ctggagagccttattttatcatcttgctgacatctcctcaaatcatacttttaaaaggcatttatttaatctgtagtagtatattatttaatttctgtttgagaacacagacatagttcctgaaacttgctgaagcaatttttaataatcaacggatagtacatcacaaaatgccatatatctacattcagaaggcaatgaagtttttggtaattggaaaccaggtcattgcttaatgcatagtaaggtcacattactgagaaatcataggaattaattatatctaatcaattcttttgataattgtgcatattgcaataatattttcattattttggcgattgttggtaagactatttgtgaaacaaatactgagctccattttggggtaatgaactgctsttggtgccacagagaatataaggctttagagaaaaattggacatgctaaactgtgccattagccaaataaaacaataaaagtgcatatcattttgtgcttcatcagagtcattttaccaaaatttttattttctaattaattggtgaaaatttaacaagtcctagtcatcaaattaagaaaaaaaaattagaaaactctatgtgtagagattcaaggaaatataaaatcaaaatgttgtatatttccttaatggatttcc

SEQ ID NO: 12187 - DNA, 528 bp, Homo sapiens
taccaactaaagttttaagaagtatatgtaaattattgcttataataaactttaaatataaaatataaattaatgtcaatttgaaaagaatttattcaccgagtacataaacccagcactttgggaggccgaggcagtcagatcatgaggtaaagagatcaagaccatcctggccaacatggtaaaaccctgtctctactaaaaatacaaaaattagctgggcatcgtggcacrcgcctgtagtcccagctactcaggaggctgaagtaggagaatcaaatcacttgaacccaggggcagaggttgcagtgaactgagatcataccactgcactccagctctggcgacagagcaagactccatcaaaaaaaaaaaaaaaaaaggaaaaaaagaatttattctagtacttacatgtttgtgctgaatatatgataaagagctactactttgttactcttgaaactaaaacaaaatcatttctttcttcaataaaaattaacaaacatcatcgccttgatctctgccatc

SEQ ID NO: 12188 - DNA, 528 bp, Homo sapiens
taccaactaaagttttaagaagtatatgtaaattattgcttataataaactttaaatataaaatataaattaatgtcaatttgaaaagaatttattcaccgagtacataaacccagcactttgggaggccgaggcagtcagatcatgaggtaaagagatcaagaccatcctggccaacatggtaaaaccctgtctctactaaaaatacaaaaattagctgggcatcgtggcacgcrcctgtagtcccagctactcaggaggctgaagtaggagaatcaaatcacttgaacccaggggcagaggttgcagtgaactgagatcataccactgcactccagctctggcgacagagcaagactccatcaaaaaaaaaaaaaaaaaaggaaaaaaagaatttattctagtacttacatgtttgtgctgaatatatgataaagagctactactttgttactcttgaaactaaaacaaaatcatttctttcttcaataaaaattaacaaacatcatcgccttgatctctgccatc

SEQ ID NO: 12189 - DNA, 556 bp, Homo sapiens
tttttttcttttttgagacagggtctctgtcacccaggctggagtgcagtggtgtgatcacggctcactgcagccttgacctccctggctcaagtgatcttcctgcctcagcatcccaagtagctgggactacaggcacataccaccatgcctggctaatttttaaattttttgtagagggtgggatctcgctgtgttgcctagactggtctcaaacttgtgggctyaagcagtcctcccaccttggcctctcaaagtgctgggattacagatgtgagccaccccgcccagcctgtgtatatatgtgtttttcgagtgcttcatttttaatacccctccatctattgcccttggtgcttctgctacaatggcctcttgttttcctgaatgaatcggcccacttctgggcattcccagtttcctcttccaaaaatgtctcttccttcttccctatacagctagctatttgtttttcaagccttgactccttcaagtacatgtgtgcttatgtgttctcaatttgcctaatatccctcttacctcaaaatcataagtt

SEQ ID NO: 12190 - DNA, 567 bp, Homo sapiens
aggaagaactgaaaccacagatcaagaggcctaccatgtactaagaaaaactgatgaagaatgttcatcatcaagaataatctactctaaacttcaaggacaaagaattttatgaggatccaggtgtaaaaaaacggtatgcaggtagtttcagactccctctaattttacagtgacacaaagtctctagagctctgatgaaatgaattaataaaaaaaattcaagatttgttgtcatttaagtacaaaaggtatcattaaacaaatgccaaaatctcagaaaataatcctactacaacccatttctcccaatactaaactctgaacaacaaacaaaaattctgaattacactgaaaagaaacaaaagaagacagattktagaagagagcaaaaactgaatgacatgttccatattgagtgagtttcccatttatttgttaattgatttttcctttgtgactctgctctaagagcaggccccatagaaaccaggaaaaggggactttacaagctgaagtgagttagggggaaattcttaggaaggagaaaattagagaagttttcta

SEQ ID NO: 12191 - DNA, 1341 bp, Homo sapiens
tatttttgagtctcaggaaggattttgtatattactattattcctacatgtatatgagaaaaatagttkggtcatagaaatatgcatatgtcttcaagtttgctacatactgccaaattacacagtaaacttatttcaacaattgatattcccaccaaccaactagtcattgttccaaattcttgccagcagctgaagctgtcagacatataaaatcttttgaaactaagttttaaatatttttgtttgtttaatctgcatatacttgattaccagcagtatttgggtttcctcttctacaaatgtcttctttatattacatttaggtagttttttaatgaatatattcattttaaaattgattttaaagaaatatatgcaaagtatatgtatttgtttaatttttacacattcccagtgtatgacttttatttgcacttgtctaaagcataattttgattgataaaagttgttttaaatatggttcttaatatttaacataattttccttaagaggctatacttttttttgtttgttatcttgtttaaaaaaatccactttgaggttatacagttttttttttaatctgttttcttttaaaagttacataatttttcatttcacattgaatccaccgttacagacttttgtgaatgagtgaggaaaaaacaccattttatttgcttttgctgaatagtgaattaattctgccagcacacttgctgacggcttctccagtgaactttactattgccactctccacttagtctcaactaggcttgcagctctcttgatcttctgcacagctgtcattgtgaactttcttttttattcctctgagttaggtctatatttttctaggtagagtctagtaactccctaagaaaacaaatgtgggaagtaaaatgttttattctttatatggccaaatcctatcatcaaggcggatcttggaacctgtaccaaaggaagtaagtgtcgtataaagaacttggattctccaggcagactgccaggatttgtatcctggctcttccacttactgcctatgtgatcatcatgctaatcttcaagctggatatgagcaatgcaccccttgagagcacatggagaccttagaatcaataaaagacatagttattccaagaaaatggatttttatagcccaaatctacataaacgtgtatacctatatatatacacacacatatatatgtatgtgtgtgtgtatatatatgtgtatatatatacgcttttccaaaatttatccatgaagctaccttgtttgactgagattttgttcctctttcctatctatcttttcacaatcacctttccg

SEQ ID NO: 12192 - DNA, 1341 bp, Homo sapiens
tatttttgagtctcaggaaggattttgtatattactattattcctacatgtatatgagaaaaatagttgggtcatagraatatgcatatgtcttcaagtttgctacatactgccaaattacacagtaaacttatttcaacaattgatattcccaccaaccaactagtcattgttccaaattcttgccagcagctgaagctgtcagacatataaaatcttttgaaactaagttttaaatatttttgtttgtttaatctgcatatacttgattaccagcagtatttgggtttcctcttctacaaatgtcttctttatattacatttaggtagttttttaatgaatatattcattttaaaattgattttaaagaaatatatgcaaagtatatgtatttgtttaatttttacacattcccagtgtatgacttttatttgcacttgtctaaagcataattttgattgataaaagttgttttaaatatggttcttaatatttaacataattttccttaagaggctatacttttttttgtttgttatcttgtttaaaaaaatccactttgaggttatacagttttttttttaatctgttttcttttaaaagttacataatttttcatttcacattgaatccaccgttacagacttttgtgaatgagtgaggaaaaaacaccattttatttgcttttgctgaatagtgaattaattctgccagcacacttgctgacggcttctccagtgaactttactattgccactctccacttagtctcaactaggcttgcagctctcttgatcttctgcacagctgtcattgtgaactttcttttttattcctctgagttaggtctatatttttctaggtagagtctagtaactccctaagaaaacaaatgtgggaagtaaaatgttttattctttatatggccaaatcctatcatcaaggcggatcttggaacctgtaccaaaggaagtaagtgtcgtataaagaacttggattctccaggcagactgccaggatttgtatcctggctcttccacttactgcctatgtgatcatcatgctaatcttcaagctggatatgagcaatgcaccccttgagagcacatggagaccttagaatcaataaaagacatagttattccaagaaaatggatttttatagcccaaatctacataaacgtgtatacctatatatatacacacacatatatatgtatgtgtgtgtgtatatatatgtgtatatatatacgcttttccaaaatttatccatgaagctaccttgtttgactgagattttgttcctctttcctatctatcttttcacaatcacctttccg

SEQ ID NO: 12193 - DNA, 1769 bp, Homo sapiens
ctctgttctaattttactttaactatggttctaacttataatttagctaattttaaaaattgctatttctaatcttacagggaagcctgggcagatcatcattcacctttaaacccaagcactcagcacagtggcttacaccaatgtggatgactttttcatgaatattttttatgttccctatttcacatggtttcaaaatcctggaattttaaaagaacattttgataagttgttttaaaaattgtttagggaatgcttcaaagaggcattaagataaactttagtaaaatgtattttcagtgaaatgtaatcactgtatttttagatttatactaaaagatgtataccactgttatatgcctatttcaacttcctgtcacacctacagcatatgatgtctgtggcaaatgtgattatttccaaatgcatagaaaaaacagtacactgtttctccatgtaagtcaattatgacatgcagtacctgcagcacagcaacatacaataatcagactaagagaaagaatggctgaagatggcaaggtctgcacttttccactgcacttgaagaattttacaattttatatttgtggaatcaactttgagttcatggataataaaactaaaactaacgttcactctcataacaaaggaattttcctaattcatgtaaaatcaatgatgaatccatatattgacttatgtataatgtatgaaaagtgcagttatttacagcaatcttgaattattatcaatcagttgaagaatttttaaaatacattattaattcctatcaacatatttgttatatttttgacagcatcatgcaggtcctactagcgtttcagtcatgtttcttcctcccagtcctgaagtctggccacaaatctagttcaccgtctactgcatacaatgtgtatcaagtgcatacaaggactgtaggcctgtaaagctgtgtatctgtatttatgatggaaagatatccataaacatcgcagcatacaatgtattaaatattttctacaacacaatttatactagataccactgtccactgaaatatacatcatgcactctattttcaatttgaaaatatttgctttagcataaataattgttaaaatatggcactcgtaaccaatctattcaaaactatatatgctcacttatgaatcaaattataactataaatcaaaaattttaaatcaaatatacataattctaatgattataaaacttactaatggcataaattaatttgttagagttatgactttatttaaaagattatacaaaaaaaaatgccataagaaattactctcccgtttttaaattataactttaatcctccacttatgaggctgccccaaatagctgctcagctttgtgcgaggtgggaaattttccttcttgccagggaaaaacagatgttcctgctgtgatcagggatyttccttatcatctaaatgtactgccacagcatcaggtgtcaaaaagccactccggctgggaaatgcatattaatttgctgctccctggtagcggtatcctggctatggagaaaatctctttcagggtaaggaaagtaagtgtcttctcccaccttagccctccccaagcttattacaattcaggaaaactatatagagcccacccaatgccttgagatagaggctcattcccggcatactaagctgcaactccaagctttatctcccagaaacagctatttagctgatggtcagatttcttggcaagactatatccc

SEQ ID NO: 12194 - DNA, 522 bp, Homo sapiens
tcaccacaacctccgtctccctggttcaaacgattctcctgcctcagcctcccgagtagctgggattacaggcacccaccatcatgcctggctaattttttgtatttttagtagagacagggtttcaccatgttcggcagactggtcttgaactcctgacctcaggcgatccgctcacctcggcctcccaaagtgctaggattacaggcgtgagccaccgtgcctgrccaattttctttttcaactgagttaaagttttgaacaggagtaagtaaaaaaatttgaaaataatttttccaagcaaattaactatccaacaaattaacaatatacaaaataaaatatcctaacatatatatcaaatttttactaggatttttcctttgaaatgttaaaggtattatccatagttcttaaaactcattctgacctgaaaaatgaactatatcattcttcacatttgataatatcttttctagtcattctgatacatactcagtatcttctagataataaaattca

SEQ ID NO: 12195 - DNA, 647 bp, Homo sapiens
cgccatttccctaccacaacagattatggagagaaggccctgctgtgaccttgtgtctcacttctatattcaaacagatggtattatcattcaattcactttctcataaaagcttggaaaattgcacaggtgacatctagggtgaattggaagtgggcgcacaaccacattaaatatttatccttatcttcctcatcaccaggttggactggggcacatgaagaaagacgggtatctggaaaaatcaaagagagaacaggctggggagagcagcttggtggggtctgcaggctgcctctgtgatgttccatagcacccctgtccatcctgccacttgacctctaatagggacttgacacactttacagttatttatttatatacccttctcccttgcttggtagacacaaagggagaggtcttttcttatgtttctttatacccagggcctagctcagagtctccttgtgaagagcaaaagtttagtcaatgtctgctggataaatacacacagaaagcccaagaggttgagatttcccaggactagagaccggagactgtaaattgggtgtgttctctcccctcacacatactgagtattyagtacacagcagacaactgtgagtggtatgacacagacacaaaag

SEQ ID NO: 12196 - DNA, 544 bp, Homo sapiens
caaattcaaagtctgtgtgctcatgcactcgctgyggtgcctcagacaaaccaaacctaaaagaagctgcaatggtggcttgaaatattaaaatatgacaaatcacacaggctgagaatttctgttaacataatcaaacaaggcaaagagcagaatgttaaaaggtcctcaactctgggctggctgtggaactgaatcttccttgggattgcagggtgactggttgatgggagagcagccctggcagaggtgtgttttactgggggatcggggtagaatgtctgcctttgccttcctggttagggtgggccttcagctgcattcttcatcaatagagacagaaagtaccaagaatacagagtccaaacacctatggcacttcacaaaaggtgtcaaatccatgctctgtctacttggattcacagctgtcagtcagaaattccccagtctttcatgtagcaacattctatcttgccttactaagaaaaatgccaacatctgctgagtgccaactatgtacaagtcacaattttaggcctctcac

SEQ ID NO: 12197 - DNA, 544 bp, Homo sapiens
caaattcaaagtctgtgtgctcatgcactcgctgcggtgcctcagacaaaccaaacctaaaagaagctgcaatggtggcttgaaatattaaaatatgacaaatcacacaggctgagaatttctgttaacataatcaaacaaggcaaagagcagaatgttaaaaggtcctcaactctgggctggctgtggaactgaatcttccttgggattgcagggtgactggttgatgggagagcagccctggcagaggtgtgttttactgggggatcggggtagaatgtctgcctttgcsttcctggttagggtgggccttcagctgcattcttcatcaatagagacagaaagtaccaagaatacagagtccaaacacctatggcacttcacaaaaggtgtcaaatccatgctctgtctacttggattcacagctgtcagtcagaaattccccagtctttcatgtagcaacattctatcttgccttactaagaaaaatgccaacatctgctgagtgccaactatgtacaagtcacaattttaggcctctcac

SEQ ID NO: 12198 - DNA, 592 bp, Homo sapiens
tacaagtgtggcaaaaacagacatttacatgaaattcaaatataactctgcatcttgtatttttctggcaatctgaggcacactccaaaccctaggtgtgcaatcttaggcacagcccaaactcaaacccaaggcctcaaggagataaaaaaggagtattccaggtcctgcacaaccaagttctgaawctgtgaaaacatccagtcacacctcacacctttagcaccaggaggatcttcagtgtggctacagtgagattatttgtgtagtctaggtagggagggcctactgttcaactcaaattgaatttctgttagtattctctgcttctgaagcttctaagtagagaagcccaaaggagagccttgagaaaggacatgaaaaaatctgtactcaccatatatccaggcaataacaaaacattcaaagaatgcaacccacaaaaggcatacaccgctagctgcatagtagtcaaagagctgaaacacatacatgccaccctgtgaagaaaaaaaccacagaaggtcgatttcctacctggtctccaatttctttcatatacaaagagctctggcatatcaataagattaaa

SEQ ID NO: 12199 - DNA, 631 bp, Homo sapiens
agggagtgaagtgtgactctgtgcctcagtttccccttttgtaaaatgagaataacagctcctgcccaggatgctcttggggaagcattctggaacatcccaagctttcagccagtccgtgggattacccccacagtcagggctctggttctcggaacacacaccaggctagaccctttatcatttttattttattttttttagagaagcttcaacataaggacttygaataaatccaagattcccttctcaactggtattcaagcaaggcctttctttagtttactgctgtgttcccagcacctagaacagcatctggcccattggaggacctcaataaagacctgttgagtgaatgagtgaatgaatggactcaactgggaggacagcaagttcacatgtcactgtaggaccgatccgtgaaatactcccactaacagccataagacaggacagcttttctttgccctcttcttgctggtcacagcgacatcagtgggctccccctggcaccagggatgtcaacatgataatgctgatggacgaaataaaagctaccagcaaccacctgctttccaaggccttttcagtttatctcatctgatcccaggagtagaggccattcacccca

SEQ ID NO: 12200 - DNA, 551 bp, Homo sapiens
gctattccggggkgggcgggggggctcacacctttaatcccaacactctgaaaggctaaagtgaaagggtggcttgaggccaggagttccaaataagcctgggcaacacattgggaccctgtctgtacaaaaagttaaaaaaaaattacccgggggtggtcacgtgcgcctgcagtcccagttactaaggaggctgcggtaggaggatcacttgcacccgggagttggaggctgcagtgagttgtgatcatgccacctcactccaggctgggtgacagagcaagaccctgtttctaaaaagatgaaaaaataataataataaagtagaagctctttccatcactctaagtggagtagctgttttaagtggaaattaatcaaagcctttctttttctcttttatatatattttaaaagtacacctttaagagattgaatcattgaattgtatcatgaggtctgtatctgttggttatctgctcccaaggaaaggctaactcaagcgtggcgagctccaaagcctccagaggcctggtgggcaaaggacagga

SEQ ID NO: 12201 - DNA, 572 bp, Homo sapiens
taaaaaaaaaaaagtcaaaatcttcatgtattgctgtttatactgaaaactctcttcccatcctaaatgtgaattctggtgatctaatacctacacatttattttatattatgcaaatgatagaataacaccctgagtcagtagattttcccaagtcaaagttgggattatcaagattttcaaaattacttgtagaacatcataattgttaagaactttttctaaagtgctaggattcataaggttatttccctgtggcatttgtattcatttaaaaaacaatgcacagtatgaaaatttagatcttatatttttaaatggaagtttaaatgaccgtcaaatattmttgattgttattacattctggtttatattatgctcctatctcagaagaacagtcacttaataaaaccccagaatcaacatagtttagaggttcccttagacaaacaatagcattttttaaatgcaaaaatagcacttttacacaaaggtcttttaaaagaccttgatattactgtggaatttatactcagtaattccttttgttttttgatgaaatataatctttt

SEQ ID NO: 12202 - DNA, 536 bp, Homo sapiens
aaacttttttttaaacggggagacagaagaaagagaaggggaagatacccaggtacacagttctgggaggaagtttcacaacatataagcatgcacgtgagacgtagtaggacttggctttaagactcatgaccacaactacagtgctggcagttttagtgaaatgaataactttgatttcyacctattcttaaattagaacgataagaaacaaacaatttgaccaagaagcaaggtagatagatagccagggctataatctgaaaatcccaacaagcaacttctcctcctccgtagaaggaggggcaatgggcctaaagtcagaatcggcatatttgcgtccagatatcaaaagcacttgtgcagattctactgactctcaacatttgctgctgagtaatactagtggctagaggaatctggctaatgctgaatcatataaggaacacacagatactctgcttataagctagacataggcataaatccacctgcttcaagcactagtgtctgtggtatactgtagtaagaagatc

SEQ ID NO: 12203 - DNA, 645 bp, Homo sapiens
aaacagtgtatgatgagacatataaattaatatatcaacctcttccagtttcttttgtatccaggatctagtacttggatactgctctatttttttgtttcatttcctactcctcacccctctgctaccaaagcccaatccatttatcccataaacattcaaggttaacccaaagtcaggttgtgaattagtaaggaatgaaacgctgatgagtcaggtgggcccaaccatgtcaccaccccaccttccttattgaacttgctgattgtaaggtggagtcctactgataatgtgcagacgccacatctctgagaagttactccttttgtgtggaccgcaatcagattgtcttccctgaataaaagggaaatctgggagacattttccaggattttaaaagactcctgaggaaggcgagtgtcgtgagattaaagcaaggagcaagtgcttcttcaatgcccaggttgttcgaagcatctgataatcagctgtcctgtctgcatttctttccttctctgttttgatgytggcttgattgtgctatacattttgctatcttgcccaagtataatcagcaggaggagtcttttggaataaaagcgtctttgactttcatacacattttctgagacagaagaaaaaatc

SEQ ID NO: 12204 - DNA, 645 bp, Homo sapiens
aaacagtgtatgatgagacatataaattaatatatcaacctcttccagtttcttttgtatccaggatctagtacttggatactgctctatttttttgtttcatttcctactcctcacccctctgctaccaaagcccaatccatttatcccataaacattcaaggttaacccaaagtcaggttgtgaattagtaaggaatgaaacgctgatgagtcaggtgggcccaaccatgtcaccaccccaccttccttattgaacttgctgattgtaaggtggagtcctactgataatgtgcagacgccacatctctgagaagttactccttttgtgtggaccgcaatcagattgtcttccctgaataaaagggaaatctgggagacattttccaggattttaaaagactcctgaggaaggcgagtgtcgtgagattaaagcaaggagcaagtgcttcttcaatgcccaggttgttcgaagcatctgataatcagctgtcctgtctgcatttctttccttctctgttttgatgttggcttgattgtgctatacattttgctatcttgcccaagtataatcagcaggaggagtcttttgraataaaagcgtctttgactttcatacacattttctgagacagaagaaaaaatc

SEQ ID NO: 12205 - DNA, 819 bp, Homo sapiens
acgtgtagcagaggccacactcccaacactggtaggaagaaccatctgatttgtgctgagggatctgtttgtggagctgctttcctcccagtgtcttctgtgaagayggcaggatcctaagtcattaatttgaagctcgctaacaacagcacgatgaaagccatggtcatatctgctgcctctgtccagagctccagcagagccaacattaaagccaccaatgccatccaacagcaaactgtcgtgctgccagcatccagcctggccaacaccaaactcatgccaaagactgtgcaccttgccaaccctaaccttttgcctcagggtgctaaccagttccctccttggtccttggaagattttgaggcagcttctcagaaaacaagacaataaaataatcgttgtaataaaacctgtacatgcttcaggagacttatcagaatgtctgggaggaataattgcttttctgaaaaatataattattttttcaactcaccgccacggtgacttttctttcccaagttccaagaaaccctgataactcctccccacgctaagaagtacaaaggaaataaggtcaggggcgtccaagcagaccctgtgaacagcaggagcccatactgtgctgaaggggctgttattgccattgctggtcacctagaggtgctgcgttctggccacgcccacgtcggggtgcctaactccaggaaacccattttggtctaaaagaaccataattgtatattcctcatgaccatgggaagccagtgttcactcctggtatggaaaaagcagctcactcctggtatggaaaaagta

SEQ ID NO: 12206 - DNA, 1131 bp, Homo sapiens
cacaagacacttgcagatggctaagctgaaagtcagactgtgacacgcccactggggcttagggagctgtaaacactcaaccctagatgctgccctgaggtcggagcccaggctccccacgacctgcccgtctgcatgcttcccctaggggtttgagctgcgggcaccgaagacgggagccatacacctgtcacacgccctgcraggggaatatgggaacttatccagtttcaggaggagggaatgactagctaccaaacaaccaaagccaattttcctgtgaaagggacgctggggcatctgattacttttgttgctataaaggccttggaggctgggcacagtgtggtgtgcttatagcctgcacaacgtggcaggatcctgtctctctaaaaacaagagggggtgctttggtgaggatggaaaattctgaatagctctgccttgatgtcttctgctgtcattacagcaaaagtggtctggggtgtcactcaaacagaaaactgtcttgtttgggacttgagaagatttttggtgccttcaccaccagaaaatgaggaagaaggagcaaataagggaggaacgccaggcactgagggccgagggccttcacggcctgcactgttctgccgagcagggctgtgcgcagctgagttgagtcacgctgcctgcgtcctgggctgtgcgcagctgagttgaatcacgctgcccgcgtcctgggctgtttacagctgagttgagtcacgctgcctgcatcctgcacgcggccctgtgctctgcatgtttgaggtaggctgctttctccacacgcatggacatctttcctatggggtgaaggctaggcttacaagccctgtcttttggatgtggacatggatcccttgcacatgtgccttccgtggcatgaagactgtcagcacctggcaggactggagcgactagtgaaacaccagacaccagcccctcggccaaggtctcgcccagcacctccttctgaaccctgccctgccccggaggctgctggctccagtgcaggcctgactgtcacgggcacctacagcataaccctgccagtgacctcgcagcagctgcagcaccaagctctccaggcagcgccctggcgcaggtgaa

SEQ ID NO: 12207 - DNA, 1131 bp, Homo sapiens
cacaagacacttgcagatggctaagctgaaagtcagactgtgacacgcccactggggcttagggagctgtaaacactcaaccctagatgctgccctgaggtcggagcccaggctccccacgacctgcccgtctgcatgcttcccctaggggtttgagctgcgggcaccgaagacgggagccatacacctgtcacacgccctgcgaggggaatatgggaacttatccagtttcaggaggagggaatgactagctaccaaacaaccaaagccaattttcctgtgaaagggacgctggggcatctgattacttttgttgctataaaggccttggaggctgggcacagtgtggtgtgcttatagcctgcacaacrtggcaggatcctgtctctctaaaaacaagagggggtgctttggtgaggatggaaaattctgaatagctctgccttgatgtcttctgctgtcattacagcaaaagtggtctggggtgtcactcaaacagaaaactgtcttgtttgggacttgagaagatttttggtgccttcaccaccagaaaatgaggaagaaggagcaaataagggaggaacgccaggcactgagggccgagggccttcacggcctgcactgttctgccgagcagggctgtgcgcagctgagttgagtcacgctgcctgcgtcctgggctgtgcgcagctgagttgaatcacgctgcccgcgtcctgggctgtttacagctgagttgagtcacgctgcctgcatcctgcacgcggccctgtgctctgcatgtttgaggtaggctgctttctccacacgcatggacatctttcctatggggtgaaggctaggcttacaagccctgtcttttggatgtggacatggatcccttgcacatgtgccttccgtggcatgaagactgtcagcacctggcaggactggagcgactagtgaaacaccagacaccagcccctcggccaaggtctcgcccagcacctccttctgaaccctgccctgccccggaggctgctggctccagtgcaggcctgactgtcacgggcacctacagcataaccctgccagtgacctcgcagcagctgcagcaccaagctctccaggcagcgccctggcgcaggtgaa

SEQ ID NO: 12208 - DNA, 566 bp, Homo sapiens
gatttatagttatagcagatcagtgagctaacataagtagttctgatatagaccagagactatataagaatataatgcataatatatatgtgatatgatacaaaaagcattacaaaacaacacagctaaggaatggagatattctaataaaggctagaacacacactgtcctgtaaattctgatcatcagacagatatgtatatagttatacggtaatttttatgcacttgcgcatagtatagtttctatatataagagagaggctacggtcagattgttgcaaatatcttgagatggtggttaaggaaagtgctaatttattaaagcatatataatatagctatcagtttatagatttatatataaatctatatatccttttayatatcctctctttccaaaaactttggaagatacaacacacacaaacaaacaaacagtcaggcctctgagccagaactacgccattgtaacccctgtgacctgcacgtatacatccagatggcctgcaggagccaagaaatttggagcagctgaagaaccaaaaacgacgtgaaacagccag

SEQ ID NO: 12209 - DNA, 566 bp, Homo sapiens
gatttatagttatagcagatcagtgagctaacataagtagttctgatatagaccagagactatataagaatataatgcataatatatatgtgatatgatacaaaaagcattacaaaacaacacagctaaggaatggagatattctaataaaggctagaacacacactgtcctgtaaattctgatcatcagacagatatgtatatagttatacggtaatttttatgcacttgcgcatagtatagtttctatatataagagagaggctacggtcagattgttgcaaatatcttgagatggtggttaaggaaagtgctaatttattaaagcatatataatatagctatcagtttatagatttatatataaatctatatatccttttacatatcctctctttccaaaaactttggaagatacaacacacacaaacaaacaaacagtcaggcctctgagccagaactamgccattgtaacccctgtgacctgcacgtatacatccagatggcctgcaggagccaagaaatttggagcagctgaagaaccaaaaacgacgtgaaacagccag

SEQ ID NO: 12210 - DNA, 566 bp, Homo sapiens
gatttatagttatagcagatcagtgagctaacataagtagttctgatatagaccagagactatataagaatataatgcataatatatatgtgatatgatacaaaaagcattacaaaacaacacagctaaggaatggagatattctaataaaggctagaacacacactgtcctgtaaattctgatcatcagacagatatgtatatagttatacggtaatttttatgcacttgcgcatagtatagtttctatatataagagagaggctacggtcagattgttgcaaatatcttgagatggtggttaaggaaagtgctaatttattaaagcatatataatatagctatcagtttatagatttatatataaatctatatatccttttacatatcctctctttccaaaaactttggaagatacaacacacacaaacaaacaaacagtcaggcctctgagccagaactacgccattgtaacccctgtgacctgcacgtatacatccagatggcctgcaggagccaagaartttggagcagctgaagaaccaaaaacgacgtgaaacagccag

SEQ ID NO: 12211 - DNA, 214 bp, Homo sapiens
ctgacctaggatagtaaattttcaggtggtcatactgcaaaacagtgcccagtgaagaggctgtgtattttccagctcttcctatttctatccaatttttctgtaaggactgctgtgcrtggtatctgcggttgacctacacagtgctccaccagatgctaaagtgtcagttggacagccacaaactgcagtgaaggcaggaataaatgtgttt

SEQ ID NO: 12212 - DNA, 539 bp, Homo sapiens
cctactgatttattctactgattttctctgggatcaattccaaaatgaactacttgtacacaagttcttgcgttgtgatatgcttcttaagaaagacaaataggcacctattctaaaagatgtgtgttgggacttaagagttgtagtatgaaaggctaattaaggaatttggtgagttatgctatgacattatgatgttaatttcctgggtagccacagagaggaaaagatcagatgaacctggcagaaaatcagtaacatcagtgctttgtagaaacaaaattcccggtgggctggtggccgaggctgttggaataggttttatagaaggttgagcctggcaggttcattgaagtgtgaactgagaggaggtgaagacattttagaaagtgatgactgtgacagtggcatgaacatgtaagtcatgtttggagtaacaaactatctggagcaacactctatctggatgttgaaattatatggaaaggaacaaaaaataaaccttgcaatgwcagttggaatgacattagactctcaaa

SEQ ID NO: 12213 - DNA, 539 bp, Homo sapiens
cctactgatttattctactgattttctctgggatcaattccaaaatgaactacttgtacacaagttcttgcgttgtgatatgcttcttaagaaagacaaataggcacctattctaaaagatgtgtgttgggacttaagagttgtagtatgaaaggctaattaaggaatttggtgagttatgctatgacattatgatgttaatttcctgggtagccacagagaggaaaagatcagatgaacctggcagaaaatcagtaacatcagtgctttgtagaaacaaaattcccggtgggctggtggccgaggctgttggaataggttttatagaaggttgagcctggcaggttcattgaagtgtgaactgagaggaggtgaagacattttagaaagtgatgactgtgacagtggcatgaacatgtaagtcatgtttggagtaacaaactatctggagcaacactctatctggatgttgaaattatatggaaaggaacaaaaaataaaccttgcaatgayagttggaatgacattagactctcaaa

SEQ ID NO: 12214 - DNA, 520 bp, Homo sapiens
gtgatcaagatgcaatgactaccctcaagctcactgttaagaggagtcagatcagtaaacatagaatgttggtccagcaagagaaacatgatgatagacagaaggccaggttgccgtggagcatgrattcagaatacacaccagcccatggaagttaaggaagctttttgatagatatgacggtttagctaagatctgaaaaacaggttggatttaggcagcagtaaggatggaaagacatcccaagcagagagaatgaatacctgcaaaggctccaaggtgatggagcccatggtgctaagaccacagataattcagcatcatggagggggagcagtgagggaaagcctggagtggttaaaataatagaagcttccatgacagagggacatgaattccattctaggaggtttggattttatcctgagtctatcatagagccatgcaagggttttaaacaaggagttgacataatcagaatataaacagcactggccttcgaggcaggagagctgtattc

SEQ ID NO: 12215 - DNA, 697 bp, Homo sapiens
ttgcaattgttcttttattcaacgtatggacatccgatatctactttgtgaaaagcactatgtgttgttgttttagggtttttgttggcggtagttttttttytttctttctttttttgagatggagtttcgctcttgttcctctggctggagtgcagtggtgcaatctcggctcactgcaacctccgcctccagggttcaagagattcttccacctcagcctcccgagtagctgggactacaggcgcccatcaccaccccagactaatttttgtatttttagtagagatggggtttcaccatattggctaggctggtctcaaactcctgatccacccacctcagcctcccaaagtgctgggattacaggcatgagccaccgcgcccagcgaaggtttgttatttaaaagaacggttactgagtcccagctgcccctgaggtagtactcagcatgcctgctctccaacgtcaatggtcttctttttagcttgccttcttgacctgctactttgtttggggtgtgaaagacaagacacctaaaatgtggttggaaatgtgataagagatagctaaatgtttgttaaaacattaaggattttaagaattgcagaaggggagatttatgtgggattgaaaacatgcagagagggaagggatccggtcctgtaggggatatcccattgcataggtgcatgt

SEQ ID NO: 12216 - DNA, 558 bp, Homo sapiens
gtgatgggcagccggagtatctgcttacagacagtgtgttgaaagtcttaaggtttattgaagttccgtccctgtagtattccttgtatctttaatttgcttggctaatctttccttacatacagtatgaaggaaaattcagcctatattggattttcacaagaattctgaaaccatcctagtttgaatgaaataaaatgctattttgtgttggatggtattgaaaggctgccctatctgcactgggcccttaatctcattttgggtgcagaattttccttgggcagttcagaagagggtaactttctgtttcgtgcattcttcttatcactgttcagtgcaaagatcccagcaacctcttcgaaccccagaatgcctgccttgtcgtagacttccaagcaatggctggggtttgcagtcacatacaattcagatgacacatttgtgtttctaaaatctgaacccacctaatgatcacgccacagccggggagttgttggtggaaagctgtcttccaggcttctygttgaacatctcattctctggtgtttgtgttgc

SEQ ID NO: 12217 - DNA, 549 bp, Homo sapiens
agaggttaaagagaaggatgtatgctcacttaggaaggaaaaaaagaaagcctctgaattattagaaaggtcatcgaaggccattcctaaataacttgactgttgagatcagtcatttctttttgtggtcacagattatggccacttctgcttctttaaaaagtgttctgtttctagcattattctgaaagcattttttttaaccacctagttttttggcctactctgccagtcataccccatgtgtacagaattttaaacaccttttctgtccttgaagctggaaacatctttgtcagtctgctaaaaatatgggtactctgagcccttctgtaatgatcactgtgtagatgacagaggttgctgagtgagagtggtcaccaaaatgttggcttagcttttaatatattcaaatttaatttaaattytaaaacaattactagtacaggctacacttagactgttaaccatttcaaacattttgtccaacccattaaatcccgaagtcctttgcttcccggagaactgattgtctactatggacgtctg

SEQ ID NO: 12218 - DNA, 545 bp, Homo sapiens
aatagattatagccacatcttattagcagctctgggaacatctagcaaaccacatcatcacagatctgagacaggagggtaacacagaaaataagaactgtgaaaggggagaaaaatgccttctgtttctgtttctgtgcygtgcatctaggccaccgggaggttacttttcttctctaattgggaatgttcattttcattcaattggctgtgtaaggagaagaaagattcgctttcaccacaagtggccactgatttctcaccctaagaactatgttcttcacagcattccccagctcaggattatgacaatgactttctcttgtctctagcaccaaggtgtggttcctgcctgattttcaagggcatccaataacccggcccagactacccatccaaccacatttccccagaattttctggagagtttcttttgttgtactagagagatatactcacccccaccaggataggccagtgctgtcctactgttatccttcactaacatgatatagaaaggtatcccttcttgtctccactctaca

SEQ ID NO: 12219 - DNA, 643 bp, Homo sapiens
ttttttttctttttcttttttttgagacggagtctcgctctgtcgcccaggctggagtgcagtggcacgatctcgactcactgcaagctccacctcccgggttcacgccattctcctgcctcagcctcccgagtagctgggactacaggcgcccgccacctcgcccggctaatttttttttttttttttttttgtatttttagtaaagacggggtttccctgtgttcgccaggatggtctcgatttcctgacctcgtgatcctccctcctcggcctcccaaagtgctgggattacaggcgtgagccaccgcgcccggcctgtacagacacttttttaaacacacagagctgttaaatactgtttagcaatcctcatgctcatatcttgcagaaaatatctggtcattcaaactcttcaaaaacaaraaaatcataaggcttcgagtaacatagggagctcttttttcttttcttttcttttttcttttttttttttttttttgagacggagtttcgctcttgttgcccaggctggagtgcaacggcatgatctcggctcaccacaacttccgcctcccgggttcaagcaattctcctgcctcagcctcccgagtggctgggataacaggtgcacaccaccaca

SEQ ID NO: 12220 - DNA, 515 bp, Homo sapiens
tattatgcacccttaaatttaagaattagtcattcggaggtttctctcaatggcgaacttgaaaataagttcaggaaaccagacaattggagcggaccgacagccctgattccaatggtaagagcagtgcgctgggtgtgatctttctgccagcaccttaaggcctcacttaacctcgggaccttagttgcatcatctatagaatgaaatgattgctctccgacctaccttctcgtggtggtgatgtgataataaaaattgaatagtgagmaacccagtgggctatggaaatgtgtggaagatggcatttctatttctcagtggggctcttacctattactcatcaaccttgtaggcagaattgactgatgcagcctacacagtatttaattacataaatgggacaccacctatgtgcccaacatgggatttgataggaaggatttgaaggggttagagacagggagaccaaataggagtctgcccagccacccagctttcgggtaatgtgcgtc

SEQ ID NO: 12221 - DNA, 616 bp, Homo sapiens
atgcaagacacaaagggtggcctcaggggacaggactagggaatgattgtgtgggggtggagatgcagtgcaggagggaggtgtccaaggactcaccttctccctgggtgataggagggcagaaagtgaccaggagtccacaggcgtgccccagctgaggctcaggtgaaaggaattccttgcagacactcagtcttcagtgttgtttggcttgtttgttctatgctgtgcttccytctcaagaacttcaagccttcaggaatctggtcttagcaggttgaggggcactggagacagaccagcatgtccattttagggacacagtaaaagggaaggaggcccctggatgccctccaggattggctccaggggtgctacattctttcaaggggcacagaagatgatgctggtggcctgcacctctgttgctggtgcagcaggggagctgcagcgtggacacactgcggcatgcctgagatggactgggagctggagtgtgcagccccacctcgtggagcaccttcagagggccgggcttagccctgctcctggaaacaaacagagcagctctcccagacctgtcctgctgtctctgacttttcctctcctgatttcc

SEQ ID NO: 12222 - DNA, 539 bp, Homo sapiens
ttctatcctgaggcagaccacacttagagacctaggatgttggccagtaaccaccaggaactactccataatttctctttgaggaccaggctgatgagaaggccttgcttttaaaagcatacccataagactaaggaagaatgtctgtatgtgttttaatggccagcttgggttgcaatmccaatcctgaaccaattcctgcaagaggaaggattttagctttaggattattgagcctatctgagtagctgagtgtgaggtcagctcctgatgaggcaaatgcttcttccttttaggaagtaagaaagaagagttgaggttgcttattaggtaaatgtttgagatgatggctatgctaattaacctgatataataactatacattttatgtatcaaaacatcaccaggtaccccataaatatgtacagttatgtgtcattttaaagataaaataaaataaacaaaaagatatattaattgattgtaatttatggaccttacttgaaccccaaatcaagcaaactataaataaataaata

SEQ ID NO: 12223 - DNA, 684 bp, Homo sapiens
ttccttcttttgcaaaagtagggaagatagtctaggtggagcttctgcagtggctgctgttgccctccaaccctagaagatggactttctcatgcttctccccgtctcctctgtgagagcctagtggagttcctggaagagagaccagcaaaaagttggaatatcaccccccatctttgtctccaagggcttcacactcataccgacccacaatttgttaaaaatttctagttgaatgtcctctgttttatacgacatttgagagcatttattccaggtaacaaatgcttaggtcttgtttctccctacaggtaattgtctctctactttttaggttaattatttgccctgcaattttaattctctgccggttcaagaaaagtcattagtttgcagcgtgtccatctttttcctcgttagtaaaagggagaacatccttttatttatttttttagctctctatatctctaagctgaaactggaggtctcagtgttgtaagaattgaaaccacctactcctcgccccccactgcatagtgtggacactgacgactgaaactacttatcctccacacaacctattgtctgcatgacatggctttatattttattgtctttattagcataactttattattccaaaatactcttgcscagacaaaaaacttgatttttcattacggg

SEQ ID NO: 12224 - DNA, 528 bp, Homo sapiens
catttagaacagattataactctcctgtcatttacatttggatgcagttcatggtgaatttgcacatcctttgaagaaaaaccttcatgctttagtttgtgttcagctatacaatatccactattttaagttgttggcaggaaatagctatttagtattagtcrtcttgcagaatttataacataatgattgtaatccaaccccaacaacagaatactatattgccaagaatggaatcgggctcacatttatctttaatggagaaatatgttctattttaaaaagccaagaaaaaaataaacagtcatggagggttaaagttggcagaatctagcctaggtattacttttcaacttttcaagcaactagtgaatcacctatgacaagtctaattaaaacaatttctgctccgtaactgggatactaagcagatggtagaaataaagatgtgctgaacaggccataaataattgaggcaggaaaaaatacaaagagaagtgcaagctagtccttgcagtttatgtgagt

SEQ ID NO: 12225 - DNA, 505 bp, Homo sapiens
aatcaaattcagcactctgtaatctgtcgcgcacaaataattccacattttaaagaaatttaatttttttcaaatgtataattaaatgtagacatagaaaaccacatagggaaaattaagattggcaagcattgactcctttacctatatatttgaccaattttaatgatcacttttgcttttatttcctgtccaaaatattattgtagccaaacataaacttcataaaaagaacttcaatctttgycttcaatactaaggcctttttttccctttacctgatgatcttgcaactcatcaactgacaatctgtaaacacactttgattgaataacctaatgtacatacaatgcataataaatattattatatttcacttgctttgtagaaaaataggtattttcttaatgtagatcatgagttgatgggtgcagcaaaccaccatggcacataacaaacctgcacattttgcgcatgtacaccagaacttaaagtataattttaa

SEQ ID NO: 12226 - DNA, 533 bp, Homo sapiens
ctctcctgctcttcctcttgcagctcttttttttttttttccttctaagtccgggacagttggaaagcatgcttggccgagagggtctccatttatgccaacagctccttctgctcttaacaactgctatcctaaatcaaatcagcagctctgtgcctggagattaaatctgtgccacctgatagcagtggcaccctgtggcatttggccatgcgtactctctgcctgggctcatttctttatttcctcagagaatgggttgtgttggaagaaaaggttcatgtcctggggattcaggttttagatattccattttggtcctttgcagcctggayaccaggaacaggctgctctctgggaaagtttatgagggagtctttctcctcatcacatcagccggcagcttgcagagctcctttagctaaagtatatggcttcataccatgatctggaattaaccaacggggaaatcaacactggtgacatcttaccaataaaggcaaattttttattctgcgagaacgaatattaca

SEQ ID NO: 12227 - DNA, 1172 bp, Homo sapiens
tataaagttttagtcccttccttggcacttaattacctacaagttcatcactactccaatctataagaacacatattctatagcaaacaaattgttgagtgagaagtagcaaaaacaaacctaaagataaaaawtttgattttatctgaatttctgggctctttatcttcaccttgttaatattaggtatttgtgatacacagaacctgcttataagcagtagcattaattttttaaaggttctgtgctattagggtaagttggtatcaaaggttttgatactggcctttccaaaggggctcaataaatcagataaacaccaaagttactgttacactattaactaaggtaaagctgaatgtaaaatattctaaggcaagaagaaaaacagattatcacaaagtaaccctgatttaacaaggaagtagaaaataaagggatataaaatgatttattcataagaacaaataagtaagaaacattagcaaatattgattttagaatctatactctcttagtttgactagggcatcccatagagcaccccaagttatactgaagtcccacaaagaccttttcagttacctcttaatgatcttgttctgttatatccgtctgagctccaaatgcaatcactgtgtattgaatatgctgtatacaagatgcttcaatgagagctttcaaatatattatacatgtaatctttctaacaacccaatggataattattagtcccattttacagaggaagtaaatttgaaggtaaaataaaataattgggtcaagaataatacctatgttgtggtggtatagtgacttctgaaatggatgaatgataagcacagcaaatccactcccataaagcaataataaaactagaaatagattgtcaaaacaacttttggacactggacattaaaaaggggtatacattaaattgggaagcatttgtttaagcaaaaagtttaaggcttagtgagaatatagaaggtattctatgttttagcctgggattactatcatacccactccaggttcaagacattgaaatagaatataggacaagaaccacataatcatctcaatagatgtggaaaaaaagattcgataaaatttaacatctattgatgataaaaactctcaacaaaccagaaataaaagaaaatgccctc

SEQ ID NO: 12228 - DNA, 1172 bp, Homo sapiens
tataaagttttagtcccttccttggcacttaattacctacaagttcatcactactccaatctataagaacacatattctatagcaaacaaattgttgagtgagaagtagcaaaaacaaacctaaagataaaaaatttgattttatctgaatttctgggctctttatcttcaccttgttaatattaggtatttgtgatacacagaacctgcttataagcagtarcattaattttttaaaggttctgtgctattagggtaagttggtatcaaaggttttgatactggcctttccaaaggggctcaataaatcagataaacaccaaagttactgttacactattaactaaggtaaagctgaatgtaaaatattctaaggcaagaagaaaaacagattatcacaaagtaaccctgatttaacaaggaagtagaaaataaagggatataaaatgatttattcataagaacaaataagtaagaaacattagcaaatattgattttagaatctatactctcttagtttgactagggcatcccatagagcaccccaagttatactgaagtcccacaaagaccttttcagttacctcttaatgatcttgttctgttatatccgtctgagctccaaatgcaatcactgtgtattgaatatgctgtatacaagatgcttcaatgagagctttcaaatatattatacatgtaatctttctaacaacccaatggataattattagtcccattttacagaggaagtaaatttgaaggtaaaataaaataattgggtcaagaataatacctatgttgtggtggtatagtgacttctgaaatggatgaatgataagcacagcaaatccactcccataaagcaataataaaactagaaatagattgtcaaaacaacttttggacactggacattaaaaaggggtatacattaaattgggaagcatttgtttaagcaaaaagtttaaggcttagtgagaatatagaaggtattctatgttttagcctgggattactatcatacccactccaggttcaagacattgaaatagaatataggacaagaaccacataatcatctcaatagatgtggaaaaaaagattcgataaaatttaacatctattgatgataaaaactctcaacaaaccagaaataaaagaaaatgccctc

SEQ ID NO: 12229 - DNA, 1172 bp, Homo sapiens
tataaagttttagtcccttccttggcacttaattacctacaagttcatcactactccaatctataagaacacatattctatagcaaacaaattgttgagtgagaagtagcaaaaacaaacctaaagataaaaaatttgattttatctgaatttctgggctctttatcttcaccttgttaatattaggtatttgtgatacacagaacctgcttataagcagtagcattaattttttaaaggttctgtgctattagggtaagttggtatcaaaggttttgatactggccttyccaaaggggctcaataaatcagataaacaccaaagttactgttacactattaactaaggtaaagctgaatgtaaaatattctaaggcaagaagaaaaacagattatcacaaagtaaccctgatttaacaaggaagtagaaaataaagggatataaaatgatttattcataagaacaaataagtaagaaacattagcaaatattgattttagaatctatactctcttagtttgactagggcatcccatagagcaccccaagttatactgaagtcccacaaagaccttttcagttacctcttaatgatcttgttctgttatatccgtctgagctccaaatgcaatcactgtgtattgaatatgctgtatacaagatgcttcaatgagagctttcaaatatattatacatgtaatctttctaacaacccaatggataattattagtcccattttacagaggaagtaaatttgaaggtaaaataaaataattgggtcaagaataatacctatgttgtggtggtatagtgacttctgaaatggatgaatgataagcacagcaaatccactcccataaagcaataataaaactagaaatagattgtcaaaacaacttttggacactggacattaaaaaggggtatacattaaattgggaagcatttgtttaagcaaaaagtttaaggcttagtgagaatatagaaggtattctatgttttagcctgggattactatcatacccactccaggttcaagacattgaaatagaatataggacaagaaccacataatcatctcaatagatgtggaaaaaaagattcgataaaatttaacatctattgatgataaaaactctcaacaaaccagaaataaaagaaaatgccctc

SEQ ID NO: 12230 - DNA, 556 bp, Homo sapiens
ggtttgcactgtttgtcttagtctgtggaagttgttaaagaagacaatttgtgtctgatggactaaaatctaacaggacaggaaccatcacatattgaaaatgtaaaccattaaagaagacaacaagtactttccatasattaggctgtaccagtctatgtttgattgctttaacaaaataagctgtggcaggaacttgattggattaaaacctctggtaaacaaccagctaaatctgagaccttggacataacacttcctcatcaccaaattctgggaaatgaactgaattagctttaagatatctattttcaattcctttattattttaattgtgcaagttcagaaaatcaatgtatgtcagaccaggtgttgaggcggagagaacacttaagtttggtccatctgagacagagtggaaacaagagagactggtatccacctacattaatatacttttctatgcatatcggctaacaaacagaccttgcaccactttccccactggtgccaaacctgctaagaccttgcaagctatttgaaaaagttaagatag

SEQ ID NO: 12231 - DNA, 556 bp, Homo sapiens
ggtttgcactgtttgtcttagtctgtggaagttgttaaagaagacaatttgtgtctgatggactaaaatctaacaggacaggaaccatcacatattgaaaatgtaaaccattaaagaagacaacaagtactttccatacattaggctgtaccagtctatgtttgattgctttaacaaaataagctgtggcaggaacttgattggattaaaacctctggtaaacaaccagctaaatctgagaccttggacataacacttcctcatcaccaaattctgggaaatgaactgaattagctytaagatatctattttcaattcctttattattttaattgtgcaagttcagaaaatcaatgtatgtcagaccaggtgttgaggcggagagaacacttaagtttggtccatctgagacagagtggaaacaagagagactggtatccacctacattaatatacttttctatgcatatcggctaacaaacagaccttgcaccactttccccactggtgccaaacctgctaagaccttgcaagctatttgaaaaagttaagatag

SEQ ID NO: 12232 - DNA, 547 bp, Homo sapiens
agaatggtcagaagtaaagtaagtatcttttgctggaaaatcagagctagtaaatagtgtgagagctcaatattagcagcagaaaaaaaaacttttatagagattttaggtcaggcacagtagctcacacctgtaatcttagcactttgggaggccaagggaggaggatcacttgagcccaggagtttgagagtagcctgggaaacatagtaagactctctctatttttaaaaagaataaraaacattaataataataataaatgttttaaatgccaaagctgaaagcctttaaaagccaaagatcacatcctgttttctatttagccccagtaagaaaaaccaaaaacagcagcaatcaataactgtgaataaggtactctaccatgtacctacatgtttatatttacttgaaccttgctctaaagcatcacattgtttttaaatagaaattaatcaaaatgtaccgttataaaagcaaaagaagaaactgtaaagaaaaagacaaccaataaaaaagttctatttaccgaaaacctgccagcaca

SEQ ID NO: 12233 - DNA, 520 bp, Homo sapiens
tgctgagagaatttgctgatagaattaagccaacacacctgaaggtttctgaagtccttgcactaatgacagttgatttttcatgcccctctgagattcgtgcgctaccccaatattttctaatacaatttattttagttttattcagttttgcaataagataattttattaatgaagtcctaatactatcttttcagaaattaatatttcatagaataacatgtattaaaatattggttgtatatcacattgagaacaaaattattttggctagctttagaataygtgaatgctgtctttgctattcattctattatggagtatttttaatgttgatgcagtttaaaagttgcctatttcccatatttgattgcaaaataaaattgttaagtgcatttttaaatgtaatgttcttatttttacacaatctatggttaaggtaaaatgaatgaaggaatgaatgaggaatgaatgcttagttctacccctccagaagcaatgatgatgaggaagaagggg

SEQ ID NO: 12234 - DNA, 1274 bp, Homo sapiens
tttttttttaatcctcttgatttctctgcagaaaatagggaaattcatcaaacacaatggaaagtttccttggaagattattatctagtcacacttgcatacagtcccctcttacagcattctacagtttgggattttgtttgtttgtttatttgtttttgtatttatttatttatttatttatttattgagatggagtcttgctctgtcgcccaggctggagtgcagtggtgatatctcagctcactgcaagctccgcctcctgggttcaagtgattctcctgcttcagcctcccgagcagctgggattacaggcgcgtgccaccacgcccagctaatttttttgtatttttagtagagacagggtttcactgtgttagccaggatggtcttgatctcctgacctcatgatctgcctgccttggcctcccaaagttctgggattacaggcgtgagccactgcgcccggctgtttttattttttttttgggatggagtcttgctctcttgcccaggctggagtgcagtggtgccatcttggctcactgcaacctccgcctcccaggttcaagcgattctgctgtctcagactcccgagtagctgggactacaggcgcacaccaccacaactggctaatttttgtatttttagtagagacagggtttcaccatgatggtcaaactggtcttgaactcctgacttcatgatctgcccgcctcagcctcccaaagtgctgggattaccagtgtgagccaccacaccgggcctgggatttgtttttaatcctatgggaaatgtcctaatagggctttggcatatctttgttccaatttctacattgaggaggggaagaagctttctttttattaaataaaatacacatctttttatttttttaaaattttatttatttattttttcgagacggagtttcgcttttatcgcccaggctggagtgcaatggcgcaatctctgctcactgcaacctccacctcccaggttcaagcgattctcctgcctcagcctcccaagtagctgggattacaggcatgtgtcaccacgcccagctaattttgtatttttagtaaagacggggtttctccatgttggtcaggctggtcttgaactcctgacctcagatgatccacccacctcggcctcccaaagtgctgggattagaggcatsagccaccacgcacggcccacatctattttattaaataggtgcctcaagcattagttgctaatgaaacagaaatacaaatgaaacatc

SEQ ID NO: 12235 - DNA, 575 bp, Homo sapiens
gacttcaagctagcatgagaccctagaggctgtgtggtgtcactcctcggggaacagacttgtttctgctctcagcctggatcccaacttttcatgacagagacagggacatatttaggcaatcaaggraaacagctgcaaacttcacagcctcaaagagcaccactgtcactcactttgatgcaggaggttattgaggcctacatgctggtgaacctgccaagtaagtccccacttgggaggcatcgagagcccagagcaggaggaagaaaatgcaccagacacccagatgccatgtgaggatgagctgtgagttcgcacccacagctcaattagtattgctaacatgccctctccctcagcaccttcagaataagtaaataatccatctacctgaaatgaactccaaaaagagagaaaaagagagagcatttggaacatttgctgagacctaaattgaccaactttgatcaagatgagttagtaaaatagcaggctcctcatcagctgcattttaatgccatatttggagccactcagtcattataaaatcatctgaacttctcagcagaagt

SEQ ID NO: 12236 - DNA, 677 bp, Homo sapiens
gtaactttagtaggctgacttaacatgttatgataacaggattatttagattataagagactgggcaggcagatattacactagtcttgtactttgctcataattttatagagcactttgatgtatatttatttcatttaatgtttttgacatctgagaggtatatattctcatagataataaaacccaaacgtcccagatgattaagagacttgctcaatttgacactgttagtcattagaagagctagtcttaaaaaaagaaaagaaggccgggtgcagtggctcacgcctgtaatcccagcactttgggaggctgaggcgggcagatcacgaggtcaggagttcaagactatgctggccaacatggtgaaaccccatctctactaaaaatacaaaaattagccgggcgtggtggcacgtgcctgtaattgcagctactcaggaggctgacgcaggagaatcgcttgaacccgggaggcagaggttgcagtgagccgagatcgcgccattgcactctagcctgggygacagagcaagactctatcttaaaaaaaaaaaaaaaaaaaagtattctgacttcaatccattttttttctctaactgcaaccaagataatttatttactgagtattttcagctattatgataaaagacataaatgtgatttcttcccta

SEQ ID NO: 12237 - DNA, 1752 bp, Homo sapiens
atttaagagtttcctttacctttgcctttccagggttggagatgcctcagagagtaagaagtatttgcttgagccataacattccttttttttttttaagcttcaatccacaaagtttttctttgattagattgatttattttaataattgggaaaaatgaattatgatagtgttgaattaaaatattttctcaagggtgttgggtaaaagagcaggactatactaattgactggagaagccaatttaaagctgatccacagtagtatatgccatttcatatgtaaagggtaagttttacttatactattgcaaaggaagatactggaccatcttgggttatttggcatttcttccattctgtctagttttatccaattttcaatgttaataactttttctagagactatcttgaacataaggaataaagccaagaagaaaacagggacagaactaatgggaaattcatttttcagttcaataagattatataataaaataaaaaataaaaaaawtttttttttttttttgaaacagggtctcacccaggctggagtgcagtggcatgatcatggctcactgtagccttgacctcaagcagtttacccacctgagcctcccaaatagttgggactgtaggtgtgcatcaccacgcctggctgattaaaaaaaaaaaaaaaaccttttgtagagatgggggtcactgtgttgcccaaactcgtctttaattcctggcctcaagcaatcctctcaccttggcttcccaaagtcatggattacaggtgtgagccactgtgctcagctgctaatagctctttacattaattttgtgggattgtttgtgaataatacagttctcctcatgagagaaaagacatactcattttgtgcatattagattgttgactgaatctcttttaaaaattgttttctcctctctttcccctccccacagaatctgtctatgatcttctcccaaaggagttacagttacctccatctagagaaacatctgtagcatcaatgagtcagacaagcggtggtgaggcaggctcgcctcctccagctgttgttgctgctggtatgcatttcattttactttattaaagaaaactagggccaatataaatctggccaacatgaacagtgctggcaaaattcatactaaaaagagtgtgatttgagggttttaaaaagaggcattaaaatatgtacttttaaccttaaactttttcaatattattttcttaatgtaattcttatttcttaaaattttacattgtctcatctataaatgccatttcctaaaatggaccttgtcttcaaatatgggaaccagcttaaagttgtttggttgactgtgcttaaaaaggttaaataccaagctgtgaatagaaaattatatttgagtttctgtttaataattaattttaaagacttgcaccaagggaaaatattttatatgatctgaaaaatgactgaagcactcaagtgtcttttatattcatagcatgttactgaaacctttttattatatttaaaaatatatgtgacttcgtagttttcaatttattgaaagtaatggaggacgtcaatataatatttatataaagacattttcttatattgatgaaaaggtatagaaagtaatgtttgaaatttattagacttatttttactcagctctcaaatcatacacttaatgatatacaattggctcaaatttttattttacataaaaataaaagatag

SEQ ID NO: 12238 - DNA, 651 bp, Homo sapiens
caaatgttcacctcctttggtaacgccctcacagacacacccaggatcaatactttgcatccttcaatccaatcaagttgacactcattattaaccatcacaaggtgtgagccctgcacccagcaatatattgctttttatatatttatagaaattcaattggttctgtttctctggaaaatcctgatcaatatacactccttcatttttcttatagcactgaattatgggataaaccaggttggttgtcctgtagaatgtcccacactgtgatttgactgatrtttccccatgattttaacttctatctcctgtgtttcccaatcaacccacttgggtttttgttttttctttttgtttttagatagggtgtcactgtgctgcctaggttggagtgcagtggtacagtcacagctcactatagcgtcgacttcccaggctcagatgatccacccatctcagcctcctgagtagctggatccacaggtgcacaccaccacacctagctaatttttaatttttttagagatggcagaggtggggggggttggggggggtctcactatgttgcccaggctggtcttgaactcctgggctcaagcgatccccctgccttggcctcccaaagtgctgggattacaggtataagcc

SEQ ID NO: 12239 - DNA, 572 bp, Homo sapiens
cgggaggcggaggttgcagtgaactgaaattgtgccactgcattctagcctgggcaatagagggagactcygtctaaaaaataaaataaaaaaaataaaataaacacaagatccctaataagaaaatgaagcagagcttctgaagcccagagagacctgattagtgcatccccctgaagggattaggcaaagtcagaaccaaaagggagcaagacaaacaaggaggatggagaagaaaagggagaagtgggtgaaacaagacaactcaggatccaagatcatgcacactgaacagacatcagctgctccttcagggcgcgatgtacttctccaggctgcagcagacctttaaagagggcaaaacggggatgaagagggtgcccatttaggtttttaataccacctggcattgttactaaagagtaatttgaagcatttaacaaagtatactaatgcacagcattttaagtgaaaaacaaaaattgatgaaaatatgttagtctattcatctgtcatgaaacacccaggcaaatacaaaatattgaatagccagggctggtgaaaatgttgtt

SEQ ID NO: 12240 - DNA, 572 bp, Homo sapiens
cgggaggcggaggttgcagtgaactgaaattgtgccactgcattctagcctgggcaatagagggagactctgtctaaaaaataaaataaaawaaataaaataaacacaagatccctaataagaaaatgaagcagagcttctgaagcccagagagacctgattagtgcatccccctgaagggattaggcaaagtcagaaccaaaagggagcaagacaaacaaggaggatggagaagaaaagggagaagtgggtgaaacaagacaactcaggatccaagatcatgcacactgaacagacatcagctgctccttcagggcgcgatgtacttctccaggctgcagcagacctttaaagagggcaaaacggggatgaagagggtgcccatttaggtttttaataccacctggcattgttactaaagagtaatttgaagcatttaacaaagtatactaatgcacagcattttaagtgaaaaacaaaaattgatgaaaatatgttagtctattcatctgtcatgaaacacccaggcaaatacaaaatattgaatagccagggctggtgaaaatgttgtt

SEQ ID NO: 12241 - DNA, 572 bp, Homo sapiens
cgggaggcggaggttgcagtgaactgaaattgtgccactgcattctagcctgggcaatagagggagactctgtctaaaaaataaaataaaaaaaataaaataaacacaagatccctaataagaaaatgaagcagagcttctgaagcccagagagayctgattagtgcatccccctgaagggattaggcaaagtcagaaccaaaagggagcaagacaaacaaggaggatggagaagaaaagggagaagtgggtgaaacaagacaactcaggatccaagatcatgcacactgaacagacatcagctgctccttcagggcgcgatgtacttctccaggctgcagcagacctttaaagagggcaaaacggggatgaagagggtgcccatttaggtttttaataccacctggcattgttactaaagagtaatttgaagcatttaacaaagtatactaatgcacagcattttaagtgaaaaacaaaaattgatgaaaatatgttagtctattcatctgtcatgaaacacccaggcaaatacaaaatattgaatagccagggctggtgaaaatgttgtt

SEQ ID NO: 12242 - DNA, 572 bp, Homo sapiens
cgggaggcggaggttgcagtgaactgaaattgtgccactgcattctagcctgggcaatagagggagactctgtctaaaaaataaaataaaaaaaataaaataaacacaagatccctaataagaaaatgaagcagagcttctgaagcccagagagacctgattagtgcatccccctgaagggattaggcaaagtcagaaccaaaagggagcaagacaaacaaggaggatggagaagaaaagggagaagtgggtgaaacaagacaactcaggatccaagatcatgcacactgaacagacatcagctgctccttcagggcgcgatgtacttctccaggctgcagcagacctttaaagagggcaaaacggggatgaagagggtgcccatttaggtttttaatacmacctggcattgttactaaagagtaatttgaagcatttaacaaagtatactaatgcacagcattttaagtgaaaaacaaaaattgatgaaaatatgttagtctattcatctgtcatgaaacacccaggcaaatacaaaatattgaatagccagggctggtgaaaatgttgtt

SEQ ID NO: 12243 - DNA, 597 bp, Homo sapiens
actgtatatagtatatattatatatatatgtatatatatattctgccaacaattgaataaacctggggaaacagactctgcccctagagcactcagaagaaaatacagccctgctgaccccttgctttctgctactggaaactctaagcagagaaaccagctgagccctccagattactcatctacagaattatgatataacaaatagatattgttttaaggcacaaatctgtggtagtttgttatgacagccatggaaaattaacacaaacctcttctgatgagggcctgaggaatctctctgttattttcagcctcacttctttgtgcttttggataaggcaccctttttggacaactggccactgtacagagatggcagttaagagcatccatcttttgttctggcttggcgggaataatacaatgtgcattgaatgaaaacttcatttggatgggctcaccgtgcttactgttctcccctccaaatttttttcactctgcagactctgaaaggttcgttttcaaagtaaggatggtgartgcttcaggaagtctccagaagattattattcaactgatcctacaaaatagatt

SEQ ID NO: 12244 - DNA, 477 bp, Homo sapiens
taggttgggctaaatgcccttaggaatcccaagaccccctttggtctctcatgatgggtttgggatgatcacttcacatgctggtccaggggttatgcgtttgctgtgaatcctcagcacctaacactggatctggtgcacagggactctgccaaaccgtctgacgccgccaggctgggatgctgttactcttcctgtgtctgcaatgggtccagagtggctgtgatggagagatgctcccgtgtggtcactggggagattggtgagggctgcaggggggaccagcacttcccacatccttcctcagacagtggtggaaattgggttatatttgcatgtggcttggaggccacccagaaagtgtcaggacatccctggggtcagcagtagcagccgcttggtgcaggtttaagaagtcmaccaggacagagccaagcatcaaactgcgggggaggggaggtgggggagggaagatta

SEQ ID NO: 12245 - DNA, 513 bp, Homo sapiens
tttatttgaggaaccaccagattatttctggccatagactcttagacaagagaggagcttcaaaagccccataccctcgcttatggacaggaaagtgggggccacgtgatgagctcttcatctgcctctcrtgtgaggtggtggcccagccaaggccattctgtttagggttcttagtgcatgcctctggcacctttgaagatggccaatgggaacaccaaactgaggtgtgatgattctgcttgcgataaatggggtagacggggacacaggagcacagagaggcagagcctcctgaaggtcacacagctggccacacacagcctagtgtgctccagctcctcaaggctccgggaaccccttccaaggtgagctttagttcacgaggcagagccttcccgtctgcgtctgcaaagccccagcaggctgacaggggatgccataggcctcaatttgccctgctgtacaactgaaggaggcagatggtgtctaggggctgttgcagctttgctc

SEQ ID NO: 12246 - DNA, 513 bp, Homo sapiens
tttatttgaggaaccaccagattatttctggccatagactcttagacaagagaggagcttcaaaagccccataccctcgcttatggacaggaaagtgggggccacgtgatgagctcttcatctgcctctcatgtgaggtggtggcccagccaaggccattctgtttagggttcttagtgcatgcctctggcacctttgaagatggccaatgggaacaccaaactgaggtgtgatgattctgcttgcgataaatggggtagacggggacacaggagcacagagaggcagagcctcctgaaggtcacacagctggccacacacagcctagtgtgctccagctcctcaaggctcygggaaccccttccaaggtgagctttagttcacgaggcagagccttcccgtctgcgtctgcaaagccccagcaggctgacaggggatgccataggcctcaatttgccctgctgtacaactgaaggaggcagatggtgtctaggggctgttgcagctttgctc

SEQ ID NO: 12247 - DNA, 616 bp, Homo sapiens
gctgatatgagtggtctgtgtctcttcataatgagcattctgatttacattttggtgtctggattattgggttagcctccttccatgtcccctggtcagctgccactctttgggatcctgtcttggtaactgcaaccaatcttccttgaaatacctcaatgaaatcagaccctgtcagacccttggtccagttcatcatccgtttactcctgcaattggcatcacagaataagggcccaaataagcaaagcagataggatgcacagttgtagatcaaagacggaactaattattttgttttcaatagtcaagggagtctcagaaacaaaaaggggccagggatgggttttaagaaaatgaatctgttctggaaagatggagaggatggagaaaagatgatttggatggtggggatgaaaccaatttgytttatcagaaagtttgttttgggggagcagggagaaagaatgttgattaggtcagcctgaaagccaggctgaaggtttgggctttatccaacacatgtatggaggagaaactaaaattctgaggaaatgaatgacaggaagaaattggtgttttacttagattgtttggtatcggtggacagagcttc

SEQ ID NO: 12248 - DNA, 598 bp, Homo sapiens
atgcctgagtttcggttctgttatacacaggcagtaagcgaaaatttytgtttagctaaatcttccagtcctgtgatgaaatgcgcaagtggtagggctgtgttaaaacccaatttgcatcaagatgattcagatttttttttatttgtttgtttagatcttaatcatttcccagtaactgctgcccttcctcagctcacagaaaacgcctggctcgaagccatgttgtagatagggccctgacacagcacctggcttggggcaggtccctcgtgcgtgcttgggaataaccattgctgaatgtcttcacttgtattggatctgagtatggcaaagcacagtcaaaagcagatatcgacacttaccaaatatgacacgtgggcagctttaatcagagaccacttgcgcatacaattctacagggaggccagtcactactgaacaaaaacgtagctcaggaaatctgaatttctgtgatttattgctgccagatgtatgagtatagggctggaccagctaactttcgtgaatgaggccgcctgctctttctaaagaacaactttttttcctcatatgcttcttcgaggactcttatttc

SEQ ID NO: 12249 - DNA, 598 bp, Homo sapiens
atgcctgagtttcggttctgttatacacaggcagtaagcgaaaatttctgtttagctaaatcttccagtcctgtgatgaaatgcgcaagtggtagggctgtgttaaaacccaatttgcatcaagatgattcagatttttttttatttgtttgtttagatcttaatcatktcccagtaactgctgcccttcctcagctcacagaaaacgcctggctcgaagccatgttgtagatagggccctgacacagcacctggcttggggcaggtccctcgtgcgtgcttgggaataaccattgctgaatgtcttcacttgtattggatctgagtatggcaaagcacagtcaaaagcagatatcgacacttaccaaatatgacacgtgggcagctttaatcagagaccacttgcgcatacaattctacagggaggccagtcactactgaacaaaaacgtagctcaggaaatctgaatttctgtgatttattgctgccagatgtatgagtatagggctggaccagctaactttcgtgaatgaggccgcctgctctttctaaagaacaactttttttcctcatatgcttcttcgaggactcttatttc

SEQ ID NO: 12250 - DNA, 553 bp, Homo sapiens
tttctatttcaagtagcctataaggggttatttggccacacataacagctgagagtgacatctgcagttgcagcttagcaactcatgttcagctatcatgcagaaatgttcctacagggaaggcaaaaaaccccctcagtattctaagtatcaggtagaacactaagaaatcagtcttctttggaggtgatgtgaaaaggtwtgttgatttgagatagaatttctatgtactttagtaggatgcactcttgacttttctttctaatacatacccttaagaggtacctgtgaaataaaccagaagagaacaaaacaatccttccccagtctcactccactttacatggtacatacccattacagcagtttattaagaaattgtttctaaaaaatgtaattgggaggccattaggctgagaggtatccagtacctttgattcctacataagcaaactaaagccaaatgtaaatagtaaaacaaaatttaggctaaaccaaccagaaactgccaactaacttctaactagggactttccagcagattatacctaaa

SEQ ID NO: 12251 - DNA, 553 bp, Homo sapiens
tttctatttcaagtagcctataaggggttatttggccacacataacagctgagagtgacatctgcagttgcagcttagcaactcatgttcagctatcatgcagaaatgttcctacagggaaggcaaaaaaccccctcagtattctaagtatcaggtagaacactaagaaatcagtcttctttggaggtgatgtgaaaaggtttgttgatttgagatagaatttctatgtactttagtaggatgcactcttgacttttctttctaatacatacccttaagaggtacctgtgaaataaaccagaagagaacaaaacaatccttccccagtctcactccactttacatggtacatrcccattacagcagtttattaagaaattgtttctaaaaaatgtaattgggaggccattaggctgagaggtatccagtacctttgattcctacataagcaaactaaagccaaatgtaaatagtaaaacaaaatttaggctaaaccaaccagaaactgccaactaacttctaactagggactttccagcagattatacctaaa

SEQ ID NO: 12252 - DNA, 557 bp, Homo sapiens
cacattgaccattttctcctgccatcaagagtagggrtattggggaatgtgttccttcctcgagagcaaaccacttgaggtacaaatctgattttatcactctcttgcccatagatggcgccccatcacctgtagctctcccgactccagtggattttgattaattgagccaggagtccgctcaggaattcgcatttttaacaagcttcctaggcgaccaactgtcccagtgtacctgggactgaggtgttttccaggacttggggctttcagtgctaaaactggagaagtcctgggccaaatggaatgagttggttagcttgtttctggataattgtgatttacagcaggagtctgcagactacagcccacgggccaatccagctctacacctgtttttgtaaataaagttttactggaatgtagacatgttcactgatttacatatctgctatggttactttcgtgctatagtagcagagttgagtagttgcgacagagaggatatgactcaagaaacctaaaatatgtattatttgcccctttacagaaaacat

SEQ ID NO: 12253 - DNA, 557 bp, Homo sapiens
cacattgaccattttctcctgccatcaagagtagggatattggggaatgtgttccttcctcgagagcaaaccacttgaggtacaaatctgattttatcactctcttgcccatagatggcgccccatcacctgtagctctcccgactccagtggattttgattaattgagccaggagtccgctcaggaattcgcatttttaacaagcttcctaggcgaccaactgtcccagtgtacctgggactgaggtgttttccaggacttggggctttcagtgctaaaactggagaagtcctgggccaaatggaatgagttggttagcttgtttctggataattgtgatttacagcaggagtctgcagactacagcccacgggccaatccagctctacacctgtttttgtaaataaagttttactggaatgtagacatgttcactgatttacatatytgctatggttactttcgtgctatagtagcagagttgagtagttgcgacagagaggatatgactcaagaaacctaaaatatgtattatttgcccctttacagaaaacat

SEQ ID NO: 12254 - DNA, 557 bp, Homo sapiens
cacattgaccattttctcctgccatcaagagtagggatattggggaatgtgttccttcctcgagagcaaaccacttgaggtacaaatctgattttatcactctcttgcccatagatggcgccccatcacctgtagctctcccgactccagtggattttgattaattgagccaggagtccgctcaggaattcgcatttttaacaagcttcctaggcgaccaactgtcccagtgtacctgggactgaggtgttttccaggacttggggctttcagtgctaaaactggagaagtcctgggccaaatggaatgagttggttagcttgtttctggataattgtgatttacagcaggagtctgcagactacagcccacgggccaatccagctctacacctgtttttgtaaataaagttttactggaatgtagacatgttcactgatttacatatckgctatggttactttcgtgctatagtagcagagttgagtagttgcgacagagaggatatgactcaagaaacctaaaatatgtattatttgcccctttacagaaaacat

SEQ ID NO: 12255 - DNA, 568 bp, Homo sapiens
ttaaatatatttggacaactattgaagcatattattttgtagatatttgtctccacctatagaaaacattgcccatgtaattttatcaattacatagaggcacaaaatgatgaagatgagtaaaattaacaataaagtatatttggatattcatgttcaagtgttatttttaaaaattagcagatttagcaatctgagacaacagaattggaccaaaacaggacccaaagtatgaagatgctaaaaaaaaattggtaagtttaatacccactgatgtttataagataaattataaagtaaagctgattctttgtgtactttggatttaaaaacaatatgatttgtatacattgaggaaaaaaaaaaaacaaggaaatgctcataaaatgccatatgaggtagcctagattttcaagctagcttctgatggctttccagagctttttggatgttgatagtttttgtttgtttgtttgtttttgttttttgaatcggagtctcccgctgtcaccaggctggagtgcagtggcaccatctcagctcactraaacctccacctccttggttc

SEQ ID NO: 12256 - DNA, 555 bp, Homo sapiens
tctgcataagcatacagtgcaatgcacagcaatagtgatctcccaaattagaacacttgctgaggtgtgtctgagggtaaatgtggaaagcctgacagacctggaagagcttggtgayctggaggagtgtgtgtgagtggaagagatacagtttgctgtaagcagagatgagaccatggagggcctggcaccactttagggattccggcctttattttcaagcctctctggagctgtggaagaaggctcagttatgaatctcaggagagtcctcgaggaacactcagagaatgatattgacagctggggagcagcgaggaagctgttgtaggcatccacgtggaagtcaattgacctgaacagggagagtggcccagaaacagaagcaagctgattctcaggacatgcttgcattggtcaagagcagggagactgtcggcttccagtcttttggcctggtcagctgtctagatgatgaaggcattcactgagggcgacgggctggaggacaagcagaacctggggagtggttcacctttcatgcccgtgggacat

SEQ ID NO: 12257 - DNA, 772 bp, Homo sapiens
ataatwctatcttaatatgctttgaaaaagattatttccaaatataaaataaataaaagttactgtatttccagaaggtaacttctattataagtctagcagtaacatcacaggtagaaattccaagtctcaagagtaaactgaaaatgttcaaatctaggagagattaaaacaaacaatctatgtgtcaggaagtcctgacacttggtaacttggtctatctcttaaaagctccaagtggttttcagaagaagctttttcaatttaaggggaaaaataaatctataaatctaataaaataataaattccttaatctatactgtcatcctaagaatggtaagtagataaaaaccatgaacttgcactgtgaccatcaatgtcaccatgtcattatttatgaatacacatgaccaagaataattcagaagaagctttgaactcagaatgtaagtgcacagactttgaccaaaatgttaaaaaaagatagaagttacatgtaattgtgaacctaaatgtatgttcttctctgcatttcatgtgcacatataatctgtgttaaatttgaatgtttgctgtttatttccttttctttacatgttcctgtccaaattcccaggaaaaatatgtgctgtctcatgctaagtttttgcactgggccacaccaggccccctaatttgttataaatgagctatccaaaaaagagggaaacaagaaatagtatgacgtgctcttctatcttttaggaaacagattttccaagtgaggactag

SEQ ID NO: 12258 - DNA, 772 bp, Homo sapiens
ataattctatcttaatatgctttgwaaaagattatttccaaatataaaataaataaaagttactgtatttccagaaggtaacttctattataagtctagcagtaacatcacaggtagaaattccaagtctcaagagtaaactgaaaatgttcaaatctaggagagattaaaacaaacaatctatgtgtcaggaagtcctgacacttggtaacttggtctatctcttaaaagctccaagtggttttcagaagaagctttttcaatttaaggggaaaaataaatctataaatctaataaaataataaattccttaatctatactgtcatcctaagaatggtaagtagataaaaaccatgaacttgcactgtgaccatcaatgtcaccatgtcattatttatgaatacacatgaccaagaataattcagaagaagctttgaactcagaatgtaagtgcacagactttgaccaaaatgttaaaaaaagatagaagttacatgtaattgtgaacctaaatgtatgttcttctctgcatttcatgtgcacatataatctgtgttaaatttgaatgtttgctgtttatttccttttctttacatgttcctgtccaaattcccaggaaaaatatgtgctgtctcatgctaagtttttgcactgggccacaccaggccccctaatttgttataaatgagctatccaaaaaagagggaaacaagaaatagtatgacgtgctcttctatcttttaggaaacagattttccaagtgaggactag

SEQ ID NO: 12259 - DNA, 543 bp, Homo sapiens
acccaagttactagaggatgctcaaatgtcttctgtagttttccacaaatgctggaacatcatgctttctttaaaaatggtctgagggcgggcatggtggctcatgcctctaatctcagcactttggtaggcctagacaggtggaccacctgatgtcaggagttcgaggccaacctggccaacatggtgaaaccccatctctattaaaaatacaaaaattaggtgggcatggtggtgggcacctgtaatcacggctgctcaggacgctaaggcacgagaatcgcttgaacctgggaggtggaggttgcagtgagccaagatggcgccactgcactacagcttggttgacagagtgagactccatcttggggggaaaaaatggtctgaagagtctcagtcccttcatgcagaagggccctgcggttagatatctttggtgcataatttagagcacattrgtacaactaatttacactaagctgattgttatgtgtctgtgttaatttattggtgatctttcctattttctatgtagaataataa

SEQ ID NO: 12260 - DNA, 524 bp, Homo sapiens
ttgtgtttctccacttcacatatcaaaccgtgggatgacccaactgacttgcccgcccatcggaatgccattatgtccacctcagactgagtcttttaagctagatattggtcagaatatatcttgccttgagatacaagaactagttatttgatcaattttgaayacttgatagtaaccatttgtacctgtcagaatttgatctaagtcctaattttgttattaaatacaacgcagtaacaggaactcttccaggctggtgtcccaatgaccttgcacacttccacactggcaacatagggaaggcttaaaaacagctgatctcgcagaatgccctgtgattctcctggaatgtaaagcatgagggtcttaggaggagttggtatgagcccacttctcgcctactgtctatcccatagaaaccacctctgagatagttttcatctcccaggttctgataaggtatgagaatttttggcttgccttctccttctgggtctagctgcacactgtgacactcgtta

SEQ ID NO: 12261 - DNA, 524 bp, Homo sapiens
ttgtgtttctccacttcacatatcaaaccgtgggatgacccaactgacttgcccgcccatcggaatgccattatgtccacctcagactgagtcttttaagctagatattggtcagaatatatcttgccttgagatacaagaactagttatttgatcaattttgaatacttgatagtaaccatttgtacctgtcagaatttgatctaagtcctaattttgttattaaatacaacgcagtaayaggaactcttccaggctggtgtcccaatgaccttgcacacttccacactggcaacatagggaaggcttaaaaacagctgatctcgcagaatgccctgtgattctcctggaatgtaaagcatgagggtcttaggaggagttggtatgagcccacttctcgcctactgtctatcccatagaaaccacctctgagatagttttcatctcccaggttctgataaggtatgagaatttttggcttgccttctccttctgggtctagctgcacactgtgacactcgtta

SEQ ID NO: 12262 - DNA, 569 bp, Homo sapiens
ctcttgtcatcactgtaagggagctgaaacgcaagcagartgttactttgtttgacctcatctgggaaaggaagaaatgagtgactcaatttttttttatcactttgtatatgtccttgaatgatggcaaaaatgctatgaatattcattacaaagacattttagtgagtaggcaaatttataagtatggacttgagttctggtttcaagcaacatgatactcttcacatatggggagaggattaagggttaaagcccatcagaagaagaaactcaatcctggatttggtcagatacacttggatattgacactgtggaaattttagctccagaatattcatagctcaatgccaaactgacaagctgaaagtctagaacaaaatcatagtgtttcattcattcagtagtgttttttacaagaattgatgaggggaaaggaatggtattgcaaaggacaaaagccagatattgtatagtgtaatgtgactcacactagaaaaatattgaaataaagccataaaagtaacattaaaattcaacaagaggaaaataaagtgataaatgtgca

SEQ ID NO: 12263 - DNA, 569 bp, Homo sapiens
ctcttgtcatcactgtaagggagctgaaacgcaagcagagtgttactttgtttgacctcatctgggaaaggaagaaatgagtgactcaatttttttttatcactttgtatatgtccttgaatgatggcaaaaatgctatgaatattcattacaaagacattttagtgagtaggcaaatttataagtatggacttgagttctggtttcaagcaacatgatactcttcacatatggggagaggattaagggttaaagcccatcagaagaagaaactcaatcctggatttggtcagatacacttggatattgacactgtggaaattttagctccagaatattcatagctcaatgccaaactgacaagctgaaagtctagaacaaaatcatagtgtttcattcattcagtagtgttttttacaagaattgatgaggggaaaggaatggtattgcaaaggacaaaagccagatattgtrtagtgtaatgtgactcacactagaaaaatattgaaataaagccataaaagtaacattaaaattcaacaagaggaaaataaagtgataaatgtgca

SEQ ID NO: 12264 - DNA, 593 bp, Homo sapiens
tgaacagcaacagataaatggcaataataataaaatagtagaacaatataccataatcaaataggactcaatatgtgtgctggagtagacctgattgacttttaataaataaaaagttggttcatttttgaaatgggtaatacaygcacacagtacacaattcaaatatggtaagtgatattcagtgtaaaaacatttcctctcccatccagtctcccagtcagtcccttacctatgcagggaagtaaaacagttccttatgtaaatacagagatattctatgtacaagcaaatgtatataagtgtgtgtataatcatgtaatccagaatatatgttgccactgactatgcaaacaattttacttatttttcttcattatatacctagaattagagtagctgggtcataatgtagatatatgtttaatgtttttagcaactgcccaatgatattctaaagtagttgtaacattttatttttccaccatttgtggtataagagtttcaattcttccacatcttcatcaacacttggtatggtcaatctttttaattttacccattttcacaggtgtatagtggtacctcattgt

SEQ ID NO: 12265 - DNA, 494 bp, Homo sapiens
caggatagtgtttgacttaggatgggatatggtagaaaaggagatgtgattagggagaaggattttcaactttcataaagttttatttctcaagctggactgaggattggtacatggattttgtcataacatttwtccaattttgagtgtctgaaatattttataattttaaaaatctcatactctctcaaaccccctttccctatttcatttttccaaaagtttcaggagttttaaaaaatgaagatagtaaatctctttttaaaaatatttgttccaatcattcatttttttgctctgattgaatccatttgtttactcatggtttcagctacttctgaacccatttgatgacttttgacataaatgtattagtacacaagtataagtacatttcttgttgactatcaagaacatttctttattttgatacagtgaaattaagagacaagttacagaattatacgggatataattataatatctatatgtta

SEQ ID NO: 12266 - DNA, 494 bp, Homo sapiens
caggatagtgtttgacttaggatgggatatggtagaaaaggagatgtgattagggagaaggattttcaactttcataaagttttatttctcaagctggactgaggattggtacatggattttgtcataacatttatccaattttgagtgtctgaaatattttataattttaaaaatctcatactctctcaaaccccctttccctatttcatttttccaaaagtttcaggagttttaaaaaatgaagatagtaaatctctttttaaaaatatttgttccaatcattcatttttttgctctgattgaatccatttgtttactcatggtttcagctacttctgaacccatttgatgacttttgacataaatgtattagtrcacaagtataagtacatttcttgttgactatcaagaacatttctttattttgatacagtgaaattaagagacaagttacagaattatacgggatataattataatatctatatgtta

SEQ ID NO: 12267 - DNA, 494 bp, Homo sapiens
caggatagtgtttgacttaggatgggatatggtagaaaaggagatgtgattagggagaaggattttcaactttcataaagttttatttctcaagctggactgaggattggtacatggattttgtcataacatttatccaattttgagtgtctgaaatattttataattttaaaaatctcatactctctcaaaccccctttccctatttcatttttccaaaagtttcaggagttttaaaaaatgaagatagtaaatctctttttaaaaatatttgttccaatcattcatttttttgctctgattgaatccatttgtttactcatggtttcagctacttctgaacccatttgatgacttttgacataaatgtattagtacacaagtataagtacatttcttgttgactatcaagaamatttctttattttgatacagtgaaattaagagacaagttacagaattatacgggatataattataatatctatatgtta

SEQ ID NO: 12268 - DNA, 786 bp, Homo sapiens
ggaaaaaaagtcgtctacaaaactggtccctggtgccaaagaggttgaggaccacttctgttgtgggagtagaaatgargattcaccttaaaggaggatacagctctagcaaccctttgagcaaaatatatgagctgtctgtcatctcgaggaaatagatggcaacatcagaaatgggaagaccacactactccaactcacatctatgtctatgtgcagtaggccctctgttttgatggataatcagatggtctcacgtttttaccatggtgtgccacctgtggccctagctgtgtgactgtctaggatgaagtctgggctcaggttacagtgatgtggataaagtccgttctgcctgagcaccagtgatcatcacgtgcggcggcatattgtagagcccaggacagagtttgacttggagcctgctgagttttttgcagaagcatgtctacgtgcaggagaggacagctcagcgggtaacaccaggactctcttatttgtgttcctttcattgaaggtagttccttccccagaacatggcatagctgcttttgagaaccaatccttgtaagtgacttcctttaatttttttcaataagtagagtttaatctttgaatatgaatggaacacctgagaaaattctttggagtctgagaggaagtagggtatgttggtttctaatagttaggtaaataattagttacataaattgatttcttttccttacttttattcctcagcaggacaaaagtaatattttagacaaggcatggtggtacaggctg

SEQ ID NO: 12269 - DNA, 786 bp, Homo sapiens
ggaaaaaaagtcgtctacaaaactggtccctggtgccaaagaggttgaggaccacttctgttgtgggagtagaaatgaggattcaccttaaaggaggatacagctctagcaaccctttgagcaaaatatatgagctgtctgtcatctcgaggaaatagatggcaacatcagaaatgggaagaccacactactccaactcacatctatgtctatgtgcagtaggccctctgttttgatggataatcagatggtctcacgtttttaccatggtgtgccacctgtggccctagctgtgtgactgtctaggatgaagtctggrctcaggttacagtgatgtggataaagtccgttctgcctgagcaccagtgatcatcacgtgcggcggcatattgtagagcccaggacagagtttgacttggagcctgctgagttttttgcagaagcatgtctacgtgcaggagaggacagctcagcgggtaacaccaggactctcttatttgtgttcctttcattgaaggtagttccttccccagaacatggcatagctgcttttgagaaccaatccttgtaagtgacttcctttaatttttttcaataagtagagtttaatctttgaatatgaatggaacacctgagaaaattctttggagtctgagaggaagtagggtatgttggtttctaatagttaggtaaataattagttacataaattgatttcttttccttacttttattcctcagcaggacaaaagtaatattttagacaaggcatggtggtacaggctg

SEQ ID NO: 12270 - DNA, 786 bp, Homo sapiens
ggaaaaaaagtcgtctacaaaactggtccctggtgccaaagaggttgaggaccacttctgttgtgggagtagaaatgaggattcaccttaaaggaggatacagctctagcaaccctttgagcaaaatatatgagctgtctgtcatctcgaggaaatagatggcaacatcagaaatgggaagaccacactactccaactcacatctatgtctatgtgcagtaggccctctgttttgatggataatcagatggtctcacgtttttaccatggtgtgccacctgtggccctagctgtgtgactgtctaggatgaagtctgggctcaggttacagtgatgtggataaagtccgttctgcctgagcaccagtgatcatcacgtgcggcggcataytgtagagcccaggacagagtttgacttggagcctgctgagttttttgcagaagcatgtctacgtgcaggagaggacagctcagcgggtaacaccaggactctcttatttgtgttcctttcattgaaggtagttccttccccagaacatggcatagctgcttttgagaaccaatccttgtaagtgacttcctttaatttttttcaataagtagagtttaatctttgaatatgaatggaacacctgagaaaattctttggagtctgagaggaagtagggtatgttggtttctaatagttaggtaaataattagttacataaattgatttcttttccttacttttattcctcagcaggacaaaagtaatattttagacaaggcatggtggtacaggctg

SEQ ID NO: 12271 - DNA, 786 bp, Homo sapiens
ggaaaaaaagtcgtctacaaaactggtccctggtgccaaagaggttgaggaccacttctgttgtgggagtagaaatgaggattcaccttaaaggaggatacagctctagcaaccctttgagcaaaatatatgagctgtctgtcatctcgaggaaatagatggcaacatcagaaatgggaagaccacactactccaactcacatctatgtctatgtgcagtaggccctctgttttgatggataatcagatggtctcacgtttttaccatggtgtgccacctgtggccctagctgtgtgactgtctaggatgaagtctgggctcaggttacagtgatgtggataaagtccgttctgcctgagcaccagtgatcatcacgtgcggcggcatattgtagagcccaggacagagtttgacttggagcctgctgagtttttygcagaagcatgtctacgtgcaggagaggacagctcagcgggtaacaccaggactctcttatttgtgttcctttcattgaaggtagttccttccccagaacatggcatagctgcttttgagaaccaatccttgtaagtgacttcctttaatttttttcaataagtagagtttaatctttgaatatgaatggaacacctgagaaaattctttggagtctgagaggaagtagggtatgttggtttctaatagttaggtaaataattagttacataaattgatttcttttccttacttttattcctcagcaggacaaaagtaatattttagacaaggcatggtggtacaggctg

SEQ ID NO: 12272 - DNA, 786 bp, Homo sapiens
ggaaaaaaagtcgtctacaaaactggtccctggtgccaaagaggttgaggaccacttctgttgtgggagtagaaatgaggattcaccttaaaggaggatacagctctagcaaccctttgagcaaaatatatgagctgtctgtcatctcgaggaaatagatggcaacatcagaaatgggaagaccacactactccaactcacatctatgtctatgtgcagtaggccctctgttttgatggataatcagatggtctcacgtttttaccatggtgtgccacctgtggccctagctgtgtgactgtctaggatgaagtctgggctcaggttacagtgatgtggataaagtccgttctgcctgagcaccagtgatcatcacgtgcggcggcatattgtagagcccaggacagagtttgacttggagcctgctgagttttttgcagaagcatgtctacgtgcaggagaggacagctcagcgggtaacaccaggactctcttatttgtgttcctttcattgaaggtagttccttccccagaacatggcatagctgcttttgagaaccaatccttgtaagtgacttcctttaatttttttcaataagtagagtttaatctttgaatatgaayggaacacctgagaaaattctttggagtctgagaggaagtagggtatgttggtttctaatagttaggtaaataattagttacataaattgatttcttttccttacttttattcctcagcaggacaaaagtaatattttagacaaggcatggtggtacaggctg

SEQ ID NO: 12273 - DNA, 786 bp, Homo sapiens
ggaaaaaaagtcgtctacaaaactggtccctggtgccaaagaggttgaggaccacttctgttgtgggagtagaaatgaggattcaccttaaaggaggatacagctctagcaaccctttgagcaaaatatatgagctgtctgtcatctcgaggaaatagatggcaacatcagaaatgggaagaccacactactccaactcacatctatgtctatgtgcagtaggccctctgttttgatggataatcagatggtctcacgtttttaccatggtgtgccacctgtggccctagctgtgtgactgtctaggatgaagtctgggctcaggttacagtgatgtggataaagtccgttctgcctgagcaccagtgatcatcacgtgcggcggcatattgtagagcccaggacagagtttgacttggagcctgctgagttttttgcagaagcatgtctacgtgcaggagaggacagctcagcgggtaacaccaggactctcttatttgtgttcctttcattgaaggtagttccttccccagaacatggcatagctgcttttgagaaccaatccttgtaagtgacttcctttaatttttttcaataagtagagtttaatctttgaatatgaatggaacacctgagaaaattctttggagtctgaraggaagtagggtatgttggtttctaatagttaggtaaataattagttacataaattgatttcttttccttacttttattcctcagcaggacaaaagtaatattttagacaaggcatggtggtacaggctg

SEQ ID NO: 12274 - DNA, 1243 bp, Homo sapiens
catatttttgccatttaaattttttcaaaaattaaaacctggctcaagttacaagtaaagcttgggttaaggaaagcattcatgaaacactttgttttctgtaaatcagatagtttattgcctggttcccttccaatatatatgtgggctttactctccattcagaatttgattctaatttttaagtggcaagcaaagtcgaattattaattaaagaatcaagacatataagtataccttactctctacatggtgaaggcaaacactttcaaagacaatttccctaatattttaaacctatcacatgaaaactttagccctttggatggaaacatttcactgactttcttcatcagtcccccttttttgccataaaaattcacgagataataaattccagtaaaaagaaaaccacacagtaaggcacagatctttgatagtataaaagaacattatctaatttaatccccataacaaatcagtgacagtattatctcatttatatataaggaacctgaagctcagagatgctgagttactaaagatggcacagctagtaaatggcatgtcagaatctgaacccattgctggatggctctgaaccctttgcccttcccaacattaattcgtgcctttctggaattttgccagccaagtggattttttttaacctaacttaaaatattcaaaaataactaacgttatttaacgtcttattctctaagattttttaaaaaaacatttaaagttatttttgtcatctgttttaatatgtcccaatcccttaagctaagaatctatcatttttactttacccaactatctcgtgatataaattaagcctgtttactctttccaggtcactgaagcaatgcttctttctagaattagagtcatacaactagaagagatggtctgactttgtacagaccatttgtacaccatgtgtagttccatttctaagaagaaacagcaaaatgatctacatgaaaaaaaaaatcaccttacaatttcagatgactttcatgaagtggttttataaattgtattgctgtaccatcattattgttattaatgaagttacatttaggtgttatggtagatttgaccagatgtggcaaacagttgttaccatwgtcttcatccataaaatttgtcaaattagaggttttatggagtatacaactaattgcaagaaattatataggcagtgtatttttaacattttaaatactaacaaaaa

SEQ ID NO: 12275 - DNA, 1243 bp, Homo sapiens
catatttttgccatttaaattttttcaaaaattaaaacctggctcaagttacaagtaaagcttgggttaaggaaagcattcatgaaacactttgttttctgtaaatcagatagtttattgcctggttcccttccaatatatatgtgggctttactctccattcagaatttgattctaatttttaagtggcaagcaaagtcgaattattaattaaagaatcaagacatataagtataccttactctctacatggtgaaggcaaacactttcaaagacaatttccctaatattttaaacctatcacatgaaaactttagccctttggatggaaacatttcactgactttcttcatcagtcccccttttttgccataaaaattcacgagataataaattccagtaaaaagaaaaccacacagtaaggcacagatctttgatagtataaaagaacattatctaatttaatccccataacaaatcagtgacagtattatctcatttatatataaggaacctgaagctcagagatgctgagttactaaagatggcacagctagtaaatggcatgtcagaatctgaacccattgctggatggctctgaaccctttgcccttcccaacattaattcgtgcctttctggaattttgccagccaagtggattttttttaacctaacttaaaatattcaaaaataactaacgttatttaacgtcttattctctaagattttttaaaaaaacatttaaagttatttttgtcatctgttttaatatgtcccaatcccttaagctaagaatctatcatttttactttacccaactatctcgtgatataaattaagcctgtttactctttccaggtcactgaagcaatgcttctttctagaattagagtcatacaactagaagagatggtctgactttgtacagaccatttgtacaccatgtgtagttccatttctaagaagaaacagcaaaatgatctacatgaaaaaaaaaatcaccttacaatttcagatgactttcatgaagtggttttataaattgtattgctgtaccatcattattgttattaatgaagttacatttaggtgttatggtagatttgaccagatgtggcaaacagttgttaccattgtcttcatccataaaatttgtcaaattagaggttttatggagtatacaactaattgcaagaaawtatataggcagtgtatttttaacattttaaatactaacaaaaa

SEQ ID NO: 12276 - DNA, 1298 bp, Homo sapiens
  misc_feature (1)...(1298): n = A,T,C or G
tgctctgactttttacttgcggttatcttttagcctggcctcctatggatcactccttggtcaacataagccattttgtggtaatttttaccctctactgtcaaatatgtatgtggattgaagaccgcttttgtaattcagggagttttgtggttttgctctggatttagccagggwctggtagcttggaagttttgtcaccagtcactcctcagagggtgcagccttcagcatacacagtcttccagacccagctatgagtatattttattttaaagtggatagaatatattattttccagtcagtgatgcattacaggttgtactatacttatgtccctgagtcagtaaggcatcagctctttgctaatcaatctgaatgtggcttgggaaatacttacaagtctgcactacatcttgctctgactggtactgagtaggcagagcggntgcataaacacagccttccagaccccagagatgagtgtgctcttagtgggccactttagctgtatgtttccctgcttctctctgttaaacttctggctggtcgtctttgtttctttgttgctattagttttatgcagctattggccttctaattgttcaccaacaaaaaataatttctgccttacagccatataactgtaatttgtacttttcttacctttacaaagtgactggaaaatgcaagattagccactgaatggataccctaagccaggggttggcaaagtttttcagtagagggacagacagtaaatactttaggctttgcaactcatttggtctcttgcaactactcaattctgtcattatagcacaagagcacccagagctaacacataaatgaatgagtgtggctatgtttcaataaaacattacagttgacccttgaacaatgtgggagttaggggtgccaacccaccgtacagtcaaaaatcccattataagttttgactccccaaaaacttaattactaatagcctacttatagaaaaatgaattttgaaataatgtatttattgcagtgcatatttaaataaaccttgctacttccaattgaatattaatatattgaattgctgatagtaccttcaagttttcttcattgctgtttgctaaattagcctacctttatgctttgatagtattatattttcagcttagactaaactttttaagctttgaattttctttattttgttaactgtagatatcgtgttgaagggataattccagaatcaccagctaaactatctgatttcctctaccaaactggagacagaattacatgg

SEQ ID NO: 12277 - DNA, 1298 bp, Homo sapiens
  misc_feature (1)...(1298): n = A,T,C or G
tgctctgactttttacttgcggttatcttttagcctggcctcctatggatcactccttggtcaacataagccattttgtggtaatttttaccctctactgtcaaatatgtatgtggattgaagaccgcttttgtaattcagggagttttgtggttttgctctggatttagccagggtctggtagcttggaagttttgtcaccagtcactcctcagagggtgcagccttcagcatacacagtcttccagacccagctatgagtatattttattttaaagtggatagaatatattattttccagtcagtgatgcattacaggttgtactatacttatgtccctgagtcagtaaggcatcagctctttgctaatcaatctgaatgtggcttgggaaatacttacaagtctgcactacatcttgctctgactggtactgagtaggcagagcggntgcataaacacagccttccagaccccagagatgagtgtgctcttagtgggccactttagctgtatgtttccctgcttctctctgttaaacttctggctggtcgtctttgtttctttgttgctattagttttatgcagctattggccttctaattgttcaccaacaaaaaataatttctgccttacagccatataactgtaatttgtacttttcttacctttacaaagtgactggaaaatgcaagattagccactgaatggataccctaagccaggggttggcaaagtttttcagtagagggacagacagtaaatactttaggctttgcaactcatttggtctcttgcaactactcaattctgtcattatagcacaagagcacccagagctaacacataaatgaatgagtgtggctatgtttcaataaaacattacagttgacccttgaacaatgtgggagttaggggtgccaacccaccrtacagtcaaaaatcccattataagttttgactccccaaaaacttaattactaatagcctacttatagaaaaatgaattttgaaataatgtatttattgcagtgcatatttaaataaaccttgctacttccaattgaatattaatatattgaattgctgatagtaccttcaagttttcttcattgctgtttgctaaattagcctacctttatgctttgatagtattatattttcagcttagactaaactttttaagctttgaattttctttattttgttaactgtagatatcgtgttgaagggataattccagaatcaccagctaaactatctgatttcctctaccaaactggagacagaattacatgg

SEQ ID NO: 12278 - DNA, 486 bp, Homo sapiens
taagtgtggaaacttcatgaattattgcccttataaaagaagcctaagagagcctgttgccccatccaccatgtgaggacacaacgagaaggtgccatctctgatgaatggatcttcactacacacaatctgccagcaccttgatcttggacttcccagcctccagaattgagagaaatgcattctgttgtttataaactactcagtgtatggtattttgttataacaacttgaaatgactaagacaatggatttaaaagcaagctagtagtttaactgttctaaatagctaacaacacaggtccaaaatgtgaaatgttgcttaaattattaccttcacattgaagctcctttatgctcatgtgtatgtatatactatatatatacwtttttttttttgaggcgtcttgctctgtcccctagagtgcagtggtgcgatcttggttcactgcaacctctacctcccgggttcaagcgattctcctg

SEQ ID NO: 12279 - DNA, 498 bp, Homo sapiens
tcttttggtttcaggcttgagggttagagatgtctgtgacttcaattcccatgtggtatggcagaattctctgtgaggcagcccttctgcctggacatacttgaagcatcacctcagaacttgttagaaatgcaaattataaggcctccccatcaacctcctaaatcagaaagtcagcagactgcaaattctccaatgttccatgctacaaatgttctgcccaggaaggagtgggcaggcatcaccactctctccttcccttggagragagacggtatgtgaatctcattctagttcctcctctcttaatcttgattttttttcctcagatgacaatccttccatctcaagagttctgcttcagagtcacctagaataatattaatagaattagttataagcaaggaagtactcttagttttaaactgggaagtactggaagaaaaaaaagacatcttacctgccacaaaacatttttgcagatgaagtttaaggctt

SEQ ID NO: 12280 - DNA, 577 bp, Homo sapiens
tatgaggcagtttgaacttgccttcctgttgcttgtaaactaagtcgcaacccaagctrctgagaaatctctgcacgtcggatatttttctcctaattgataagaaagtgctcaaaaatagaactgtcatctgacaaatcctggaactaattgccttacacgtagcaggctgctaaatgtgaccagcattctcccctccattcggtggttcccaaggaaacgaggttaatgcattcatgactaacgtttgccttgtcaatcctagttcactgcggtaggcatagagcatgaggggaaagtgccgagaacgtcgtttcatgctttttttcctcttctgctcgaagtacaaacgtctcaaccaaaggttaaacacatgctcagccaaccatcaaaaatcaatcagcatctgcacttgtcccctgcttctaaaggtttgcctgaggatcctactggtaccagaacgttgaggcattcaaactcctcaaccacaaagttttaacaggagttaactctttagcaatgactggttagagttttctttgcatgtattttcacaatttattaattttcttcccca

SEQ ID NO: 12281 - DNA, 1355 bp, Homo sapiens
gatccttggaaggcatagatgcttcaaaaattattttgaaatgtgaaacttaggggactatttgttcttctagatattaagatgtattttaaatctctaataattaaacagaaagtagtaggcttgcaaagcaagtcagtcacatataaaaaaatagctctgacatagattctagtatattttatgtataaaaatatgttttaagtatattaatatataattgtattatatgttaattatgtatgttatataattatatatgttataggctaataaagttatatattatgtaactagtatataattttatgttttaaaattatgttttataaaataatattttatgcatattttatatagcttagtacatgataaagcattgcaaactattggggaaacattattctacacacatggggaaaatagtcataataaagaagccatggaagttcttggtataagaactgagttactatattgccactgtaggaatcattcagttgtaagaaaaagtattcaacctaaattctctatttttctaatttaaaaactgaaattccaaaaaacatacatttttattgtgatcatttagacagtttaattgtatatcttatgcttgcttgatagtgacttgagtaggatatttttacttttaatttgctaagtttttttgttacatcaaggaaaaaggaaaggacaaaatgaactgataattactcaaaaccttggctttactaatgatattaaaccttttagatgaagtagatggaggagatacacaaaagaagcaactcataaatcctcatgtggaacttcgtaagtatgagatattatatcattggtttggggagagggactacagttgagccatctctattatttgagaattctagcttcatactaaataaatgtcccagttcttgaaatgaatattaagtctttatgctgacatgaggtatatttaatcaacagtttataaaatataaatttaatttataaagaaayttaatcaaaagtataatttatttgtaaattatgctcttatttctaatagttaaacatttacttattatgtaatctagagccacagaattttgacagttgcatttagaattgtgtatatgtgtgccagaaacgtattatccagaataatatgtacagtacattttaagatatttattaagaattactataaaagtacaatgatgttaatatggtaggtaacaagtgtaaaattagaactgagtcttttttttatgtgatttttatttttttctctttttttggaaagtatgtaaggatggtcatacgatgttctttaattccccctgaagatcagtttaacaaaattgtga

SEQ ID NO: 12282 - DNA, 528 bp, Homo sapiens
tttcaaatttcttcatcattgcttacatttttaataaattctttttttctctttatttatgccttgatagctacctggtgcaagcctccttattaactctttatttgggctttatcactcagtctgtctctccttacagttaggagtttgtcccacygaatctcagaaaacacaaatctttctatgaaaaagagaatgtgaagaaaagctaaggtgctagtgagcttctatgcaagtatggtttcttaccttcctttacagcttttattaatttgcccacaaaagtttaggcatagaaatgacaactacaatagaaatcttcatttcgtgaaatagtttgagaacacacatgaaaaccggttgacttttcatggaaactgtctgtgaacgcattttacatgccacattttgctcacttaattagccacaagtcaaaagagtaataactattcttcatggaattatggttctacagctagtctgtcttctgactttctctttgcatttccattctttaaaaatatactc

SEQ ID NO: 12283 - DNA, 528 bp, Homo sapiens
tttcaaatttcttcatcattgcttacatttttaataaattctttttttctctttatttatgccttgatagctacctggtgcaagcctccttattaactctttatttgggctttatcactcagtctgtctctccttacagttaggagtttgtcccaccgaatctcagaaaacacaaatctttctatgaaaaagagaatgtraagaaaagctaaggtgctagtgagcttctatgcaagtatggtttcttaccttcctttacagcttttattaatttgcccacaaaagtttaggcatagaaatgacaactacaatagaaatcttcatttcgtgaaatagtttgagaacacacatgaaaaccggttgacttttcatggaaactgtctgtgaacgcattttacatgccacattttgctcacttaattagccacaagtcaaaagagtaataactattcttcatggaattatggttctacagctagtctgtcttctgactttctctttgcatttccattctttaaaaatatactc

SEQ ID NO: 12284 - DNA, 596 bp, Homo sapiens
acagtgtgagtgggaacattgaagaattaactaaaaacaagcattaataacattttctttaaaaagtttgaaatctcaattttctttcctatatcacaggggaaatttgaaactttgacactgaaaaccatcaaagacaagtttttcatgtttttagaggtagctggttttgacctacttccaaatgcaagcattttatagagcctgaattgtataattgaatcccaatgtgttaggagacaccatgatgaaatgccattaaagcaaagaaagaagactgtgaagatattaccaaatgtcaaaaactgaaaagaaaatttagggaatccgaaagccttgtagcttagatcttggctaagtgaatcaatgttcaatttacagtcacatgatatatgccaccttccttatggtagaaagcttttttagggtaatgtgattctgcataactcagtaacattgtcttttatctttcttgtctggttaaataatgtgaaaaacagatacatgtaaacaatgccagaaaatgttcaataatatgcaagtgtaagatttttgtgtcttaaatttccatgttattcaaacttcaagacmattga

SEQ ID NO: 12285 - DNA, 590 bp, Homo sapiens
tgaccatatttcatataatttaagagactattatttataaaactcatctctattgcagggctgctaagctgtgaaaaagatgtgctaaaaattctactgaaatatgatacagttatacaccacataacaatattttggtcaacaacaggctgcatatatgcggtggtcccataagattataatatcatatttttactgtatcatttctatgtttagatacacaaatacttaccatggtgttacaattgcctacagtattcagtaggctgtagcatgctgtacaggtttgtagcccaggagcaacaggttatcccatatggcctaggtgcatagtaagctataccatctagttttgtgtaagcacactctatgacgttcacrcaatgaaaaaattgtctgacgatgcatttctcagaaggtattcaggttgttaaacaacgtatgactgtacatgggttgatgcactatggggacggagcagtgagggagtagaatgagggctgagctttcactgagaccaggtttgacttccaaccctgcccttaattagctgtgtaaccttgggcaaagcatttaacctctctgagccc

SEQ ID NO: 12286 - DNA, 1045 bp, Homo sapiens
tacctttgtgttgttactgagttctcrtgagatctggtcatttaaaagtgtatgaaacctgccccctgcccccccactgtctctcacttgtttctgctttcatcatgtgacatgtgtgctcaccttctgccatgattttagtttcctgaggcctccctaaaagccgagcagatgccagcaccatgcttcctgtaaagcctgcagaaccgtgagtcaactaaacctcttttctttatgaaagaaaaggaaggaagggagagagggaaggagaaaaagagagagggagagatggatggaggaagggagggagggcttacaaccatgaggacagtttttaggtcaatgagggatgacttgggagtcctatgaagactgatgtaaactagaataaagggcatgatgagcttatgattcaaaagtatttcgtcatagaaatagtttgttttctgtaaaagaacacagtaaatattttagctttgtaggccactgagtctctgttgctttaaaaaatgtgaaaaccattcttagcttgagggctggacagtccagggccatactttactgaccgctgcttgaactaaacgctgttagaagcagctctggaaaaataatttgcatggaatcttatgattttttttttttttttttgaggcagaattttgctcttgttgcccaggctagagtgcaatagcgcgttcttggctcactgcaacctccgcctcctgggttcaagcaattctcctgcctcagcctcccgagtagctgggattacaggaaggcaccaccatgcgtggctaattttgtatttttagtagagacaaggtttctccatgttggtcaggctggtctcgaactcccaacctcaggtgatccacccgcctcggcctcccaaagtgctgggattaccagcgtgagccactgcacctggtcaagtattatggttttttaatagtatgcacacatgggacaaaactcaactggtataaaagggtatgcaggagaaaaaaagcaaacttccctctctcccttttctgtccaccagcca

SEQ ID NO: 12287 - DNA, 517 bp, Homo sapiens
ttttttcttttttctttttctttttttgagacagggtctcgttctgtctcccaggctggagcatagtggtgtgatcacagttcactgcagcctcaacctcctgggcccaagcgatcctcccacctcagcctcacaagtagctggagcaacaggcacatgccaccatgcccagctaattttttcattttttgtagagatgggatctccctaggttacgcaggctcgtctcaaactcctgggctcaagcaatccttatgccttggcctcccaatgtgctgggataacaggcatgagccactacaccaagctggtgttttttgttttgtttygttttttggtatttttgtttgtttgtttgttttttaatactttaagttctgggatacatgtgcagaacatgcaggtttgttacataggtatacatgtaccatggtgatttgctgcacccatcaacctgtcatctacattaggtatttctcctaacgctatccctcctctagccccccaacgcctctac

SEQ ID NO: 12288 - DNA, 645 bp, Homo sapiens
ggcatactttttaataaagaaaaagcaaagtcctcattaataaaataatttactaaatagatcataagagtcaagtgaaaatatatttgcatttttatggttagwccacatctaggatggtctgtgagttagaaactatgtaaatctagagactttctggggacagggaaatcaatctagtaacattagcgaaagatttaaatctcgactgaaatcttaaaaaagggcaaaagacagataggtaggtaatgacaaaacatacccattcttgtcaaagacttcaaacccatagatgtccagtaatccaattacagttttcctggtgaaatcctggtcaaaataacacaccccattcatagttaggtcttttcctttgtgctactcaaaactgttgctgctcccctaaactgggacttggcgctaaagctcatatgtcctctgtctccaacaatgcggaaaatctttgggtggaagtaatttccccagcctgctgctcctgcctgctcagatcccactgcagcttccatagccatcacctgtgtagtcagaccttccccttctgattcacttctttgttcaggtgtcctcagcctcccaagcccatgtacaatcaaaaaaaaaaaaaaaaaaaaaaaaaaaagaaga

SEQ ID NO: 12289 - DNA, 553 bp, Homo sapiens
tattttctgaatatttagtcttaagagtaaatattgccctacttttacaacactctgaataacttacaaaaataattcacacacacacacacayatatatatatatatatatatattttttttttttttttttaagttttcaaacctttttccttttttttctttctttttcaagctggcttttatttcatttattattattatactttaagttttagggtacatgtgcacaatgtgcaggttagttacatatgaatacatgtgccatgctggtgcgctgcacccactaactcgtcatctagcattaggtatatctcccaatgctatccctccccactccccccaccccacaacagtccccagagtgtgatgttccccttcctgtgtccatgtgttctcattgttcaattcccacctatgagtgagaatatgcagtgtttggttttttgttcttgctatagtttactgagaatgatgatttccaatttcatccatgtcactaaaaaggacatgaactcatcattttttacggctgcatagtattccatggtgt

SEQ ID NO: 12290 - DNA, 540 bp, Homo sapiens
tcatcaaacactcactccactggctttcctctcaatcacctaacagcactataattgatttttaaatttacaagtcgttttgatgacctaaaatacacactatggaaagaagtattattttagcaattcacaaaagctacattttaatttatacatgggccaaggccatgtattaggcattacttatttcagaaaattactttttttttcctggcagcttttgtgttactatacaaaaagaaattaagtatattctcttgaatgatatatttttatttcttatgaaatgtatgtattatttaaggtcaattttagtggtttaattctgtgatccatgtatttcacggcacatgataaatcctaataaggttagggattagtatcatcttagatacccatttagtggcccctctgacctctttacacacatctggctcttatttctgattctcaatggcggtggtgggtgctaggggtgatgctmtatattaattaactctgagtaactgtcaagaaaaatgataatacacaaatgggaca

SEQ ID NO: 12291 - DNA, 628 bp, Homo sapiens
gataatggctttcatgtcacctcacttgccaagatacactcaaaacccgtcaagtcaggttgtcaaaacgacaccagcagctaaaacatacaaagagcctcggcctccatcgccacaatccctggcggatgcagcaccagaaacagcagccgtggcgtctcaaagtttacgcacgcgtttttcaaaattaaaactatgcatctgcaaatcactctggctggcttaaacctctttttccctttctatgccaacaccggggagaagatcgtcccagacgccattcgcccatttctgataccactgaagtcatgagcaggtctaacaaaataaaacatcacccagccgtcgggaagtagaagactcctgttgccaaggagaaactaagttctgctcctcctaaggcgcaaaaatgacctcgagatctccccagaaggaagcagagaggagggagwtctgccacatggagagggttttgctgggctagggagacaccgccgggctcagcctttcccttcctttctctaactttccctcatttcgctccgcaaactgagttatatctcggggctgtggaaggaatccaatttggggaactcagcagcaaaccttcctggcccagggcgcagct

SEQ ID NO: 12292 - DNA, 541 bp, Homo sapiens
caggtggtgagtttcaggaaaccctgtgacaggcaggttctggcaaaactatcaacctcatggaaagccagctacaggttgtaataattttggaatggatgggaccactttctcttattccagtttggtaaataatatatattgggaatatgctacatgtcacacactaactgtgtacggtcttttgcataattatttacctattattatttaagcctcacaagaatctattaggtagggactattattatgtccttatatagacaagaaaaccgaggcycagtcttcttgatttacttgcctaaatttacacagttaagtagaaccatgatggcagaaccaggatgcgaagaaagaccaccagatctagagcacagtgtagcactcttaaccactctcaggccttggttgacctcagagacgggaggaggatgacagcttgtgtgatgcatgacagcagtaaagtcaagagttcaggggatggcttgagagttgtaacctaaatgatagaggtacaataggagtcctgagctgggcacat

SEQ ID NO: 12293 - DNA, 617 bp, Homo sapiens
atcccttttattctttttctccctggactttgaagaatccctacagaggtggcctcactcctcaaaacaggtttgattgagcaagatttttttcaagacagtttgctggcttgctttcatgaagtctatagagaacccttttctctgctgyccatgatggtatagctggctatggggcacagcctcacatatttacactctcgaaggcatgaatcaagttccagtccctgtgtctcacaaagtcatggatacttgttttcttagattgagtttcttaaatcaaagcttgaagaagggatttcataacatttagcttattgaggctatctctcaggagaaagacagagaaacaggagagcgaaaaaggaacagattttaattggtgtctagtttcagctgatccaacgagggtgtctggaacatgaattgccccacagaattgatctcaatgtaaggcaagggagctcatgctttgcatcagttatcattgactgcagaaagcatctagggtagagaaatgtaacctctgagagggagagagaaaaagagagagagagagctattatgttgtcagtatacaagctcagggagagatctgagcaggacactaacagcat

SEQ ID NO: 12294 - DNA, 592 bp, Homo sapiens
ttctatcagtttaatattaaaacattcagttaattagcattttatttgttgtagtctagttatttgatattttaatgtcatttattttgttttttatatttaatgaaagaaaactggcaggtttgtttcatctgttgtccagttaggctcacttgactatactgcccttccaataaaacctagaaatagtctgttttatctaaaaaattataatttataatctaatttgcaactgaagtatatactatgtgcttttaatgtaccttagttatatgccaatggtcataaataagaagagataagaaagtgtttagaccttaggacatgtgtttcattattactgaaaaatcattcaaaataccaagcagattaaatgagcacagtgrtaggcacatgggacaagaatttgaataaaatacagctttaccagaagaggctcacaagggaaatagtagcgggtgggtttggtatggacgtaggggtagactgacatacgtgggtttctattgcacccacacttcctggatcatagctcttctaaaacacatttgcatttgcttggtgatgtacctgtattccctagtaaactgat

SEQ ID NO: 12295 - DNA, 592 bp, Homo sapiens
ttctatcagtttaatattaaaacattcagttaattagcattttatttgttgtagtctagttatttgatattttaatgtcatttattttgttttttatatttaatgaaagaaaactggcaggtttgtttcatctgttgtccagttaggctcacttgactatactgcccttccaataaaacctagaaatagtctgttttatctaaaaaattataatttataatctaatttgcaactgaagtatatactatgtgcttttaatgtaccttagttatatgccaatggtcataaataagaagagataagaaagtgtttagaccttaggacatgtgtttcattattactgaaaaatcattcaaaataccaagcagattaaatgagcacagtggtaggcacatgggacaagaatttgaataaaatacagctttaccagaagaggctcacaagggaaatagtagcgggtgggtttggtatggacgtaggggtagactgacatacgtgggtttctattrcacccacacttcctggatcatagctcttctaaaacacatttgcatttgcttggtgatgtacctgtattccctagtaaactgat

SEQ ID NO: 12296 - DNA, 840 bp, Homo sapiens
aagccccaagagggcaggggctatgtctgactgttcattttatccccagttccgagcaaagggcagggcagctaggaagtgcttggtaagtatctgtggactaaatacctgcatgttttgcagaatagttccaaacctctttagtcttgctgctctgtaaccaggtgactcctcctgacccctcttctcttaggcaggggctgcctctcctgcatgagacccatggggtgactcctgacagccccattacataaaatgttccacatgacatgtctgctttgccctattttcagcaacctcctgaagatctattaatatccatatccatcatttgcttttctatgggaacctttcaatgtttcctaatctcccctgaactttcctaaagctgaatttttagggtcttcgtgtacatccttgattcctyctggcccacaaggatcttcaggagttactctttttcactttggacgctgcatcatagtgtcttacgtcactcagatgcttttgcgtattggtgtttgtggtctcacggtaatctcaggggtggctgggtggagtatgtgagatcatctctgttcacgatgagaacataaggcccagaatcaatttcccaactcctgtcacagcctcctgcttgcttctgttccctaatcttaaaaccacttagaaacaaaatcctgcatccaaacctcggtttctttgagtcttcccaaagcactggtgagaacactggacgggagctcagttacctggtttcatgcccttctaagacatctcccatctctgggtctcacttcactgactttgcaaaatgagaagtttggaccagattattga

SEQ ID NO: 12297 - DNA, 840 bp, Homo sapiens
aagccccaagagggcaggggctatgtctgactgttcattttatccccagttccgagcaaagggcagggcagctaggaagtgcttggtaagtatctgtggactaaatacctgcatgttttgcagaatagttccaaacctctttagtcttgctgctctgtaaccaggtgactcctcctgacccctcttctcttaggcaggggctgcctctcctgcatgagacccatggggtgactcctgacagccccattacataaaatgttccacatgacatgtctgctttgccctattttcagcaacctcctgaagatctattaatatccatatccatcatttgcttttctatgggaacctttcaatgtttcctaatctcccctgaactttcctaaagctgaatttttagggtcttcgtgtacatccttgattccttctggcccacaaggatcttcaggagttactctttttcactttggacgctgcatcatagtgtcttacgtcactcagatgcttttgcgtattggtgtttgtggtctcacggtaatctcaggggtggctgggtggagtatgtgagatcatctctgttcacgatgagaacataaggcccagaatcaatttcccaactcctgtcacagcctcctgcttgcttctgttccctaaycttaaaaccacttagaaacaaaatcctgcatccaaacctcggtttctttgagtcttcccaaagcactggtgagaacactggacgggagctcagttacctggtttcatgcccttctaagacatctcccatctctgggtctcacttcactgactttgcaaaatgagaagtttggaccagattattga

SEQ ID NO: 12298 - DNA, 567 bp, Homo sapiens
agctcactgcaagctctgcctcccgggttcacgccattctcctgcctcagcctcccaggtagctgggactacaggcgcccgccaccatgcccggctaatttttttgtattttttttagtagagatggggtttcaccgtgttagccaggatggtctcgatctcctgagctcgtgatccrcccgcctcagcctcccaaagtgctgggattacaggcgtgagccactgctcctggcctgtagagcatatttaatttatactcatttgattttgctttccacaacaatttttggtaaacacttcatttatctgtgaattatcaggcccagacctgacgtcaaataatcagtttgaataatgcttacatagtatttattcaaatgtgccaggtattgttctatgtgttttatatttattaactcagttaatattcataggaagtctcttcatgatgctgttactatttgtgttttacaaatgaggaaacaggcacagaaatgttaagtgccttgcctgggttcaagtggtggagccagaaattaagctaaagccccctgctggcaggatcca

SEQ ID NO: 12299 - DNA, 948 bp, Homo sapiens
tttcttttgaagttatacctatccttcacttaatgactaatttattcctaaaaactttgctgctaagtgacaaacctgcatatgaaaaaaatatttctattaattttaatgagaaaatacatcatttatctcaatccaagacacgtgaataattttaatagaaaaaaaatcaaccaaataaagaaaacatatttatgtcagtagtaaacaacaattttttttttttttttgagacggagtctccctctgtctcccagactggagtgcagtagcatgatcttggcccactgcaacctccgcctcccgggttcaagcaactctcctgcctcagcctcctgagtagctggggctacaggcacgcgccactacgcccggctaatttttgtatttttattagagacagggtttcaccatgttggccaggctggtctcaatctcctgacctcgtgatccacctgcctcggcctcccaaaatgctgggattacaggcgtgagccacagcgcccagcccaacaagtttaatgtaaataaatattatgtgcatagaacttcgtgtaatgtagatatgttgccttccccaaaagaggaactcaggacttgaccatcggggaaggggcatttttcatcttgcaccattgtcctcaccaatttttcagtcttttgggagctcatgattacagtgccctcaaactttacagaaaataaacttatggcaccccaaatacgtttgaaacaaaattaaggctaagcaagggcgtttcctagcatggaagcatgcatggaattaagatgctggctctgccgccgaccaggaggtggygctgtcccacacagaccagaggcagctgcttccacgtgaggcctccggctgggaactgcgcatggagattttggggtgtgtctttgctggaaaccctaaggtcaagtattacttcttacagtgtactt

SEQ ID NO: 12300 - DNA, 551 bp, Homo sapiens
atggaaacagactctggtgcctggggaacagtagcagagaaggactttctgcacaaaagttgcaaaaacaaaagggatgacctgttttgacgataattgctttcaggtcttaagcgctcctcttttctgcatttacctctcccagcatttatagtgtagctggagacgtcactgattactgagccagtctaagccatgaggatggaaattgctgacatttgtaatgttttgacatattcaagagaagagaaaaatagtccaaagagtggggctgccaatcttgttgattataaaccaaccttatgactgaatgaggcatggcaaggttctcagaaagattcatgcactggaatctcakgaactgacatacatcatgctccagttacaggtcaattacaatagtatgacaatttttgttataaaattatatatttaatattcaacagaatatacaaacacatacagatgctaatttgtatgtacaataaaatatacaattaaatatgcaaacatgcaagtactatgttgatgtatagtattacatatattat

SEQ ID NO: 12301 - DNA, 559 bp, Homo sapiens
atccaggttgctgcgaatgaaggcatgtttcttaatccatagttctaagaacttaccaaacagaagactcaataatatttatttgttgcatacaggagtaaaagttagattaatcaatggatacaggaaaaaaatggctttaaaatgtttcagtacaaagagttaagacttgtattgataaccatccctagctactctacatgraaagttgggagcctttatgtatattctcagttgtccaattcccaatacagatgtgggaagaggcccattgatgtgatttggctctgtgtccccacccaaatctcaccttgaattgtaataatctgcatgtgccaagggtgggaccaggtggaggtaactggctcatggtgggggtttccctcatgctgttcgcatgataatgagtgaatctcatgagatctgatggttttataagcatctggcatttcccctgcttgcactcattctctctctcctgccaccctgtgaagaggtgccttctgccataaccttaagcttcttgaggcctctccagccatgtggaactgtgagtcaa

SEQ ID NO: 12302 - DNA, 507 bp, Homo sapiens
caaaactttttttttttttgggaaattctccatcttttcagccgcttagtgcatctctcccctcttggctttgatgcctttataattgataattttaagtccttgtgtgctaatttctgtatctggattatttacagatctgcttctattgacagctttttatcaatcattagtcatgtttccctagttcacattcatctaagttctgattacaggaaagtcgtcgtgtatacaaagatgatggaaactaaagttgttgctactgtttctctgacaatttctgcctctccctacccacctttttttggaagatggggattaggtgctaatcacygcaacacaattcaggattgagctgatttgagtctggggtacaacatgagaagcagtgcacctgttttccaagtctgaagactgaagccagacggtgggcctggcaagtggggcagtgggagatctcattccctctctagtgcctccacccttcttgtaccactgcagaagcca

SEQ ID NO: 12303 - DNA, 544 bp, Homo sapiens
agggctgggctccttatgcgtgagttrcacgcctgagtgcctctatgggttttgtggctcgtggcttttatgaagggaccagaatgttaggaactctggagttgggaattgctgcaggagaaccgtgttccgcatttcgttcttctagagcagaggttggtaaagcacggcccatgggtcaaatctggtccaccatctgcctctgtcagactttcccgggcataggcagttggtttacatactggctgtggctgctttcacaccaccacagcagcgagtggttgcgacagacgtcgtaaaacccgtaaagcccgagatatctgccactgggctctttacagaaaatgtttgccgacccctgttcggagcaagctttgtctaaaggactttatttcatttagtgacagtgagataatttattgctgcaaagaacttatagccaaatatgttctattttgtctggtgaaacagaatggcaagagctttttagatactttgaggtttgggaacagcaccgttgagggtgagaagttggttttgatgg

SEQ ID NO: 12304 - DNA, 581 bp, Homo sapiens
gaaagggccttattctctctttctcatagactgaccttcttttggaatttctgagtcatttattttccttagctttttccactcaaattaagggcaagcgaaaaagtaataatttggcattctttaagcctacagaatgtgattctttcacttgtttattacactggctcgtggacagaacaatttgaaaagtgaaagaattattttggtaaaagattttgctttacttttcgaagcattatttttttaaagagtgttttactccaacgattgaaacattttcctatttaaatttcattgttagaatcacaggaggcaaaaaatggaacggttgaatgaaattttactctttctgtgaaagaaaatccacagagttgttgcctccgttgtagttggtgggccccgttagcattggatgcctttgccaaatggttcatgtggacacacaaaggcaaacagatctgccatsgatcgcagatttctgtagaaacacggatgtgcatgtgcagattcccttttgcaggtattaaaaataattaaaaatagtcctgcctgaggttgcagtgagccgagcttgcact

SEQ ID NO: 12305 - DNA, 581 bp, Homo sapiens
gaattgaacaatgagaacacttggacacaagatggggaacatcacacatgggatagcattaggagatatacctaatgtaaatgacgagttaatgggtgcaggacaccaacatggcacctgtatacatatgtaacaaacctgcacattgygcacatgtaccctataacttaaagtataataaaaaaattaaaaatgtagttgggcacagtggcatatacctgtagtcctagctacttgggaggatctcttgagccaaggacttccaggttgaagtgagctatgattgcacactgcactccagcctgggtgacacagtgagactctgtctccaaaaattaattataaaaaaaaactacggagggggagttcattagaaggggaaactgttaaattttattcatatacttttaaatatcttaaccaattataattgtaacctaattttccattaatagacagtatatagccatatactcaggatgagaaaggagataattagacatgggtcaggggtggggttgatcttcctctcctttctcaccctctccacagaagaccaagaaagcttccatctctcatgg

SEQ ID NO: 12306 - DNA, 551 bp, Homo sapiens
gatgaaaccacgtctctacgaaaaatacaaaaattcgctgggcgtcgtggcaggcgcctataattccagctacatgggaggctgaaataggagaatgacttgaacctgggaggcagaggttgcagtgaaccaagatcatgccactgcactccagtctgggccacaaagagtgaaactccatctcaaaaaacaaaacaaaacaaaagaacgtggtctgacctcctccacctttgctttgtgcttccctccagtggaattgccatttgtctgttgtctcgcccttgctctgctcctacttcacccatcttctgagatccaagtcaaaatcatctgcacggtgaagtctttcccagrcagttattcaaggcaggacagatcacactctcaaacttccaaagctctttgtactaattaccagggtgtattatattaaatcatatcggctttcttgcctctccctctctgacctaaaaactccttgagggcagggactgtgacttttcaatctttgtatccacaagtgcctggtaccatgctggccacatcttgcc

SEQ ID NO: 12307 - DNA, 551 bp, Homo sapiens
gatgaaaccacgtctctacgaaaaatacaaaaattcgctgggcgtcgtggcaggcgcctataattccagctacatgggaggctgaaataggagaatgacttgaacctgggaggcagaggttgcagtgaaccaagatcatgccactgcactccagtctgggccacaaagagtgaaactccatctcaaaaaacaaaacaaaacaaaagaacgtggtctgacctcctccacctttgctttgtgcttccctccagtggaattgccatttgtctgttgtctcgcccttgctctgctcctacttcacccatcttctgagatccaagtcaaaatcatctgcacggtgaagtctttcccaggcagttattcaaggcaggacagatcacrctctcaaacttccaaagctctttgtactaattaccagggtgtattatattaaatcatatcggctttcttgcctctccctctctgacctaaaaactccttgagggcagggactgtgacttttcaatctttgtatccacaagtgcctggtaccatgctggccacatcttgcc

SEQ ID NO: 12308 - DNA, 551 bp, Homo sapiens
gatgaaaccacgtctctacgaaaaatacaaaaattcgctgggcgtcgtggcaggcgcctataattccagctacatgggaggctgaaataggagaatgacttgaacctgggaggcagaggttgcagtgaaccaagatcatgccactgcactccagtctgggccacaaagagtgaaactccatctcaaaaaacaaaacaaaacaaaagaacgtggtctgacctcctccacctttgctttgtgcttccctccagtggaattgccatttgtctgttgtctcgcccttgctctgctcctacttcacccatcttctgagatccaagtcaaaatcatctgcacggtgaagtctttcccaggcagttattcaaggcaggacagatcacactctcaaacttccaaagctctttgtactaattaccagggtgtattatattaaatcatatcggctttcttgcctctccctcwctgacctaaaaactccttgagggcagggactgtgacttttcaatctttgtatccacaagtgcctggtaccatgctggccacatcttgcc

SEQ ID NO: 12309 - DNA, 1180 bp, Homo sapiens
cttaacacatctggtgcaagctgtgagagtagaattattggtgtatatgccacaaaaactgatggaacagacgctattgaaaagcagctgggaggaagaattcacagcaaaggcatttttaaaaggtatgtccaaatttaaatgtgaaaaagaacaaaataaagtcttggtctcttttaagaggtgtttctgaatgaaatgtgcttgactagaaaagaccattaacacctctcaggagacacagtgagccatcatagcagttgagataggcctgcttcatgaggaaattataattaagatcatttcccatacagtatggataagctgcatgccatctgcatgatctagtgcagtggttctcaactgggagtctgcatcagaatcccctcccctgagaggcttaaaaagaaaagaagagaaagaaaaaagaaaagccacatgcctggtgtcttcctagaccatagaagcattggcagaagaagtcagcaggcctactgagtgactcagggctggcctgccttggtgtcttcttctgagaaatgacgaagcacttgctggtcccttccagctttagaattttatgacttgaacatgttaaattcttaagagttattacttaatatttttcctataatcttatttacactggttaattctcttagcaatttttaaaaaaattctctggcagatgggattgggtcgaatattagtgactaatgaaggatcatataagcttgccttttgagattattaaatatgtcatcagtttctgaattctttacagatagggatgcttctatgtaagatgtgtaagtgcctggcataatgctggtgaaacgtgaatattttctaagttcattggagttcgctgattttttttaaaaacttgatattaaagatgtgttgatttgtctacatggtgcatattgtggaattaataaaatactatgataaaaaragatcaaaatataggttagtatattatataatgtgtacatatgtatctgtgtaagcatatgtatacttaaggatcacagaacaactactcagtgcttacatgttttttcccttaattaacaagctcttattaaatgtatattagctgtatgtatatatgcacatccatacctaggtagtatattttcattactctttgcaatatttctagagaggcgggaaa

SEQ ID NO: 12310 - DNA, 551 bp, Homo sapiens
tcacagtattatgcagtcagtattaatacctctgtaccacagatgggggaattagggttctacgagtctaagagaatgtgtaacttatccaaggtcacagaagtagaaaattgtgcagctggactgtttcactccaaagcctgtgctactaactattttatgatgggtggcgttttgataggcagaaatgaaactcggaagatgaggtgatttcaatagatcaggaagctagcaattttatatttcttacttgatgttctaacaagctgggatttttgtagagagagatggaagttggaacatatattgaagtccagctgtgaatttctttctgaggggaaggagatatactggggaaaccagatctgctttgggagtttacgtctggtcttagtggagtacgaggctgaagggagacagtgtaggcagagagactagtgtggaggccactgcaattggctgggtgggaggccacaaaggccagagcagagaagctgaggagggaaaggccactgrcgccctcagcaccctcaggtgaggtcctcttcccc

SEQ ID NO: 12311 - DNA, 530 bp, Homo sapiens
aaatagagaattttctcagcagtcaggtatgttctmtaaataaatctggacgatgaatcttctgctttgagacttcaaagcagccctggaggccgggcttggtggctcatgcccgtaatcccagcactttgggaggccaaggcgggcggatcacctgaggttgggagttcgagaccagcctggccaacatgatgaaaccccatctctactaaaaatacaaaattagccgggcatggtggcacatgcctgtaatcccagctactcaagaggctgaggcaggagaatcgcttcaatccgggaagcagaggttgtggtgagctgaaatcacaccactgcactccagcctgggcaacaagagcgaaactccgtatcaaaaaaaaaaaaaaaagcagccctgggatataccaacataagatgacacataaactttagcccttcatgtgaatctaagcagcgtcaccatccttgtctcccacttcctttcttcaacctttcctgaaaagaaagccctgtagagaatgcctggatgt

SEQ ID NO: 12312 - DNA, 554 bp, Homo sapiens
tgccactccaagaaccctcctgrcaaaccttccttcccccactcagtcattcagtcacttggagataaaggtaagttcttttgaaaatacaaccacaataaaaatttgactccatgtctttttccctctcaggccttgttggtggctcatttgttggaacattcttcattgtaactgaaattccttgttaaaaactgattttagggtgggccgcagtggctcatgactgtaatcccagcactttgggaggccgaggcaggcagatcacttgaggtcaggagttcgagaccagcctggccaacatggtgaaaccccgtctctactaaaagtacaaaaatgagctgggcgtggtggtgggcgcctgtaatcccagctacttgggaggctgaggcacgagaaatgcttgaacccagtaggtggaggccgcagtgagccgagattgtgccactgcactccagcctaggcaaaagagtaagatcctgcctcaaaggaaaaaaaacctggattttagattgttttttacaatgagacttgtgcaatactatgcactggtc

SEQ ID NO: 12313 - DNA, 554 bp, Homo sapiens
tgccactccaagaaccctcctggcaaaccttccttcccccactcagtcattcagtcacttggagataaaggtaagttcttttgaaaatacaaccacaataaaaatttgactccatgtctttttccctctcaggccttgttggtggctcatttgttggaacattcttcattgtaactgaaattccttgttaaaaactgattttagggtgggccgcagtggctcatgactgtaatcccagcactttgggaggcygaggcaggcagatcacttgaggtcaggagttcgagaccagcctggccaacatggtgaaaccccgtctctactaaaagtacaaaaatgagctgggcgtggtggtgggcgcctgtaatcccagctacttgggaggctgaggcacgagaaatgcttgaacccagtaggtggaggccgcagtgagccgagattgtgccactgcactccagcctaggcaaaagagtaagatcctgcctcaaaggaaaaaaaacctggattttagattgttttttacaatgagacttgtgcaatactatgcactggtc

SEQ ID NO: 12314 - DNA, 605 bp, Homo sapiens
ctgttgccttccacttttttctcatattaactacttgggttttgtagatatttgaatttgtgaccccatgctggagacctggccactctgtaatacccagtccctacctaaccatgccmcaccctcatgcccctctgtgccacattgggcatgctgttgtctccatctggaactccttccctacttttccatatttcagaaccctatttgcctgtcaattgccagcttagacactacctcctcttttttaaatatcccccaataaaagtcagtctttgtcttctacggtcccataacacagcacttgtatgtcatttggactctacgttactccaggttgcaacacagttgacatttctatgtgtgtctcctcaatgaaaggaactttaaggtagaataagtagtttccttcagcctcacagcctgccttccccttggtgccttgcacatagtgggctcttcattactttctcttgaagtgcaatgaaggatacaataaatctgcaactccacttcaggggctactttgctttatatttattgtagggcatcttttgattatgctatggaaggaacctcagtttgtatgggacaagactacttga

SEQ ID NO: 12315 - DNA, 565 bp, Homo sapiens
gaaatgaggctgcaaggccactcctgcaattagacagttcacattctacatgcattctgggggaggtgagggccaaaatccaacacaggctctgcccaccagrctataggccagtctttgtcttcccaacgggactctatgggctaataggagcctgtcatcgtcatatccactgctgccaccacttgagccttccctagggaagatataaagtgaaactaatatctgagcccacttccttcttttcttcgtggagcaaccaaggatgctgggtagatttccctctgaattaagccctcctgctaactctatgggagcctgtttttcaagctgtttctgtctgggagcttcttattcccccaaatttcacttttggtttttagtgtcaggcctctgagcccaagccaagccatcgcaacccctgtgacttgcacctatacgcccagatggcctgaagtaactgaagaatcacaaaagaagtgaatatgccctgccccaccttaactgatgacattccaccacaaaagaagtgtaaatggccagtccttgccttaagtgatgacat

SEQ ID NO: 12316 - DNA, 565 bp, Homo sapiens
gaaatgaggctgcaaggccactcctgcaattagacagttcacattctacatgcattctgggggaggtgagggccaaaatccaacacaggctctgcccaccaggctataggccagtctttgtcttcccaacgggactctatgggctaataggagcctgtcatcgtcatatccactgctgccaccacttgagccttccctagggaagatataaagtgaaactaatatctgagcccacttccttcttttcttcrtggagcaaccaaggatgctgggtagatttccctctgaattaagccctcctgctaactctatgggagcctgtttttcaagctgtttctgtctgggagcttcttattcccccaaatttcacttttggtttttagtgtcaggcctctgagcccaagccaagccatcgcaacccctgtgacttgcacctatacgcccagatggcctgaagtaactgaagaatcacaaaagaagtgaatatgccctgccccaccttaactgatgacattccaccacaaaagaagtgtaaatggccagtccttgccttaagtgatgacat

SEQ ID NO: 12317 - DNA, 306 bp, Homo sapiens
ttatcctttcttttccaactaggaaaagagacagagattttggaaattgtgaagaaaaaggactttctactcaacagaaaaactgaaagaatataaataaataatcactgacaaggaaatatagttaagcaatatgaaaaatgcccaacttcattcttaataaaagaaatgcagattgaaawtttttttaaaaatttaatctctatgttgatcatctgaacattaaaaaataatgtaaagagaataatttatgtttgatatggatttgcatatttaattctgtttcctagacatatcaccctctaa

SEQ ID NO: 12318 - DNA, 538 bp, Homo sapiens
ttttcctaagaatctggtttgttattatcctatgggtgctgctactgctcagatttccctatttgcctttgctgctaagaagtttatagactaattkgtggcccatcgctgggaatgcatacacaggattgcagtttgaggattaatcttacctccaacatttttattttcatacccctattttccctttgcccaaccccctatattttattgtatcttgctgtttataaactgccccaggtttgagaccagttgaggtctaaatttattaattaatagattaacttattttaaagtgttatgaggccgggcacgattgcctgtaaccccagcactttgagaggccaaggcaggcagatggtttgagctcaagagttcaagaccagcctgggcaatgtgacaaaaccctgtttctacaaaaaaattagctgggttagctagttgtggtggcacactcctgtagttccagctactcaggaggctgaggcaggagaactgcttgtgcccagaaggcagaggttatagtgagacaagatag

SEQ ID NO: 12319 - DNA, 540 bp, Homo sapiens
tgggggcttgaatggtgaacagtgaatgtacctgcaggagagccttccagctgccccaagggttccagactgtagaaaatcagaatgcagaaagccagacattgaagtgatgagagggagaatgccatgatggttgacaagatgtctgggaaggcttcacaggggagcgtcttcccaagtaggctgtgggaggtggaygcagcagggagggcaggctattaggggatctggttccaggccagacttaatggctgtgtggcttgaatatggaggttgacctctctgaccctggtgctcctcatctgcaaaacggggtcaatagttcttacctcgcaaggttttgcgagcatcaccttcaataaaatagtttatgtaaaagtacattgtgatctacaaatttaaaaaataaatgttggatgttactactaccagataagaaagaaaagatcagagaataagtggcttgccagaggtcacatggctggtatagtgacagccaggacccaaacagaagtctctcctttcctttgttctgtgttg

SEQ ID NO: 12320 - DNA, 723 bp, Homo sapiens
gagaataaagtttaaaggaaactaaagtgatacttgttttaaatctttaggacaccccttcatgcggcagcatttgctgatcatgtggagtgcttgcagcttcttctgagacacagtgctccagtgaacgcagtagataattcagggaaaacagcactgatgatggctgctgagaatgggcaggcaggcgctgtgggtatgtgcttgttgtatggactttgcccttatgcccatgcaaaaaccaaaataatgtcaaatcaagaaatcagttgttctcatagtatatacacgtggaaaagggccattagcagttttacttaagtcacctgattctacctgctcaagcgtctttcagttccctgttttttgattcttggtggaccttgtcaaagagctaacccttctgcaatgaaattatcaacatttagaaaccaagtgtaacaacagaatcattttaactgggaataatgaactgtaaaagcagttaaaattagtgcctattaaccttggatttggatagcacagatatgagaataaattactcccttttttctttaaatacattaaatatgattatgtgaactgtactaatttaaatatgttattgtgtttrtagtaacttcttcaaaatgcatgtaattagcatctcatctaagtaaccctcttttgggctttttctacagatattttggtgaacagtgcccaggctgatctgactgtaaa

SEQ ID NO: 12321 - DNA, 534 bp, Homo sapiens
cagtcacatacctacaagtgctgaccaagctgggcagttttagttagaatccttcttttgatatgtcttcatttaattttgtgaagtctctctttttctttgctgatatttctggggtaatattataaatttagtgggctgttagaaaaattttatggactgacatatttggggaaactatttgtattatgtattagcattatgtattctgactggaaaatgacagttttgcaaatcagkttcccagaatacatttgaagagtttctaagctatttgtcttgattatattttaatataattcagtgtaacccttggtgtgaaagatctaaaagctgtttcattttccgctttaggaaattatttatgcatttgttttaaaggcaaaggaatttttttcatttaagattcttaagccgggcgtggtggctcatgcctttaatcccagcactttgggaggccgaggcagttggattacttgaggccaggagttcatgacccgcctggccaacatggtgaaaccccgtctctactaa

SEQ ID NO: 12322 - DNA, 579 bp, Homo sapiens
accatggcaacctgacctcattattgtagggaagttgtaacaatacaacttccttattgcagttgaggaagggaagtaaaatgragacagaattatcagctcaggtagaaaggataaaaagaagagctcctgtctgttcagcaaagacaagacagccatgaaagtatcataggacaagcttgtatagcccaactgcttccctcttaccaaaatagaaaaggaaaaaaaaaaaagaagaaagaaatccagcttatggtttaaactgtgcaattatagaaaccaccagaacctttgataattctttggcattttaataaaatccaccgttaatatttaattttaataattctagttattctttccaaattcagcaccctctctgagcacaaacttggaaacttttttcaaagctgttacaatgaataaatgcggaaattaagctctactaatttttttttttgcttaggcataaaacttcctttttatagctcttttatggaattgctaggaatttgtgtgtataaactatttacaaatagagggcttgctttattattttaggaccaagtgagatctcag

SEQ ID NO: 12323 - DNA, 571 bp, Homo sapiens
gggatgaagtggagccatgggttagtctggctcatactgaagaagatgtaaagggcaataggtatcaagtgaatayacaggaaataagtagcagcatctcctagattttccacaggatctcaataccactgaccccaccaagaggtgtcattcctccaccacctcttctatcctctcctggcaatttccttggcttcagaataacaaggtgttccccaacattgaatggatttcccagagaaaatgtaatgctacaggaaatgcataggatcggaaattccagggcccaggtctcaacatcagctttgtcattttaccaaccaactatgtgagtaaacaagtatttcctgagtcttggtttgcttatctaaaaaaataaaagagaatgaggataatcatgcctatctatatcatcaaacactacacaaatgtttgtccctatcattcgaagttctccgtatggtagaagagtaatcccagttttccccatacaccagagaactctgtaattctcacaaatcctggatgttcagattgaaaatgatctcaggcatggctcctccatatactc

SEQ ID NO: 12324 - DNA, 571 bp, Homo sapiens
gggatgaagtggagccatgggttagtctggctcatactgaagaagatgtaaagggcaataggtatcaagtgaatatacaggaaataagtagcagcatctcctagattttccacaggatctcaataccactgaccccaccaagaggtgtcattcctccaccacctcttctatcctctcctggcaatttccttggcttcagaataacaaggtgttccccaacattgaatggatttcccagagaaaatgtaatgctacaggaaatgcataggatcggaaattccagggcccaggtctcaacatcagctttgtcattttaccaaccaactatgtgagtaaacaagtatttcctgagtcttggtttgcttatctaaaaaaataaaagagaaygaggataatcatgcctatctatatcatcaaacactacacaaatgtttgtccctatcattcgaagttctccgtatggtagaagagtaatcccagttttccccatacaccagagaactctgtaattctcacaaatcctggatgttcagattgaaaatgatctcaggcatggctcctccatatactc

SEQ ID NO: 12325 - DNA, 571 bp, Homo sapiens
gggatgaagtggagccatgggttagtctggctcatactgaagaagatgtaaagggcaataggtatcaagtgaatatacaggaaataagtagcagcatctcctagattttccacaggatctcaataccactgaccccaccaagaggtgtcattcctccaccacctcttctatcctctcctggcaatttccttggcttcagaataacaaggtgttccccaacattgaatggatttcccagagaaaatgtaatgctacaggaaatgcataggatcggaaattccagggcccaggtctcaacatcagctttgtcattttaccaaccaactatgtgagtaaacaagtatttcctgagtcttggtttgcttatctaaaaaaataaaagagaatgaggataatcatgcctatctatatcatcaaacactacacaaatgtttgtccctatcattcgaagttctccgtatggtagaagagtaatcccagttttccccatacaccagagamctctgtaattctcacaaatcctggatgttcagattgaaaatgatctcaggcatggctcctccatatactc

SEQ ID NO: 12326 - DNA, 519 bp, Homo sapiens
tcagtattaagaaatgaagacccatataaataaaaccataaagtaacacaaagatttgaataaatggaagacacgctatttaatggaaagaaaaattaaaaggtttgaagtcaacttttccaaataacattctctgtattgccaatcaaaatctcaatgagctcgttaagaattgacaaaatgattctaatgttcatatagaaaaataaaaatgctggccgggcgtggtggctccagcctgtaatcccagcactttaggaggccgaggcaggcggatcacctgaggtcaggagttcgagaccagactggccaacatggtgaaaccccgtctctactaaaaatacaaaaattagccaggttttgtgatgggtgactgtaatcccagctactcgggaggctgagacaggagaatcgcttgaacccaggaggcagagtttgcggtgagccgagattgcaccactrccctccagcctgggctacagagtgggactccatctctaaataaataaacaaataaat

SEQ ID NO: 12327 - DNA, 532 bp, Homo sapiens
attacaggcgtgagccaccactcctggccaaatgaatgcttttgaaaaattacacgttatacacttttggggttactgaaaaatagctaaaatccccaaggttaagtcttcaaatgacaagtctactataatacctacttcttaattttgttgtaacaatcagaaaatgtaacataggtagaagagttagaacatagtataatcaatawatatgacactccttccttccaaaataatgtttgttggataaatcaaggaatattggtaagagaattgcttctgttcatgtagaagtatgataagtgtaggcggtcgttggacattttttctagaattctctagactcatcaccttggaaacattggttgtgcccatacattgggtctgtggccatataaggaagaagccaggtcacaattgcctgttcacccctcctcactcctccctcttcttgattctctatgagggaggatttgagcttatctgcagtatgtatatagagaggagggaggttttattttttaaattcatt

SEQ ID NO: 12328 - DNA, 532 bp, Homo sapiens
attacaggcgtgagccaccactcctggccaaatgaatgcttttgaaaaattacacgttatacacttttggggttactgaaaaatagctaaaatccccaaggttaagtcttcaaatgacaagtctactataatacctacttcttaattttgttgtaacaatcagaaaatgtaacataggtagaagagttagaacatagtataatcaataaatatgacactccttccttccaaaataatgtttgttggataaatcaaggaatattggtaagagaattgcttctgttcatgtagaagtatgataagtgtaggcrgtcgttggacattttttctagaattctctagactcatcaccttggaaacattggttgtgcccatacattgggtctgtggccatataaggaagaagccaggtcacaattgcctgttcacccctcctcactcctccctcttcttgattctctatgagggaggatttgagcttatctgcagtatgtatatagagaggagggaggttttattttttaaattcatt

SEQ ID NO: 12329 - DNA, 696 bp, Homo sapiens
tacaaaatatagactcagagagagtctcctttgaataacttggacaaagacagacatgtaatagcaagtcaatatgactctgaatcttatggtttttttaaatacaagaaagtaagtttaagaaaataaatatgtttgcatttgtgtgtgtgtgtgtgtgtgtgagagagagagagagagagagagwgagagagagggagagagagagagagagaaatacaagctccaaagtcccagtgtgatcagctgagttctcggttgacactatttaacagtttcatttgttcctctttctaatcctgcttccctcacttcctcacaagtgttattccaaagaacaccattcaatataacacttgtgtgcaaatctctatcacggatcttgtttgccaggaaacccaacttatgatatttgataccaggagtatcctaggatgtagaatctaagaaggattctgaagttagatcaccttctgcctggctgacaggggaggaactattaccagtggtagatggagcaccagctgtttgcacaaggtcacagtgcaactgttcaatcttttatttgtggttaactggtatagtagttaacggaaatgcactggaaggtgcactatctctgctttttgagagatcagaatgaagttataattataaaaatactatgaaattggatggcccctactatgaaaaatg

SEQ ID NO: 12330 - DNA, 593 bp, Homo sapiens
cttgtaatcccagcactttgggaggccaaggcgggcagagcacttgaggtcaggagttcgagaccagcctggccatcatggcgaaaacccatctctactaaaaatacaaaaattagccaggagtggtggcatgcacctgtaatcctagctatttgggaggctgaggcacaagaattgcttgaacctgggaggcagagtttgcagtgagctgaaattgtgccattgcactccaacctgggtgacagagggagattccatctcaaacaaacaaacaaacgaacaacaacaacaaaaatcaaccctgcaaggtggtttctcttattatgctcatattaatggtgaggaaactgaggcacagaatgatgatagtaagaggcaaagrtggaatttgaacccagtcagtctgtttcttggttgtgtgtgtgtatgtgtgtttgggttagggtgaaggaggtttgtagtggaagaaggcatgaagacccctctgctatgccctctgccctctggtcagaccagtatacttgtcgctggagcataccctgtatagtgccacttccctatctttgtgttatcctctttgttagggacactct

SEQ ID NO: 12331 - DNA, 520 bp, Homo sapiens
tcagcctcccgagtatttggaactaaaggcgcacaccaccacgcctggctaatttttgtacttttagtagagacagggattcaccatgttggccaggctggtctcaaactcctgacctcaagtgatctgcccacctcggcctcccaaagtgctgggattacaggtgtgagccagcaggccyggcattaaatatgatttcataaatttaatgtgaaagaggattgcatattaatattgcataaatttattaaggttatcttgacaatttcctttattcttggctaaattctaaaagttgcctatctatggtcagatggtttggtacaagaacaagaaccagaaacacagagtctcattcctggctctaatttcacagagaaccacaaaacccttaatttcttcaatgcttgctttttcatttacaaagtatcactgataattataatctgcaaagtactttcctcaggagagagtcatgatttgagtgcaattagctgctaatttttcaaacataaaattc

SEQ ID NO: 12332 - DNA, 562 bp, Homo sapiens
atcaggataatctgtccttattaagaaaaaataagtgacattagtcacagaacaatagcaaggtaattatcagtagctacttcgaaatgacttacctgctataatgtataataattaaatccatgggcagaaaccatagattccctatgattcagagagactctaggctgtatttaggtcccaaagctggcaaacacatgtaaggaccaaaattaacaataagacaccaacaactaataaaattccatcaacttcccagcttgccctttttaattgaacagactagatgttttggcacaaggaagaatgaaacccaagtagggaaaaatcaggaagtaaattgggaatttaaaaaattacaaatgcagcaaaagaatgtatctagactayggtcttttaattagtaattatttgaaaaacaattttactatcttagtcattattttgataacattaatattttaataacttttagtatcttagttaactattttggtaattttagattatgtttcttaacaatagcccatataccacttacaaaatctcacttaaaaggcta

SEQ ID NO: 12333 - DNA, 533 bp, Homo sapiens
cataagacatcgttcttggcacagtgggactctaaaatgacgtttacctaagtaaagttaggatgacatctttatcctcatacctttgacaggtacccttgttttcatcaaaatttgtgttagctacacttaggctaaaatatttgtctttagtaaagtgaaaaatccttctgtaaagtgaccaacaattcacttagtttgtttttaaagtcaggacttttcattttttaggttttcttagtgtgaaatatgaactcatgagcatctggcctgggaactggaccagttttaaatctcgtgttgagagccggaagatgctggagaaggaatgtggtggaatgactgcctgagaatgaaccattctccagtgagaggtaaattaattatttcagggaactaggatatcaactagyaaattacgtcttaccaggcaccagatgattatctgtttccccaagttaatttatttcattgggtgaacccgccactccttaaagactagagtatattggttctacctgggaccaggtcca

SEQ ID NO: 12334 - DNA, 533 bp, Homo sapiens
cataagacatcgttcttggcacagtgggactctaaaatgacgtttacctaagtaaagttaggatgacatctttatcctcatacctttgacaggtacccttgttttcatcaaaatttgtgttagctacacttaggctaaaatatttgtctttagtaaagtgaaaaatccttctgtaaagtgaccaacaattcacttagtttgtttttaaagtcaggacttttcattttttaggttttcttagtgtgaaatatgaactcatgagcatctggcctgggaactggaccagttttaaatctcgtgttgagagccggaagatgctggagaaggaatgtggtggaatgactgcctgagaatgaaccattctccagtgagaggtaaattaattatttcagggaactaggatatcaactagcaaattacgtcttaccaggcaccagatgattatctgtttccccaagttaatttatttcattgggtgaacccgccactccttaaagactagagyatattggttctacctgggaccaggtcca

SEQ ID NO: 12335 - DNA, 529 bp, Homo sapiens
ctgcaggtaaagtgacttgctataggtcacatgatcataagaaaaagaagttgtcattttctaagtctgtctccaaagacagctatttttctatcacaccaatggtctcaagtaagaaaaatggacacttaaatcatgtgggcagcagagcgtggggggtcacatgttggaatactacataaccatgacaaagaatcaaccactgctacatgcaacaacatgtaatataagcaaaggaagccagacatggatcgtaaatatatgattgtgtgcagatgaagttcaagggcaggcgaagctaatccacactgatggaagttagaatagtggttacttctggatgagtgagtgagaggcaccracttggaaggaccgtgaaggagccttttggggcactggaaatgttccttttatagccggatggtattcatacaaacgcatatgtatgtaaaattcatgtatgtacattatccctcaataaaaaaaatgtttaaaacatcctcagggaggacatatgtagtcttttaaa

SEQ ID NO: 12336 - DNA, 813 bp, Homo sapiens
atgtttgctgtgggaatgaaaacaaacaagcaaggctccccaaacagagctagaaaggccttcagggaacacaggacaagaaagatgatgagaactcacattccctgggtccctactgtgttccaggcacagctcaaatacagcctttacatggatttacccagggagttctatgggagtgatcactggaattctctctgtattaagatgaggagacagacacagaraggttaagtcacttacctaaaaacaaaccagtttttaggtaagtggagtaggatgtggagccaggattcaaactcagccatctggcttcaaagacaaacttaaaaaaatttccttagtttatgctaagtgaaagaattaagtcacaaaagaccgcattattgtataattccattgatatccactgtccagaacagggaaagctatagacatagaaagtggatctgtcagaaatctgtttgagtgaaaaagaaaaaaacaatagattagtggttgccagtgattgggggaaggaaaaatggggattgactgctaatgtgtatggggtttctttttgagatgatgaaaatgctctaatataagccatagggatggttgcacatatctgtgactatattaaaaaccactgaattgtataccttaaatgggtaaattatagggtatgtgaactatttatcaataaagctgttgttattattattattaacttagttaaaacacatctcctgagaaacaaaccagaggatacacaactctgctttcactggggacctggggagacagtgcaacttcacttcaaagggaaac

SEQ ID NO: 12337 - DNA, 813 bp, Homo sapiens
atgtttgctgtgggaatgaaaacaaacaagcaaggctccccaaacagagctagaaaggccttcagggaacacaggacaagaaagatgatgagaactcacattccctgggtccctactgtgttccaggcacagctcaaatacagcctttacatggatttacccagggagttctatgggagtgatcactggaattctctctgtattaagatgaggagacagacacagagaggttaagtcacttacctaaaaacaaaccagtttttaggtaagtggagtaggatgtggagccaggattcaaactcagccatctggcttcaaagacaaacttaaaaaaatttccttagtttatgctaagtgaaagaatyaagtcacaaaagaccgcattattgtataattccattgatatccactgtccagaacagggaaagctatagacatagaaagtggatctgtcagaaatctgtttgagtgaaaaagaaaaaaacaatagattagtggttgccagtgattgggggaaggaaaaatggggattgactgctaatgtgtatggggtttctttttgagatgatgaaaatgctctaatataagccatagggatggttgcacatatctgtgactatattaaaaaccactgaattgtataccttaaatgggtaaattatagggtatgtgaactatttatcaataaagctgttgttattattattattaacttagttaaaacacatctcctgagaaacaaaccagaggatacacaactctgctttcactggggacctggggagacagtgcaacttcacttcaaagggaaac

SEQ ID NO: 12338 - DNA, 466 bp, Homo sapiens
gggcgactctaagggacaccaatacagggattggtgggccggccccccgagagagtcaagggaagaagcaatacacatggtgtcgccctgctcagtccaccccagaccaccaccagccaggcgtggagacaggaccagaaggacaactgytgggctctgggggtgctgagcaggggtgaaagcgtcctagaggcttggtgccgacctggacacggcccggcccaggcgtggactccccacttgggagcgtttgtgaagtgaggagaaccccatgccactgccacatggcttctgtcacctgcatccagtcacagttcctgaggaaagggtccccgagatccccgttggccacactaggtgcgagggaggaagcctgggccagtggctgtccctatggacaccgcgggtggtttctcgttgacatacatgggaacgtcgctgaggccaggaagacggcaaatccttt

SEQ ID NO: 12339 - DNA, 466 bp, Homo sapiens
gggcgactctaagggacaccaatacagggattggtgggccggccccccgagagagtcaagggaagaagcaatacacatggtgtcgccctgctcagtccaccccagaccaccaccagccaggcgtggagacaggaccagaaggacaactgctgggctctgggggtgctgagcaggggtgaaagcgtcctagaggcttggtgccgacctggacacggcccggcccaggcgtggactccccacttgggagcgtttgtgaagtgaggagaaccccatgccactgccacatggcttctgtcacctgcatccagtcacagttcctgaggaaagggtccccgagatccccgttggccacactaggtgcgagggaggaagcctgggccagtggctgtycctatggacaccgcgggtggtttctcgttgacatacatgggaacgtcgctgaggccaggaagacggcaaatccttt

SEQ ID NO: 12340 - DNA, 614 bp, Homo sapiens
caccaccaccaccacagtccactattagggatttactttcttgagcaggctgctctttcaaactgaaactctccagaaaagccatcttgaatctcctgatgcctcagcttgaacgtctgtctctggggtggccggggyagatgggagagcctagccctgggtggaaccagggaggagggatggggtccagagcggatacagccaggggctgtgaagaccttgtttctgccttgagtctccctcgccccggaagagttgctgttttaggcaggactaagtgctggcacacagagtgggggtctgggaggcccccggaggaaagtgaagagggcatgcagccgcagtcgtgggaccctgctgttgggcagtgggaaaggtggctgtggccagtcgaccctccaggcctccacctgcccgaagcgcatggctgagcacagggcagagtccgaggaagggagggtacatcccagcagaagggttaatgcctaaaccagtggctctcaatctctggtgcccccagggccactgtggggtggggggtggaggtgggggtgggatgtctgcctgaaaggccagcgggcagccccagaagctgacagtgagaaaggcagagc

SEQ ID NO: 12341 - DNA, 614 bp, Homo sapiens
caccaccaccaccacagtccactattagggatttactttcttgagcaggctgctctttcaaactgaaactctccagaaaagccatcttgaatctcctgatgcctcagcttgaacgtctgtctctggggtggccggggcagatgggagagcctagccctgggtggaaccagggaggagggatggggtccagagcggatacagccaggggctgtgaagaccttgtttctgccttgagtctccctcgccccggaagagttgctgttttaggcaggactaagtgctggcacacagagtgggggtctgggaggcccccggaggaaagtgaagagggcatgcagccgcagtcrtgggaccctgctgttgggcagtgggaaaggtggctgtggccagtcgaccctccaggcctccacctgcccgaagcgcatggctgagcacagggcagagtccgaggaagggagggtacatcccagcagaagggttaatgcctaaaccagtggctctcaatctctggtgcccccagggccactgtggggtggggggtggaggtgggggtgggatgtctgcctgaaaggccagcgggcagccccagaagctgacagtgagaaaggcagagc

SEQ ID NO: 12342 - DNA, 1923 bp, Homo sapiens
tgtcttccttattgaatcaaaaacagtagcaagatgactgtggggattaaatgaggttgtataaatgacaggtgaagggcatcagtgtaggaatttaataaatagtaatgattttgttcaatcctcattggaaattttgtcctaaatactaaacattgcctttttaggaagctatgaaggaaaacagaagtctgttgatatgagatacttcatctatttttttaaagaatcatttgcatgcttattgcataccagactttgggctagttgctaagatttgccttgttatataatcactctactaactaagcaataagattacattttgaacagcttttgcttagaataaggctgaatgagctgagcattagcgtggagaatctccatgagcaggaaaggagccagcagtgcacaggcacctggctctgcagctgccaagacccccctcctgggctgtaaaatggggtgattggagctgtgtttgctgatcggtgattggagctgtgtttgctgatcggtgcccttgaaacacaagtacaggacaggtccaaggctgatctgcatgcacttgccagattctgtcatgggagaatttcaggtttctccacttataaataatctgaactcggagataaacacttcctccagcatgttaaaaatgattgtttctaggcagacattggacaaactgttctgctccaagagtacaattttgctgatggcaatwcattgaaataaaggtgatagtgcagtggctcatgcctgtaatcccagcactttggggggccgaggcgggaggatcacccgaggtcaggagttcaagaccagcctggccaacatgatgagaccctgtctctactaaaaatacaaaacttagctggttgtggtggtgggtgcctgtgatcccagctactccagaggctgaggtaggagaattgcttgaacctaggaggcggaggttgcagtgagccaagatcatgccactgtactccagcctggtgacagagtgagactccatctcaaaaaaaaaaaaaataaagtgatagtgcagatgtggttagtacttgagtctagccccatcactgtccctggggtctggggtgactttgggaaagaggcttgccttaactgtcttctcaaaaaaaaaaaaaaaaaaaggaggaaataatatttaatttgtaagacgattgtaaatacaataagaatttgtatgaaaggcttttcatgaatttagtagtttttgacagctatttctgagatggttgtggctgtggtatttaagaaatgtgagctacttgatttcaatgatctttctctcgctctcgctctctctctctctgtctgtgtgtgtgtgtgtgtgtgtgtgtgtgtgtgtgtgttaacctcagacttccttcttttacgtttattctgaattccagggtctccatccacttctttttccaactctccttaacaatgagtagtctaaaaaaataaaataaaattattctatcagatgactcttattgggcaagccaggatagacatatagtcctcctgtataactagatctagtatttaacaataagtaacttttagtggtaaagtgaatctacagagttgactgtcctttttttccctccttccatttctacttcctagttggccccctctcttatgtctcacttgcacagtagttcagcttgaacactcctccagcagcacagagagtacacgatgtatatagacacgtgtgggggtagagggcgtgtgttgtatagacacatgtgggggtagagggcacgtgttctatagacgtatgtgggggtagagggtgcgtgttgtatagacgtatgttggggtagagggtgcgtgttgtatagacgtatgtgggggtaaagggtgtgtgttgtataaacgtatgtgggggtagagggtgca

SEQ ID NO: 12343 - DNA, 533 bp, Homo sapiens
tcaagagcaggcaagggtgtctgcgactggggagcggggtgctgtggggaatggagaaaagtattcaagactgaagtacttagcatcgttaaaaccataaagatggaaagcagaatgctggttgccagggcctgggagaaggggaaatggggagttagtgtttcatgggtatagaatttcagttttacaagaggaaaagggttatggagatggatggtggtgagagttgcacagcaatgtgaatgtacttaatgctactgaactgtacagctaaaaatagttaagatggtcatttttatattatgtgtatttcactacagtaaaaaaatttttttgagaataaaaaggacatrcactagctgttagaatgcagctcatgtgattgtaaacgtgcatctgagtgtgtgtgggggcctgttcccctgcccccatgctcagccaagcttcctccaccagcagcgcatgccacatggccaagccccctggggacggctgcaggtgggcatcctgccctggccatgctcctgctctgg

SEQ ID NO: 12344 - DNA, 525 bp, Homo sapiens
cccaggttggagtgcagtggtgtgatctcggctcactgcaacctccgcctcctgagttcaagtgaatctccctgacttagcctcctgagtagctgggattacaggcacccaccaccatgcctggctaattttttgtagttttagtagagacaggggtttcatcattttagccaggatggtctcgatctcctgaccttgtaatctgcctgcctcagcctcccaaagtgctgggattacaggcgtgagcgaccagcctagcctctgcattatattttaaagttgatttgctgtcaccactcttacattttacaaggaagacaatacctttcaccatgttcctaaatttaagaaaacctgcacagtcctcttttataaggtgagtaaatgaaagtgagatcaatgaagtcaggtttaataatcacctcaacwggtagataagatcaaatgcctatgccaaacacaatttgcagttttgtgtgaacaaaagttttctacaacacacatcctggcagatgttactgtaac

SEQ ID NO: 12345 - DNA, 551 bp, Homo sapiens
ggtactgccaggcagctaaagagagtgaycagcagacataggtttgaagattaccccaaaggcattgcgcaaggtccggcctggtacaccagaacacggcagcagctggcgcagccgggcaccgaggagggacctcccactcctgccccttcccgcgtgctctgagtgaccctgggatagagagagagggagaggagagcccttgcttcttcccacccccagcccactggccactcaggaggaaccctgagatggggtcagaacagggctaagtggactctctttgttctgcaagtttcctgtgacgcagccccagccacacccttctcccagggaaagtgtctcgtcccgcctgccttcctaacagggacccttcttctgccactggccttccctgtctacctacatggctgatgattttcattccttatgaaaataaagctggctttaacttatttgtaatgtgcacacttgatgcacagattctaataatgccatcctccaataaaagaaaccagggctccttggaaatggccactaaagaaaaaaac

SEQ ID NO: 12346 - DNA, 573 bp, Homo sapiens
gatttatattgaatgctatgggaagatggctatggtttaaagataatccttctattgatctacaatgctgtactatagctacagcttgccttaataagattaagtccatgattgcattcctttggaaacagggtatgatggcagatcatttggatcaactcaatggaagtggtaaaataaaatcacaaactattagtgctgggaggaatcttagcaaacacctggtcaatatcctcattcaatgtagatgtcccctcaatatcttctgttgatctcttcagggatgaagaactcccttctttcagaggtaattcactctatgtttagatattaatagttattagaaagctcttcctcatctgaaatgattttaatcctgttttctgaggctcacatgattagttcttacacctagctcaccattttttaaaagttaccttttcaatataaccaccccaatgyttcccagtattcatataatgtggtttgcctactccacgctatctttttttatttttcattaaaactattctgattcctcaacatgtccctcttacagcatgcacacggact

SEQ ID NO: 12347 - DNA, 573 bp, Homo sapiens
gatttatattgaatgctatgggaagatggctatggtttaaagataatccttctattgatctacaatgctgtactatagctacagcttgccttaataagattaagtccatgattgcattcctttggaaacagggtatgatggcagatcatttggatcaactcaatggaagtggtaaaataaaatcacaaactattagtgctgggaggaatcttagcaaacacctggtcaatatcctcattcaatgtagatgtcccctcaatatcttctgttgatctcttcagggatgaagaactcccttctttcagaggtaattcactctatgtttagatattaatagttattagaaagctcttcctcatctgaaatgattttaatcctgttttctgaggctcacatgattagttcttacacctagctcaccattttttaaaagttaccttttcaatataaccaccccaatgtttcccagtattcatataatgtggtttgcctactccaygctatctttttttatttttcattaaaactattctgattcctcaacatgtccctcttacagcatgcacacggact

SEQ ID NO: 12348 - DNA, 530 bp, Homo sapiens
acctccagaaccataaatttcacataataaatctgtgttgttttaagccactaagtctggactaatttacatagcagcaataagaaactgaggcagtaccttattcataagttgctttggataacatagaattttttaagtgagagctagaaggcatctttaaagtgggtataacttaactattctgactttagaagtgaacggaaatgacttttctgaaggttcccctctccttgaagcctaaaattacgtgattcaaaacaaagacccctatgagtctactcatttgaacgggcatataaatgacttagaaaaaatacaagagcatcttgcttataatactgcctgtgtagtaatggattaccttgagtctaggttcagcctacactcctgggagcctctcagaactccatcttagccaggttcctcctaagaaggggatgtaagarggaggcaaaatgaggggccttggcatcacgtagaagtgggcttacatccagccatgccactgactggcttgaccttgaaaa

SEQ ID NO: 12349 - DNA, 530 bp, Homo sapiens
acctccagaaccataaatttcacataataaatctgtgttgttttaagccactaagtctggactaatttacatagcagcaataagaaactgaggcagtaccttattcataagttgctttggataacatagaattttttaagtgagagctagaaggcatctttaaagtgggtataacttaactattctgactttagaagtgaacggaaatgacttttctgaaggttcccctctccttgaagcctaaaattacgtgattcaaaacaaagacccctatgagtctactcatttgaacgggcatataaatgacttagaaaaaatacaagagcatcttgcttataatactgcctgtgtagtaatggattaccttgagtctaggttcagcctacactcctgggagcctctcagaactccatcttagccaggttcctcctaagaaggggatgtaagaaggaggcaaaatgaggggccttggcatcacrtagaagtgggcttacatccagccatgccactgactggcttgaccttgaaaa

SEQ ID NO: 12350 - DNA, 544 bp, Homo sapiens
tggcctcgaactcctgacctcatgatccgcctgccttgacctcccaaagtgttgagatttcaggcgtgagccactgcatctgacctttttttagaattttaaattttacagaaattattcctctataaaccaggcagaatgtatacaatttgaacattaaaggtacttcaagcttgatatggtgtccttgccccactacaataaaggggaaagatgttatggttgtttttatcattattctgtagttaatgtttcagccacctttttatactattcacagagtgatcagtcttaacaaccttggrtgtatgtattagcgtttttaaaggtaattaaatatattctttttcctttggcatatttttatttaaatcatgtgaatgatgtctctttagtaagaaaaaattattactttagatttactataatatacatctactaatattgcattttattttgtaaactctaaactgtcttttcccagctggacaacctaattaaactaactacatattgtcatctttctgaaaaccaagttttgtca

SEQ ID NO: 12351 - DNA, 860 bp, Homo sapiens
tggatttcttggttataaaaatatccatgatttgatagccctatgaccctgtgactaccagcacaattagttattaaaagatgaggcaatacaacatacttacagaaacaagatcaaggtaaaaaggccaatatagccatgacctggtcaatatttatcacaaatgtgttcacaccctggagcacatactgctaaaaggtaaaactagttggatattagtgttgcacagtctggttaccaggaagtattactacagtgttttctgctttaaacaaagaactaaaaatatgccctgcaactctttatcaggtaagaatatcaattgtctgatgtgatttaatatctatcatttacagatttattatgtctttctcttgaaatcacaaatgctcaaaaaacctcctattcatgtaattcatgtaaaatatgatggcttatgattggacactttgtttttactctgagaagttagattattattkaaaatatataaatgcgtatagctaatttgccaaaagctgtgttttaaatccagtaaatgtgtttttaaataatgcaacttctgacctggttagtattcaaaaccaaaaactgaaattctgccaccctctttgcagtctattgatttgagaactacagctgctgaaattaaactttattgttagcatagagctttcagctgaggaagcaatttcaaattggtttcttttctagcccagcttaatattaagtaaatatgtgcctataagtgtctctagctagattattacctaaagtggtgcatgcaagtttgcaggtgcagctccgggaaacgaaaatctactttggtgatgaatcttcctatccaatgggtaaacaca

SEQ ID NO: 12352 - DNA, 568 bp, Homo sapiens
ctataaccactactgataaaaaccagtcttcaaaaatgttactcatcttttgctttgtgtttaagataaacctgaatctttatttgcttagactacaaaaatactgtttgttttccctgataagcattttttttttaggctaagacttttttttttaatggcaaaactaagacttataaaacatttcagtgataaatgcaggtaaaaaattaacacagwgagccgggcatggtggctcacacctgtaaatcccagcactttgggaggctgaggtgggcggatcatgaggtcaagagatcaagaccatcctggccaacatggtgaaaccccgtctctactaaaaatacaaaaattagctgggcgtcgtggtacctgcctgtagtcccagctactcgggaggctgaggcaggagaatcgcttgaacccaggaggcagaggctgcagtgagccgagatcgtgccactgcactccaacctgggtgacagagggagactccgtctcaaaaaaaaaaaaaaaaaaattaacacagaagtatattaagaaatgacaacgcccttccctatccgcc

SEQ ID NO: 12353 - DNA, 568 bp, Homo sapiens
ctataaccactactgataaaaaccagtcttcaaaaatgttactcatcttttgctttgtgtttaagataaacctgaatctttatttgcttagactacaaaaatactgtttgttttccctgataagcattttttttttaggctaagacttttttttttaatggcaaaactaagacttataaaacatttcagtgataaatgcaggtaaaaaattaacacagtgagccgggcatggtggctcacacctgtaaatcccagcactttgggaggctgaggtgggcggatcatgaggtcaagagatcaagaccatcctggccaacatggtgaaaccccgtctctactaaaaatacaaaaattagctgggcgtcgtggtacctgcctgtagtcccagctactsgggaggctgaggcaggagaatcgcttgaacccaggaggcagaggctgcagtgagccgagatcgtgccactgcactccaacctgggtgacagagggagactccgtctcaaaaaaaaaaaaaaaaaaattaacacagaagtatattaagaaatgacaacgcccttccctatccgcc

SEQ ID NO: 12354 - DNA, 543 bp, Homo sapiens
gagttaagactttgggggattgttaggaaggcatgattggttttgaaatgtgaggacatgagatttgggaggggccaggggtagaatgatatggtttggctatgtccccacccaaatctcatcttaaattgtagctcccatgattcctacatgttgtggacctggtgggaagagattgaatcatgggggcgggwctttcccatgttgttctcataatggtgaatgggtctcgtgagatctgatggttttataaatgggagttcccctgcacaagctctctcttgcctgccgccatgtaagacgtgcctttgcttcttctttgccttctaccatgattatgaggcctcccagccatgtggaactgtgattccattaaacctctttcctttataaattacccagtcttgtgtatgtctttattagcagcatgagaacagactaatacacgtggcaatagggttcctttttgtgattatttaattcctttttggtagagttcaaaagtgccgaaaatgatgggtaatcttatgttttaagctatat

SEQ ID NO: 12355 - DNA, 544 bp, Homo sapiens
gaacaattgttgaatgcatgaatatatttaaagaagatattatactagaaactgagagatgggaggctaaaatcaaaattattacttcaaggaagttttcagtagggggtttctggtaagatatggaaatgtggaatagaaataactataatacaaagcagcttttttcaagtgcaatacagtattcacaaatgcagtgttaccatttcaaaggaagagagtccattaccaaaacaaggtaagaggattcctcatactaactctgttatcatgatttagctttgaaaataggcaatatggtgttcttgggtgctttttcatacacccaagatcaagtattcttrgtcacctaggacatgatagcattattaaaatttctacttatggaaaagattaattaatctagaacaatctatcttaatagtaaaatcaacgtgttaggagagatgtgcgtggggatacattcactaaaaattaagtagttttgaagatgtgatggctgccctatatgatgtcaatacaggagaaacattggtataatctt

SEQ ID NO: 12356 - DNA, 587 bp, Homo sapiens
tttgagacggagtttcgctctgtcacccaggctggagtgtagtggcacgatctcgtggaattcctgtttttgctttcatgttgctaggattttagtctcattctatttggtttatgcataagaactcagattgaaaaaaatagtcttatgtcataatttctttgaatagtacaacattcwtctttgcaactcttctgtctccagtcttctggcagttgatgccactgcctcagatgcctgatgggcttcctggcacttttataatatatcactgagtattggcttacaagttctaggagaaaatagagctgaagacctggactttcccatttggcagctcttcaccatcagtgctcacgtctgaattgttgactattcttaaatcatgaaaggacttctgcaaaccttgtaaagaccttagttcaaaaacatttttatttgtagtttagagacccacagagaaagtgacctttcaagaagatgggttcaacccagagaatgaggaaatggctaagaacaaatattaacccagtgaaatgagtatgaagaaggccaagtaggaatagaggcaaattatggaatctgta

SEQ ID NO: 12357 - DNA, 587 bp, Homo sapiens
tttgagacggagtttcgctctgtcacccaggctggagtgtagtggcacgatctcgtggaattcctgtttttgctttcatgttgctaggattttagtctcattctatttggtttatgcataagaactcagattgaaaaaaatagtcttatgtcataatttctttgaatagtacaacattcatctttgcaactcttctgtctccagtcttctggcagttgatgccactgcctcagatgcctgatgggcttcctggcacttttataatatatcactgagtattggcttacaagttytaggagaaaatagagctgaagacctggactttcccatttggcagctcttcaccatcagtgctcacgtctgaattgttgactattcttaaatcatgaaaggacttctgcaaaccttgtaaagaccttagttcaaaaacatttttatttgtagtttagagacccacagagaaagtgacctttcaagaagatgggttcaacccagagaatgaggaaatggctaagaacaaatattaacccagtgaaatgagtatgaagaaggccaagtaggaatagaggcaaattatggaatctgta

SEQ ID NO: 12358 - DNA, 587 bp, Homo sapiens
tttgagacggagtttcgctctgtcacccaggctggagtgtagtggcacgatctcgtggaattcctgtttttgctttcatgttgctaggattttagtctcattctatttggtttatgcataagaactcagattgaaaaaaatagtcttatgtcataatttctttgaatagtacaacattcatctttgcaactcttctgtctccagtcttctggcagttgatgccactgcctcagatgcctgatgggcttcctggcacttttataatatatcactgagtattggcttacaagttctaggagaaaatagagctgaagacctgractttcccatttggcagctcttcaccatcagtgctcacgtctgaattgttgactattcttaaatcatgaaaggacttctgcaaaccttgtaaagaccttagttcaaaaacatttttatttgtagtttagagacccacagagaaagtgacctttcaagaagatgggttcaacccagagaatgaggaaatggctaagaacaaatattaacccagtgaaatgagtatgaagaaggccaagtaggaatagaggcaaattatggaatctgta

SEQ ID NO: 12359 - DNA, 616 bp, Homo sapiens
acactcttatcaaatttagatgaattctcactcacctttgcaagaccttagtcagtaaaatgtctcgaggaattatgtaagaacagaaaaaatttaatatacattgctgtgaacaataactccacaaggtaaaactccttcagcataatttgtagcttaaaygtaatgtgtattcatacacttttattctgcaaaagaaagtaatttaaatatttatcaaatgtgatttacatgaaaatacaatcctacttttcatttatggtgctgttcttgtgtccctcagagttgtcttctttaaatatacatttggaaacatattatgatccaaaatacaaaaagtaaatacaatgcggaatgagggagcttgtaggaggaaaagtgactgcaggcccagtgaaaagagaaactagcttgttgaattttcatacactgaactactgagcaggcttatttaaatctattttcctttatgaattatacatggctatcatcacgaggtacactcccagggtaaaaaaagaaaagaaaaaaaaattttaaaagacaacttactgatgaggcatcaaatgggaaaaacacactcatttcctcaaatctgaggttgattttttattaa

SEQ ID NO: 12360 - DNA, 616 bp, Homo sapiens
acactcttatcaaatttagatgaattctcactcacctttgcaagaccttagtcagtaaaatgtctcgaggaattatgtaagaacagaaaaaatttaatatacattgctgtgaacaataactccacaaggtaaaactccttcagcataatttgtagcttaaacgtaatgtgtattcatacacttttattctgcaaaagaaagtaatttaaatatttatcaaatgtgatttacatgaaaatacaatcctacttttcatttatggtgctgttcttgtgtccctcagagttgtcttctttaaatatacatttggaaacatattatgatccaaaatacaaaaagtaaatacaatgcggaatgagggagcttgtaggaggaaaagtgactgcaggcccagtgaaaagagaaactagcttgttgaattttcayacactgaactactgagcaggcttatttaaatctattttcctttatgaattatacatggctatcatcacgaggtacactcccagggtaaaaaaagaaaagaaaaaaaaattttaaaagacaacttactgatgaggcatcaaatgggaaaaacacactcatttcctcaaatctgaggttgattttttattaa

SEQ ID NO: 12361 - DNA, 616 bp, Homo sapiens
acactcttatcaaatttagatgaattctcactcacctttgcaagaccttagtcagtaaaatgtctcgaggaattatgtaagaacagaaaaaatttaatatacattgctgtgaacaataactccacaaggtaaaactccttcagcataatttgtagcttaaacgtaatgtgtattcatacacttttattctgcaaaagaaagtaatttaaatatttatcaaatgtgatttacatgaaaatacaatcctacttttcatttatggtgctgttcttgtgtccctcagagttgtcttctttaaatatacatttggaaacatattatgatccaaaatacaaaaagtaaatacaatgcggaatgagggagcttgtaggaggaaaagtgactgcaggcccagtgaaaagagaaactagcttgttgaattttcatacactgaactactgagcaggcttatttaaatctattttcctttatgaattatacatggctatcatcacgaggtacactcccagggtaaaaaaaraaaagaaaaaaaaattttaaaagacaacttactgatgaggcatcaaatgggaaaaacacactcatttcctcaaatctgaggttgattttttattaa

SEQ ID NO: 12362 - DNA, 573 bp, Homo sapiens
aaaaattcacaacagtatataaggctgtaaaatgagaattctgccccctcacctcttaccccagtactattctccagaggtaatctattaacaatttcttatgtaattttcaraaaatttgtatgcgtatataagcaaatatgtaatctttattttttaaataaatgggatcatattatatattctaccttgcatcttgcttttttgcttacatagtcttgagatcttttcctgtcgacactgagctacctcatttttaatggttgcatagcattctgcttgatgaatgtactgcattcagcttactgtccatgctctggtggcagtcagtggttattacacaattttgtttttctattacaaacattgccatcgtaagcaaccttcagtgggaggtatagtcttactgtgaaaatatacctgtagaatatgtttgtataacttgctaagtgaaagaagagtgtttgcagtttggattgtgaaagatgctgttgcattgcctcctctacaagctgtgtgaatttgaacccctaccaacagtcatgagaatgtccattttcccacacccttgcc

SEQ ID NO: 12363 - DNA, 573 bp, Homo sapiens
aaaaattcacaacagtatataaggctgtaaaatgagaattctgccccctcacctcttaccccagtactattctccagaggtaatctattaacaatttcttatgtaattttcagraaatttgtatgcgtatataagcaaatatgtaatctttattttttaaataaatgggatcatattatatattctaccttgcatcttgcttttttgcttacatagtcttgagatcttttcctgtcgacactgagctacctcatttttaatggttgcatagcattctgcttgatgaatgtactgcattcagcttactgtccatgctctggtggcagtcagtggttattacacaattttgtttttctattacaaacattgccatcgtaagcaaccttcagtgggaggtatagtcttactgtgaaaatatacctgtagaatatgtttgtataacttgctaagtgaaagaagagtgtttgcagtttggattgtgaaagatgctgttgcattgcctcctctacaagctgtgtgaatttgaacccctaccaacagtcatgagaatgtccattttcccacacccttgcc

SEQ ID NO: 12364 - DNA, 524 bp, Homo sapiens
cactgcctcccracccagcacttggaaagaatccacagaagctgaaattgagtaagattgatgaaacagagtgaatttcatttcatctctctagttcaggacaaaacagatgcccaacactttggaatagtccttgcagttcttgtaatttttttttttttttttttgtaacgtggcctagctcttctgtctccaggtggtggcaacctgaccttggggttcccgagttacaaatagatgacacagagaaggtgcctgggaccctgattctgcctcttgagtggggtctagttccttctggatacaaactgtggatgcccctagcaactttcttgtggacaatcccccaaaccgtgcactcaattcaatcaaacacattttgagaaatacaagctgccagaccctgaggcaggtgctgagaggcagatacaggtgaacaaggcagatgaggccccctctctggggctgatcttctggttggggcatggcggggcaggggagctggtcacaaacaagacatttca

SEQ ID NO: 12365 - DNA, 524 bp, Homo sapiens
cactgcctcccgacccagcacttggaaagaatccacagaagctgaaattgagtaagattgatgaaacagagtgaatttcatttcatctctctagttcaggacaaaacagatgcccaacactttggaatagtccttgcagttcttgtaatttttttttttttttttttgtaacgtggcctagctcttctgtctccaggtggtggcaacctgaccttggggttcccgagttacaaatagatgacacagagaaggtgcctgggaccctgattctgccycttgagtggggtctagttccttctggatacaaactgtggatgcccctagcaactttcttgtggacaatcccccaaaccgtgcactcaattcaatcaaacacattttgagaaatacaagctgccagaccctgaggcaggtgctgagaggcagatacaggtgaacaaggcagatgaggccccctctctggggctgatcttctggttggggcatggcggggcaggggagctggtcacaaacaagacatttca

SEQ ID NO: 12366 - DNA, 524 bp, Homo sapiens
cactgcctcccgacccagcacttggaaagaatccacagaagctgaaattgagtaagattgatgaaacagagtgaatttcatttcatctctctagttcaggacaaaacagatgcccaacactttggaatagtccttgcagttcttgtaatttttttttttttttttttgtaacgtggcctagctcttctgtctccaggtggtggcaacctgaccttggggttcccgagttacaaatagatgacacagagaaggtgcctgggaccctgattctgcctcttgagtggggtctagttccttctggatacaaaytgtggatgcccctagcaactttcttgtggacaatcccccaaaccgtgcactcaattcaatcaaacacattttgagaaatacaagctgccagaccctgaggcaggtgctgagaggcagatacaggtgaacaaggcagatgaggccccctctctggggctgatcttctggttggggcatggcggggcaggggagctggtcacaaacaagacatttca

SEQ ID NO: 12367 - DNA, 512 bp, Homo sapiens
tgtctggtacctcgatggttaaatataaaatagtagtttgcataatttgggtttagaagttactcatacccaccctcagccctcctttgctgccaactccttcaagatttggctgaaatatcaccttcttctttgcttccccaattccctaaggcagagaaagttgttctaaccatcacagtcagacacactcaatgtctaaggagacctccactaggaggctgcataactgatctacccacgtgaccgacgaccccactgggctgttggttctccacgggcaatgcctgtctcctactcatctttatcttcccagcttgtattgcagggcttggcacaaggaggcttaagaaacatgtgaagcaataaatcaaggaagaaaagaggtcaatggtaacagctgtatgaaggcaaaattgttcaacccatggaagaacttcccaaaaatcagaaccacctcctatgtcaacatgcacctgtctgaratggagagctgagctgtacttcccggg

SEQ ID NO: 12368 - DNA, 455 bp, Homo sapiens
taaatactttgtgaaatttctttctcctcyaaggaaacattgaagaaaataatcctcatacttcaatgataaagacatatcagatgttgaagaaaatgttgctaccacaaaggctggcaccattattttgtattttacattctccttaatttctctcactttcccccactaaagaatacattacatcatctccatattaaagggctgcaggaagctatagatttctctgcaaagtttttgaaactgtggaaatagccatactcataaattgatgatgcttaaaatgatcatgagctgtaaaatcttactctaatgattctgagcatataaatgagagcagaatttgttctaagccagttattgctctactggcatttcaccagtggggctgttggattctgtgactatatatgattggttacatgtgtgaaataagttaacagtattttttttat

SEQ ID NO: 12369 - DNA, 536 bp, Homo sapiens
cacacacacacacacacacacacacacacacacacatatttcaatggctgtctaaaataaatggggctractttattccttatggttccttatgttgctaggagaagaaccaatgaaataacattatagagaagtagatttatgatcactatatggaagaatttttttgttatttaaagatatcccctccaaaaacgggaggagtatgagagttgccccatactgaaagtgttcaaggagaagtttagcagacacttgttgaagttctttgggagtgcaggtgatcatggtatgcagggaaggagggagaaagaagagccttggttggagtatgtgaatgaaattttttcttaagtttttgtgattttaccagttgaaaatctttagaaagaataaatgttacagtagtaatatgaattttcaagataaagaaatgcacaaaccaagttacttcacaacaacaaacaggaaaattttaacccagaatttagaggtaagaatattagactaactatagctgtacttaattaaaatct

SEQ ID NO: 12370 - DNA, 552 bp, Homo sapiens
caaagtacttatccttaccctggttagtaccagagaaacaaaaaggactctggaaagaaggcggctataaatgggataaccatgaggttatagttactgcaaaagcatccagtttggctctgagcttcctagtagacaagacaaaaagggaacatgayatggtctatggctctggttggtggatgggcaatgcttactagttcctcagggaaaacaaagtttgtcctggcattaaatcttaaaagaaatctctcagggggaggtggcaacccctcccctgaccaatcaatcaactgatcaagcaagcaagcaaattaagatctggtttcaaggatttaccaacaaatgcagaagcagttctatagaaggctcctctaggagaatgactacggggggtaaggtgacacaccccattgaagagcagtttcacctctaggctgagcattttgcacagctggggtggtagacgatggcacgtgcccacggccttcccttcaaacagccctgctcctggccagatttctgagtctgtgctaatctctcctcccagtg

SEQ ID NO: 12371 - DNA, 552 bp, Homo sapiens
caaagtacttatccttaccctggttagtaccagagaaacaaaaaggactctggaaagaaggcggctataaatgggataaccatgaggttatagttactgcaaaagcatccagtttggctctgagcttcctagtagacaagacaaaaagggaacatgacayggtctatggctctggttggtggatgggcaatgcttactagttcctcagggaaaacaaagtttgtcctggcattaaatcttaaaagaaatctctcagggggaggtggcaacccctcccctgaccaatcaatcaactgatcaagcaagcaagcaaattaagatctggtttcaaggatttaccaacaaatgcagaagcagttctatagaaggctcctctaggagaatgactacggggggtaaggtgacacaccccattgaagagcagtttcacctctaggctgagcattttgcacagctggggtggtagacgatggcacgtgcccacggccttcccttcaaacagccctgctcctggccagatttctgagtctgtgctaatctctcctcccagtg

SEQ ID NO: 12372 - DNA, 552 bp, Homo sapiens
caaagtacttatccttaccctggttagtaccagagaaacaaaaaggactctggaaagaaggcggctataaatgggataaccatgaggttatagttactgcaaaagcatccagtttggctctgagcttcctagtagacaagacaaaaagggaacatgacatggtctatggctctggttggtggatgggcaatgcttactagttcctcagggaaaacaaagtttgtcctggcattaaatcttaaaagaaatctctcagggggaggtggcaacccctcccctgaccaatcaatcaactgatcaagcaagcaagcaaattaagatctggtttcaaggatttaccaacaaatgcagaagcagttctatagaaggctcctctaggagaatgactacggsgggtaaggtgacacaccccattgaagagcagtttcacctctaggctgagcattttgcacagctggggtggtagacgatggcacgtgcccacggccttcccttcaaacagccctgctcctggccagatttctgagtctgtgctaatctctcctcccagtg

SEQ ID NO: 12373 - DNA, 672 bp, Homo sapiens
cagtattgtcatgtaactattactgcctgcttactatgatagtggccggcaaagtaaggaacacggtaggtcctcaaacaacacatctctttccctgccttggccatctgggtgcacagtcaggagggtcacagtgagtcctcatgtctgtctggtgctttgaatgttcacaaggcttctgtgttccttatctcagatcattctcaccacaatgccgtgtggataataaggcacatcttacaatggtcccacctcaccatacacccataccttggagaggcaaagtgcatgtcgcaggatcacacagcagtctgtatcagggccatgccaagtggccaggactcctggctgycaggctgggttctgatagcaaggagacaggcacctctcactctccagcttgtgagcacacgaccgccagtctggcttggcagtattttctaaaagtcatctggaccatgcccctgcttctctgtgccatgcaattcccaaactcacgacagggaagacatctcattcacttcttacgcatcagcaacaacacctcttggttcggagtctgggctgcccagagccctggcattgttctttctttctccctctgccccactcaaaatatgtagcaatccttaccaaagtaataagagtgaattgggagtttcagctgctgga

SEQ ID NO: 12374 - DNA, 636 bp, Homo sapiens
tccttcgctctctgctatgatgataagtttcctgagactccgcagccacggtgaactgtgagtcaattaaacttcttttctttataaattacacagtcttgggcaatgctttatagcagtttgaaaatggactaatacagatacttttgtggggaagcattcttgtgataaatatgtatcatatataatgtatattkatgtattagtatacataaatacgtatcacaaatgactatacatatgtattttctaaatgtatctacacaaatagtagaatatgtgtatatacgtatgtgtgtgtgtgtgtatatagctacagataggtacatatactacatatatatatttgcctatatatacccatatgatatatatatatttatctactatgaaaacacacacacacacacatatatttacctacctatatgtagacatactgatatgtagaaatgtcaggagattgtattttaatataaatatgtcacctctgccgtactagaatgtgtaaagttgagcccattgttggtgggatagggaggttacagaaaggactactggtgggaaggtagtgggaatatactcacacaagggggtaaggcataaagtagtataagaactaacttcataatactg

SEQ ID NO: 12375 - DNA, 559 bp, Homo sapiens
tggagtaaccatttaatatgggattttttttaagaaagggaatttcccattattaagcatatcaagtctattttcctaagtatatcaagctattcatttgacgaagtgaggtctgtctccgctccacctctgtgcaccagctgcatgcgtgttccaccataactctttcaaarcaattggctggtttggatgaaatgcaatatattcacataccagaatctttgggacacagctaaagcagtgtcaaaagggaaatttatataactaaatgcccacatcagaaagctagaaagatctcaaatcaacaccctaacatcacaattaaaagaactagagaagcaagagcaaagaaattcaaaaactagcagaaaacaagaaataactaagatcagagcaaaactgaaggagacagagacatgaaaaacccttcaaaaaaatcaatgaatccaggagctggttttttgaaaaaatttaaaaaatagatagaccactagctagactaataaagaagagagaaaaatcaaatacacacaataaaaaatgataaaggggatatcac

SEQ ID NO: 12376 - DNA, 559 bp, Homo sapiens
tggagtaaccatttaatatgggattttttttaagaaagggaatttcccattattaagcatatcaagtctattttcctaagtatatcaagctattcatttgacgaagtgaggtctgtctccgctccacctctgtgcaccagctgcatgcgtgttccaccataactctttcaaagcaattggctggtttggatgaaatgcaatatattcacataccagaatctttgggacacagctaaagcagtgtyaaaagggaaatttatataactaaatgcccacatcagaaagctagaaagatctcaaatcaacaccctaacatcacaattaaaagaactagagaagcaagagcaaagaaattcaaaaactagcagaaaacaagaaataactaagatcagagcaaaactgaaggagacagagacatgaaaaacccttcaaaaaaatcaatgaatccaggagctggttttttgaaaaaatttaaaaaatagatagaccactagctagactaataaagaagagagaaaaatcaaatacacacaataaaaaatgataaaggggatatcac

SEQ ID NO: 12377 - DNA, 588 bp, Homo sapiens
ttgaaagagtaatatattagttgctaaaagtagtattttgttagatgtgtggcctacctacaggaaagtgcacagattattagtatgtagattaatgaatgtcccaaggaaatacacacccaaatatctatcacagataaaacttatgagataccaccactactctagaaacccccttccaactcatttatattcatttcctcctgcaatcccactgaacataatcacctgaacatgagcaagactgtaactyctctgcccaccatctccctcctccactgctactttcttgacaatattggggatgtcggaagacaattgcttgatctagtgatcttttcttttgtttctggttcttcaagattagaatatgcctagacaactcaccgtgttttcaagacctgactgatttcttttcaatttcagagtctctttgtctatgtcagacttacttatacacagatcgggcatctgccctcagctttggaaggtgcaacaactcccgccacacctactcatctatgaacgactcagttctctgtggaattcagttcttttaaatcttttttttgtatgatgccctaggtt

SEQ ID NO: 12378 - DNA, 544 bp, Homo sapiens
acttttaactttgagattttttttttttttttttttgagatagagtctcactctgtcactctgtcacctaggacttaggctggagtgctggagtacagtggtgcaatctcagctccctgtaacctccatttccctagttcaaatgattctgctttctcagccacctaagtaactggtattacaggcatacactaccacacccacctaattgttgtatttttagtggagacrgggtttcaccatgttggccaggctggtctcaatctcctgaattcaggtgatccacccaactctgcctttcaaagtgcagggattacaggtgtgagccacagcacccagcctgtttttattttcaaatttcacatataacccacattttctacaaacaaatttgtaataaacatctttgaaaatactaaagaaaaaccccggtttttgtcatctgagtcattgtagtcctaacctctttcattttcctgtgcgcgtactcagttatcacagcctcagttcgagaattttgaccagagttaatcacgtatctgta

SEQ ID NO: 12379 - DNA, 551 bp, Homo sapiens
taagccacaaatgacatctccaaccagaaacattccaaccctaagataaacccctccccaatcagaaacatgccagccccaagataacctcccctccggcaggagagatgtcagccccaagataacctctcctccaaccagagacattccagccccacaatcaacttctcctccacacagaaacattccaagtactcctttgttaaggtctctygccctgaacccttaaatactcttagtctttaagagaaagctctcctgagcaaaatatgccagaagtccctctcaggtttattctccaaaatgaacccatgtttgactgttgacccacttttcgtgtttctttcctcttgctttaactcttacaataacttccatgttagtctgcacattcatcatgcttagtaattaattaaagtagaacaaggtctcacataattttttttacgttctcttgtagcaggaagtctaccttacatatagcccagcaacctggtgaccaccatcccatcaagcaaatggttttctggcaaattggtaggaaaaacaat

SEQ ID NO: 12380 - DNA, 638 bp, Homo sapiens
gtctccctctatgctacttatggatttagaaaaattctctaattcagtctcttttastattcaaacaagcatagtattgtgtaaatgagaaaatgttcttaacgactaaaccataaaatattgttaaggatatcaagaaatgaagatactttaaggagctacctatcatcccacattaatcgacataccagaaaacaaagaatatatcctatatttaaaccattctaaaaaagaacccaggtatcctactaattatttaacattgtaagtaacaatggtaagttaagtgcaatgtttaatatctctctggtacaatataagattgttatgatatgtgatatgtatataaaaagtatttaatatgatattgactaataaaaatagtctttttatcttctgcaaaaccataagtgtatggaaaacattacattaagcttaactaacatttaaaaaaacaactacagtggaaggatcactgagcccgggaggcggagcttgcagtgagccaagatcacaccactgcattccagcctgggagacaaagtgagaccctgtcccctctaaaaaacaaaaacaaaaaacaaaactaccgaattctataaaacttttccaagctcttaaaagtaagcacttttaca

SEQ ID NO: 12381 - DNA, 567 bp, Homo sapiens
ttacttgagttacttgcctatcaagtgttatgatcagcttagtactacatgaagagaaactaaacaggcacccttgggttggtgaagtatgatagatgtgcttgtatccataattctgatgaatgttaactacagacaccttaatcgattaggtgattttatattatatactccgtatttgtatacttccagccaagactgacatacgttccattttggctctttctttgggacctgatgccttttctccctcccctgtgttaagtactcttcttatacacttaccaacattcttaaaaacattctaaatgggtcagtccctgacaatattattgtagtgctcygattacatgcatcagctagaaaatctccatccaagttattctcccaattagatgccagatcagtttgtagtctgaaattttaatgaagtgacaaaaaaattacatctgaagtttaggcaaaatcaacaagtaccttaaagagagaaagtagaatgtattgtcagaccacacattttatttgaaatttttttatttattcatttatattccacctgattccaaa

SEQ ID NO: 12382 - DNA, 567 bp, Homo sapiens
ttacttgagttacttgcctatcaagtgttatgatcagcttagtactacatgaagagaaactaaacaggcacccttgggttggtgaagtatgatagatgtgcttgtatccataattctgatgaatgttaactacagacaccttaatcgattaggtgattttatattatatactccgtatttgtatacttccagccaagactgacatacgttccattttggctctttctttgggacctgatgccttttctccctcccctgtgttaagtactcttcttatacacttaccaacattcttaaaaacattctaaatgggtcagtccctgacaatattattgtagtgctctgattacatgcatcagctagaaaatctccatccaagttattctcccaattagatgccagatcagtttgwagtctgaaattttaatgaagtgacaaaaaaattacatctgaagtttaggcaaaatcaacaagtaccttaaagagagaaagtagaatgtattgtcagaccacacattttatttgaaatttttttatttattcatttatattccacctgattccaaa

SEQ ID NO: 12383 - DNA, 615 bp, Homo sapiens
catcatcataaatatatacagtatactatatgtagaatatataatatacatattacataaattcatataattccatgaaagactggaaggacatactccaaaatatatttttaaagacagggtctygctatgttggccaggttggtcttgaaccctaggcctggcctcaagcaatcttcccctgcctcagcctcccaaagtgctaaaattacaggcgtgagccaccatgccctgccaaaacagtccctttactaaaatattaaacactggttatctctattctttcatttgtgccagatatttgagctaagccagaagagaattttttatggtgatggttgtttatattatcattactatcgttattagaatgactgtaccatctctttcctcaactcattcataatctaggagaaaggttaaaaaaaaaaaaggaataaacaccaagtacgtggaactgcactatttagtgtttttgtaagtcttccaggcattgtgtagtaagcgtgtagaaataattgtagtttctcctccagttattttcccagttggaggagaaagattccaataactgtaaataaatacggctgagccatatttttaagaaataaaaac

SEQ ID NO: 12384 - DNA, 543 bp, Homo sapiens
actttcactgacagtattttgtgtgatttttatgacaatcatgtaaagtatgtattttgtccacagtcagataaggaaacaacagcagctcaaagacaagaaggtgaatgcggtagtgtacattaatagattgtatttgttaacatagtattgaggatttttaatatgagtagttgatcacaattttctgttcttgttttggtgctgaaattwcattggctcataaaataagttagagaacttctgttttgctactctcaaatcagttggtttggcatgggagtcacctgttccctgaaggtttcataaaattcacctgaaaaccagggaagcctggtagcacttgctaaggtaaactttgattatgtaattacggtaacctaatttgattacccaatttaattaacagttatgagtttactcagttttcttctcttttaaaaataaatgtatgcttttgttccaggaaattatcagttttatttaagttttcaaattcattgggataaagttgttcagaatattctcctatggatttgaatc

SEQ ID NO: 12385 - DNA, 1363 bp, Homo sapiens
aaacaagcccacactggtgtgagcatggctggggccccagaggagggtagacgtggaccaggggcaagagtgataaactagaaacagcttgagttgctggaaaaccaagtgtgctgtagacaagagctcagcatgaaaccggacccgccagcaggccccagattgtggagagcttttaggtccagcttgattgatttaagaccacctggctggtgagtagcagagataagacttaggtcttctttctcccaatccagtgctaactctactaagtcataataatggctaacatgtattagtagtgataataagatactgagcacgttaaatcattcaatctttacaagcacccaataaaatagatattattattactaattccacttttccaataaaaactctgagacttaaatgggaagtttaagtattgctcaaagacacacagctggtaagtgagtatcagttttctttttcttttttttttttttttgagacggaagtttcgctcttttttgcccaggctggagagcaatggtgcgatctcggttcactgcaacctccgctccccgggttcaagcgattctcctgcctcagcctcctgagtagctgggactacaggcatgtgtcaccatgtccagctaactttttgtgagttattagtagacacggggtttcaccatgttggccaggctggtcttgaactcctgatctcaggtgatccaccggcctcggcctctcaaagtgctgggattacagatgtgacccaccgcacctggccaagtatcagttttcttaaccattgtcactgtcttatggttcttctgtgttgtcttctgtggcatgagtatgtacaggaaaaaaagatcggcttatataatgcatttgagatgggaaaattcaagtacgtgtgattgtgcaagttatacggttatatttattgaaaagagtacccttttatccatttatttctcaatatggtaaaatttgacatgaatttcagggatgcttaatatttgtcttcaatggagacagcaaaacagagcccagggtgacttttctcttgctttgcctgtctatgtctcatgatggtgtcctgaggagcattttggtcaaatacgattaatgtgctgatgcatttattcctgagaatctcaaatatatctattgtgagaccatctagaagaagagtctcttacgaagaaaatgtggtttaagaaaaggaaaatgaaccctcaacccttatctggactaataagcaattatttgtcagaaaagttagggttgggcagaagaattacccytgaatgctaccatgagctctaactccctgcagttctacatcagtgttttgacagaatgcatg

SEQ ID NO: 12386 - DNA, 494 bp, Homo sapiens
tgataaaaaaagacttccatttcggcgcagtggctcatgactgtaatcccagcactttgggagtccaaggctggcggatcacttgaggtcaggagtttaagtccagcctggccagcatggtgaaacctcgtctctctaaaagtacgaaaaaagaaaattagctgggcctsgtagctgatgcttgtaatcccaactacttgggaggctgaggcaggagaattgcttgaacccaggaggcgggggctgcagtgagccaaaattgtcccactgcactccagcctgagtgagagagactcagttcccaaatatgtaaaatataaaaaagcaaaatattaacactgattatattggagtagtgggaaaatgctaactttttttttcttttttctcattctttttaaaattttctgtaatgaatattttatgttatgtagttaaaataaaaatgttatatagagtgtgttataaaggatactttacagagagtcgaatgt

SEQ ID NO: 12387 - DNA, 523 bp, Homo sapiens
acttttatatcagatgtcttatttagtgaatatgtgataagaactaagaatatgaaatttcaaaaatctaattgctaaaaattacttttataaaaatggcatagatgatactttagaactttaacattatattatacatatatatttttaatatcacaataaagattagtgaatcaatgatgatcctgtatgggtatacatcatgarttggaaatgttatagctgctagcaaccttctctgtaaatacaaatataaacaaagtagtgatttatttctgtgtttgagagagatttgaggaagacataatagcaacttgccctcctatttgctgtcattatctttaaatgtgactttcatcttctgataaggggttgatatccaaaatagataaaaactcaaacaactcaatagaaaaaaaaataattcaaatatggaaaaggatctgaatacaaatttatcaaaagaatatatgcatgtggccaaaagatagataaaataatgctcaacatcactaatcattgg

SEQ ID NO: 12388 - DNA, 523 bp, Homo sapiens
acttttatatcagatgtcttatttagtgaatatgtgataagaactaagaatatgaaatttcaaaaatctaattgctaaaaattacttttataaaaatggcatagatgatactttagaactttaacattatattatacatatatatttttaatatcacaataaagattagtgaatcaatgatgatcctgtatgggtatacatcatgaattggaaatgttatagctgctagcaaccttctctgtaaatacaaatataaacaaagtagtgatttatttctgtgtttgagagagatttgaggaagacataatagcaacttgccctcctatttgctgtcattatctttaaatgtgactttcatcttctgataaggggttgatatccaaaatagataaaaactcaaacaactcaatagaaaaaaaaataattcaaatatggaaaaggayctgaatacaaatttatcaaaagaatatatgcatgtggccaaaagatagataaaataatgctcaacatcactaatcattgg

SEQ ID NO: 12389 - DNA, 490 bp, Homo sapiens
tttataaccttggatttggaaaggactttctaggacttaacactcagaaactatagaagaacaactaaattaaaaagaaacaacctcttgcctggtaaatatataccataagtaaaaccccacataaatgactttctgagaataaatatttgtgacttatgttaaaagagccaatctgtctaattataaatatttcttaatataaataagaaaaggtcaataaatttacagaaaagcaggtaaaaaaattgagttcacagaaataaacataatttattattatgcatataaaattatttaagctgactaataaattgggcaatgtakattggaactacattaaaatatgacttctttattatgttgtaaaaaatacaaatttgacaacatactgatgacaaagctatgagcaaagccaatctatttgtaagagtaagaaattgtacaaacactttacaaagaaatatgactatttgtcaaagttataaat

SEQ ID NO: 12390 - DNA, 990 bp, Homo sapiens
cacctgtaacaggttctgtttgcagctctcacaaggtcccacaatagactgtctgcaagctgaggagcaaggagagccagtccgagtcccagaactgaagaacttggagtctgatgctcgagggcaggaagcaaccagcctgggaaaaagatgtaggctgggaggccaggcccgtctctccttttcacatttttctgccttctttatattcgctggaagctgactagattgtgcccaccagatcaagggtggatctgccttccccagccccctgactcaaatgttaatctcctttggcaacaccctcacagacacagccaggcttaatactttgtatccctcaatccaatcaagttgacgttcagtattaaccatcacacctggcatctcatctgartttttaaatgtctcactcacggcagcaaaacatctggttactattacttgagcctagaatctaatgtgttacacgacattcaccccctttgccccgggtttggcaaaggcattccaaggatgcacctctgctgtcaattgtagattctgtttactattttatcaagaatcattcaccattttggagaatcccatctctaaagcgacaacacttgaatattcaagttgtcaacataacagacgtgtaacaggttctgtttgcagctgttgtattcttagggttccacgtgtaggtgctgacatctggcctccatgagtgcagctggtgcccagatatttacatactgaaaggtttattttatgctcatcacttttcctgcatttctcctttttatcacattgtattaggctgttcttgcattgctataaagaaatacctgagtctgggtaatttataagaaaagaattggctcacagttctgcaggctgtacaggatgtatagcgctggcaacagcttctggtgaggcctcaggaagcttttactcatgaaagaaggtgaaaggggagcaggtatctcacagggcaagagcagg

SEQ ID NO: 12391 - DNA, 990 bp, Homo sapiens
cacctgtaacaggttctgtttgcagctctcacaaggtcccacaatagactgtctgcaagctgaggagcaaggagagccagtccgagtcccagaactgaagaacttggagtctgatgctcgagggcaggaagcaaccagcctgggaaaaagatgtaggctgggaggccaggcccgtctctccttttcacatttttctgccttctttatattcgctggaagctgactagattgtgcccaccagatcaagggtggatctgccttccccagccccctgactcaaatgttaatctcctttggcaacaccctcacagacacagccaggcttaatactttgtatccctcaatccaatcaagttgacgttcagtattaaccatcacacctggcatctcatctgaatttttaaatgtctcactcacggcagcaaaacatctggttactattacttgagcctagaatctaatgtgttacacgacattcaccccctttgccccgggtttggcaaaggcattccaaggatgcacctctgctgtcaattgtagattctgtttactattttatcaagaatcattcaccatyttggagaatcccatctctaaagcgacaacacttgaatattcaagttgtcaacataacagacgtgtaacaggttctgtttgcagctgttgtattcttagggttccacgtgtaggtgctgacatctggcctccatgagtgcagctggtgcccagatatttacatactgaaaggtttattttatgctcatcacttttcctgcatttctcctttttatcacattgtattaggctgttcttgcattgctataaagaaatacctgagtctgggtaatttataagaaaagaattggctcacagttctgcaggctgtacaggatgtatagcgctggcaacagcttctggtgaggcctcaggaagcttttactcatgaaagaaggtgaaaggggagcaggtatctcacagggcaagagcagg

SEQ ID NO: 12392 - DNA, 505 bp, Homo sapiens
acactttattataaagtttttagtttgtaaatctttttaacattaagatttcttcaaagtgaccyaaaaaaaaaggtaccttagctaagtccgaggtttgtcttaagagctgctctcaagctgtttgaatggcctgtcccagcctggtcttgtctcccagcaggagacccagagcaagtcagctagaggctggcagagataatgccatccccaggtggcaaagctgttaaccgcgcatcgccaaaccctccaggcctgaggtttaacaatgccccacagcaggagttgtgctgagatattaagaaagagacaaaagggaaagctatgtcgaatgtgagttcaaattgttcagcagaaaacctggaaaagtaattagcagactcttgtgaggaaagaattaatgcccaactgacctcccaagactctgtaatatctgaatttccactgttggatattcatttctttgaatagcccttctgggttcctctctgaaactctacatttg

SEQ ID NO: 12393 - DNA, 555 bp, Homo sapiens
ataaaaggaggctgagtcctgagatgggccccagagagagtgagtctacatccacatggagcaggaagcccctccgttgttctcccacagccagccacaaccaagagcacagacagttgggtaattttgcttccaaatactgactcagcctctgtaaccgcttcctgggcccaaagaaaactaacgagtgctcccttctcagggacagtgccccaagtggcagtgagggaaaacccacgagctcttccactcttggatgccagcggcctgctggcacgttcttcccaacacagcttttctgtgtctcagacctcatctccagcttgactattgatgacagccctgtctctcctgaccaggccttgggagctccctgctcccatctcagccagatgttctgcctaggcctgctcctgaaggctgtcagtgcccccagcacaygacctagcactgaattccacaacctcaccccaactcactatgaggcctcaatgaggtgatggcttggctctgaggaggcagtcactggaaagcccaaaactggctgaaaagagc

SEQ ID NO: 12394 - DNA, 1680 bp, Homo sapiens
ttattattattattttctttgagatggagtctcgctctgttgcccaggctagagtgcagtggcgcaatcttggctcactgcaagctccgcctcccgggttcacgccattctcctgcctcagcctctccagcagctgggactacaggtacatgccatcacgcctggctaatttttgtatttttagtacagacggggtttcactgtgttagccaggatggtctccatctcctgaccttgtgatctgcccgcctcggcctctcaaagtgctgggattacaggcatgagccactgtgcccggcctattcatttatttatttagagacagagtctcgctctgttgtccatgttggccaagctggtcttgaactcctgacctcaggtgatccacctgcttcagcctccctcatagctgggattacaggcgtgagccaccgtgcccggccctatcgctatttaaaaggcagagaaaatcttagaggtttttttattgtcaccagcggtgtttcgttgatgcgtaattgcctttggaggcttgaaaaaagttgtgcttaaaggtaatccctcaattatctggaaacttccaccctccagagtgaggcaccccaagtcctggtctggattcgtggacagagtccctgcctgtgaggcctgatggccagtcctctcgccttggccgtggtgcttcaggccctgttgcaggtgggacccgccctccttagggaccttgtttcccaggtgatgctcatgtaatctgcggtgacctctgccccttcccatctgacctctgtccccaggaaagatggcaggcgtgcgagggctcatcctgtccgcggcagttgtgcccctcgggcttctgctccagtggtcctggggcagggcagctggcgctgatgcccaggctctgcctggggacagttcccaggacgggagcctgagggcagcgcacgggaccagcgtgaggacacggactggcccgtgtctgcctctgacttgctgggtgtgcctttgagttcctctgagggtgggtgcgccgagggggatccagctgggccctggccacgtgcaggccagccagagccctggagcctgcaggtgggctgggacagggcttgcgaccgcaggggtggtgtgcgtttgcgctggcgtctgcacaggtgtgtgcgtgctgtgccatcacgctggtcaggcctgtacgccgtggagaggggcgctgtgtggggctcgctgcctgagccctgggtggaccgtggctgccccatgagttgtcggggacctccgctgccccttggacctcgcccgcggccctgggcaatgggtgtggtgacgtcctggggcccccatgagtcagctcgtcctcgtgcccgggcactggcctctccttcctgtgggcgcacagccccggttcctctgaaagcttcgtgggccgggacccgggatgagctggttaaaccctggccctgtgagcaggaggtgtggcttcggggsgcggccccgccctgggctcagacttgatcctgcaccggagggagccattctggaaggccgctgccccgggccctgtccctccccctctcatccccagggtgctggccagagccgggctcacagcgtttcttaaaattaacgatcccggccgggcgtggtggctcacgcctgtaatcccagcactttgggaggccg

SEQ ID NO: 12395 - DNA, 1680 bp, Homo sapiens
ttattattattattttctttgagatggagtctcgctctgttgcccaggctagagtgcagtggcgcaatcttggctcactgcaagctccgcctcccgggttcacgccattctcctgcctcagcctctccagcagctgggactacaggtacatgccatcacgcctggctaatttttgtatttttagtacagacggggtttcactgtgttagccaggatggtctccatctcctgaccttgtgatctgcccgcctcggcctctcaaagtgctgggattacaggcatgagccactgtgcccggcctattcatttatttatttagagacagagtctcgctctgttgtccatgttggccaagctggtcttgaactcctgacctcaggtgatccacctgcttcagcctccctcatagctgggattacaggcgtgagccaccgtgcccggccctatcgctatttaaaaggcagagaaaatcttagaggtttttttattgtcaccagcggtgtttcgttgatgcgtaattgcctttggaggcttgaaaaaagttgtgcttaaaggtaatccctcaattatctggaaacttccaccctccagagtgaggcaccccaagtcctggtctggattcgtggacagagtccctgcctgtgaggcctgatggccagtcctctcgccttggccgtggtgcttcaggccctgttgcaggtgggacccgccctccttagggaccttgtttcccaggtgatgctcatgtaatctgcggtgacctctgccccttcccatctgacctctgtccccaggaaagatggcaggcgtgcgagggctcatcctgtccgcggcagttgtgcccctcgggcttctgctccagtggtcctggggcagggcagctggcgctgatgcccaggctctgcctggggacagttcccaggacgggagcctgagggcagcgcacgggaccagcgtgaggacacggactggcccgtgtctgcctctgacttgctgggtgtgcctttgagttcctctgagggtgggtgcgccgagggggatccagctgggccctggccacgtgcaggccagccagagccctggagcctgcaggtgggctgggacagggcttgcgaccgcaggggtggtgtgcgtttgcgctggcgtctgcacaggtgtgtgcgtgctgtgccatcacgctggtcaggcctgtacgccgtggagaggggcgctgtgtggggctcgctgcctgagccctgggtggaccgtggctgccccatgagttgtcggggacctccgctgccccttggacctcgcccgcggccctgggcaatgggtgtggtgacgtcctggggcccccatgagtcagctcgtcctcgtgcccgggcactggcctctccttcctgtgggcgcacagccccggttcctctgaaagcttcgtgggccgggacccgggatgagctggttaaaccctggccctgtgagcaggaggtgtggcttcggggggcggccccgccctgggctcagacttgatcctgcaccggagggagccattctggaaggccgctgccccgggccctgtccctccccctctcatccccagggtgctggccagagccgggctsacagcgtttcttaaaattaacgatcccggccgggcgtggtggctcacgcctgtaatcccagcactttgggaggccg

SEQ ID NO: 12396 - DNA, 794 bp, Homo sapiens
ctaaaaatacaaatcagcctgtcatagaggcacatgcctttaatcccagctactcgggaggctgaggcaggagaatcacttgaacctaggaggcagaggttgcggtgagccgagatcgcgccattgcactccagcctgggcaacaaaagctaaattctatatcaaaaaattaaaaaaaaaaaaaaaagaaggctgtttgttgaccatttgagtggccagtcttggtgcttcctggtgggcgaggagagccctaccccattcctacccattccagtagtcatggcataagagtgattctcactttctgctatagcctccttatccattggctgaaatgattcttttttaatrtgtcttataaatgcttccatagcaaaaaaaattgaattgacttttatagggactctttcggggattgttacccatcattccataatttgtttgtactcctagaaaagggaagtatgccgagcacagtggatatttcgtctcaaataataaataaataaccaaatagaaaagaaagaaaaggaagtaaagggaaatatacaaatatacaaggtgttaggagagagttgctaatcgtgattcccccttaattgtccaaacagaccacctctggggatctattcgtaaaagactcgttagaagtgcagactcatgcatttgagaatcactcagggaaatctgaagatgacctgtggtgggggtgtaaatggatacttaaatgtgtcttgtgattgtgtgagagtgtgactgtgtgtttgtgtgtgtgctgtcatctgtggagtggg

SEQ ID NO: 12397 - DNA, 794 bp, Homo sapiens
ctaaaaatacaaatcagcctgtcatagaggcacatgcctttaatcccagctactcgggaggctgaggcaggagaatcacttgaacctaggaggcagaggttgcggtgagccgagatcgcgccattgcactccagcctgggcaacaaaagctaaattctatatcaaaaaattaaaaaaaaaaaaaaaagaaggctgtttgttgaccatttgagtggccagtcttggtgcttcctggtgggcgaggagagccctaccccattcctacccattccagtagtcatggcataagagtgattctcactttctgctatagcctccttatccattggctgaaatgattcttttttaatatgtcttataaatgcktccatagcaaaaaaaattgaattgacttttatagggactctttcggggattgttacccatcattccataatttgtttgtactcctagaaaagggaagtatgccgagcacagtggatatttcgtctcaaataataaataaataaccaaatagaaaagaaagaaaaggaagtaaagggaaatatacaaatatacaaggtgttaggagagagttgctaatcgtgattcccccttaattgtccaaacagaccacctctggggatctattcgtaaaagactcgttagaagtgcagactcatgcatttgagaatcactcagggaaatctgaagatgacctgtggtgggggtgtaaatggatacttaaatgtgtcttgtgattgtgtgagagtgtgactgtgtgtttgtgtgtgtgctgtcatctgtggagtggg

SEQ ID NO: 12398 - DNA, 446 bp, Homo sapiens
  misc_feature (1)...(446): n = A,T,C or G
agggagggwtcagggaagggaggctatatgccaaacagaagggacagaatgtgcaggttcctatggtgcaagggaccatggagcatttaaggaactaaaaaccagtggtatggctggctcatgaagactacagagggagaggtgactaggattatccattttcatcttaggaaccgcaataagcattaaatgtgtatatatgtggtagagtgaggagtggaaggtaatgagtatgtgtttgtgtttgaggttgtgacatatcagagacgtgaagtactatagctaagtgactttggtaagttaacttctctaaacctaaatgtcttcatatggaaagtgatgtaannnnnnnnnnnnnnnnnnnnnnnnnnnnnnnnnnnnnnnnnnnnnnnnnnnnnnnnnnnnnnnnnnnnnnnnnnnnnnnnnnnnnnnnnnnnnnnnnnnna

SEQ ID NO: 12399 - DNA, 658 bp, Homo sapiens
ttttctgggaagcctgagtttttttttttaattttgccctcgcatagggtcatcttctgtcttatgcttttaaattcaaggattctttccccttggtgatctcccttcaagtttgctrtcagaaccaaagtcctcttcatggcatgcgagactcacaatctgactgcttttccattgttttgggggacacacaaatatctacatgattttgagaaactctatgttaaactattttcttttcttttttctttctttttttttttttttgagactgagtttcatgctcgttgcccaggctaaagtgcaatggcacgatctaggctcactgcaacctctgcctcctggattcaagcaattctcctgcctcagcctcctgagtaggtggaattacaggcacctgccaccatgcccagttaattttttgtatttttagtagagacagggtttcaccatgttgggcaggctggtctcaaactcctgacctcaagtgatccacccgccttggcctcccaaagtactaggattacaggtgtgagccactgcacctggccaaactattttcttagttctctttttgcatcatgtctgaaatgtgtaatagtagtggtttctgttccactgttttttgttgttgttgttaacttttctgcacactcca

SEQ ID NO: 12400 - DNA, 521 bp, Homo sapiens
gtcatgtattccttcagcatttgcttctctgaaaagaattttatttttctccagttacaaagacttagtagtgttattttattgttttatttgattcttgtatctttgttcctcattttctctttttctgtctctgtgtcttttttatacttatcttgatatgcttttacttctttcttattttgttttgtgtatctattcagatatattcttggtggtatattrggaattacataatacctctaaaagataaaacagtgtattttaatctggtaaaaaatgaacttcagctggattcataaattttttctcattatatctgccctcaaatttgtcattgatgttgctaatcatatattttatgttgtatatcattaacaaatgtttataatgatttctattcttttacctttcaaattttagagaataattaaaaatgttttttgtgccattattataatgctaagaaattccatttttgtgtatgtgcatgtttccctagaaaataatgtatttatatg

SEQ ID NO: 12401 - DNA, 521 bp, Homo sapiens
gtcatgtattccttcagcatttgcttctctgaaaagaattttatttttctccagttacaaagacttagtagtgttattttattgttttatttgattcttgtatctttgttcctcattttctctttttctgtctctgtgtcttttttatacttatcttgatatgcttttacttctttcttattttgttttgtgtatctattcagatatattcttggtggtatattaggaattacataatacctctaaaagataaaacagtgtattttaatctggtaaaaaatgaacttcagctggattcataaattttttctcattatatctgccctcaaatttgtcattgatgttgctaatcatatattttatgttgtatatcattaacaaatgtttataatgatttctattcttttacctttcaaattttagagaataattaaaaatgttttttgtgccattattataatgctaagaaattccatttttgtgtatgtgcatktttccctagaaaataatgtatttatatg

SEQ ID NO: 12402 - DNA, 520 bp, Homo sapiens
tctttaggataagctgtactatgtactatgtgttttacacaaaaataagtttttctaggaacattattaaagacatgtatagtgtaatgttttataatagtatttcaagacattttctggatttgacttttttttttttttgcttaatactagttatactccaatgtccttaccaatgggaaataaacacatatgacaaaaaaaatagaggaataaaaggaatagargatgcaggcaaaagagcaaggaggagctaaaagaagaagctaagaaggtagaaagatgtaggatctgtgagggaagaacatttctgtatgctgtggcaatatataaaacaaaggagtaaaggacatggagaaggaagggctgtcagaaaaagagtagagagacaaagacaattaataattctatatttttgcaatgttgtctccaaccttaaagctttgagattgtcattagagtccttaaaaagctatatttcctttccttgaatatatatttttctagcatgttgccaaca

SEQ ID NO: 12403 - DNA, 520 bp, Homo sapiens
tctttaggataagctgtactatgtactatgtgttttacacaaaaataagtttttctaggaacattattaaagacatgtatagtgtaatgttttataatagtatttcaagacattttctggatttgacttttttttttttttgcttaatactagttatactccaatgtccttaccaatgggaaataaacacatatgacaaaaaaaatagaggaataaaaggaatagaagatgcaggcaaaagagcaaggaggagctaaaagaagaagctaagaaggtagaaagatgtaggatctgtgagggaagaacatttctgtatgctgtggcaatatataaaacaaaggagtaaaggacatggagaaggaagggctgtcagaaaaagagtagagagasaaagacaattaataattctatatttttgcaatgttgtctccaaccttaaagctttgagattgtcattagagtccttaaaaagctatatttcctttccttgaatatatatttttctagcatgttgccaaca

SEQ ID NO: 12404 - DNA, 520 bp, Homo sapiens
tggaagcaaagcttatttttaaaatactgactctcgttctccattctgggccaggaaaagccatgactggatctcataagaatagggaggaattgtgtcatacagaggcctctgcaaatactttcccaaccacagttgattcaagtcgtcacttgatgatttggcccatcccaggggtgcatcagtgttgagacatttcaccctggagttcttacaaaggacccctcagtcagttgtaataaagaatggcaataaatcatgcccagatcatgacatggaattggatggcataaagtgctcctcagttcagaaagatgttcacacaccttggaggccgcacccaaacctgttcaaccatcccacaagcatgagtctgagacactctgggggcacccagttcagaccttcaccttcactgaggtgggacagcttcgttggaggccctgaaaggggktaggtatgtctaatctcagataccctgctgctgctcttcctccatgccgtgctcacatttttcttg

SEQ ID NO: 12405 - DNA, 578 bp, Homo sapiens
aaattataccaggcttggtatcgcatgcctgtaatcctatcactttgggaggtcaaggtgggaagatcacttgagcttaggagtttgaggccagcctgggcaacatagtgagaccctgtctccatttttatataaacaaataagcaaaaattttgatgaaaaatttttttgtaaccaaattaaaatttatgaatttcatttgtacaaaaaaggcagtggataactaacttgtttttaatattggaatggtagtatgtgcagaacagtgttttagaaaaatacatctcacaacaytgaagaagaaaatgtatgttggagattttgtgttttagatatatctcaacctgtcagctttgaaagaatgtggctatgaaatggagtgtgtttgttaaagaaataagtaaatcagtaagtgaatgttggttagttgggtggagaaaggcttagaagcatctagcactaaaagatatattcttttgtggttatctggctgatgtcatgaaattctgacttataccaccagggaagcttacatttctctttggcagggaacttcaaatttagtacagtttggacct

SEQ ID NO: 12406 - DNA, 560 bp, Homo sapiens
ggtgttcaatggggcttctttctttccccaactgctatttcacaatacatagaggaggagtttaattgcttgcacccacctgcacccttgtcatttcttggttctattggttttaatgaaaatattaagtgcactctaggaacagcagctaagtgacattttgattgaaatacacaaggaaatgtataatggaagcaggcactattacaaygttaatagaaactgaaagaagcaacatccagaacaacatttttgctattgttatgcatatagctagtcctcagaagggtaataggggacttacccttctagctcttggtaaaagaggctttcacctcagctacctgactttttttggttttgttttctagaagaataaagtggccagctttgatgtattttctttcattagacacctcttagatagcattcatggtcaagcatatattggaatacctttcctcttctctggagtcacaactcagtagagtttctgtagagaagttggatttattgacatgaatataggatgaaaacaatgattccttgcaggtgaactc

SEQ ID NO: 12407 - DNA, 560 bp, Homo sapiens
ggtgttcaatggggcttctttctttccccaactgctatttcacaatacatagaggaggagtttaattgcttgcacccacctgcacccttgtcatttcttggttctattggttttaatgaaaatattaagtgcactctaggaacagcagctaagtgacattttgattgaaatacacaaggaaatgtataatggaagcaggcactattacaacgttaatagaaactgaaagaagcaacatccagaacmacatttttgctattgttatgcatatagctagtcctcagaagggtaataggggacttacccttctagctcttggtaaaagaggctttcacctcagctacctgactttttttggttttgttttctagaagaataaagtggccagctttgatgtattttctttcattagacacctcttagatagcattcatggtcaagcatatattggaatacctttcctcttctctggagtcacaactcagtagagtttctgtagagaagttggatttattgacatgaatataggatgaaaacaatgattccttgcaggtgaactc

SEQ ID NO: 12408 - DNA, 816 bp, Homo sapiens
cagactggagtgcaatggctattcacaggtgtgattatagtgcactataccattgaacacctgggctcaagtgatcctcttgcctcagcctcccaagtagctgggactacaggtgtgcaccactgtgcacagctgctttctttttgcatctcaaatcttttatataggatcattttgcttctaaatgaagtatatctgtgagaatttcttttggtgacattctctcataataatctctattttagtccgatagttttatttcacccttgtttttgaagaatcttttcatcaggtgtagaattttaggtttgtggtgattttattttagctcattaaaaatatcattccaaagtctgtgttgacagaaaaacatagctcctttagcagtttccttttctttttggttttgaagttacaccctgatgtgtctaggtgtacaagttcagggaaactgtagatatacaacaaggaaagctaaaaatacaatagttcaaaatgacaacctaggttccctattccaggttgataggtggctatggtccacattgctatccaggaamccaggtttcttctatcttgtttctctgccacccacggtgaaaaccaggtcacaggcatattcttgctttggtttataggaggaggaaggaaaatggagatagcttataaataaacaaggtcccagctgaaagcattataatggtaagaaattatgtacaaagtcacacttacccataaggaagaatgaagaatgtagagtatttgagaagccatgtatcggtacttctattactatgcagaaagggaaattgcaat

SEQ ID NO: 12409 - DNA, 1394 bp, Homo sapiens
agaaatgagacctttttaactcttgagtgctcatgatgcaaagtgaacctgagaccatcsagggatgacgaatggatgcgagccactcttcctccacaaacttcaccttccttccaccatcctcagagtaccatgtctaaaactaggatactcatcagttgaattggatgggaatgaaatccaagtcccacctccatggattccagccacactcactaaacatgagaacaggcagaacgcacacagaatgagaagtgggcgtgtgaacagggggctgaagtctggaaggcactgagcaacagaagctaccagctctttcgccttgagaaagcctggctgtgctttgtatcttgtctgtaaatatctgtttactgagttaaaatgcaaacagtctgggtgtgccttaaaagtgaacaccaaaaaggaaaggcctaacccagttcagtggctcatgcctgtaatcccagtgcttcagaaggctcaggtgggaggattgcttcaggccaggagtttgacaccagcctgggcaacacaacaagatcccgtctctataaaaatttaaaaatgtagccgggcacagtggtgtgcacttgtaatcccagctacttggaagcctgaggcaggaggatctcttgagcctggaagatcgaggctgcagtgagccatgattgcaccactgcactccagcctgggtgacagaacaagaccctgtctttaaaaaaaaaaaaaaaaaaaaaaaggaagggagggagggaaggagagaaggaggaaagggaggggagggggagggaagggggagggaagagggagggaagggggaggggaggggagaagaaagagacctgtgggaaagctgatgtgagcgtgacaagggaggtgtcctcattcaacacattgacttttgcagtttgctctgtgctcagggctgggaactcagggatgagatagccagtcggtgtcctgctaaagcagaatggtaagacacacacacaaatgagaacaaaaccctgtgctgagaacactgcattcttccactcgaagcattgcgtggacctgtcgcggcagcaccacctgggggtttgttagaaaagaatcttaggctccagaaccagaatctgcattgtagcaggaactccagggttttagaagcatggctgcatagggtaaggggccctggggagcttacagtgggaggagaagggctgattctgtctaagagggtcagggaaggcctcccccaggaagtcacatttgggctggatcttcaaagatgagtaggaacttaatttgagaagagatggaggaaattccaagcagaggaaggggtaggatgagatggtgacagactgcagagagagatgatgctgaactggaaacgggggctagaatctgat

SEQ ID NO: 12410 - DNA, 1394 bp, Homo sapiens
agaaatgagacctttttaactcttgagtgctcatgatgcaaagtgaacctgagaccatccagggatgacgaatggatgcgagccactcttcctccacaaacttcaccttccttccaccatcctcagagtaccatgtctaaaactaggatactcatcagttgaattggatgggaatgaaatccaagtcccacctccatggattccagccacactcactaaacatgagaacaggcagaacgcacacagaatgagaagtgggcgtgtgaacagggggctgaagtctggaaggcactgagcaacagaagctaccagctctttcgccttgagaaagcctggctgtgctttgtatcttgtctgtaaatatctgtttactgagttaaaatgcaaacagtctgggtgtgccttaaaagtgaacaccaaaaaggaaaggcctaacccagttcagtggctcatgcctrtaatcccagtgcttcagaaggctcaggtgggaggattgcttcaggccaggagtttgacaccagcctgggcaacacaacaagatcccgtctctataaaaatttaaaaatgtagccgggcacagtggtgtgcacttgtaatcccagctacttggaagcctgaggcaggaggatctcttgagcctggaagatcgaggctgcagtgagccatgattgcaccactgcactccagcctgggtgacagaacaagaccctgtctttaaaaaaaaaaaaaaaaaaaaaaaggaagggagggagggaaggagagaaggaggaaagggaggggagggggagggaagggggagggaagagggagggaagggggaggggaggggagaagaaagagacctgtgggaaagctgatgtgagcgtgacaagggaggtgtcctcattcaacacattgacttttgcagtttgctctgtgctcagggctgggaactcagggatgagatagccagtcggtgtcctgctaaagcagaatggtaagacacacacacaaatgagaacaaaaccctgtgctgagaacactgcattcttccactcgaagcattgcgtggacctgtcgcggcagcaccacctgggggtttgttagaaaagaatcttaggctccagaaccagaatctgcattgtagcaggaactccagggttttagaagcatggctgcatagggtaaggggccctggggagcttacagtgggaggagaagggctgattctgtctaagagggtcagggaaggcctcccccaggaagtcacatttgggctggatcttcaaagatgagtaggaacttaatttgagaagagatggaggaaattccaagcagaggaaggggtaggatgagatggtgacagactgcagagagagatgatgctgaactggaaacgggggctagaatctgat

SEQ ID NO: 12411 - DNA, 1394 bp, Homo sapiens
agaaatgagacctttttaactcttgagtgctcatgatgcaaagtgaacctgagaccatccagggatgacgaatggatgcgagccactcttcctccacaaacttcaccttccttccaccatcctcagagtaccatgtctaaaactaggatactcatcagttgaattggatgggaatgaaatccaagtcccacctccatggattccagccacactcactaaacatgagaacaggcagaacgcacacagaatgagaagtgggcgtgtgaacagggggctgaagtctggaaggcactgagcaacagaagctaccagctctttcgccttgagaaagcctggctgtgctttgtatcttgtctgtaaatatctgtttactgagttaaaatgcaaacagtctgggtgtgccttaaaagtgaacaccaaaaaggaaaggcctaacccagttcagtggctcatgcctgtaatcccagtgcttcagaaggctcaggtgggaggattgcttcaggccaggagtttgacaccagcctgggcaacacaacaagatcccgtctctataaaaatttaaaaatgtagccgggcacagtggtgtgcacttgtaatcccagctacttggaagcctgaggcaggaggatctcttgagcctggaagatcgaggctgcagtgagccatgattgcaccactgcactccagcctgggtgacagaacaagaccctgtctttaaaaaaaaaaaaaaaaaaaaaaaggaagggagggagggaaggagagaaggaggaaagggaggggagggggagggaagggggagggaagagggagggaagggggaggggaggggagaagaaagagacctgtgggaaagctgatgtgagcgtgacaagggaggtgtcctcattcaacacattgacttttgcagtttgctctgtgctcagggctgggaactcagggatgagatagccagtcggtgtcctgctaaagcagaatggtaagacacacacacaaatgagaacaaaaccctgtgctgagaacactgcattcttccactcgaagcattgcgtggacctgtmgcggcagcaccacctgggggtttgttagaaaagaatcttaggctccagaaccagaatctgcattgtagcaggaactccagggttttagaagcatggctgcatagggtaaggggccctggggagcttacagtgggaggagaagggctgattctgtctaagagggtcagggaaggcctcccccaggaagtcacatttgggctggatcttcaaagatgagtaggaacttaatttgagaagagatggaggaaattccaagcagaggaaggggtaggatgagatggtgacagactgcagagagagatgatgctgaactggaaacgggggctagaatctgat

SEQ ID NO: 12412 - DNA, 814 bp, Homo sapiens
ccacacaatgtgtattatttaggggaaaaaatgtcaaataagtttggaatgctgagttaagtaaagttaagcagatgtcttatctgaagggctacctctaataaacctctaataaagctaatatgtatagtgaaattccaaaggggccaagtatgcagtttcccaaacttattccagtggtatgctgcagctggcccataccagcttaaggttgtgggcatctcttcccaactctgagttcagtgatgtcactgtggtagtttgaaattggccatggtgggagtagttacgccacacaaattgacagttactaacaggttttctttaccaccataccattgtcttagaaaacacttgttaataaaacctgtcacaggactagtgcattagtattctactgctgtttcaacaaattatcacaaattgagtaacttatagcaatacaaatatgttatagttcttaggtagaaatctgacacaggtctcactgggccgcagtcaaggtgtctgcattcctttctgaaggttctaggagagagttcatttccttaacttttccaacttttggagccatctgcattccttgactcagggccccctttctttatctttaaagccaacaacagcagactggtcccttctcacagggcagcacctcttctacacccttttctacttttaaggaccttgtgattrtaatgggcttacccaaataatccaggataaactctctattttcagatcagttaattagcaaccttaattccacctgcaatcataactaccctttgaaatgtcaagtaatacagtcaca

SEQ ID NO: 12413 - DNA, 561 bp, Homo sapiens
tcaaacttcattcaagaaggaactcggaaatatgttaataagaagcactgtgataacaaaccaggattttccaaattgacctagaggtaacaacaatataagaaaaattttaatatatcacttttaaaataataaaaatgatttccttttctagaatgacccaaactctaattttccgtctgaggctcataaaactaatcataaygaattcatttagcatgattatggggtgtggtacagctcttcagaagaaattttgttctattataattttattccagagcactatatcattaaagtgaaatattaatgatatttttattacaattgtcaagaaaattatggacaggattccaaaaacataaaagcttgtaattgttttaaaaacctacatttttaaaatgtgctattcaaagactttcaacttcttcagaaaataatgcataatggctctcatttatcctgggtatttattattccaaaattatataaatgctcagttgaatcaaagagcagcagtaaaagaatttatatgaaagattaattagaacagaatatttc

SEQ ID NO: 12414 - DNA, 594 bp, Homo sapiens
acttaatcacacatagtcaaagggcaccatttccggacttttctcacggttttttttgtttttttttttaactacgtttttcaaacacagctcaaatcatgtggcgttacgtcatctgggctatgaagaatccaaatggtgatgggtgccgttttcctgttgtccaggattgtagaaaagatgaaatctctagaaaaggaatcccaaacaacaacaacaacaacaacaacaaaggcaaaagaaatttgagtccatttaatgcataacccaagtgttgcagatcctctcagttcatggaaacatcaaycttctgccgaattgtataatatggtattagaatatagtcaaaagtcttgtttaacagtttaagagtacatgagatgatagttatactgatatgcctgaataagctcctatcttacttgaccccactgaaggtagcatgtgaaactctaagtaaaatatttcttaaagcattatttgaatgcatgagaataaaaaaataggcagattctggagggaatttgaaagttgaaagaatggattgcaagaaatgagctgatggtttttataacatgcagcactaaaatgcca

SEQ ID NO: 12415 - DNA, 594 bp, Homo sapiens
acttaatcacacatagtcaaagggcaccatttccggacttttctcacggttttttttgtttttttttttaactacgtttttcaaacacagctcaaatcatgtggcgttacgtcatctgggctatgaagaatccaaatggtgatgggtgccgttttcctgttgtccaggattgtagaaaagatgaaatctctagaaaaggaatcccaaacaacaacaacaacaacaacaacaaaggcaaaagaaatttgagtccatttaatgcataacccaagtgttgcagatcctctcagttcatggaaacatcaaccttctgccgaattgtataatatggtattagaatatagtcaaaagtcttgtttaacagtttaagagtacatgagatgatagttatactgatatgcctgaataagctcctatcttacttgaccccactgaaggtagcatgtgaaactctaagtaaaatatttcttaaagcattatttgaatgcatgagaataaaaaaataggcagattctggagggaatttgaaagttgaaagaatggattgcaagaaatkagctgatggtttttataacatgcagcactaaaatgcca

SEQ ID NO: 12416 - DNA, 1596 bp, Homo sapiens
tgcattgtatagtctgggtctctctctgccccactcctgcttcctctccacttcctttttacatatattagatctaaaggctttccactcaatttttcttattcatcattttatcttttacagtatgtataacccaataagttgttgtcacccttaattctgtctcaatgtctgtttcccaagggtcctatctgatgcagaactccagaatatgttacaagtatatttgttaagattattcagcatcaaggtaaattttagctgaagggcttttcacaatatcttgtatgacacatgcttcaattggaaatcaattacgcttgcaatttctttggggtttgtcctccatattaccaatatgcacttcatttctttgatagtctatttttctcctccctttgttgacatgctcctattttatgtccttttattatctttcaccattttttcctgagttctcatttttgcttcaagattttattcatattaatattcctgcaataactttctttaattcatggtgatacagctggtgaccaattgattcagttctatatctgtatttttctggtgattctactctaaagaagtttttcctcttctttttctcctctttataacattattttatagaacgtatttcatttattattattattgttaatcttcgaatgaggcgttaaagaaaatctgagctatatttcaagtcagaaagaacttttcctggttcacgtaaagttccttataaagcacaaagttgtaggaatgaatgacttgatgtttttctggacaaaagtgattgatagctgaaatattgctcatttccctccatttgtttcctgaacataggtgtgtcttgtgcttctatatttggcagctcttctcttccttcttaaactccaactaagtctaggggatctcctgccaatagacgcaccatgtttctattgttgaaaataagaaatgttggttttctcttctaataaktgttatctactttgcactgcaatgtcctgtaggtctctccttagatctgcacctctgtttaatttttttttttctttttctttttttttttttttttttttttttgagacggagtcttgcccttgtcatctaggctggagtgcagtggtacgatctcggctcactgcaatatccacctcccgggttcaagcaattctcctgcctcagcctcctgagtagctgggattataggtgcctgccaccatgcccggctactttttgtacttttagtagagatggggttccgccatgttggccaggctggtctcaaactcctgacctcaggtgatccacccacctcggtttcccaaagtgctgggattacagatgtgagccaccatgtctggccacctctgtttaatttttatggtatttgacaacccattctttcacattatagttgatattcatatgacttttagttttatccaaaaggaagataacatattttcctttcctttctctttattgcttgaggataatttccaagaagagaaagactttaaactgtctgtctacttcaatattttaaaaccagagttttatatttatattttacacgtaatgcat

SEQ ID NO: 12417 - DNA, 1596 bp, Homo sapiens
tgcattgtatagtctgggtctctctctgccccactcctgcttcctctccacttcctttttacatatattagatctaaaggctttccactcaatttttcttattcatcattttatcttttacagtatgtataacccaataagttgttgtcacccttaattctgtctcaatgtctgtttcccaagggtcctatctgatgcagaactccagaatatgttacaagtatatttgttaagattattcagcatcaaggtaaattttagctgaagggcttttcacaatatcttgtatgacacatgcttcaattggaaatcaattacgcttgcaatttctttggggtttgtcctccatattaccaatatgcacttcatttctttgatagtctatttttctcctccctttgttgacatgctcctattttatgtccttttattatctttcaccattttttcctgagttctcatttttgcttcaagattttattcatattaatattcctgcaataactttctttaattcatggtgatacagctggtgaccaattgattcagttctatatctgtatttttctggtgattctactctaaagaagtttttcctcttctttttctcctctttataacattattttatagaacgtatttcatttattattattattgttaatcttcgaatgaggcgttaaagaaaatctgagctatatttcaagtcagaaagaacttttcctggttcacgtaaagttccttataaagcacaaagttgtaggaatgaatgacttgatgtttttctggacaaaagtgattgatagctgaaatattgctcatttccctccatttgtttcctgaacataggtgtgtcttgtgcttctatatttggcagctcttctcttccttcttaaactccaactaagtctaggggatctcctgccaatagacgcaccatgtttctattgttgaaaataagaaatgttggttttctcttctaataattgttatctactttgcactgcaatgtcctgtaggtctctccttagatctgcacctctgtttaatttttttttttctttttcttttttttyttttttttttttttttgagacggagtcttgcccttgtcatctaggctggagtgcagtggtacgatctcggctcactgcaatatccacctcccgggttcaagcaattctcctgcctcagcctcctgagtagctgggattataggtgcctgccaccatgcccggctactttttgtacttttagtagagatggggttccgccatgttggccaggctggtctcaaactcctgacctcaggtgatccacccacctcggtttcccaaagtgctgggattacagatgtgagccaccatgtctggccacctctgtttaatttttatggtatttgacaacccattctttcacattatagttgatattcatatgacttttagttttatccaaaaggaagataacatattttcctttcctttctctttattgcttgaggataatttccaagaagagaaagactttaaactgtctgtctacttcaatattttaaaaccagagttttatatttatattttacacgtaatgcat

SEQ ID NO: 12418 - DNA, 1596 bp, Homo sapiens
tgcattgtatagtctgggtctctctctgccccactcctgcttcctctccacttcctttttacatatattagatctaaaggctttccactcaatttttcttattcatcattttatcttttacagtatgtataacccaataagttgttgtcacccttaattctgtctcaatgtctgtttcccaagggtcctatctgatgcagaactccagaatatgttacaagtatatttgttaagattattcagcatcaaggtaaattttagctgaagggcttttcacaatatcttgtatgacacatgcttcaattggaaatcaattacgcttgcaatttctttggggtttgtcctccatattaccaatatgcacttcatttctttgatagtctatttttctcctccctttgttgacatgctcctattttatgtccttttattatctttcaccattttttcctgagttctcatttttgcttcaagattttattcatattaatattcctgcaataactttctttaattcatggtgatacagctggtgaccaattgattcagttctatatctgtatttttctggtgattctactctaaagaagtttttcctcttctttttctcctctttataacattattttatagaacgtatttcatttattattattattgttaatcttcgaatgaggcgttaaagaaaatctgagctatatttcaagtcagaaagaacttttcctggttcacgtaaagttccttataaagcacaaagttgtaggaatgaatgacttgatgtttttctggacaaaagtgattgatagctgaaatattgctcatttccctccatttgtttcctgaacataggtgtgtcttgtgcttctatatttggcagctcttctcttccttcttaaactccaactaagtctaggggatctcctgccaatagacgcaccatgtttctattgttgaaaataagaaatgttggttttctcttctaataattgttatctactttgcactgcaatgtcctgtaggtctctccttagatctgcacctctgtttaatttttttttttctttttctttttttttttttttttttttttttgagacggagtcttgcccttgtcatcyaggctggagtgcagtggtacgatctcggctcactgcaatatccacctcccgggttcaagcaattctcctgcctcagcctcctgagtagctgggattataggtgcctgccaccatgcccggctactttttgtacttttagtagagatggggttccgccatgttggccaggctggtctcaaactcctgacctcaggtgatccacccacctcggtttcccaaagtgctgggattacagatgtgagccaccatgtctggccacctctgtttaatttttatggtatttgacaacccattctttcacattatagttgatattcatatgacttttagttttatccaaaaggaagataacatattttcctttcctttctctttattgcttgaggataatttccaagaagagaaagactttaaactgtctgtctacttcaatattttaaaaccagagttttatatttatattttacacgtaatgcat

SEQ ID NO: 12419 - DNA, 500 bp, Homo sapiens
gatgaaggtagagcccagtagaaagtctttscctgccttataacagtttattcaaaagaggtggcacatgtaattgttactgggatttctacttctttatataaaatcatccataacttctccaagccatagtgagtttttaaagtagagaagagtaggtcagggagtagatctgctcccattacaaactttagtccctatcacagacattctaagcatattttttactccaggatctaagtcactggttaaaatgttcactgcccaagaagcaatctcaatggaatgccatttgctgtatctccccaggttgacactgaaccacagataatgtttgtcaaaatgagacacttcaaccagctgtctcttctcatagcacatgtgctcacagttgtcagtgaagaattaagactgtaacagcagggacagtaaggattaatcttgacagtttagtaaaaggaatgcacagtttagctttgtccaagtcaggatgccttcct

SEQ ID NO: 12420 - DNA, 530 bp, Homo sapiens
aacaatgagaaaattctccctctgctcctcacctcaagtttcagtgagaaccagtatgtaagtcttgcttatatgggcatatggatgtgatagttcatagcaggagagcttaagtgtgcatgaatgaagactaaagcagaaatggctttgtgcaaatatcaccagaggcaaactagactgcaagattgcactgaaagatgcatgtacacccaccataaacattaatttttactacaagaaacaaacacccgaaatsaaggtgtatatgtgggtccttagcacgagtgaaccacgaaaatcagctctctggaacactatgaattaatctagccttttattaaaatcatcattctctggaatcctcttattcatataaaaaaagtgtgatcccctaaagctagggctaaacgtgactcactttgagtaaatcgagcctgttagaaattgatttgcctcacgtttacctacgtaagaaacctgcatatcctactcgtgtaccctgaaacttaaaattaaaaaaaaaagaaatg

SEQ ID NO: 12421 - DNA, 496 bp, Homo sapiens
catttacttagccaagcttgtggtcatacacccatccataggcagggtgcaggcccctgagtagggcccctggttacagttccactagcctaattacctcaaaaagaaataaagatgctgttaggaaggaaaaacatacacgacagaaaaaaaaaattggtgggggggttccctctatactaccaaggctttctttaaaaattcttgaagaagctaactagcagtagactcttaatttctcaagactattaactagtaattgatgacaaccaargaaggtagttttcctaatacctacaaaacttcagcctaataacttttcacttccagaggcctcacttcctgtattacctgaaagttaccttttcatttgattcctaaggaccaagcagaattttcccttctttggtagcaacatgcttattttagaaatattatcctgaagcttctaaaaagaatagacttataaaaatgtataatgaataaattcataaag

SEQ ID NO: 12422 - DNA, 545 bp, Homo sapiens
tgggtctttagccacctggaatttctttgtgagttgaagagtaagttttttttccataataagaacaaaagtttaaatattttaaaataatctggctatgtattataatgccatttctgtcacatggcaagcttccatatatgcagggctctccattatgttccattgttctttttatttatccctctgtcactaccatgcttgtaattattataactttatgataagctctgatattatatatagggcttattgttgcaaattcttccttctcttccaaaatawactggttattcttggccttttgtattttcatgccactctgtgattatctcattaaatttcatgaaattcctactgggcagagtacattgaatttatatacgaatgtgggtataactatattatttatttaatttaaaaccttttgaataaatacatatttgaaaaacaagaagtgctctattttactggtctgtgctatcattctggcggaggggatagatcatttatttttatacaaatagcacaataaccagcagatg

SEQ ID NO: 12423 - DNA, 1111 bp, Homo sapiens
gttcaaataatgcctatttggacatgttacmcatcttgcctattgcccttctagtgtacctaatctctatccacactgcatcaatggctggcctgaactctccttaagttgatacatgcaggttacaccattactttgccctcatttgatagcatctaagacaaataataaaacctcagaccactggtcttggaatacaaacaagaacaaccatttctactctcctccccacccctccaaactctggctcatgtgtttaaaggaccagcattcacagtctgtggtcagtccctgaattatacaattctctttcaaagtttgggaagagagaatgttgagaaagaagttgaggcctgaagagagactgggataatttagaattggaagcagagacaggtggttaagatcttctccagtatctgaagagatccttagccacggagtgaatgtcaagttaatgcagaagttgttggaaaagtttcaaagccaaggttcagatgggacatgagttagctgtgatagcttctgtagcactagtcttcatgccaaaaatttggtagagcgagataatccctgccagtggattaaattattttataggactttcgaggaactctcatgtgttcactgtcacccccgtttttgtgctctcctctacctgcataggaaattacggaatattaggctttcggattcagtgttagtttctgggtactttggaagttccagaaaagaggaaaacaataaatttggggcaggtaaccaatgaaacccactttgcacagcactcagaacactcaatatgtgtgaatatttttaggtatcatatcaaagcaatatatatagcattttagagaaaaaatgagtaaaattgtgagtgttctgtgttagtgagtcccttacccacctcgagacatgacaatgtcccaggttcctgcttggaaaacatattcagatttaagaattctatctcaactcttggttcacccatgccttctgcctctgatggtgaacactttcatgctaaatacttccaatgatggaagtatttagtggaaagaaaccatcctccaggtacagtgctatctgagcctcccttgaggaattgaaa

SEQ ID NO: 12424 - DNA, 575 bp, Homo sapiens
acattagtgctytccttaaccgtaaatttattgttctctagacttggggctggtctgttgctagctaacttgacaacccttgaaactgcctggctctcccaatgctagaattcaatcagagattctgccttctagatgcccaggtataaggtaaggctaaggaatgagcagctgtcttgtatccctctatcaatatctcttcactgaataggacaggctcttatgctgagtgattttatggacaaccagaatggcccttggcacttgtgagtaaccttggctcctggccatttcagcccatatctcactggtgattgtggcttattaggcttgggatggtcagaagtctagagagtctctgggatggtgggaggcaggaagaaagtcccaaagatctcaagaaagatatgacttgttatcttttttatgaagtgtggtctaaactagcactcatcccacctgaagaatagggaacagagggaaattctgaaacattctttctcttttctgcaactagattcagaataacaccttcaagatctcagctgaaaccttaggcaactccaaagattcgc

SEQ ID NO: 12425 - DNA, 601 bp, Homo sapiens
tccctgaccagcaaacccagatatttcaggcccattggcaggtatgttcccatagggaagatggatgaatccgatgatcaagcttaatgactttagataaacctgctgattccctttgttcttttccctggttcgccacgatcttctggttatattttagcttatctatgtgkctggcaaatcagccaatttgaacatttaagtcctctatgtgcttacatttctaactgtacatgcgcactctggaaacatccatttcttgtgaatctgcttagtatgatatatccccaagagtgtagtcacatctgtccattgctgactttactgaggcctaccccctgaggatgtcctgcctttcaaatattcaactctgtttcctctacttcctgtttctctctctgtagagaagcaataattgcaaaaagggatcttgatgagatatgagtgtgagtcaactcaaagcaaatcacacgagggattccttacttgccttatgatttaaactcttcaaaaagtagaagaaacaaaggaatgcagtcttttttttttttttttttttttttggagatggagtcttgctctgttgcccaagctggaatgc

SEQ ID NO: 12426 - DNA, 661 bp, Homo sapiens
ttttttttgagacggcgtctcactctgccgcccaggctggagtgcaatggcgtgatctcrgctcactgcagcctctgcctccccggcttaagcgattctcccgcctcggcctcccaagtagctgggattaaaggcgtgcaccaccatgcctggctaattttgcatttttagtagagacaggatttcactatgctggtcttgaactcctgacctcaagtgatccgcccgcctcgtcctcccaaagtgctgatgtattacaggcctgagctagcgtgcccagtccctagaaaaaaaaaaacacctcgtacacagctgacgttcaaaaaaatgttgactttcagtgaatactatgctagcacatacacacaaaagtagtacgggatcatgctacacagaaataaaaaacactaagtaaacatttactgagcatctcctgggtgccaggcactggactaggcactgccttaacagctctttcggagttgattttgaacgcatacaacgacggaaagagcaccgcagtgggaatgtgaagacttaggttctaatctttcctcggtcactgatttgatgaccttgggaagttcttaaccaacagattccacttgcccaaaaggaaagaatttgagtgaagaggaggccgtcttggaattcataaggg

SEQ ID NO: 12427 - DNA, 661 bp, Homo sapiens
ttttttttgagacggcgtctcactctgccgcccaggctggagtgcaatggcgtgatctcggctcactgcagcctctgcctccccggcttaagcgattctcccgcctcggcctcccaagtagctggsattaaaggcgtgcaccaccatgcctggctaattttgcatttttagtagagacaggatttcactatgctggtcttgaactcctgacctcaagtgatccgcccgcctcgtcctcccaaagtgctgatgtattacaggcctgagctagcgtgcccagtccctagaaaaaaaaaaacacctcgtacacagctgacgttcaaaaaaatgttgactttcagtgaatactatgctagcacatacacacaaaagtagtacgggatcatgctacacagaaataaaaaacactaagtaaacatttactgagcatctcctgggtgccaggcactggactaggcactgccttaacagctctttcggagttgattttgaacgcatacaacgacggaaagagcaccgcagtgggaatgtgaagacttaggttctaatctttcctcggtcactgatttgatgaccttgggaagttcttaaccaacagattccacttgcccaaaaggaaagaatttgagtgaagaggaggccgtcttggaattcataaggg

SEQ ID NO: 12428 - DNA, 545 bp, Homo sapiens
tgacgttactgagtcatctgagctaagtgttaatgagatgttgccgcgtctgccatttcattctcgctgtcttgatttatttctccaaccatcttggccaccctctcatgagagcctgtccttgactaaacaaggtcttcactaaacgctgcgctttacgggggagctgtaataattgccacttcctcatggtgtctgccctagatttagtgacgaggtttcttcctggactcttggatgttgctttctattaagaacacatctgactttctctttgttatgaagctaacacatacttatggtagaaaatctataacatttgggaaactctgtaaaataaaactttttttttttttgagatggaatctcgctctgttgcccaggctgragtgcagtgctgcagtctcagctcactgcaacctccgcctcccgggtcccagtgattctcctgtctcagccttccaagtagctgggactacaggcgcatgccaacacatctggctaattttttttgtgtgtgttgtattttcagtagagatggggtt

SEQ ID NO: 12429 - DNA, 545 bp, Homo sapiens
tgacgttactgagtcatctgagctaagtgttaatgagatgttgccgcgtctgccatttcattctcgctgtcttgatttatttctccaaccatcttggccaccctctcatgagagcctgtccttgactaaacaaggtcttcactaaacgctgcgctttacgggggagctgtaataattgccacttcctcatggtgtctgccctagatttagtgacgaggtttcttcctggactcttggatgttgctttctattaagaacacatctgactttctctttgttatgaagctaacacatacttatggtagaaaatctataacatttgggaaactctgtaaaataaaactttttttttttttgagatggaatctcgctctgttgcccaggctgaagtgcagtgctgcagtctcagctcactgcaacctccgcctcccgggtcccagtgattctcctgtctcagccttccaagtagctgggactacaggcgcatgccaacacatctggctaattttttktgtgtgtgttgtattttcagtagagatggggtt

SEQ ID NO: 12430 - DNA, 1481 bp, Homo sapiens
gggagaaatgcagaaaataatcttattttataaatgtagttttcaaaatcatatgaagtcactggaaaaatacggtgaggtgaatactgaaatatatccttttctcaaagggaggataatgtcacacatgcagggcacttttacaaataaaagtcactgcattagcagcaccttccttttagcacaagggtcagcaaataagcacctgtgggccaaatccagcccmctgcccgtttttgtaagtcaagtatcttggaacacagccatgcttattcactttacagtccatagtgtcagttagctgggtgtgatgttgcacacctgtggtctcagctagtagagactgaggtcagaggatcactagagcccagaaagtcgaggctgcagtgagccatgatcacacaactgcactccagcctgggaaacagagtgagaccctgtctcaagaaaatcaatatatgtagtccacaaagcctaaaatatttactaactagctctttgcagaaaaagctggccaactcctggtttagtagatcaaagattctttgatgtattttaataaaagttttaccaaatatactgaaatgtttatattaaatatagatccccatgtacaatcccttggcaatattcagattgagggtccaatatttcagcactcaggcactgacaacaaaaatttagtaactagcaatcttgttgctaacaaggtacagtgtcaatgtagcatgtagcttccatttgcaacacagcagatattacaagaattttaacaagaactcttaagatgtgtcatcaaactaaacgctttaaatacattttaattgtgaaataatcagtataccctacatctaacctcattttttaaaaatggttgcataatacattattttggggatatggaaattgagctatttcctattgataagcaattagactagttccaaattttttacataataatactataataaatgtccttatacataagtatacatataacatatctatacaaatatcctttacatgtattatatatgcttactctgttatatatgtgtgtgtgaatatgctactcaattaatgttcaaaatgtatttaccaacagtatatgaaatgtctttttcaatgaaaccatttcccctgcagcaacacggatggagctggaggccattatcctaagaaaactcatgcaggaacagaaaatcaaatgccacatattcttactcattagtgggaactaaacatgagaactcatggacacaaagaggagaataacatacactggggcctacttgagggaggagcatggcaggagggagacgaccaaaaaactacctttcgagtattttgtttattatgtggctggtgaaataatctgtaccccaagcctccatgatacagtttacctatataataaacctgcacacgtacccgaagctaaaataaaagttcactgaaaagagaagaaaatgcctttt

SEQ ID NO: 12431 - DNA, 1481 bp, Homo sapiens
gggagaaatgcagaaaataatcttattttataaatgtagttttcaaaatcatatgaagtcactggaaaaatacggtgaggtgaatactgaaatatatccttttctcaaagggaggataatgtcacacatgcagggcacttttacaaataaaagtcactgcattagcagcaccttccttttagcacaagggtcagcaaataagcacctgtgggccaaatccagcccactgcccgtttttgtaagtcaagtatcttggaacacagccatgcttattcactttacagtccatagtgtcagttagctgggtgtgatgttgcacacctgtggtctcagctagtagagactgaggtcagaggatcactagagcccagaaagtcgaggctgcagtsagccatgatcacacaactgcactccagcctgggaaacagagtgagaccctgtctcaagaaaatcaatatatgtagtccacaaagcctaaaatatttactaactagctctttgcagaaaaagctggccaactcctggtttagtagatcaaagattctttgatgtattttaataaaagttttaccaaatatactgaaatgtttatattaaatatagatccccatgtacaatcccttggcaatattcagattgagggtccaatatttcagcactcaggcactgacaacaaaaatttagtaactagcaatcttgttgctaacaaggtacagtgtcaatgtagcatgtagcttccatttgcaacacagcagatattacaagaattttaacaagaactcttaagatgtgtcatcaaactaaacgctttaaatacattttaattgtgaaataatcagtataccctacatctaacctcattttttaaaaatggttgcataatacattattttggggatatggaaattgagctatttcctattgataagcaattagactagttccaaattttttacataataatactataataaatgtccttatacataagtatacatataacatatctatacaaatatcctttacatgtattatatatgcttactctgttatatatgtgtgtgtgaatatgctactcaattaatgttcaaaatgtatttaccaacagtatatgaaatgtctttttcaatgaaaccatttcccctgcagcaacacggatggagctggaggccattatcctaagaaaactcatgcaggaacagaaaatcaaatgccacatattcttactcattagtgggaactaaacatgagaactcatggacacaaagaggagaataacatacactggggcctacttgagggaggagcatggcaggagggagacgaccaaaaaactacctttcgagtattttgtttattatgtggctggtgaaataatctgtaccccaagcctccatgatacagtttacctatataataaacctgcacacgtacccgaagctaaaataaaagttcactgaaaagagaagaaaatgcctttt

SEQ ID NO: 12432 - DNA, 1481 bp, Homo sapiens
gggagaaatgcagaaaataatcttattttataaatgtagttttcaaaatcatatgaagtcactggaaaaatacggtgaggtgaatactgaaatatatccttttctcaaagggaggataatgtcacacatgcagggcacttttacaaataaaagtcactgcattagcagcaccttccttttagcacaagggtcagcaaataagcacctgtgggccaaatccagcccactgcccgtttttgtaagtcaagtatcttggaacacagccatgcttattcactttacagtccatagtgtcagttagctgggtgtgatgttgcacacctgtggtctcagctagtagagactgaggtcagaggatcactagagcccagaaagtcgaggctgcagtgagccatgatcacacaactgcactccagcctgggaaacagagtgagaccctgtctcaagaaaatmaatatatgtagtccacaaagcctaaaatatttactaactagctctttgcagaaaaagctggccaactcctggtttagtagatcaaagattctttgatgtattttaataaaagttttaccaaatatactgaaatgtttatattaaatatagatccccatgtacaatcccttggcaatattcagattgagggtccaatatttcagcactcaggcactgacaacaaaaatttagtaactagcaatcttgttgctaacaaggtacagtgtcaatgtagcatgtagcttccatttgcaacacagcagatattacaagaattttaacaagaactcttaagatgtgtcatcaaactaaacgctttaaatacattttaattgtgaaataatcagtataccctacatctaacctcattttttaaaaatggttgcataatacattattttggggatatggaaattgagctatttcctattgataagcaattagactagttccaaattttttacataataatactataataaatgtccttatacataagtatacatataacatatctatacaaatatcctttacatgtattatatatgcttactctgttatatatgtgtgtgtgaatatgctactcaattaatgttcaaaatgtatttaccaacagtatatgaaatgtctttttcaatgaaaccatttcccctgcagcaacacggatggagctggaggccattatcctaagaaaactcatgcaggaacagaaaatcaaatgccacatattcttactcattagtgggaactaaacatgagaactcatggacacaaagaggagaataacatacactggggcctacttgagggaggagcatggcaggagggagacgaccaaaaaactacctttcgagtattttgtttattatgtggctggtgaaataatctgtaccccaagcctccatgatacagtttacctatataataaacctgcacacgtacccgaagctaaaataaaagttcactgaaaagagaagaaaatgcctttt

SEQ ID NO: 12433 - DNA, 1481 bp, Homo sapiens
gggagaaatgcagaaaataatcttattttataaatgtagttttcaaaatcatatgaagtcactggaaaaatacggtgaggtgaatactgaaatatatccttttctcaaagggaggataatgtcacacatgcagggcacttttacaaataaaagtcactgcattagcagcaccttccttttagcacaagggtcagcaaataagcacctgtgggccaaatccagcccactgcccgtttttgtaagtcaagtatcttggaacacagccatgcttattcactttacagtccatagtgtcagttagctgggtgtgatgttgcacacctgtggtctcagctagtagagactgaggtcagaggatcactagagcccagaaagtcgaggctgcagtgagccatgatcacacaactgcactccagcctgggaaacagagtgagaccctgtctcaagaaaatcaatatatgtagtccacaaagcctaaaatatttactaactagctctttgcagaaaaagctggccaactcctggtttagtagatcaaagattctttgatgtattttaataaaagttttaccaaatatactgaaatgtttatattaaatatagatccccatgtacaatcccttggcaatattcagattgagggtccaatatttcagcactcaggcactgacaacaaaaatttagtaactagcaatcttgttgctaacaaggtacagtgtcaatgtagcatgtagcttccatttgcaacacagcagatattacaagaattttaacaagaactcttaagatgtgtcatcaaactaaacgctttaaatacattttaattgtgaaataatcagtataccctacatctaacctcattttttaaaaatggttgcataatacattattttggggatatggaaattgagctatttcctattgataagcaattagactagttccaaattttttacataataatactataataaatgtccttatacataagtatacatataacatatctatacaaatatcctttacatgtattatatakgcttactctgttatatatgtgtgtgtgaatatgctactcaattaatgttcaaaatgtatttaccaacagtatatgaaatgtctttttcaatgaaaccatttcccctgcagcaacacggatggagctggaggccattatcctaagaaaactcatgcaggaacagaaaatcaaatgccacatattcttactcattagtgggaactaaacatgagaactcatggacacaaagaggagaataacatacactggggcctacttgagggaggagcatggcaggagggagacgaccaaaaaactacctttcgagtattttgtttattatgtggctggtgaaataatctgtaccccaagcctccatgatacagtttacctatataataaacctgcacacgtacccgaagctaaaataaaagttcactgaaaagagaagaaaatgcctttt

SEQ ID NO: 12434 - DNA, 547 bp, Homo sapiens
ttatttcataaattgagtgtttcatcttttgtgaaattgtcatttaagaaataattctcaaaaacttcaaaaacccacttggggagataccagatgtcaccagattgaagacaaacaaacatgtcaaaaattccctcacaaattcatccacccaacatccatgaacaaaaccaccagaaacacagctttaaaatacagtagaaacatataaggtgacacagtgtactgttctccacttcctaatagtaccttataaatgatttccaaaatcactgctgacacctttattagtgtacaacgtcttcctaatatctaaaatgtttccctccactattctgacaaatttattttctttttttcttttttctttttttttttttatgarccagggtcttcctctgtcaccaggctggaatgcagtggcatgatcagctcactgcaacctccgcctccctggttcaagtgattctcctgcttcagtctcctgagtaactgtgattacaggcaagcaccaccacacccagctgatttttgtatttttagtaga

SEQ ID NO: 12435 - DNA, 530 bp, Homo sapiens
tttaaagtaaattacatacatcatgacatcttcttcctgaatattttcatatttaggatgtctgaaaaatgaggctgtgttcccacaaatctgtattagatggaactgaattaacaacagtgctccagaaccctggaccatccagcctaaattccatttggggatgagatgcgtttttgcctcagaatcccaagcggtaagcaccatsaacccctcagttcatatctcaatcttcctttctattggattttgttctcaatttctaacttcttactagattatatctcatttaattctacttgttaaagctgatttattctaaaatttgatgaagcaaaagtctggattttgcctcaatataataagaaccacttaattataaacattgatgcagggctttgctaacctgcattttgttcttggtatagccacatgtcttttgggccccttaaaaggtaattttccatatgaagcacttctatatggatctacaataagaattaactttaaagttagtattttattggggg

SEQ ID NO: 12436 - DNA, 530 bp, Homo sapiens
tttaaagtaaattacatacatcatgacatcttcttcctgaatattttcatatttaggatgtctgaaaaatgaggctgtgttcccacaaatctgtattagatggaactgaattaacaacagtgctccagaaccctggaccatccagcctaaattccatttggggatgagatgcgtttttgcctcagaatcccaagcggtaagcaccatgaacccctcagttcatatctcaatcttcctttctattggattttgttctcaatttctaacttcttactagattatatctcatttaattctacttgttaaagctgatttattctaaaatttgatgaagcaaaagtctggattttgcctcaatataataagaaccacttaattataaacattgatgcagggctttgctaacctgcattttgttcttggtatagccacatgtctttkgggccccttaaaaggtaattttccatatgaagcacttctatatggatctacaataagaattaactttaaagttagtattttattggggg

SEQ ID NO: 12437 - DNA, 550 bp, Homo sapiens
cagtagatacacaaaccttttaaaatatttttttaaagctgtaatgtattataatgacaacataacttttttttatttttaattttttgagacagggtctcgctctgtggcccaggctggcatgsagtggtgcaattccagctcactgcaacctccacctcccaggttcaagtaattctcatgcctcagactcctgagtagctgggatacaagcgtgtgccaccacatctggcttttttatttatttactttcatttttagtagagacagggttttcgccatgttgcccaggctggtctcgaacttctgacctcaggtgatctgccctcctccgcctcccaaagtgctgggattacaggtgtgagccactgcgcttggccaacactgcattctatatcctttttcctcatagtttgtcagtttggggaatctgtgccgtaaccaaatggagcccaaacaccctattgttgctttttaaaatcaggctttgtagaaaatcctacttcatgtgggtgaaaagctgcattaatgctgttttatggtattcagc

SEQ ID NO: 12438 - DNA, 563 bp, Homo sapiens
gagtctcttggtcgtccctccctcccacccgtctccccaactccattcccaggcagccactcatctgctttctgtcactatagattggtttgcattttgtagaattttttttttttgagacagagtcttgctctgttgcccaggctggagtgcagtggcacgatctcagctcaccgcaacctccacctcccaggttcaagcgattctcctgcctcagcctcccaagtagctgggattacaggcatgygccaccacgcccggctaattttttttttttttttgtatttttagtagagacggggtttcaccatgttggttaggctggtcttgaactcctgacctcgtgatctgcccaccttggcctcccaaagtgctgggattacaggtgtgagccaccatgccaggtggacttttggttttgtctgcagcctggctagtttcagtctaggctttccgccttccctttgagcctgtgagagcttccccacagcccttcagcgagtgcctttctgggttggttctctttgcactgggaatcctgactggtgcaagggagccgctgt

SEQ ID NO: 12439 - DNA, 532 bp, Homo sapiens
cttgcaatcttgcccgcagcgccatttcatgcggctctctctcctctgtgcctcagtttccctgtgtgtaaaatgtgggagagtctactgccttccgtggaggctgtgaaattatgtctttaaactaattggtccagacgtggggccaaaktatcgggattacaggtgagccactgcaccgggcctcagccttgtcagggggccggaggttgcttaaccccctggatcccagcttcctcatctgtaaaacgggctgatgcctatacagctctcagaaccacacctggttcagaagtccccaaatggtagtcctcaaattctggccaaggccaaagcaggtgcttcacttcttccgtgcacaccctgcaagtgggctccgggtggcaggtgcagctacgccctctgccggtcggggcgggagacaaactcaggggagtggggagaaccacagcgactcagggagctatttcagagggggcaagtggaaggcgctggggctccaggagagtctgtaagcgaacagatgaggaaa

SEQ ID NO: 12440 - DNA, 508 bp, Homo sapiens
tccctggggactaagacaggcacccagcccctcacccccagacccccagccccttacctggcaggtagatgtcagcaggtgggcctcggccacagtgctcggggctgctgtcctgcaggacattctcaatggaagctgctcgggtccctgcaggcagagggtgaggttagggacctacaggcaggggccaggtcccggcaggtccctctgggcaggaggccgtctctcttacccaagggctctgtagccactgtggggaccccaggcttgtgctccagcaggactccaccgtgaccccacctgctctccagggaccccaaagctgggtgtttcccttctatttccctccttcccatcccccagcatggggcttttttttccccttttttacactgtgtcctggatgttcagagcatagggctttttttttttggtcatagaaacattmcacgctcatgtttcaaaaccaggactgaatgctggcaggtgttccccatcccaggcagac

SEQ ID NO: 12441 - DNA, 532 bp, Homo sapiens
ttgatgccattacactagttaaatttcaatttgcattttaatgtacactggtccccaagtcaaatgcaatatttaatgacaaatcatgtcttgacttgcataaataattttaaataaattaaaaaacctctcacttgctacatgagaagaaactaagtatgtgttgcaaatattagagattatattaagtacattggataatttaggctttaataatattcagacatatttttatttagaaatcacatctttattacatctttgatacagatacagaagagtgacaaaatagtttttaaatctctaaaacaacttgggagcttattaccacaaaaatattttatgattctaaaaaggtgggaagtgatagaacagtgttctctggggctaggctcagtcgttcatgcctgtaatcccagcactttgggaggctgaggagaaaaaactgcttgaggccaggaattcaagcagcctgggcaacatagcaaaccccatytctctctctctatgtgtatatatatattttaagtcc

SEQ ID NO: 12442 - DNA, 879 bp, Homo sapiens
tgcctttgttatgtttcatgttatcagaaatgtttaaaaatcactttggaatgttatttatcacaacaaacaaaagttacatcatcctaagcttctaaaagccaatctgaacagtttgaccaaatgaaaacttaaggtagactaagaccccattgtacccaaccttgcatactcaaggttgatgaggtactattcctgctattctctagttacttggtgaggccatcactaatctcaacagattctggtggtttgaaggcagtggccacctgaatcaagaaataaaatgttgactacaagcagagcaagtaactgtatgatattcctttttccccaggacaaatgtttccactattttcattctgatccatcaacaatgtgattagacttcctggtcccactgaaaaatggaactaagttctcacagtttaaatcctaaggcctttcttgaaaataatagctagcactgaacatttaaccaggttctaggtactatattctggataagaattatctccatttaataaatgtgaaaactgagtcttgggagatctgctcagttataaagataacatgtggaagaattaagatttgaatccaagtctgtctgactgcaaaacatttgcccttacaaaccatggtacattgctcccataatgtggagggtgggcatgactgaatcgtgctgagccccaggaatcagtggacataaccttggatctgaggcacgtgggccacagttgatggctgccttgagacaatccagaagctgatttrtggcagtgattcatagtgtgtcctttagagcaggagtccccaaccccatggtactggtccatggcctgctaggaaccaggccgcacagcagggcatgagagg

SEQ ID NO: 12443 - DNA, 397 bp, Homo sapiens
tcaaaacgccccagcaggttgttgtccttggtcatggccctctcaccctcatacacctggatgaagaccccaggctggttgtccgagtaggtggtgaaagtctgggtctgcttggtggggatagtggcgttcctctggatcagcgtggtcatcaccccacctgctgtctccagccccagagacaggggagccacatccagcagcaggagatcctgcactttctcacatttgtcccccatcaacacggccgcctgcacagcagccccataggccacagcctcatcagggttgatgctcttgttcagctccttgccgttgaagaagtcctgcagcaacttctgcaccttggggatgcgwgtggagccccccaccaggacgacgtcatgaatctgggcct

SEQ ID NO: 12444 - DNA, 522 bp, Homo sapiens
tttctatagagaattcaatgtaattttaaaacttttacacaatatatttcctattttcacattctgtctttgcatactaagaagattgtgtttaaacaaatattcattattctctggttattaccttactgacccaacaaatattttcatgatggatgtattaaaatatcagagttctttccatatatctttccatatccaaatattactgggggaaacattacattagwttgcacacagctcatcaccatacttaatattatatttcagtcatcttaaaaatatatatatttccttgcacaactagtaagcttgaatatatttcatttttcagtcctctgccaaactatactctgcattacaattaatttaagaaacgtgagcagtcagttaaaatgtaaacttcagatttcttttttgtgagacccctgaatctttatatagcactcaggcatatccagataaagtaaaaagatctaaaaggaacaaaaaaaatgcacaaactgtctggaaaagctgggg

SEQ ID NO: 12445 - DNA, 578 bp, Homo sapiens
aaagtgatgaagccaatacattcaactgcagtagcataaaaattacatgtatacatgtatgtatttagtctccttttcrtctcatgcagtgtgtgcttattatgagacatatggatctactgagagaaaataatatatatacacacacatatatatgtatatatatatacttaaaccctgccttccaaaaataagctgtgccaactgcatatttgtgttgctttgcattaggattagttaattctttatagtgttttagatgttttatggaataaattctttaaatgattcctctctgacactgtggcagtttttgctttcagctatgcatatattatatatgacatgcatatttaatgtaaatatctcacacatagatgaaaaagtatgattgtacaatttaccacttaccttcaggggtgggggttaagaggcattttatttttagaagaaattacttggattaaaaataaacacatctcactgccaaactaaatgtaattgtaaagaaggaggctgctggaaaatgtcacattcctttggaaattgatgaataaaataataaaataatagccttg

SEQ ID NO: 12446 - DNA, 587 bp, Homo sapiens
ggaagatatctgtgtatctgagggcaagatttggctccaagatttttccaacaagtatttctatattttgaaaatgtcatatatcctatatatagtgaatggattttaatttaattttcttttaaattttaagaataaagataaaaattaattaaaggagtaagtcttggttggttctgcaggtgttggcaagtgttaggtatggaaacagccatctgtgttaatgaatagttccctgtctgccacctgtcaggtattcctgtctaaagtaagaggcaggacttgggaccattataaaagggtccgattctgtaacaagcgtcagctaacagagacctagagagggaaagaccgtgagttttctgtgatcttaattttcaagmcttgctactaccaaaatgtaatcataaaaaaaaaatactaaaaaaaaaggttaaatgtttatcccttttgatctataaaggtgataaagtgaccttgctatcagttatttttgagctttatttggcatcaaaatattcttgggataacagttaaaatgcagactcttttgtactaggtccaggccccaggccctggaatagggc

SEQ ID NO: 12447 - DNA, 569 bp, Homo sapiens
tcgagataaacaaatgttgggaaatactgtagggaggctttctaaatgacaccacactgattagttttctttctttttctttttcttttcttttttttttgagatgaagtctcgctctgtctgcaacctcttccycccaggttcaagcaatgctcctgcctcagcctcccgagtagctgggattacaggcacccaccactacgcccggctaatttttgtatttttagtagagacggggtttctactttactccagttcccagcaagttcctcatttccatctgttactttgtcagcctggacttcactgtccatgtcactatcagcattttggtcataaccatttaacaagtctctaagaagttccaaactttccctcatcttcctgtcttcttttgaggcttccaaactcttccaacctcggcccattacccagttccaaagttgcttccacattttaatgtatctctatagcaaaactcacttctggtaccaactttctgcattaggcaattcttgtggtgtgtcactataaagaaatacctgagattgggtaatttacaaagagaa

SEQ ID NO: 12448 - DNA, 475 bp, Homo sapiens
tacacaatctagtttacctgtttacaccagatgcacacaaacccatataccactctaggtatatcacacatggggtgtgtgtatcatgaagtcatattattcagtttaaaaaaatatttttctccaaatatcaggacatttctaaaattatcacgatattggtgcaattaaaattaaaattgaccatgggaattaaaaaaacactaataaaaacttgggtatcaawgacaaaactattaatgggaaaagcaatacatcattttagaaaatttcaaaatatttatttcaaaatatatgtgaggcagtaaacagtacttagagggattcttgtaacctgaaatgcttacaaaagacaaaaaggctaaaaaataataagctgatttttcaaagttagatgctaaaaaacctaattttaaaaactaaaagaaagcagtaagtagataataaaaacaatgttttatgagacagaaaccac

SEQ ID NO: 12449 - DNA, 543 bp, Homo sapiens
ttatttttcaataactgaattccctgtggaacctagtgcttcattaaccaactgtaggaggatcatttactcctttttcatggcagacaaatatatctttgatgattgtttaaatattggtcatacttctatactatacattgaccagacttagatrtagtattttattctcatcaaattgagtatggtcattaactgagaattttggaatcagagagatttgagattgaaccttgtttgtaaaatttactagctttggaagcttgtgcaaatacttctctgaaccctagcgttcattcagtcattaatgagtgaattaatacattcagtcattaatgagtgaattaatacattcatttattaatgaatttggataaaaatatttaccttgcaagatcagattaaaaggacatataaaagtattagcacttaatatgtgcttaatgatgatcaccatctgttgacgcttgcttatggtatatattgaggttaggagtgccaatcatttagcccttctgtctccaggttctaagagataaataa

SEQ ID NO: 12450 - DNA, 530 bp, Homo sapiens
tgaagtgtgttggcctcagactagattttttttctgttttattataaaaaatgtttaagaagcaaaaaaaaaaaattttgcagtgaatacctaattatctaccactaagattctgtaattaacattttgctatacttgggttaccatatatctatctgttatcaacctgttttctggtgaatttaaaagtaagttgcgggtactcagatacagagttaaattacttttttcttccaatccaaaccttaaaggacggttagaaaatataaagaatctttattgctataccttctccctttgagaacttatttccttagaacttttaaatctgccttatcgcatacccagccaaactttggtttagttttccacaactcttactcctgatagtgtcactaagatcttygtaagaaaaggagaaactcatttatcttttttttttctttttttttgaaacggagtctagctctgtcacccagggtagagtgcagaggcacgatctcagctcactgcaacctccaccttctggt

SEQ ID NO: 12451 - DNA, 593 bp, Homo sapiens
cagctgccgtttgactgtggttgttggtctgaaagtggagagagaccagatcttcctgaagagctccacatcatgctcaactgtgtgctgggcctttttctctctgacttctgtgtcacttagttgccagttaaaatgctgtttagactgctgggttatgaacgagtcgtggagtggtagttctaacagaatcaggggggtgactcctagttccatgtcccaccctgccacctcagtgtccctaaagatgccgtgacagcccctgkgtattctcaggctcctggatgtccatcccaggccctctcttctgcagcctgtggggatcagacaccaaccagagagactgcttcctcagttgcctgagcctggagcagagattccctctgtccttcctggtctcacagtccaaaattcagcctcctattatatataatgtataataatttatagtatatatataaacacttaaatatatataaaaaataagtttcaggacatcctatacatttactgttgaaattctgtaagaaacaagtttttgagtaagttaaattcctctgcatctcagagttctataggtataccttgttttt

SEQ ID NO: 12452 - DNA, 538 bp, Homo sapiens
gtaccccaggaaaactaggaaataaaccaggggcagtttgtagaacttaagcatggaccaatcagattggatgccagcagatttgctttcgcacttgtcacataattacctctggatctaatccagaagagcagtgtaaggaaggcaaggagtcacaggtcaacatgtcagcaggcctgtactgtgagcattacagatgggagcagcaggagagagagctctaaatgggagctttccggggagaaggtcagtgtaaagggtgaggaggactgaaaagaaaagattatgtgaggcagggcgcggtggctcacgcctgtaatcccagcactttgggaggccgaggcgggcggatcacgaggtcaggagatcgagaccatcccggctaaaacggtgaaaccccgtctctactaaaaatacaaaaaattagcagggcgtagtggcgggcgcctgtagtcccagctacttgggaggctgaggcaggagaatggtgtgaacccgggaggcggagcttgcagtgagccgagatcscgccactgca

SEQ ID NO: 12453 - DNA, 538 bp, Homo sapiens
gtaccccaggaaaactaggaaataaaccaggggcagtttgtagaacttaagcatggaccaatcagattggatgccagcagatttgctttcgcacttgtcacataattacctctggatctaatccagaagagcagtgtaaggaaggcaaggagtcacaggtcaacatgtcagcaggcctgtactgtgagcattacagatgggagcagcaggagagagagctctaaatgggagctttccggggagaaggtcagtgtaaagggtgaggaggactgaaaagaaaagattatgtgaggcagggcgcggtggctcacgcctgtaatcccagcactttgggaggccgaggcgggcggatcacgaggtcaggagatcgagaccatcccggctaaaacggtgaaaccccgtctctactaaaaatacaaaaaattagcagggcgtagtggcgggcgcctgtagtcccagctacttgggaggctgaggcaggagaatggtgtgaacccgggaggcggagcttgcagtgagccgagatccygccactgca

SEQ ID NO: 12454 - DNA, 537 bp, Homo sapiens
aagaggcaagaggagattgtaatttgtgacagaggtaatgtagagtgaaataggcatattagtaatatttagcttctgacattaaaaaattatacaattgtatacattttcaatccagatatcgttttaagaaaggatctctcaaatttaatttttctccacttagtatctcaattatcacctagctgataatattaagtgcacagaagtacatagtgcaggagaacagtctagtaccctcttaaattttagctgagatggaaagaggggatgttttagggtgttcaaagagggcacaattcttcattgtctccagggaatgtcatgaaagttaaagaagagagaaataagagattagataatcaggcagatcccgaatttctacatttctactctggattgagaggaacaaagtatgtttggggaaatgaggagaggagtaagcgcatacagtggtttagcattctcctccagcttctggaaattatgaaaagaatccacatttcaagcttctctacrttaatctaggatgcaatc

SEQ ID NO: 12455 - DNA, 517 bp, Homo sapiens
tttctgttgagttctcccaatacgtttaacagtctattcctttttccaaakgaaatgttacattctcattaattttagaccacagtcatcaacattttgttaaaaagtgctgcaaatgaaaacaaaacttattttttctaggtttatgttcaagtgcttatgacaacatttttatgtagagagtagcttaataaagtactttcatgtgtattattttcattgattttcagttatgtgtgataatggtgttatttttattttgtagaggagtaaatgaattcttacagaatttatgtcacttgaccaaaaatcactgaactaatattcagtgaataagagctttatactaactctaatccaaagcctttatcctacataaggccaatattatgaccaggaattattcttgggatgttcttgttatcaatatttagaaacactatttttgaattctcctgagtctgcgattttagttatgtgcattctcagaatgtgttaccatgtataaaattttatt

SEQ ID NO: 12456 - DNA, 525 bp, Homo sapiens
gaatacagcatcaaaaataacagaattttcagtatatgcagcagcaaaaattgtgatccatttaattctacattttctaaatactaactgtgaggcatcatattaagtattattttaattctgtccataagataggtgaaaaggagaaagtacattttagacaggagaagaaattgatrttaggctgtaaagaattattaggaattatttattttgaaggtttgtctaaagtaggagatagaagtcaatacttgagaattttgagaatagttttattcagggtcaaaatatagagtttaaagaattgatggccatgtcttgcactttgcagagggcattctttcagagcaagatggagaaaccagtgagaaagaaaaacaacaaagagtaaagcaaaaataagaatgttgtattttcatacaggaaagatagtttatgaactatggaaatataatattgaaaaatcatttttaaggattttggaaagtgaaagatttgtataatatgtgcatttttaaatttttc

SEQ ID NO: 12457 - DNA, 525 bp, Homo sapiens
gaatacagcatcaaaaataacagaattttcagtatatgcagcagcaaaaattgtgatccatttaattctacattttctaaatactaactgtgaggcatcatattaagtattattttaattctgtccataagataggtgaaaaggagaaagtacattttagacaggagaagaaattgatattaggctgtaaagaattattaggaattatttattttgaaggtttgtctaaagtaggagatagaagtcaatacttgagaattttgagaatagttttattcagggtcaaaatatagagtttaaagaattgatggccatgtcttgcactttgcagagggcattctttcagagcaagatggagaaaccagtgagaaagaaaaacaamaaagagtaaagcaaaaataagaatgttgtattttcatacaggaaagatagtttatgaactatggaaatataatattgaaaaatcatttttaaggattttggaaagtgaaagatttgtataatatgtgcatttttaaatttttc

SEQ ID NO: 12458 - DNA, 525 bp, Homo sapiens
gaatacagcatcaaaaataacagaattttcagtatatgcagcagcaaaaattgtgatccatttaattctacattttctaaatactaactgtgaggcatcatattaagtattattttaattctgtccataagataggtgaaaaggagaaagtacattttagacaggagaagaaattgatattaggctgtaaagaattattaggaattatttattttgaaggtttgtctaaagtaggagatagaagtcaatacttgagaattttgagaatagttttattcagggtcaaaatatagagtttaaagaattgatggccatgtcttgcactttgcagagggcattctttcagagcaagatggagaaaccagtgagaaagaaaaacaacaaagagtaaagcaaaaataagaatgtwgtattttcatacaggaaagatagtttatgaactatggaaatataatattgaaaaatcatttttaaggattttggaaagtgaaagatttgtataatatgtgcatttttaaatttttc

SEQ ID NO: 12459 - DNA, 568 bp, Homo sapiens
ttttcttccacagactaaaattgaagcatggttaaacatgcagaatctaggtggaagtctgggatctcagaagatacaaaagaagctttcccttgcactgcaagatcacatatggcaaaggcttcaataaatatctctaatgggcctactctcttccttataactcatctgacatttttgtgatacaagggagaacagttgaattgtttgaaaaacttgcctcagaaagggtgagacagaaagctcactggtgaattgaaaaggttttcattgtaccgttatgggactgtttttaaaagactctatgttccttgtaaaattcattcttgaatcagatttgatttttagcaaacaatttcttacctaatctcaacctccagactttaatattctaacaattacayaagtccattgcattaaaaagttctcaatagttatttttttagttttgataagttttaacaagacaaaaagctgacaagtcttaaatttggtaaaaggagattttgaaaaggagactccaaaaataatgcatttaaaatctaatttatatggtgcctcagaagag

SEQ ID NO: 12460 - DNA, 512 bp, Homo sapiens
agagagaaagaaggtgagataaaagctaccagcccgaatatcasgaaaaatcaggtagtgtctacagtggctgagcactggtcatgtgtaaaaagcaagagtatgattctgagctgtgatatttggtgtaaatatagtttctattttatggaagaaaagtttttaaactacttctgtaaggacatttacctagcgtacctaaaagctaaatggatatcatgtttgatattttaaattttttttcttggtaaatacactagaatatgtccatgccatttaaaaaaataatgaaatctgagttgtaagaaaggaagtaagtgttgatggggatataagttgggaaactgtcaaaagccagctgatttaaaagaatgagagaccatatagtatatttcatcatcttcaagcagacttacaagtaaatccccaaagatataaaattcgattaccatgttagaggtgccagaggtagataatatgatccttattataaataagtttacactaacaca

SEQ ID NO: 12461 - DNA, 512 bp, Homo sapiens
agagagaaagaaggtgagataaaagctaccagcccgaatatcacgaaaaatcaggtagtgtctacagtggctgagcactggtcatgtgtaaaaagcaagagtatgattctgagctgtgatatttggtgtaaatatagtttctattttatggaagaaaagtttttaaactacttctgtaaggacatttacctagcgtacctaaaagctaaatggatatcatgtttgatattttaaattttttttcttggtaaatacactagaatatgtccatgccatttaaaaaaataatgaaatctgagttgtaagaaaggaagtaagtgttgatggggatataagttgggaaactgtcaaaagccagctgayttaaaagaatgagagaccatatagtatatttcatcatcttcaagcagacttacaagtaaatccccaaagatataaaattcgattaccatgttagaggtgccagaggtagataatatgatccttattataaataagtttacactaacaca

SEQ ID NO: 12462 - DNA, 551 bp, Homo sapiens
ctcaaaaatctataagggtctcttccatcctactccccacactgctcttcatttgaaccttcctctcagacttcttacagagtggtaaggaaatattagagacaagatttccaagactatgtattygttcgctgattgtataaagttgatgagagaacatatgtttcactcaatttcataatgccactggagaaaaaaaattgtccaatgaaagtcaatagatattttttgcttttaatcaaaaaaagaaaaaaataataatttgactcttggaattataatttacttaaggtttaccgaaccctctttatattcagttttcatcagtaaaatggagctaagtccattttacttagacttaatatctaagacctaatgttgtgaggcttctagaaagtctattgcaaaagtggagcatagaaaatgtgaataattggcaccatgttattataacagaggctagatatttgcctctaacctctaacttttataaacagaaacagttgccaagagctaaacttagacacattgcaatgttaaaaaattatttt

SEQ ID NO: 12463 - DNA, 534 bp, Homo sapiens
agatatgcactcttcatatcaggtatcttagatacaagtagtataaacatcataacttaagaaacagagatatagaagctatcttggatgaataagtgatcagggcagggcagaaggtggttagcactccaattaattaaggtcaagccaaggtaaaagcaggtcttagatgaaacagatctttagttcttccacctctagcccatcttgctgctgcactccagcccccaggtcatcacagcgatagccacccctgctttgtaacacccaacacaggttggccttgcaatgctctaagctgcctgcataacttaaattcttatttccccagattagaaggaggactaccaattaaacttcattttatgttgtatcaaccaaatggcttgtattagaagagaagtggaaaggtttttaccccatgmaataattttcatattatggagtttttaaatagaaaagattgtgaaatgaaaatcaggagggcaacaggacctttagtcactacaaaattatttcacaaagatagccaca

SEQ ID NO: 12464 - DNA, 554 bp, Homo sapiens
tactgtgtgaggatcaaatggcattgatttgatcaaggcagctaaatttctttttagatgaaagacttatttggcattctagaaagtaattttattagaggattgaagattccagaaaaagtggtattgaaaattattgacattaaaagaaaggaatgtaagctaaataatggcaggatrtgaaaaaaagtctaggcagaattagagtattatacatctgaaacaaaaaagtatgctgcaatcataactatagcctacaatgaaagatagaataactagcctatatgtaacaaaagttacaaattgctgataagctggaaggaaaaaatgaaagagcgtggtgctttgtgaattagaaaagtttggtaggtataaagaaattgataaactaaaaattgtaatagtcataatattaattccctcaacaattatatttttaaagctaacatgtgttgacgttgacctttctgttaaatgctgaaaacgcaaaaacagagatgatttaaagacccctaggagttgatactctagagatagaaaaggatatgtatgag

SEQ ID NO: 12465 - DNA, 720 bp, Homo sapiens
gggctcagagcaggaggtgagcagcggatgagcaagcgaagcttcatgtgtatttatagccagtctccatagcttgcattaccacctgagctccggtggcattagatttgcataggagtgcaaaccctatcgtgaactgcacatgcaagggatctaggttgtgcactccttatgaaactctaatgcctgatgatctgtcactgtctcccgtcacccccagatgggactacctagcttcaggaaaacaagctcagggtacccactggttctacatcatggtgagttgtataagtcttacattctatattacaatgtaataacaatagaaataaactccacaataaaagtaatgcacttgaatcatcctgaaaccatcacccccacccccarccccactgccctggtttatggaaagattgtcttccatgaaactagtccctggtgccaagaaggttggggactgctagaacacaacaaagtggggtaatttcttaactgttgctgcattccagaacattcaggcaaagtttaacattgtcaatgtaaagtgaatatttggccccaagtcttgccatttggcaggcactgtgaccatttctgaaaacaacacttctctgactggtcagaaatctaaaggatagcctcaatttggttaatcttataatggggagacaactgttcaagtagaagggaaagcaagtgtgaaaatcttgagaaaag

SEQ ID NO: 12466 - DNA, 538 bp, Homo sapiens
tgggtgatgcaataatctgtacaacaaactctcatgacacacatttatatatgtagcaaacctgcacatcctgcacatgtacccctgaacttaaaagttaaaaaaaaaaaaaaaggatcggtgagctgagccaaacacctggggatctttgtgcttttgacacactgatgactatgcctgtccgtggggagatgaacctataactgccctgggttgtgtgaccacggaggccactttatgatgatgggcagtgyctggggccttttgggctcggtgccttagggtttatacatgaatgctggactccctgtgtggtggtgaacaccccatgactaagtgcatgtcagcgtcagcactggcccacactcctgggttcgtgttttcactttttcattcaggaactcgggagctggggccactcccttggcccttcaggttctccacctgagcagtggggataataaggcagacccggggatggctctggtgagggtggaggagtcactgtacagagagagtagagcgggggtggatttta

SEQ ID NO: 12467 - DNA, 562 bp, Homo sapiens
taaccagaatttttctttgtcttttgagggtaaatactttagaatcattttttaaacacttttattttaaggtaaaataaaaatatttttaaaacactaaaaacatagctgagtaagttattataaagcaaattatwctggtcaagaattataacctttccagccacctctgaaatacctgtcatgtgtctgttcccaattacagtggtctttctccttcaagagtaactattgttctgacatttatggtatatattttccttacatttttatagatttacaactgaaatgtgctttggcagacaatataatttatctttctcgtgattaattttaatagttttaaaagtttcctttattctacgatttcccttttattcctttcaacaagtcctttatagttacatcaaattggcagctgggtccagatataggatcagattaagattagattttattggcaaaactataggtagtgcttggcaagccgatatgaggcacatgacatctgactgtctctctttttatgaatttagcaaccattaatgattaaaccctgtat

SEQ ID NO: 12468 - DNA, 312 bp, Homo sapiens
gaaactttgcttattcttcttcgtatccaccacacagttcaccataataagtgctccaaaattattcagatgaataaaattagtttaagaaaataaaatatcattctctaaaatgaaagccagctatatgttatagtttggacatactataatgaatgtatttgctaatcttcttattgatgttaaaaaccaattattamcttaccaaaaactaactaaacccatctgaagtgggtttaatatataaatgttcaacaaaaataatctagcacattatagtatacatcaaagtcactgcccatagagttattt

SEQ ID NO: 12469 - DNA, 840 bp, Homo sapiens
ataaactgaagcttaatgtttcacacagccccaaagcctatcccctagaccctacatagtgagaaagacaatcactgcagcaaattttgacaataagcaggtattagttttgccacaatcaggaatataatatactgagtatagcgtttggtccattcatcacaatccaattaactttagggtcccttctgcaactttgtccaactgatgagtccagatagcagtatattccagctggagaatatactctgtagcccagccagatcagaagtgactttggtgcccacacagaagctcagcctcatagcagggcttagctggtggtcttgctggatagcagagcatagccagctgttccacccaaattcagagaaaaggcagtgacccagacatctagagaacctgaatgcaagctctgcctgcccagattcattaccagctggcccattcagaattatagcatagactaactagtgaaggtctatctctgccaaagaactcttataaatgccagaaaaggtggctttctctgaaaatgcataaacagcaatgcaggaacacaaagattacacagatttgagaaatcatgacacctccaaaagaaactaacaaaactccaacaatggacactaaagaaagggaaatttatgaaatgacaaaaaaatttagaataatcctcttaacaaagttaagtgaacttcaaaaacatacagataaaaattaaataaaatgtgtaaaacawtacatgaacaatatgagaagtttgacaaagaaatagaaacaattaaaaaatacccaaatagaaatcctagagatgaagaatacaatgcttgaactgaa

SEQ ID NO: 12470 - DNA, 2731 bp, Homo sapiens
tgaagctcttatggagacctagattcatagcctttctgccccacccactttgagccccatgaacatttctcagaggtggagagaagcctatagcaggaagaaaactgcagctgctactgtctcctctgaggtctggcctttaaaggtggccgttaaagggtcagaaacatgaatggccatgttggcatcactgtaagaggaagctgtatccatgctcaccaagatccctttttctgagggaaaccgaggtagtagtgccatttaacccaaaccattcatgccattgtacctaacagttggttgccactgttttcctcataagaacatttacctcacagggctggagatgcagaggcagggtatcctcggatgccatagcatcagggctcggtgacmtcaccaaagatccaggtcccccacctctgttctccacattggctttattctcaggaacatttccctcatgaacacaagatggctgccagtagccatcaggcccgtgtggttgcctccttgttcatgccaaagagtgaagatgccaaaaattgctccacccaatccacgaacccatagtcatccccgggggatttccatctgccgtctggctcaggccagccattctcgatcccattaggctcagggttcccttctcataacaaatattactatcctgatgaaatctgtagaagtaggacctacttacacatgtaattgcaaaaatagcaatgcaatgccctaactctaaaagaaaaacaaaaggaaatgtataattaataaaatatatttcaagatacatgctgaggcaaaagtattctagaaaacataatgaaacaatcagatgctttcacctgcgcctaaaagctccatgaatgcggtagcaacagatatgggcaaatataggtgggttgttttggtgaccaaagcgccactggtaacattgctaccagtgacatgattgtgttgaggtggtaactcttgggaagataccagtgaaacaaagcataggcctcctcaatgtgcacagtggcggtttgctgcagtatgctttcaatatatatgaaagtcttgcaaaaaaacctttctattaatatgtcacatgagattagattctaggctcagatttttcacctacatttctgtccagtggaacatttgaaagtcacgtggggctcaggccaaagttttgctatgtgcaactgtcaggaattctaacctcgattcctgctcaccaaatgcccacagtgcccccatcattaccaattatgttccacaaaaatttaaacaccctgtgggatgcagctgctcctctcaaaaacctgtggtcttgtccaatcatgaatcctttgctgggcctgcaatagggtggctgcctgggattctattaggaaggagaaagagggagtggaggtagggaggttgccaagtgtcctccccaggcctcaagctcacctgttactcataggattcatggttcagtctagagtccctctgtgggactgaaacatcttagaagactcacagaagggctctcaggaggacgtttgcttagggggtgtatgtgtgtgtgtatatatgtgcgtgtgtatgtgtgtgtgttttccattgagctgactggcatagggaatattcatgcctctcagtcagaaagaaagaatagacagagatggttcagttctggttctgtgcctaccaggagagaataagcttcctcctctcaacttttcccaggacactcaccctcaaacatatccagctcttcctgcaaagctcctttcctgctattacctcattggacccttgcctcctgttgggttactcatatttttttaaattattaacttataagaactctttacatattatagatatcattcctcttttacttatgttgtagacatcttcttccattggtcacttttcatttaccttcatatgaggtattttttgcttcatggaagttttaaatttttatgtaatcaagcctgggaatccagatgcctttgcatgcaccaggattgtggggcagggtgagctggtgacggaggcctgctgtggtgagagaattgtgacacaggaaggccagctcacaggcttgtgccttgagacttggcaaatgtccagcagcctggacaagccctcccctccactcctctccccaggaggcacagccatttgcaaggcctgggatgtggactttctcctaaatcccaccaaataaccctctggagtcatgaatagctggcagtgctgtctgaggaaggccaagaggtccctgaaggtcctctcttggcttcaggactggggtgtgcagggcatcaatgtgatccagtggaggccaccaagatctggaagccagagttgacaggatgagtctcagtgcaccaactaactggctgtgtggccttggggcagtccctgccctgctctgggctcagcttccttttctgtccagggagtgggcttgactattgtggtgtagtttccactcactgatgctatcccaccactgttgctccacacacacacccttgaaagagccctgctgttgggggctgccctcaacctggcctgctcagactcctcacttggggcaggagggggctttggcatgaggatatctaagagtatccaagcctcagaaacttgctcctggtatgggatgtgacttctgagcctccctggtgcctggcttcagccctggaagtatagaatggaggcaggtcctggggat

SEQ ID NO: 12471 - DNA, 2731 bp, Homo sapiens
tgaagctcttatggagacctagattcatagcctttctgccccacccactttgagccccatgaacatttctcagaggtggagagaagcctatagcaggaagaaaactgcagctgctactgtctcctctgaggtctggcctttaaaggtggccgttaaagggtcagaaacatgaatggccatgttggcatcactgtaagaggaagctgtatccatgctcaccaagatccctttttctgagggaaaccgaggtagtagtgccatttaacccaaaccattcatgccattgtacctaacagttggttgccactgttttcctcataagaacatttacctcacagggctggagatgcagaggcagggtatcctcggatgccatagcatcagggctcggtgacatcaccaaagatccaggtcccccacctctgttctccacattggctttattctcaggaacatttccctcatgaacacaagatggctgccagtagccatcaggcccgtgtggttgcctccttgttcatgccaaagagtgaagatgccaaaaattgctccacccaatccacgaacccatagtcatccccgggggatttccatctgccgtctggctcaggccagccattctcgatcccattaggctcagggttcccttctcataacaaatattactatcctgatgaaatctgtagaagtaggacctacttacacatgtaattgcaaaaatagcaatgcaatgccctaactctaaaagaaaaacaaaaggaaatgtataattaataaaatatatttcaagatacatgctgaggcaaaagtattctagaaaacataatgaaacaatcagatgctttcacctgcgcctaaaagctccatgaatgcggtagcaacagatatgggcaaatataggtgggttgttttggtgaccaaagcgccactggtaacattgctaccagtgacatgattgtgttgaggtggtaactcttgggaagataccagtgaaacaaagcataggcctcctcaatgtgcacagtggcggtttgctgcagtatgctttcaatatatatgaaagtcttgcaaaaaaacctttctattaatatgtcacatgagattagattctaggctcagatttttcacctacatttctgtccagtggaacatttgaaagtcacgtggggctcaggccaaagttttgctatgtgcaactgtcaggaattctaacctcgattcctgctcaccaaatgcccmcagtgcccccatcattaccaattatgttccacaaaaatttaaacaccctgtgggatgcagctgctcctctcaaaaacctgtggtcttgtccaatcatgaatcctttgctgggcctgcaatagggtggctgcctgggattctattaggaaggagaaagagggagtggaggtagggaggttgccaagtgtcctccccaggcctcaagctcacctgttactcataggattcatggttcagtctagagtccctctgtgggactgaaacatcttagaagactcacagaagggctctcaggaggacgtttgcttagggggtgtatgtgtgtgtgtatatatgtgcgtgtgtatgtgtgtgtgttttccattgagctgactggcatagggaatattcatgcctctcagtcagaaagaaagaatagacagagatggttcagttctggttctgtgcctaccaggagagaataagcttcctcctctcaacttttcccaggacactcaccctcaaacatatccagctcttcctgcaaagctcctttcctgctattacctcattggacccttgcctcctgttgggttactcatatttttttaaattattaacttataagaactctttacatattatagatatcattcctcttttacttatgttgtagacatcttcttccattggtcacttttcatttaccttcatatgaggtattttttgcttcatggaagttttaaatttttatgtaatcaagcctgggaatccagatgcctttgcatgcaccaggattgtggggcagggtgagctggtgacggaggcctgctgtggtgagagaattgtgacacaggaaggccagctcacaggcttgtgccttgagacttggcaaatgtccagcagcctggacaagccctcccctccactcctctccccaggaggcacagccatttgcaaggcctgggatgtggactttctcctaaatcccaccaaataaccctctggagtcatgaatagctggcagtgctgtctgaggaaggccaagaggtccctgaaggtcctctcttggcttcaggactggggtgtgcagggcatcaatgtgatccagtggaggccaccaagatctggaagccagagttgacaggatgagtctcagtgcaccaactaactggctgtgtggccttggggcagtccctgccctgctctgggctcagcttccttttctgtccagggagtgggcttgactattgtggtgtagtttccactcactgatgctatcccaccactgttgctccacacacacacccttgaaagagccctgctgttgggggctgccctcaacctggcctgctcagactcctcacttggggcaggagggggctttggcatgaggatatctaagagtatccaagcctcagaaacttgctcctggtatgggatgtgacttctgagcctccctggtgcctggcttcagccctggaagtatagaatggaggcaggtcctggggat

SEQ ID NO: 12472 - DNA, 2731 bp, Homo sapiens
tgaagctcttatggagacctagattcatagcctttctgccccacccactttgagccccatgaacatttctcagaggtggagagaagcctatagcaggaagaaaactgcagctgctactgtctcctctgaggtctggcctttaaaggtggccgttaaagggtcagaaacatgaatggccatgttggcatcactgtaagaggaagctgtatccatgctcaccaagatccctttttctgagggaaaccgaggtagtagtgccatttaacccaaaccattcatgccattgtacctaacagttggttgccactgttttcctcataagaacatttacctcacagggctggagatgcagaggcagggtatcctcggatgccatagcatcagggctcggtgacatcaccaaagatccaggtcccccacctctgttctccacattggctttattctcaggaacatttccctcatgaacacaagatggctgccagtagccatcaggcccgtgtggttgcctccttgttcatgccaaagagtgaagatgccaaaaattgctccacccaatccacgaacccatagtcatccccgggggatttccatctgccgtctggctcaggccagccattctcgatcccattaggctcagggttcccttctcataacaaatattactatcctgatgaaatctgtagaagtaggacctacttacacatgtaattgcaaaaatagcaatgcaatgccctaactctaaaagaaaaacaaaaggaaatgtataattaataaaatatatttcaagatacatgctgaggcaaaagtattctagaaaacataatgaaacaatcagatgctttcacctgcgcctaaaagctccatgaatgcggtagcaacagatatgggcaaatataggtgggttgttttggtgaccaaagcgccactggtaacattgctaccagtgacatgattgtgttgaggtggtaactcttgggaagataccagtgaaacaaagcataggcctcctcaatgtgcacagtggcggtttgctgcagtatgctttcaatatatatgaaagtcttgcaaaaaaacctttctattaatatgtcacatgagattagattctaggctcagatttttcacctacatttctgtccagtggaacatttgaaagtcacgtggggctcaggccaaagttttgctatgtgcaactgtcaggaattctaacctcgattcctgctcaccaaatgcccacagtgcccccatcattaccaattatgttccacaaaaatttaaacaccctgtgggatgcagctgctcctctcaaaaacctgtggtcttgtccaatcatgaatcctttgctgggcctgcaatagggtggctgcctgggattctattaggaaggagaaagagggagtggaggtagggaggttgccaagtgtcctccccaggcctcaagctcacctgttactcataggattcatggttcagtctagagtccctctgtgggactgaaacatcttagaagactcacagaagggctctcaggaggacgtttgcttagggggtgtatgtgtgtgtgtatatatgtgcgtgtgtatgtgtgtgtgttttccattgagctgactggcatagggaatattcatgcctctcagtcagaaagaaagaatagacagagatggttcagttctggttctgtgcctaccaggagagaataagcttcctcctctcaacttttcccaggacactcaccctcaaacatatccagctcttcctgcaaagctcctttcctgctattacctcattggacccttgcctcctgttgggttactcatatttttttaaattattaacttataagaactctttacatattatagatatcattcctcttttacttatgttgtagacatcttcttccattggtcacttttcatttaccttcatatgaggtattttttgcttcatggaagttttaaatttttatgtaatcaagcctgggaatccagatgcctttgcatgcaccaggattgtggggcrgggtgagctggtgacggaggcctgctgtggtgagagaattgtgacacaggaaggccagctcacaggcttgtgccttgagacttggcaaatgtccagcagcctggacaagccctcccctccactcctctccccaggaggcacagccatttgcaaggcctgggatgtggactttctcctaaatcccaccaaataaccctctggagtcatgaatagctggcagtgctgtctgaggaaggccaagaggtccctgaaggtcctctcttggcttcaggactggggtgtgcagggcatcaatgtgatccagtggaggccaccaagatctggaagccagagttgacaggatgagtctcagtgcaccaactaactggctgtgtggccttggggcagtccctgccctgctctgggctcagcttccttttctgtccagggagtgggcttgactattgtggtgtagtttccactcactgatgctatcccaccactgttgctccacacacacacccttgaaagagccctgctgttgggggctgccctcaacctggcctgctcagactcctcacttggggcaggagggggctttggcatgaggatatctaagagtatccaagcctcagaaacttgctcctggtatgggatgtgacttctgagcctccctggtgcctggcttcagccctggaagtatagaatggaggcaggtcctggggat

SEQ ID NO: 12473 - DNA, 2731 bp, Homo sapiens
tgaagctcttatggagacctagattcatagcctttctgccccacccactttgagccccatgaacatttctcagaggtggagagaagcctatagcaggaagaaaactgcagctgctactgtctcctctgaggtctggcctttaaaggtggccgttaaagggtcagaaacatgaatggccatgttggcatcactgtaagaggaagctgtatccatgctcaccaagatccctttttctgagggaaaccgaggtagtagtgccatttaacccaaaccattcatgccattgtacctaacagttggttgccactgttttcctcataagaacatttacctcacagggctggagatgcagaggcagggtatcctcggatgccatagcatcagggctcggtgacatcaccaaagatccaggtcccccacctctgttctccacattggctttattctcaggaacatttccctcatgaacacaagatggctgccagtagccatcaggcccgtgtggttgcctccttgttcatgccaaagagtgaagatgccaaaaattgctccacccaatccacgaacccatagtcatccccgggggatttccatctgccgtctggctcaggccagccattctcgatcccattaggctcagggttcccttctcataacaaatattactatcctgatgaaatctgtagaagtaggacctacttacacatgtaattgcaaaaatagcaatgcaatgccctaactctaaaagaaaaacaaaaggaaatgtataattaataaaatatatttcaagatacatgctgaggcaaaagtattctagaaaacataatgaaacaatcagatgctttcacctgcgcctaaaagctccatgaatgcggtagcaacagatatgggcaaatataggtgggttgttttggtgaccaaagcgccactggtaacattgctaccagtgacatgattgtgttgaggtggtaactcttgggaagataccagtgaaacaaagcataggcctcctcaatgtgcacagtggcggtttgctgcagtatgctttcaatatatatgaaagtcttgcaaaaaaacctttctattaatatgtcacatgagattagattctaggctcagatttttcacctacatttctgtccagtggaacatttgaaagtcacgtggggctcaggccaaagttttgctatgtgcaactgtcaggaattctaacctcgattcctgctcaccaaatgcccacagtgcccccatcattaccaattatgttccacaaaaatttaaacaccctgtgggatgcagctgctcctctcaaaaacctgtggtcttgtccaatcatgaatcctttgctgggcctgcaatagggtggctgcctgggattctattaggaaggagaaagagggagtggaggtagggaggttgccaagtgtcctccccaggcctcaagctcacctgttactcataggattcatggttcagtctagagtccctctgtgggactgaaacatcttagaagactcacagaagggctctcaggaggacgtttgcttagggggtgtatgtgtgtgtgtatatatgtgcgtgtgtatgtgtgtgtgttttccattgagctgactggcatagggaatattcatgcctctcagtcagaaagaaagaatagacagagatggttcagttctggttctgtgcctaccaggagagaataagcttcctcctctcaacttttcccaggacactcaccctcaaacatatccagctcttcctgcaaagctcctttcctgctattacctcattggacccttgcctcctgttgggttactcatatttttttaaattattaacttataagaactctttacatattatagatatcattcctcttttacttatgttgtagacatcttcttccattggtcacttttcatttaccttcatatgaggtattttttgcttcatggaagttttaaatttttatgtaatcaagcctgggaatccagatgcctttgcatgcaccaggattgtggggcagggtgagctggtgacggaggcctgctgtggtgagagaattgtgacasaggaaggccagctcacaggcttgtgccttgagacttggcaaatgtccagcagcctggacaagccctcccctccactcctctccccaggaggcacagccatttgcaaggcctgggatgtggactttctcctaaatcccaccaaataaccctctggagtcatgaatagctggcagtgctgtctgaggaaggccaagaggtccctgaaggtcctctcttggcttcaggactggggtgtgcagggcatcaatgtgatccagtggaggccaccaagatctggaagccagagttgacaggatgagtctcagtgcaccaactaactggctgtgtggccttggggcagtccctgccctgctctgggctcagcttccttttctgtccagggagtgggcttgactattgtggtgtagtttccactcactgatgctatcccaccactgttgctccacacacacacccttgaaagagccctgctgttgggggctgccctcaacctggcctgctcagactcctcacttggggcaggagggggctttggcatgaggatatctaagagtatccaagcctcagaaacttgctcctggtatgggatgtgacttctgagcctccctggtgcctggcttcagccctggaagtatagaatggaggcaggtcctggggat

SEQ ID NO: 12474 - DNA, 2731 bp, Homo sapiens
tgaagctcttatggagacctagattcatagcctttctgccccacccactttgagccccatgaacatttctcagaggtggagagaagcctatagcaggaagaaaactgcagctgctactgtctcctctgaggtctggcctttaaaggtggccgttaaagggtcagaaacatgaatggccatgttggcatcactgtaagaggaagctgtatccatgctcaccaagatccctttttctgagggaaaccgaggtagtagtgccatttaacccaaaccattcatgccattgtacctaacagttggttgccactgttttcctcataagaacatttacctcacagggctggagatgcagaggcagggtatcctcggatgccatagcatcagggctcggtgacatcaccaaagatccaggtcccccacctctgttctccacattggctttattctcaggaacatttccctcatgaacacaagatggctgccagtagccatcaggcccgtgtggttgcctccttgttcatgccaaagagtgaagatgccaaaaattgctccacccaatccacgaacccatagtcatccccgggggatttccatctgccgtctggctcaggccagccattctcgatcccattaggctcagggttcccttctcataacaaatattactatcctgatgaaatctgtagaagtaggacctacttacacatgtaattgcaaaaatagcaatgcaatgccctaactctaaaagaaaaacaaaaggaaatgtataattaataaaatatatttcaagatacatgctgaggcaaaagtattctagaaaacataatgaaacaatcagatgctttcacctgcgcctaaaagctccatgaatgcggtagcaacagatatgggcaaatataggtgggttgttttggtgaccaaagcgccactggtaacattgctaccagtgacatgattgtgttgaggtggtaactcttgggaagataccagtgaaacaaagcataggcctcctcaatgtgcacagtggcggtttgctgcagtatgctttcaatatatatgaaagtcttgcaaaaaaacctttctattaatatgtcacatgagattagattctaggctcagatttttcacctacatttctgtccagtggaacatttgaaagtcacgtggggctcaggccaaagttttgctatgtgcaactgtcaggaattctaacctcgattcctgctcaccaaatgcccacagtgcccccatcattaccaattatgttccacaaaaatttaaacaccctgtgggatgcagctgctcctctcaaaaacctgtggtcttgtccaatcatgaatcctttgctgggcctgcaatagggtggctgcctgggattctattaggaaggagaaagagggagtggaggtagggaggttgccaagtgtcctccccaggcctcaagctcacctgttactcataggattcatggttcagtctagagtccctctgtgggactgaaacatcttagaagactcacagaagggctctcaggaggacgtttgcttagggggtgtatgtgtgtgtgtatatatgtgcgtgtgtatgtgtgtgtgttttccattgagctgactggcatagggaatattcatgcctctcagtcagaaagaaagaatagacagagatggttcagttctggttctgtgcctaccaggagagaataagcttcctcctctcaacttttcccaggacactcaccctcaaacatatccagctcttcctgcaaagctcctttcctgctattacctcattggacccttgcctcctgttgggttactcatatttttttaaattattaacttataagaactctttacatattatagatatcattcctcttttacttatgttgtagacatcttcttccattggtcacttttcatttaccttcatatgaggtattttttgcttcatggaagttttaaatttttatgtaatcaagcctgggaatccagatgcctttgcatgcaccaggattgtggggcagggtgagctggtgacggaggcctgctgtggtgagagaattgtgacacaggaaggccagcycacaggcttgtgccttgagacttggcaaatgtccagcagcctggacaagccctcccctccactcctctccccaggaggcacagccatttgcaaggcctgggatgtggactttctcctaaatcccaccaaataaccctctggagtcatgaatagctggcagtgctgtctgaggaaggccaagaggtccctgaaggtcctctcttggcttcaggactggggtgtgcagggcatcaatgtgatccagtggaggccaccaagatctggaagccagagttgacaggatgagtctcagtgcaccaactaactggctgtgtggccttggggcagtccctgccctgctctgggctcagcttccttttctgtccagggagtgggcttgactattgtggtgtagtttccactcactgatgctatcccaccactgttgctccacacacacacccttgaaagagccctgctgttgggggctgccctcaacctggcctgctcagactcctcacttggggcaggagggggctttggcatgaggatatctaagagtatccaagcctcagaaacttgctcctggtatgggatgtgacttctgagcctccctggtgcctggcttcagccctggaagtatagaatggaggcaggtcctggggat

SEQ ID NO: 12475 - DNA, 545 bp, Homo sapiens
aaggaacacagccaacaccttgatggtagcccagtgagactcatttttaatttcatacctccagaattgtaagagaatagatttctgttggttaagccaccgagttkgtggtgatttgttacagcagccacaggaaatgaatataggccccattcagacctgctgggtgggagactctgcaggtggggtctggcgtcctgtatttaccaaactcttcagggggttcagaggcacgccaaagtttgagaaccactgctcttaaatggtggttcttgaccttcgtggaacatcacactcatccggggtgtttccaaaaacactcgtacccagctctactcccagaaattccaatttgattggctacggtaaggttcaggcgtttcatttgtaaaagctccgtctactgttctagtgctctgcactgccagaactggaaagctgggcttcccttcccacttgctgcttcccacttctcacttctgcctctgcttccaccttctcttctctagatgttgggtccatcttagtctcctctttccttcttg

SEQ ID NO: 12476 - DNA, 532 bp, Homo sapiens
ttttttttttttttttggaraaagagtctcggctctgtcgcccaggctggagtgcagtggtgcgatctcggctcactgcaagctctgcctcctgggctcctgggttgacgccattctcctgcataagcctcctgagcagctggaactacaggcgcccaccatcacacccggctaattttttgtatttttagtaaagacagggtttcaccgtgttagccaggatggtctcgatctcctgacctcgtgatctgcccacctcagcctcccaaagtgctgggattacaggcgtgagccaccacgcccggcatactatcagattctttaaaaaaagtctgctgccctgaaaacaattattaatttataatattagatatagaaaaggtataaggtcatagtggtgatgtataaagacaccatgttacatctaaagattcatattttagataaatccctgctatcaacttctgtatttaatatttgtctctcacagaactagaaaaaattctgatctttatagctttgcagaacacgg

SEQ ID NO: 12477 - DNA, 550 bp, Homo sapiens
attgactgtgtcatacgggacatcttttaatcatctaagccagcatattcttatttgcaatatgtaaataaaggaagcccttcagactaaaagaaagcaatacccaacagcgacctgaatacacaggaagaaatgaagatcactgaaaatgatcaaatatatggrtaaatatgaaagatagtatatattttttttctcttttctatatgtccttaaaagacaaacctgtggaaagcaataattatttccttgtattcttggatttataacataaggaagtgaaaatggagctacagcggggcaaagttgccctattttaccagaactgagtcagtactaacctgaagaagactgatgcatacaatccctacagcaaccaattacaatttttttaatagcaaaaaattaacaggaattaaaatgacacactgaaaaatacttgctgaaacagaagagggcaataaaggagaaagtggaacaaaaaagatgtaagacatatggaaaacaaatagtaaaatagcagaaataaatccaaccatattattaattc

SEQ ID NO: 12478 - DNA, 550 bp, Homo sapiens
attgactgtgtcatacgggacatcttttaatcatctaagccagcatattcttatttgcaatatgtaaataaaggaagcccttcagactaaaagaaagcaatacccaacagcgacctgaatacacaggaagaaatgaagatcactgaaaatgatcaaatatatggataaatatgaaagatagtatatattttttttctcttttctatatgtccttaaaagacaaacctgtggaaagcaataattatttccttgtattcttggatttataacataaggaagtgaaratggagctacagcggggcaaagttgccctattttaccagaactgagtcagtactaacctgaagaagactgatgcatacaatccctacagcaaccaattacaatttttttaatagcaaaaaattaacaggaattaaaatgacacactgaaaaatacttgctgaaacagaagagggcaataaaggagaaagtggaacaaaaaagatgtaagacatatggaaaacaaatagtaaaatagcagaaataaatccaaccatattattaattc

SEQ ID NO: 12479 - DNA, 532 bp, Homo sapiens
tagtccttctgtatagaagcactttatgatgactcaataacaacttgaaatagaaaaaggagagtttgccaggaggtaataagaagctagatatcccatcatcataattctttttgcataactgtacccactctctataaaatcaagtgctgtgaaaaacagattgcatgccattgatacatggaagcatgttgtcacaagcaattacagcatgctacattaaayaaccatgtgctgtgttatgtcttaggccacacgctgcaatgttctcttttaatagttataatgaagttggtttcatttttcaagtaactgggacttaaacatttactgaagactttaaatagcaaggccaacattttaatacttagactaacacagtttgataatttaagaataggacttagaagtcgactgtgaaaaacatttaataaaaaaataagtaatctgcatactttattagaaaaataagtcactaggaaaactgagagtaaaatgtctagtttacagggatgttctattggagaaatct

SEQ ID NO: 12480 - DNA, 506 bp, Homo sapiens
ttttcattctctgggcctttaaaaggtactttaactagttcactatcagtatattttaaaatttatttttaaatttatgtaacagtaaaatccacactttgtagtatacagttgtatagattttgacaaatgcttagggtcctgtatttacacaacagtcataatatggaagagttccatcaactccccatatttttcagactgcccccttgatgttagcactcatttccactccaacccatggtaactgcaaatctgtttctatccatctagttctgtcttttccagaatgttaaagaagtggaatgatacaatatgtactttggttggacytctttcaatgaacaaagtccattgagattcaccaatattgttgtgtgaatcaatatttcattacttttgtatcaatgagtaatattgtattgtagcaacattccagtttgtttatccattttccagttgtttcaggttttaatgattatgagtaaaagctgctataaacattt

SEQ ID NO: 12481 - DNA, 2120 bp, Homo sapiens
aaggttccattacagtcagcagaatatgctttaaaaatgcaaagatatataatccaattaggaaggtggccatcccaagaggttaaaaccttttaaagctttggcatatgaaggccatcaactctgaaaaactcactcttgtagaaggtccccctcactgacaagaccaggttaagtgaggcttttgtgaagaatggctgacccttgatgtttgcagatgaaatcatttaagttaacagctttttggggttgacctcaaggttcatgacacgcacacattttactgaaatttgactctgaaacacttctactccaggatgtggagaagagtctattactcagtgagtgagcgtggtcagatgcccagcccacacacgtggctccacctctgttgtcctttactctccacatatgttgtcctttactactgccgtgactctcaggtagtgacaaaagctttgttcctttgtaaaaagtggcccacaaatcttcatgaaagctaaataagtaatcaacttgaactataaggacatgtgcagaaaatgcatgactatgggaaaatttaggagaaaaccaagaatgcaaacaaaattttctgtattttctaatttgcggtttgaagaacagctgtgaatgtacaaatgttcaagactctgctgctgatcccaaaggatccctattcatactcatctccgaggttatggactaggcctatagcctgctctatcccagccaccgagactgattcagctcacttagaccaggatgagtctctggaatcagtctataatgtctctagttcagccgatccaatctgctgcacctagctcttaagctccatggctcctcaatccccactagatccagatctcccctcaaaattctccctccttcaatactctgttttaaaactcacttttctgcacagactcccttggacatgacctttggcatttattttccaggaccatgcaccatggttaagtctttggtatcaactatttgctgccacttctaccattaccactatctccatcactgtaactacccttacaacccccacccccaccctccctggaggccagcaatgaagcaagggcctggctgtacaggccagcaagccccttcccaacagttataatcagtaaagctctatgctcattccttacaggggaacttggtgggcaccaaaaactccctacctccaacttacttctaataacttaaagtctccatatttcacgtagatagttttgatgccattaaatgcgagatccagttcctttagggctggaaacgtgtgaaatgcctctacatggggaagagaaagagagagtctgcagcttgtaaaggacttaagagaaagatattaataattaccatttactgtgtccctactgggttaggccaggcactgtataaggtactttacatacatggcctctaaatctctaacaacccagaaaaatagggattactacttccattctatggctgactaaggctcagccaagctaagtgatttgccagaatggaattgctggtaagtgaaagagccaagaattgaatctaagtctgctcaacagcaaagcccattttaaaaattatctttattaatcctgattacaaaaattaaaacacaactaagaaaaacagtcaaacatcacagaaaaataaaaagttctgtttaatcccaacatccagagacaagtattaaaagttccatatatagcactcaactttttctcatgtatatatcaaaatacatacctcttttaacaaaaatwgagtcatactgtacacactgtactgacttgctttttcccttaacaatgtaacttaaagattattccatgtcaaaacatatagatatgcctaatgtcttctgatgttctacagtatagatatatcctagtttactaatccatttccccattggtagcctttaggctatatgaataaaaggtaagaaactatatgaataaatgtttctctctttgaatgagaactgaactttttctagccttgttcctctggtaacctgaaaccaatgatacagtaactgcatttccaggcagtatcacttgcggtaaaaatcaccctaggttggcaaattacat

SEQ ID NO: 12482 - DNA, 630 bp, Homo sapiens
tgcaaaactttgaacaagttgcagaaacactatgcctcagtagtcacagaagtatattacctatgtatttatataatctaatatattttataatataaggaatgtgtttaatgctatgacaaggcattaagaatctttaaaccagtgtgaatgagtcaagtcctgcctcctgyttcctacctcattcccctctcagagattagatactccttctaatctttttttttttttttttgagacagaggtctcactctgtcacctaggttgaagtgcaatggcacagtctccgcttactgcaacctccatctcccaggatcaagcgatggtcccacctcagcctcctgagtagctgggaccataggcatgtgtgaccatgcctggtcaattttttgtatttttggtagagatggggtcttgccatgttgtccagactggtctcgaatttctgagctcaggcaatccacccacctcagcatcccaaagtgctgggattacaggtgtgacccaccatgcctggcctacttctactcttaatggtgctgcagaagggcagaagtatgtcttttgtaactgctcttgctgagcttatggacataggccctgcctagtaccagaagagtaaaaatctct

SEQ ID NO: 12483 - DNA, 547 bp, Homo sapiens
agtttaaattcactttaattttcttttctgattcagaggccctaaaatctaaaaagacttaggagggtggttacatagagtcatagcagcaagtatagcrtgggtcttctgtctccattttggttgtgtcactaagttggttagggcatggctcctgttcccgcagaggttaagttgaccttgtttgttagaaaaaagacaaactaaaaaccaaacctctttgcctagcaaatctggctgccccaagtgtatgtagggtaccatatatgccaatgcaggatccctatactgtgtcatctaaggtatctgatgaccttccccaaggctatagttggatcaagatttacaccccttacatgctccagcaacttccctatctcaggtcttagatattctaaagcaagacccattgcaatctgcttcacacatttctggtgccaactattgtcttgagtttggtgaatgacggatttgttgacttttcatcagaaccaatgatatctttatctaaagtcctcaaagtttcttgcatactgttatctgtctg

SEQ ID NO: 12484 - DNA, 547 bp, Homo sapiens
agtttaaattcactttaattttcttttctgattcagaggccctaaaatctaaaaagacttaggagggtggttacatagagtcatagcagcaagtatagcatgggtcttctgtctccattttggttgtgtcactaagttggttagggcatggcycctgttcccgcagaggttaagttgaccttgtttgttagaaaaaagacaaactaaaaaccaaacctctttgcctagcaaatctggctgccccaagtgtatgtagggtaccatatatgccaatgcaggatccctatactgtgtcatctaaggtatctgatgaccttccccaaggctatagttggatcaagatttacaccccttacatgctccagcaacttccctatctcaggtcttagatattctaaagcaagacccattgcaatctgcttcacacatttctggtgccaactattgtcttgagtttggtgaatgacggatttgttgacttttcatcagaaccaatgatatctttatctaaagtcctcaaagtttcttgcatactgttatctgtctg

SEQ ID NO: 12485 - DNA, 547 bp, Homo sapiens
agtttaaattcactttaattttcttttctgattcagaggccctaaaatctaaaaagacttaggagggtggttacatagagtcatagcagcaagtatagcatgggtcttctgtctccattttggttgtgtcactaagttggttagggcatggctcctgttcccgcagaggttaagttgaccttgtttgttagaaaaaagacaaactaaaaaccaaacctctttgcctagcaaatctggctgccccaagtgtatgtagggtaccatatatgccaatgcaggatccctatactgtgtcatctaaggtatctgatgaccttccccaaggctatagttggatcaagatttacaccccttacatgctccagcaacttccctatctcaggtcttagatattctaaagcaagacccattgcaatctgcttcacacatttctgrtgccaactattgtcttgagtttggtgaatgacggatttgttgacttttcatcagaaccaatgatatctttatctaaagtcctcaaagtttcttgcatactgttatctgtctg

SEQ ID NO: 12486 - DNA, 540 bp, Homo sapiens
ctgtcttaatctttctcccctccactgtatttccatctgcctgactcrgaggcttaccgctagtttgtttttgaaattgagtcatgaaaatttatgagatttatgagtttccctagaaccctaagaaacatgtagcctcggtttttcatcaataaaatgggggatgtttacaataatgcccacctcattttgaacttctgtaaaagttaaatgagaaaaatgcatgtaaagtacttgctacagtttttggtatacaaaaatgttaaagaaatgtaaattgtattgaatattcctctgtttgatattaggactcactggattactcaaacagcttcataatttgtctccatatcccttatagctatcaactcaaatctaccttaaacatttctgccagagtttttatctcccaccacccacaacgagatctgattatatcatcgcctttctcaaaatatataaggatgaaaagtttttaaaactttaaatggttttcatgatccttcataaaatgattctaatccataccaccatatctct

SEQ ID NO: 12487 - DNA, 542 bp, Homo sapiens
gtaaaacaatyatttaaaggcaggacttatggtaagcataataacatcaaggttgtgtgacctaagggcaggatttaaactggaaatcttagaggttttcccagaattggggttaatcagaagtcaacacggacacttagcactcaaggtagagttgctttggcatccacaaaacatatgtgctgcacacactcatacacacaaacacacaccccacagcacatattttaatttgctccacgtaaagtgtataaaaatattcaattccattggatttgtaagtaaatgaccacaaacacattttgtagctgtattaagcctcaacccaggctaaacttccagccaatagtcaggaccaaattgccagccaaatgcaccctgtaggagcctgatcctctggctgacagtcgagcttttttagctaatgccaattggagcagagatcagcgttctccactgagccttgcctaaatagaagattctggggcaaaaataaataatttttgtcattttaagccactaagttttggcacagtgtatta

SEQ ID NO: 12488 - DNA, 2299 bp, Homo sapiens
ggaatgagtcaaaaaatacttcctcaaaataagttttctcctcagctatgcaagctcaccctggctttatttggggcataattactagagaccagccaaagtctaggtcattggcacaatggaccccgttagcagcaaaccagggaccctgaactaatggcaaggaacgtagcctgcattgcactattaatatgtgcctgtcggaaaggctttattgttctaggtttttcatcagatcttggattgatgtatggctttgagactagaacaaatgctctagagggcagcacagagtcctaaatgcccccagtaagagggacsagtttgagcagagagagctttgcactggcttcctggagttttataaagccaaacctcagtgacgaggcaggctgcgggcttggagaagagaacacaatctgttctgagatgactggcgcttcaggcacatgatgcctgtggctggtgcgtgttaattcatgcgcagagaggtggtggtggtggttgttccccagccatgtttttctaattataatgaaaacaaacacacactcacacacatacacaccaaggaaattcctgttgctatacagggaatacttaagttatacagctaatgcctttcagggccccttctccagcttggatgtgccagcctactatgtcattctccagggtttctccatcctgtttgaaggtgatactgatttctgatgtttacttgcttatttgctgcattttttcttttcttttcttcctttgttttttttttttaattcacagaacaggcagtggtgacatgcatgacaggcatttgggatcagatgttgctgatccagaagcctaggtgtggccattttgtcatggcaactgttaagcaagtaaatagggtagagtagtcatctgacttatctccagcgatgttcagtttgttttgaatttctactctgtgacacttctgctctgaagccaagcatagatagatggtacctttcgttcaactcccaagttttcatttctctcaaatgaagttaagaggtttttaaaatagaaacacatcgatgtgagccattttcagactggatgggtttcctgaaccttgtctttttaatgctttacttctgctcttttagatcaatttctaagcgccaagaagagctattactcctttctcctagcagagaattctctaagatagaaaatgacacatgtagtcattgtataaattcttttattttcctgtaagcatcttgaccctctactatttgcagctgtttctggggaggagtagtttggataaccaacaaaccttgccacttcttcagtgggactcaaggcagcagaagaagactactgtctaaggatctgttagcttttacccagggtcctatgtctcttcatatgctgtgctttaaaaaaaaaaaaaataagtgaaagggcgtaagctgtgtttgagtgaggaagaaaaccttggaacttatttctctggtctgcagagggccgagctgctacctctgactgcagacttaagacagcccaatattggccaactactttactggccattgtgaggccatggtcaacatagagcataacatcttcccattgatgttcaaactgagaattgcctgagtgtggtatcccctgccataaggtgagctggaatacaccctcataatctgttaaaggccaaaattaaaatgtgatgttttcctctagtaggcaatggaaagagggaaaaaagagtagaggcactaggaagtttcagagaagtcaaaacattctggtccaaatggagttttaagcagagggagttttaccccgagaggacatttggcaatgctgaagacatttttgattgtcacgactggaggagtagaaggtgctgctgacatctaatgatctagaggccaggggtgctgctaaaatcctacagtgcacagggcagctcccacaacaaagaattatctgacccacaatgtcaatatagagacattgagaatcttctgacccacaagattgagaaatgctggtctagtgactagagtctcctgaattaagcagcctagattctaccctgtcttgactactagctgtatgagcttgaggataccccaaacctctatgaccttagtgtctgcatacactccatgcactggtatttctatatcctagggggtggagtagttgggtgagttatacttcctgaaatattaggctatagctaaggatcaaataggtttccagagtctgtaggccattagaaagttcagtgagccagctcatgcctgtaatccca

SEQ ID NO: 12489 - DNA, 2299 bp, Homo sapiens
ggaatgagtcaaaaaatacttcctcaaaataagttttctcctcagctatgcaagctcaccctggctttatttggggcataattactagagaccagccaaagtctaggtcattggcacaatggaccccgttagcagcaaaccagggaccctgaactaatggcaaggaacgtagcctgcattgcactattaatatgtgcctgtcggaaaggctttattgttctaggtttttcatcagatcttggattgatgtatggctttgagactagaacaaatgctctagagggcagcacagagtcctaaatgcccccagtaagagggaccagtttgagcagagagagctttgcactggcttcctggagttttataaarccaaacctcagtgacgaggcaggctgcgggcttggagaagagaacacaatctgttctgagatgactggcgcttcaggcacatgatgcctgtggctggtgcgtgttaattcatgcgcagagaggtggtggtggtggttgttccccagccatgtttttctaattataatgaaaacaaacacacactcacacacatacacaccaaggaaattcctgttgctatacagggaatacttaagttatacagctaatgcctttcagggccccttctccagcttggatgtgccagcctactatgtcattctccagggtttctccatcctgtttgaaggtgatactgatttctgatgtttacttgcttatttgctgcattttttcttttcttttcttcctttgttttttttttttaattcacagaacaggcagtggtgacatgcatgacaggcatttgggatcagatgttgctgatccagaagcctaggtgtggccattttgtcatggcaactgttaagcaagtaaatagggtagagtagtcatctgacttatctccagcgatgttcagtttgttttgaatttctactctgtgacacttctgctctgaagccaagcatagatagatggtacctttcgttcaactcccaagttttcatttctctcaaatgaagttaagaggtttttaaaatagaaacacatcgatgtgagccattttcagactggatgggtttcctgaaccttgtctttttaatgctttacttctgctcttttagatcaatttctaagcgccaagaagagctattactcctttctcctagcagagaattctctaagatagaaaatgacacatgtagtcattgtataaattcttttattttcctgtaagcatcttgaccctctactatttgcagctgtttctggggaggagtagtttggataaccaacaaaccttgccacttcttcagtgggactcaaggcagcagaagaagactactgtctaaggatctgttagcttttacccagggtcctatgtctcttcatatgctgtgctttaaaaaaaaaaaaaataagtgaaagggcgtaagctgtgtttgagtgaggaagaaaaccttggaacttatttctctggtctgcagagggccgagctgctacctctgactgcagacttaagacagcccaatattggccaactactttactggccattgtgaggccatggtcaacatagagcataacatcttcccattgatgttcaaactgagaattgcctgagtgtggtatcccctgccataaggtgagctggaatacaccctcataatctgttaaaggccaaaattaaaatgtgatgttttcctctagtaggcaatggaaagagggaaaaaagagtagaggcactaggaagtttcagagaagtcaaaacattctggtccaaatggagttttaagcagagggagttttaccccgagaggacatttggcaatgctgaagacatttttgattgtcacgactggaggagtagaaggtgctgctgacatctaatgatctagaggccaggggtgctgctaaaatcctacagtgcacagggcagctcccacaacaaagaattatctgacccacaatgtcaatatagagacattgagaatcttctgacccacaagattgagaaatgctggtctagtgactagagtctcctgaattaagcagcctagattctaccctgtcttgactactagctgtatgagcttgaggataccccaaacctctatgaccttagtgtctgcatacactccatgcactggtatttctatatcctagggggtggagtagttgggtgagttatacttcctgaaatattaggctatagctaaggatcaaataggtttccagagtctgtaggccattagaaagttcagtgagccagctcatgcctgtaatccca

SEQ ID NO: 12490 - DNA, 2299 bp, Homo sapiens
ggaatgagtcaaaaaatacttcctcaaaataagttttctcctcagctatgcaagctcaccctggctttatttggggcataattactagagaccagccaaagtctaggtcattggcacaatggaccccgttagcagcaaaccagggaccctgaactaatggcaaggaacgtagcctgcattgcactattaatatgtgcctgtcggaaaggctttattgttctaggtttttcatcagatcttggattgatgtatggctttgagactagaacaaatgctctagagggcagcacagagtcctaaatgcccccagtaagagggaccagtttgagcagagagagctttgcactggcttcctggagttttataaagccaaacctcagtgacgaggcaggctgcgggcttggagaagagaacacaatctgttctgagatgactggcgcttcaggcacatgatgcctgtggctggtgcgtgttaattcatgcgcagagaggtggtggtggtggttgttccccagccatgtttttctaattataatgaaaacaaacacacactcacacacatacacaccaaggaaattcctgttgctatacagggaatacttaagttatacagctaatgcctttcagggccccttctccagcttggatgtgccagcctactatgtcattctccagggtttctccatcctgtttgaaggtgatactgatttctgatgtttacttgcttatttgctgcattttttcttttcttttcttcctttgttttttttttttaattcacagaacaggcagtggtgacatgcatgacaggcatttgggatcagatgttgctgatccagaagcctaggtgtggccattttgtcatggcaactgttaagcaagtaaatagggtagagtagtcatctgacttatctccagcgatgttcagtttgttttgaatttctactctgtgacacttctgctctgaagccaagcatagatagatggtacctttcgttcaactcccaagttttcatttctctcaaatgaagttaagaggtttttaaaatagaaacacatcgatgtgagccattttcagactggatgggtttcctgaaccttgtctttttaatgctttacttctgctcttttagatcaatttctaagcgccaagaagagctattactcctttctcctagcagagaattctctaagatagaaaatgacacatgtagtcattgtataaattcttttattttcctgtaagcatcttgaccctctactatttgcagctgtttctggggaggagtagtttggataaccaacaaaccttgccacttcttcagtgggactcaaggcagcagaagaagactactgtctaaggatctgttagcttttacccagggtcctatgtctcttcatatgctgtgctttaaaaaaaaaaaaaataagtgaaagggcgtaagctgtgtttgagtgaggaagaaaaccttggaacttatttctctggtctgcagagggccgagctgctacctctgactgcagacttaagacagcccaatattggccaactactttactggccattgtgaggccatggtcaacatagagcataacatcttcccattgatgttcaaactgagaattgcctgagtgtggtatcccctgccataaggtgagctggaatacaccctcataatctgttaaaggccaaaattaaaatgtgatgttttcctctagtaggcaatggaaagagggaaaaaagagtagaggcactaggaagtttcagagaagtcaaaacattctggtccaaatggagttttaagcagagggagttttaccccgagaggacatttggcaatgctgaagacatttttgattgtcacgactggaggagtagaaggtgctgctgacatctaatgatctagaggccaggggtkctgctaaaatcctacagtgcacagggcagctcccacaacaaagaattatctgacccacaatgtcaatatagagacattgagaatcttctgacccacaagattgagaaatgctggtctagtgactagagtctcctgaattaagcagcctagattctaccctgtcttgactactagctgtatgagcttgaggataccccaaacctctatgaccttagtgtctgcatacactccatgcactggtatttctatatcctagggggtggagtagttgggtgagttatacttcctgaaatattaggctatagctaaggatcaaataggtttccagagtctgtaggccattagaaagttcagtgagccagctcatgcctgtaatccca

SEQ ID NO: 12491 - DNA, 2299 bp, Homo sapiens
ggaatgagtcaaaaaatacttcctcaaaataagttttctcctcagctatgcaagctcaccctggctttatttggggcataattactagagaccagccaaagtctaggtcattggcacaatggaccccgttagcagcaaaccagggaccctgaactaatggcaaggaacgtagcctgcattgcactattaatatgtgcctgtcggaaaggctttattgttctaggtttttcatcagatcttggattgatgtatggctttgagactagaacaaatgctctagagggcagcacagagtcctaaatgcccccagtaagagggaccagtttgagcagagagagctttgcactggcttcctggagttttataaagccaaacctcagtgacgaggcaggctgcgggcttggagaagagaacacaatctgttctgagatgactggcgcttcaggcacatgatgcctgtggctggtgcgtgttaattcatgcgcagagaggtggtggtggtggttgttccccagccatgtttttctaattataatgaaaacaaacacacactcacacacatacacaccaaggaaattcctgttgctatacagggaatacttaagttatacagctaatgcctttcagggccccttctccagcttggatgtgccagcctactatgtcattctccagggtttctccatcctgtttgaaggtgatactgatttctgatgtttacttgcttatttgctgcattttttcttttcttttcttcctttgttttttttttttaattcacagaacaggcagtggtgacatgcatgacaggcatttgggatcagatgttgctgatccagaagcctaggtgtggccattttgtcatggcaactgttaagcaagtaaatagggtagagtagtcatctgacttatctccagcgatgttcagtttgttttgaatttctactctgtgacacttctgctctgaagccaagcatagatagatggtacctttcgttcaactcccaagttttcatttctctcaaatgaagttaagaggtttttaaaatagaaacacatcgatgtgagccattttcagactggatgggtttcctgaaccttgtctttttaatgctttacttctgctcttttagatcaatttctaagcgccaagaagagctattactcctttctcctagcagagaattctctaagatagaaaatgacacatgtagtcattgtataaattcttttattttcctgtaagcatcttgaccctctactatttgcagctgtttctggggaggagtagtttggataaccaacaaaccttgccacttcttcagtgggactcaaggcagcagaagaagactactgtctaaggatctgttagcttttacccagggtcctatgtctcttcatatgctgtgctttaaaaaaaaaaaaaataagtgaaagggcgtaagctgtgtttgagtgaggaagaaaaccttggaacttatttctctggtctgcagagggccgagctgctacctctgactgcagacttaagacagcccaatattggccaactactttactggccattgtgaggccatggtcaacatagagcataacatcttcccattgatgttcaaactgagaattgcctgagtgtggtatcccctgccataaggtgagctggaatacaccctcataatctgttaaaggccaaaattaaaatgtgatgttttcctctagtaggcaatggaaagagggaaaaaagagtagaggcactaggaagtttcagagaagtcaaaacattctggtccaaatggagttttaagcagagggagttttaccccgagaggacatttggcaatgctgaagacatttttgattgtcacgactggaggagtagaaggtgctgctgacatctaatgatctagaggccaggggtgctgctaaaatcctacagtgcacagggcagctcccacaacaaagaattatctgacccacaatgtcaatatagagacattgagaatcttctgacccacaagattgagaaatgctggtctagtgactagagtctcctgaattaagcagcctagattctaccctgtcttgactactagctgtatgagcttgaggataccccaaacctctatgaccttrgtgtctgcatacactccatgcactggtatttctatatcctagggggtggagtagttgggtgagttatacttcctgaaatattaggctatagctaaggatcaaataggtttccagagtctgtaggccattagaaagttcagtgagccagctcatgcctgtaatccca

SEQ ID NO: 12492 - DNA, 625 bp, Homo sapiens
gtaatttcattagtgtaaagatgaggaaagtgaaactcagcatggtgaaagaactccactgagccagccagggcccaggctcaggcgtagcactgattctcaactaagctctaagacaatgagcaagacagaagaggaagaaaaagggaaagcagcagggggaaaaaccctctctccttaccttatattaaatggaagtagggtatttccaaatgaaagccttggctacctagtcatcctaaaaacaagtgatttccaaaaagacaacgagatttttaattgcttctagatgtacaagaacatagtccaggggagagtcaagacaacagccagctggtcgtggtggctcacgcctgaaatcccagcactttgggaggccaaggcaggcagatcacttgagttcaggagttcaagaccagtctggccaacatggtgaaaccccacctctactaaaaaaacacaaaaaacttagctggatgtggtagcccacgcctgtaatcccggctactmgggaggctgaggcacgagaatcacttgaacccgggaggcggaggttgcagtgagccaagatcacgccactgtactccagcctgaaaaaaagaaactccatctccaaaaaaaaaaa

SEQ ID NO: 12493 - DNA, 574 bp, Homo sapiens
tgttttgagctactaaatttgtagtgatttcttatggcaacaatgaaaattaagatgatatgtttaatttttttcttatccatatagggaaaaaaaaatcccaaaactgcattaattagggtttccctgttttattttaaatrtgatgtattacactttttgatggaaaagaaaacttcagccaaagccatcttggagtaagatgtgaagttaagttctgagcccacatactgaatataattatgaaatgatagtaaaggaattgtgactggaaagtaatgtctatataatattcatacatctttttgttcttttgtcatcagtgcatataaaatccttcacacctgatgccgcagatgcttaataggcaagcaactctccccaactgaagcgatgctgtacaaaacagaagggctaacacaaatcagggtttgaagtgtattgaagtaaaatctattctccaattaacaagcaatgttgcgtttaaatacataaatgaattataaaattataaaattttgacaaacattctgagaaggatgtatttgtagacacttgggaaatcatcatgcca

SEQ ID NO: 12494 - DNA, 574 bp, Homo sapiens
tgttttgagctactaaatttgtagtgatttcttatggcaacaatgaaaattaagatgatatgtttaatttttttcttatccatatagggaaaaaaaaatcccaaaactgcattaattagggtttccctgttttattttaaatatgatgtattacactttttgatggaaaagaaaacttcagccaaagccatcttgragtaagatgtgaagttaagttctgagcccacatactgaatataattatgaaatgatagtaaaggaattgtgactggaaagtaatgtctatataatattcatacatctttttgttcttttgtcatcagtgcatataaaatccttcacacctgatgccgcagatgcttaataggcaagcaactctccccaactgaagcgatgctgtacaaaacagaagggctaacacaaatcagggtttgaagtgtattgaagtaaaatctattctccaattaacaagcaatgttgcgtttaaatacataaatgaattataaaattataaaattttgacaaacattctgagaaggatgtatttgtagacacttgggaaatcatcatgcca

SEQ ID NO: 12495 - DNA, 574 bp, Homo sapiens
tgttttgagctactaaatttgtagtgatttcttatggcaacaatgaaaattaagatgatatgtttaatttttttcttatccatatagggaaaaaaaaatcccaaaactgcattaattagggtttccctgttttattttaaatatgatgtattacactttttgatggaaaagaaaacttcagccaaagccatcttggagtaagatgtgaagttaagttctgagcccacatactgaatataattatgaaatgatagtaaaggaattgtgactggaaagtaatgtctatataatattcatacatctttttgttcttttgtcatcagtgcatataaaatccttcacacctgatsccgcagatgcttaataggcaagcaactctccccaactgaagcgatgctgtacaaaacagaagggctaacacaaatcagggtttgaagtgtattgaagtaaaatctattctccaattaacaagcaatgttgcgtttaaatacataaatgaattataaaattataaaattttgacaaacattctgagaaggatgtatttgtagacacttgggaaatcatcatgcca

SEQ ID NO: 12496 - DNA, 574 bp, Homo sapiens
tgttttgagctactaaatttgtagtgatttcttatggcaacaatgaaaattaagatgatatgtttaatttttttcttatccatatagggaaaaaaaaatcccaaaactgcattaattagggtttccctgttttattttaaatatgatgtattacactttttgatggaaaagaaaacttcagccaaagccatcttggagtaagatgtgaagttaagttctgagcccacatactgaatataattatgaaatgatagtaaaggaattgtgactggaaagtaatgtctatataatattcatacatctttttgttcttttgtcatcagtgcatataaaatccttcacacctgatgccgcagatgcttaataggcaagcaactctccccaactgaagcgatgctgtacaaaacagaagggctaacacaaatcagggtttgaagtgtattgaagtaaaatctattctccaattaacaagcaatgttgcgtttaaatacataaatgaattataaaattawaaaattttgacaaacattctgagaaggatgtatttgtagacacttgggaaatcatcatgcca

SEQ ID NO: 12497 - DNA, 574 bp, Homo sapiens
tgttttgagctactaaatttgtagtgatttcttatggcaacaatgaaaattaagatgatatgtttaatttttttcttatccatatagggaaaaaaaaatcccaaaactgcattaattagggtttccctgttttattttaaatatgatgtattacactttttgatggaaaagaaaacttcagccaaagccatcttggagtaagatgtgaagttaagttctgagcccacatactgaatataattatgaaatgatagtaaaggaattgtgactggaaagtaatgtctatataatattcatacatctttttgttcttttgtcatcagtgcatataaaatccttcacacctgatgccgcagatgcttaataggcaagcaactctccccaactgaagcgatgctgtacaaaacagaagggctaacacaaatcagggtttgaagtgtattgaagtaaaatctattctccaattaacaagcaatgttgcgtttaaatacataaatgaattataaaattataawattttgacaaacattctgagaaggatgtatttgtagacacttgggaaatcatcatgcca

SEQ ID NO: 12498 - DNA, 533 bp, Homo sapiens
gatgcatggaaatgagttgaaagtgtaaataatatatggaaaaagagaaacawtgatgataaataactctttgagaaagtcaggaatgtacctattggagagatggaagtatttacaaattatagatgttcaataaatacttgtccaatgatcaaacgagcaactacatttattacatgatttcttttaaatgattaatattgaaagtaactagtgttgaattcttgctatttattaggtctttcatttaatccttctcaatcatcttgtgagatggatgatattgttctaatttttcatatatgcaaactgagattcagaaaggttatacagtggctcatgttcacacagctaaaacatagcagatcaggaaccaagtccctcttcacagtctgttctcttcctggaaaatgtcaacttatttgatgacaatagcctatttcctatatggggagcaagtcctaagaatatactttctgggcttaactttctcggccctttcacagacaggtgaacacaacaggcagtaattg

SEQ ID NO: 12499 - DNA, 549 bp, Homo sapiens
tttaatttttctaagcttatcattgtcattattgttaataatagtaattatcagccaaaaaaaaactgcatttggtaaattcctaaatttttgttctgacaatttcacctctctcagtggggtagaaaacacccagatagagaacgatgatcctgttcttaattcagcccagtgaagaacttcaggaggcgcttcctaggcttagttatggtatggagtggagacagcacagacaattggaattctgggggttgcactgagcagatagccctgttgcccatctgtaggaagcattaaagttgaacctasggagggcagatggaagtcttaattatcagaagaagcccctatccttattgcatttgttacaccataataaggtacagggaccacagctatattagcaaattccagtatggcagacaagaaaagtaaactaaaaatcaaaccctagaatgatggagcctaagccatagaccatattagtctgcagcctgggattgggacccctggtctaaaggatgccaactgttctgttggtggagtggg

SEQ ID NO: 12500 - DNA, 515 bp, Homo sapiens
gcgacctattgtgggacttcacctggtgattgtgtgagtcaatgcagcttaataaactccctttcatatatccattwatcctattagtcctgtccctctagagaaccctgattaatacatgcagaaacatttcctttcctctaaaagtttagaaatcacattatctaaaattatcagccattaaggcgtactgctgactattttggtgcagtctttagtcttcttatatgtgaccaaaccattcctattttttttcttttgtttgtttctacaaatgattactgaacaaaccttgtcaagtctatctcattcaacaccatcaccatgcttgccagaagcactgcaacaacccctccattggtcttcctgcttttatattctcttctttgaagtcagcaaactttctataaaagaccagatactaaacatttttggttttgcagcccatccattccctatcacagctactcaaatctgctgtaatagcaagaaagcagccttccatcatggaaatt

SEQ ID NO: 12501 - DNA, 515 bp, Homo sapiens
gcgacctattgtgggacttcacctggtgattgtgtgagtcaatgcagcttaataaactccctttcatatatccattaatcctattagtcctgtccctctagagaaccctgattaatacatrcagaaacatttcctttcctctaaaagtttagaaatcacattatctaaaattatcagccattaaggcgtactgctgactattttggtgcagtctttagtcttcttatatgtgaccaaaccattcctattttttttcttttgtttgtttctacaaatgattactgaacaaaccttgtcaagtctatctcattcaacaccatcaccatgcttgccagaagcactgcaacaacccctccattggtcttcctgcttttatattctcttctttgaagtcagcaaactttctataaaagaccagatactaaacatttttggttttgcagcccatccattccctatcacagctactcaaatctgctgtaatagcaagaaagcagccttccatcatggaaatt

SEQ ID NO: 12502 - DNA, 515 bp, Homo sapiens
gcgacctattgtgggacttcacctggtgattgtgtgagtcaatgcagcttaataaactccctttcatatatccattaatcctattagtcctgtccctctagagaaccctgattaatacatgcagaaacayttcctttcctctaaaagtttagaaatcacattatctaaaattatcagccattaaggcgtactgctgactattttggtgcagtctttagtcttcttatatgtgaccaaaccattcctattttttttcttttgtttgtttctacaaatgattactgaacaaaccttgtcaagtctatctcattcaacaccatcaccatgcttgccagaagcactgcaacaacccctccattggtcttcctgcttttatattctcttctttgaagtcagcaaactttctataaaagaccagatactaaacatttttggttttgcagcccatccattccctatcacagctactcaaatctgctgtaatagcaagaaagcagccttccatcatggaaatt

SEQ ID NO: 12503 - DNA, 548 bp, Homo sapiens
ttagtagagacggggtttcaccgtggtctcgatctcctgacctcgtgaaccgcccccctcggcctcccaaagtgctgggattacaggcgtgagccaccgcgcccagcccataattctgatataattgggtatgaatttgctgatatgcttaggagtgttcataaaaggtagtattgatttttttttttttttaagagtctcgctctgtcacccaggctgaagtgagtggccagtctcggctcactgcaacctccgcctcttgggttcaagcaattttcgtacctcagcttcccaagtagctgggattacaggcgcataccaccatgcctggctaatatatatatatatatatacacacacacacacacacatatatatacacacatacacacacacacacacacacacacatatatatatatatatatwttttttttttttgagacagagtctggctctgtctgtcgcccaggctggaatacagcagcgcacgatctcggctcactgcaacctccgcctcccgggttcaagcaattctctgcctcagc

SEQ ID NO: 12504 - DNA, 574 bp, Homo sapiens
tatatgagagtctccatctaaaagtgaatggcatcaataggaaagtagcattttctgaataggtaacagaatccgtaaagtgcaagtgtaaaaggagaataaaaacttgggaccctggccaggtgcagtggctcacacctgtaatcccagcactttgggaggccgaggtgggcagatcacaaggtcaggaaatcaagactgtcctggccaacatggtgaaaccccgtctctagtaaaaatacaaaaaaattagccaggtgtggtggtgygcacctgtagtccctgctactagggaggctgaggcaggagaattgcttgaacctgggaggcagaggctgcagtgagctgagatcgcgccactgcactccagtctggcaacagagcgagactccgtctaaaaaaaaataattgggacctcaattcactctgccaaaagaaaaaaaattaagcttaaagcagagtcatgcaagaagctaccttttcttttgttcctaagatagctatggataaaatataaaacatccccgcagatagttactcaattcaccttacattgcgcgtgaggtgcatacat

SEQ ID NO: 12505 - DNA, 574 bp, Homo sapiens
tatatgagagtctccatctaaaagtgaatggcatcaataggaaagtagcattttctgaataggtaacagaatccgtaaagtgcaagtgtaaaaggagaataaaaacttgggaccctggccaggtgcagtggctcacacctgtaatcccagcactttgggaggccgaggtgggcagatcacaaggtcaggaaatcaagactgtcctggccaacatggtgaaaccccgtctctagtaaaaatacaaaaaaattagccaggtgtggtggtgtgcacctgtagtccctgctactagggaggctgaggcaggagaattgcttgaacctgggaggcagaggctgcagtgagctgagatcgcgccactgcactccagtctggcaacagagcgagactccgtctaaaaaaaaataattgggacctcaattcactctgccaaaagaaaaaaaattaagcttaaagcagagtcatgcaagaagctaccttttcttttgttcctaagatagctatggataaaatayaaaacatccccgcagatagttactcaattcaccttacattgcgcgtgaggtgcatacat

SEQ ID NO: 12506 - DNA, 418 bp, Homo sapiens
gtgggcagtggaatcagaaaggacacagcaggagcacattgccaaggctggcatcctgtcactctctcctgcacccagttacacacctgcacaccctgtttagtggccgaacaggctactcagtcagagggaattttcacacactgtcaggtcattcactratcaaataagtatctgctggcagctggaattacggatgtcattttgcaggtgctatggtgtggcagggagggaagcactgtgcttcctgtcctcaggtcagttccagtctagcaatgtccagaataattccttacttctcaagaggcagaagcttggttttggtggatttgactattagagagagagatggaaccctttgcatgtgccactacaatcctgctatttcctaaatatgcgtatttctatctcatcaatt

SEQ ID NO: 12507 - DNA, 418 bp, Homo sapiens
gtgggcagtggaatcagaaaggacacagcaggagcacattgccaaggctggcatcctgtcactctctcctgcacccagttacacacctgcacaccctgtttagtggccgaacaggctactcagtcagagggaattttcacacactgtcaggtcattcactgatcaaataagtatctgctggcagctggaattayggatgtcattttgcaggtgctatggtgtggcagggagggaagcactgtgcttcctgtcctcaggtcagttccagtctagcaatgtccagaataattccttacttctcaagaggcagaagcttggttttggtggatttgactattagagagagagatggaaccctttgcatgtgccactacaatcctgctatttcctaaatatgcgtatttctatctcatcaatt

SEQ ID NO: 12508 - DNA, 524 bp, Homo sapiens
cataagcaaaaccaaaaaaggaatcactgtttggatcaaaccctgtgatttctgtgctaatttagcaaatggtaatgttgcaggagagtctgattatttcttctgacagaatttcagagggtggtaggcttttctagcatctcttattagctgagctattgactttcctctcatctctcaattttataagcttttccaccctgttcatctttagtttaacttgyccccccaccaagttggagtcttgcgaatcttgctctgtcgcccaggctggagtgcagtggtgcgatctcgtctcactgcaacctccccctccccggttcaagtgattctcaagtgattatcctgtctcagcctcctgagtggctgggattacaggcgcccgcaccatacccagccaatttttgtatttttagtagacacagtgtttcaccgtgttggcaagactggtctcgaactcctgacctcgtgatccgccacctggcctcccaaagtgctgggattacaggcatgagccaccatgc

SEQ ID NO: 12509 - DNA, 528 bp, Homo sapiens
tgttacatttgcctagatttcaaggcactgtctcttctttatctcatgtrgaattgtcagatccttttgtttttcatataaattctaatactgtttcctccttcccactcccaggaaaaatcccccctggaacttttctgttctgaactggttgctctctaggcaattttgtctaccctttacttcacactgttgaatggatttcatttcttcctctttgttggtttggtaaagcaatttcttagtgctatcttagaaaggatgcatgggagctaaatattttgagatcttccatgtctgggaatgcctttcatttggttttggctggatataggttgaaagtatttttaaaagatactgtcattttgtcttctggattttagtgttattgagaagttgagagttgatcttttaaggtggcttagtttgtttctgcgcatacttttataaactatttctggtattttgaaatttcattgtgatgtactttggtgtaagttttatgcttattgttcattatgctaggtt

SEQ ID NO: 12510 - DNA, 533 bp, Homo sapiens
tcttcagttgggcttttgtcagtcttgtggccaggtggttggggaggatgtctctcatggcccaaacccccctgaaatgtttcactttgaccaagctctgcaaaatagcagggagcttacaaaatggtgcagtttggactaatacttccgtagcagcttgggatggactcttctatcttctaagaatatggttttgtctccatttaaaatataacagaccttatataacttyatcttctgagactgggtatttgcaaacaacctgggaataattcttgtttgattggcatagtaacctcatgtattcactgtatacagcagggtgaatctgattaaaacaagttgacctaaattgaaatttaagtctcaattttaaaagatcatttaatcttatttttcccttcaaaaattgtataattagtattatcttaatgtacattcattaagatgtagagataaaaggcagacattcttttagaaggcataaactagtgtttcaaagcataatttgtgttactttgtacttttttttt

SEQ ID NO: 12511 - DNA, 535 bp, Homo sapiens
ttttttcccagacaatttcaggatgaaactgttccacctaggatcatcagatcatcaggcactggattctcataagtagcacacaacctagatcccttgcatgcacagttcacaatagggttcatgctyctatgagaatctaatgctgctgctgatgggacaggaggtggagctcagggggtaatgcttgcttgcctaccactcacctcctgctgtgtggcccggttcctaacaggtcactgactggtatcagtctgtggcccaggggttggggacccctgctctacacataaataccctcacatacatgtgtatttgtgtttatgtatataaacataatgtaaagatacttatcataaaataatattattgtacatactgtattttcttactgaacaatacatgctgccaggaatttatactgtgaatatcctgtaaaataacatgacatatatatatataagattaacattgtaacattgatagtagtcggagaaaggtagctaattattctaagattttaaatgtcaaaagg

SEQ ID NO: 12512 - DNA, 456 bp, Homo sapiens
tcaggaggctgaggcatgagaattgcttgaacctgggaggtggaggttgcagtgagctgagatcatgctgctgtactccaacctgggcgatggagtgagaacttgtctcaaaaaaagtaaaaattwgaatatttaaagttttgtttgaataaatgagtaagttaaaaaaaaaaagttgtgctttgggtacaccttgatcaccaatctaaataattcaggctgaaattcttcagagtttctgtcctgagggaatgatctagattcactatcacaagtgaattaagtttcaatctgtgcatcaaatggatcatgcaaattgatgtagactttcaataattttctactagtaaaatcagactttggttctatattgttaatcttaaaatcttctgattaaacagaatttaagaaataatttattgcagtaataaagcaaaaagaaatatggagaagaaa

SEQ ID NO: 12513 - DNA, 643 bp, Homo sapiens
gctagtaaatgtaatgaactgtatacgggtattgtgtataggaaatgaaaacaatcaaagagctgtgagagaacataaaggcctcccatatcttatcagatttctgagttctgattcaggtgagcttctatctctgtattattttataatgaccagatatattaagtgaagcaaacatgggattggacttgtcctatatgaatagatgtcccgaatctgtgtttgaatagatstaaacgtgtaatataaccttaatatccaaaacacaatttatttatttttcctaactgctaaactatgtagatacagttaaatttatttatattttatttttctcaagacagagtctcagtctgtcgcccaggctggagtgcagtggtgtgatgtcagctcactgcaaactccgcctcccgggttcaagaaattcttctgtcttcgcctcctgagtagctgggattacaggcatgcaccaccacgtccggctaatttttgtatttttagtagagacagggtttcaccatgttggccaggctggtctcaaactcctgaccttgtgatctacccgactcagcctcccaaagtgttgggattacaagtatgagccaccatgcctggcagataatgattaaatttaaactgctgg

SEQ ID NO: 12514 - DNA, 643 bp, Homo sapiens
gctagtaaatgtaatgaactgtatacgggtattgtgtataggaaatgaaaacaatcaaagagctgtgagagaacataaaggcctcccatatcttatcagatttctgagttctgattcaggtgagcttctatctctgtattattttataatgaccagatatattaagtgaagcaaacatgggattggacttgtcctatatgaatagatgtcccgaatctgtgtttgaatagatgtaaacgtgtaatataaccttaatatccaaaacacaatttatttatttttcctaactgctaaactatgtagatacagttaaatttatttatattttatttttctcaagacagagtctcagtctgtcgcccaggctggagtgcagtggtgtgatgtcagctcactgcaaactccgcctcccgggttcaagaaattcttctgtcttmgcctcctgagtagctgggattacaggcatgcaccaccacgtccggctaatttttgtatttttagtagagacagggtttcaccatgttggccaggctggtctcaaactcctgaccttgtgatctacccgactcagcctcccaaagtgttgggattacaagtatgagccaccatgcctggcagataatgattaaatttaaactgctgg

SEQ ID NO: 12515 - DNA, 592 bp, Homo sapiens
acagagcgagactccatctcaaaaaaaaaaaaaaaaaggaaaaaagaatagcattagagagggtcagcttttatgtatattttaaacatataatttttactcatttatagtcattctttatctctttttttgtttgtgttttatctaactaattaaaatttaaagatagggactaggtcttctctttctgttttccttttctcaatcccagatgctgtaacaaagtacaaattgtagcaacaatttgaataaataaataataaatgagttcatgaaagaaaactatagcaccgggtgtggtasgtcacgcctgtaatcccagcactttgggaggccaaggcgggtggatcacaaggtcaggagatcaagaccatcctggccaacatggtgaaaacctgtctctactaaaaatacaaaaaaattatctgggtgtggtggcgcgtgcctgtaatcccagttacttgagaggctgagcaggataatcgcttgaagctgggaggcagaggttgcagtgagccgagatcatgccactgcactccagcctggcaacagagagagacactgtctaaaaaaaaaaaaaagaaaagaaaac

SEQ ID NO: 12516 - DNA, 592 bp, Homo sapiens
acagagcgagactccatctcaaaaaaaaaaaaaaaaaggaaaaaagaatagcattagagagggtcagcttttatgtatattttaaacatataatttttactcatttatagtcattctttatctctttttttgtttgtgttttatctaactaattaaaatttaaagatagggactaggtcttctctttctgttttccttttctcaatcccagatgctgtaacaaagtacaaattgtagcaacaatttgaataaataaataataaatgagttcatgaaagaaaactatagcaccgggtgtggtacstcacgcctgtaatcccagcactttgggaggccaaggcgggtggatcacaaggtcaggagatcaagaccatcctggccaacatggtgaaaacctgtctctactaaaaatacaaaaaaattatctgggtgtggtggcgcgtgcctgtaatcccagttacttgagaggctgagcaggataatcgcttgaagctgggaggcagaggttgcagtgagccgagatcatgccactgcactccagcctggcaacagagagagacactgtctaaaaaaaaaaaaaagaaaagaaaac

SEQ ID NO: 12517 - DNA, 414 bp, Homo sapiens
  misc_feature (1)...(414): n = A,T,C or G
agtgrnnnnnnnnnnnnnnnnnnnnnnnnnnnnnnnnnnnnnnnnnnnnnnnnnnnnnnnnnnnnnnnnnnnnnnnnnnnnnnnnnnnnnnnnnnnnnnnnnnnntgagcttttctgcacacagtgtagcattctctttgcagagggaagccctgcgttctagcccagggtctcttactaccggttgtaaagttcttttgagaccttggtttattctactcagactgattaaattacatttcattttctcctccgccttctgtttctgtttttagagtatttatatacctttgagagactgtttaggtggcatgtatcttagaagaagaataatacgttttgtctccaatactatgttatttgagttcatttttgaatttactcaaattcccgaaactaaagagggttcatgag

SEQ ID NO: 12518 - DNA, 579 bp, Homo sapiens
tgagcaggctgtgctccaggaggaagtgttccctatccccaccctctcattccttttttgtactaaggctttaaagtattcaaccagaaaatcaatagattttttttctctacaggttaatacacgtggacttacataaattactatttgtaatgttttaaataatgcttatgcattacataaagcttaggaaataaagaacaggaatgsaacaacatttcttcataatctatccacacagtcataactaccgttattaacattttgctattgttttatcttatttatatttcgtaatgttcatgttatatgttcaattgaaaaacatgctattctttttcagttacagttatagcattatcattttcctattattataaattcattttcataatttttgaaaataatattatgtcatacatgtatcatatttatttaaaccatcaccatatgtgtggacattcaggattttgctataataagtaattctgcaattgacgaatgtacatgtaattattgttttaattttagtgtctttagtaagattgatttttataagttaaattagtaatggttaaa

SEQ ID NO: 12519 - DNA, 579 bp, Homo sapiens
tgagcaggctgtgctccaggaggaagtgttccctatccccaccctctcattccttttttgtactaaggctttaaagtattcaaccagaaaatcaatagattttttttctctacaggttaatacacgtggacttacataaattactatttgtaatgttttaaataatgcttatgcattacataaagcttaggaaataaagaacaggaatgcaacaacatttcttcataatctatccacacagtcataactaccgttattaacattttgctattgttttatcttatttatatttcgtaatgttcatgttatatgttcaattgaaaaacatgctattctttttcagttacagttatagcattatcattttcctattattataaattcattttcataatttttgaaaataatattatgtcatacatgtatcatatttatttaaaccatcaccrtatgtgtggacattcaggattttgctataataagtaattctgcaattgacgaatgtacatgtaattattgttttaattttagtgtctttagtaagattgatttttataagttaaattagtaatggttaaa

SEQ ID NO: 12520 - DNA, 551 bp, Homo sapiens
tctgttccaagtagataaaaggaactctcagaatggttggctcattttttaaacttaacataataggctactctaaaatatgagaaataagcacgctttttggttcttgtggtgtgtgtgtgtcatttgctagagaggagccttcatacrtatagtccatactcattttttccacttaacatttcatcactctgttactcactttctaaaaagctcttaaaatttgcttgccattccttttaggcatattaatttttcgtatccactgatatttaccttgttaaaaactgacagttgaaaaacgatcaatatatgcagtcaggatttcacattttaagatatgacttctagaaattcattttaatgcagaaaaccttctgtgttgtgttttgatttccctaaattaggagggtacttcacttcacattttcattgttgtttttgttttgctttatttgctattcttttttttgttttgttttgtttttttgttttttttttttgacagagtcttgctctgtcgcccaggctggagtgcagtggtgatctct

SEQ ID NO: 12521 - DNA, 551 bp, Homo sapiens
tctgttccaagtagataaaaggaactctcagaatggttggctcattttttaaacttaacataataggctactctaaaatatgagaaataagcacgctttttggttcttgtggtgtgtgtgtgtcatttgctagagaggagccttcatacatatagtccatactcattttttccacttaacatttcatcactctgttactcactttctaaaaagctcttaaaatttgcttgccattccttttaggcatattaatttttcgtatccactgatatttaccttgttaaaaactgacagttgaaaaaygatcaatatatgcagtcaggatttcacattttaagatatgacttctagaaattcattttaatgcagaaaaccttctgtgttgtgttttgatttccctaaattaggagggtacttcacttcacattttcattgttgtttttgttttgctttatttgctattcttttttttgttttgttttgtttttttgttttttttttttgacagagtcttgctctgtcgcccaggctggagtgcagtggtgatctct

SEQ ID NO: 12522 - DNA, 564 bp, Homo sapiens
ctgccattatgatcagagagagtaaaaaataaaacacgaggctgggcactgtggctcacgcctgtaatcccagmactttgggaggccgaggtgggcggatcacaaggtcaggagattgagaccatcctggctaacacgatgaaactccatctctactaaaaatacaaaaattagccaggcgtggtggtgggcgcctgtagtcccagctactcgggaggctgaggcaggagaatggcatgaacccaggaggcagagcttgctgtgagcagagatcccgccactgcactccagcctgggcaacagagcgagactccgtctcaaaaataaataaataaataaataaatatataaataaataaataaataaacatgaaacccctctgaaaaaggggttaatctcagaaaaaaaactctgagtataaaaaaaagtcttttcttttgtagagcagttttaggttgaaagcaaaactgagaggaaggttgctttaagcagaaataaatgtgcttctgtctttgttctgtagaagaaataaatcaaaggagcaaataatacatccttccaga

SEQ ID NO: 12523 - DNA, 564 bp, Homo sapiens
ctgccattatgatcagagagagtaaaaaataaaacacgaggctgggcactgtggctcacgcctgtaatcccagcactttgggaggccgaggtgggcggatcacaaggtcaggagattgagaccatcctggctaacacgatgaaactccatctctactaaaaatacaaaaattagccaggcgtggtggtgggcgcctgtagtcccagctactcgggaggctgaggcaggagaatggcatgaacccaggaggcagagcttgctgtgagcagagatcccgccactgcactccagcctgggcaacagagcgagactccgtctcaaaaataaataaataaataaataaatawataaataaataaataaataaacatgaaacccctctgaaaaaggggttaatctcagaaaaaaaactctgagtataaaaaaaagtcttttcttttgtagagcagttttaggttgaaagcaaaactgagaggaaggttgctttaagcagaaataaatgtgcttctgtctttgttctgtagaagaaataaatcaaaggagcaaataatacatccttccaga

SEQ ID NO: 12524 - DNA, 538 bp, Homo sapiens
tgtttttctgttttgattttctgtctgacagcagcagcgtgcagggtcaaagacagccggccccccatgtcagtggtctaggatggccagtgaaggcaccaacatcccaagtcctgtggtgcgccagattgacaagcagtttctgatttgcagtatatgcctggaacggtacaagaatcccaaggttctcccctgtctgcacactttctgcgagaggtaagcctcctttgtgcttggagaagggagtttcgcagrctgacctcctacaacctactgcaggattctttcccagaattctacagttacctttgagagaaaactaatctcttgtgcttctgccagacattgaaaaacagaatcatgagttgcaaataatttactttatttcaaaccattataagcaagagaaagcaatccagtaactactgattcgtttacacaagagatggagcattaaataagaatgttaagttgaaaaatcttttaaaacttccctttgttctttgtgaaacaatttttgtccacagcagatccctac

SEQ ID NO: 12525 - DNA, 1011 bp, Homo sapiens
acccaggctggagtgcagtggcgcgatctcggctcactgcaagctctgcctcctgggttcacgccattctcctgcctcarcctcctgagtagctgggactatagacgcctgccaccacgcccggctaagatttttttgtatttttagtagagacggggttttagtaggcaggatggtcttgatctcctgacctcatgatccaactgccttggcctcccaaagtgctgggattataggcgtgagccaccacgcccagcccaatttatacatatctttcctggggaaattccaccttataaatacagccaaacaaaaaataatagatatgtagaaggatgcctgtcaacacattgttttcgacagcaaaagaattggaaaccagtctaataactggatttttattttaaagacaggattttgctatgttgcctagctgggctgaagtgatcctcccgcttcagcctccagagtggctgggactacaagtgtgtgtgcgctaccagccagcttatcaactagatttttaaaagtatttttttattgcaatgggatactatacaatcatttatgttataaaaggatatttaatgacagggatatatattcaaaatgtaatatacaggatgtattatacagaaaaataaaggacaacatgacagtggttatctttggatggtgatgatttctttgtctctagaaatttaggttttccataaagtgaaagactgttgcagaaaagatgacttaatgaatattaagatatttcccaaaacatcccagtatatttcccaaaacattccagtataactttggtacttactaatgcctttctctttgggagcaatcttctccaagtcttttaattgaaatacatctttctgtttaaagggttttaaagaaaatgaaaagcacgtgtttattttctactatgtatattttcatttttaaaaatttttattatgggtacataatagttgtatacatttacagggtatgtgtgatattttgata

SEQ ID NO: 12526 - DNA, 1382 bp, Homo sapiens
gcataatatgtagtttgaccaaatatcttagcacaaagcagaatttggaaggaagtcaacctatttctattcgttctatagcttctgacatatttacttcaaatgttaattgtttattaacagtaaaactacatgcaaggttttttatttgcttacctgagaaacactgcctttctttttgtatctgattcctgccttttgctgttttgcaaactgaatatctcagctttttcctgcaggtcacatacttccaaatcagattgagacaagtctgtatggttcacacaagtgacaccaagctagcaaaatacaacaggctcaaactatgctggaattgagcctgagggggactgatcagttttattcaaaacagagaatgaactggaatgagaagaagctttaagtagactttgaaaagatgatagaggaagaatggaagaaaaagtcattaggtttttaagaactttccacttttcccatataatataaaatattaatttatctcttccccttttatctttttttggtaaacacttttaaaatcatacattagcaacatcataaaaaaatttagaaatgaaagaaaattgcccataactttacaactccaacacagtaacttgtatcattttggagtatttctttttagcctttatttcatattcatatatgctttaatagtatacaggtagatttgtattatgttcttcatttgtcattatcgtaaatacttgttcctgttgctatagagtctgcatgattattctatttgttggctgcctaatactctgtgacctgtgttttgtgaaccttccctaactccctgcaaagtctttcccaaaacgtgcctaggagtcattggagtgaaggggtgccactcttgtttggggtcctgcccagtcagctaccatatagatcatttaattccccttctccattgctgggtaccacaatgttttcatgcaagcggagtctgcacrtgctgctttgaatgaagggttttaatttttttctttggtgtttgcacacattggatttatttcagattactccatttatgtgaataaacaaaaacgagggaagaaaattttttctaagattttttttctatatgaaggaagtcaatttctaatgcattaagatgcagtgtttaccaaaattggggatgggggggtgtttatgtgcatttttgtgagaaatcagatacagggatggctgcctctgccaccatttccctggatactattaacttcccagatgggatgtccattttagtttattctcccaaaccacccaccttgatttcacccactgctgctacaaactaaaggattcctgcttacagtggggaaattggactgggaactaacaaaggccgttgg

SEQ ID NO: 12527 - DNA, 1382 bp, Homo sapiens
gcataatatgtagtttgaccaaatatcttagcacaaagcagaatttggaaggaagtcaacctatttctattcgttctatagcttctgacatatttacttcaaatgttaattgtttattaacagtaaaactacatgcaaggttttttatttgcttacctgagaaacactgcctttctttttgtatctgattcctgccttttgctgttttgcaaactgaatatctcagctttttcctgcaggtcacatacttccaaatcagattgagacaagtctgtatggttcacacaagtgacaccaagctagcaaaatacaacaggctcaaactatgctggaattgagcctgagggggactgatcagttttattcaaaacagagaatgaactggaatgagaagaagctttaagtagactttgaaaagatgatagaggaagaatggaagaaaaagtcattaggtttttaagaactttccacttttcccatataatataaaatattaatttatctcttccccttttatctttttttggtaaacacttttaaaatcatacattagcaacatcataaaaaaatttagaaatgaaagaaaattgcccataactttacaactccaacacagtaacttgtatcattttggagtatttctttttagcctttatttcatattcatatatgctttaatagtatacaggtagatttgtattatgttcttcatttgtcattatcgtaaatacttgttcctgttgctatagagtctgcatgattattctatttgttggctgcctaatactctgtgacctgtgttttgtgaaccttccctaactccctgcaaagtctttcccaaaacgtgcctaggagtcattggagtgaaggggtgccactcttgtttggggtcctgcccagtcagctaccatatagatcatttaattccccttctccattgctgggtaccacaatgttttcatgcaagcggagtctgcacatgctgctttgaatgaagggttttaattttttwctttggtgtttgcacacattggatttatttcagattactccatttatgtgaataaacaaaaacgagggaagaaaattttttctaagattttttttctatatgaaggaagtcaatttctaatgcattaagatgcagtgtttaccaaaattggggatgggggggtgtttatgtgcatttttgtgagaaatcagatacagggatggctgcctctgccaccatttccctggatactattaacttcccagatgggatgtccattttagtttattctcccaaaccacccaccttgatttcacccactgctgctacaaactaaaggattcctgcttacagtggggaaattggactgggaactaacaaaggccgttgg

SEQ ID NO: 12528 - DNA, 1382 bp, Homo sapiens
gcataatatgtagtttgaccaaatatcttagcacaaagcagaatttggaaggaagtcaacctatttctattcgttctatagcttctgacatatttacttcaaatgttaattgtttattaacagtaaaactacatgcaaggttttttatttgcttacctgagaaacactgcctttctttttgtatctgattcctgccttttgctgttttgcaaactgaatatctcagctttttcctgcaggtcacatacttccaaatcagattgagacaagtctgtatggttcacacaagtgacaccaagctagcaaaatacaacaggctcaaactatgctggaattgagcctgagggggactgatcagttttattcaaaacagagaatgaactggaatgagaagaagctttaagtagactttgaaaagatgatagaggaagaatggaagaaaaagtcattaggtttttaagaactttccacttttcccatataatataaaatattaatttatctcttccccttttatctttttttggtaaacacttttaaaatcatacattagcaacatcataaaaaaatttagaaatgaaagaaaattgcccataactttacaactccaacacagtaacttgtatcattttggagtatttctttttagcctttatttcatattcatatatgctttaatagtatacaggtagatttgtattatgttcttcatttgtcattatcgtaaatacttgttcctgttgctatagagtctgcatgattattctatttgttggctgcctaatactctgtgacctgtgttttgtgaaccttccctaactccctgcaaagtctttcccaaaacgtgcctaggagtcattggagtgaaggggtgccactcttgtttggggtcctgcccagtcagctaccatatagatcatttaattccccttctccattgctgggtaccacaatgttttcatgcaagcggagtctgcacatgctgctttgaatgaagggttttaatttttttctttggtgtttgcacacattggatttatttcagattactccatttatgtgaataaacaaaaaygagggaagaaaattttttctaagattttttttctatatgaaggaagtcaatttctaatgcattaagatgcagtgtttaccaaaattggggatgggggggtgtttatgtgcatttttgtgagaaatcagatacagggatggctgcctctgccaccatttccctggatactattaacttcccagatgggatgtccattttagtttattctcccaaaccacccaccttgatttcacccactgctgctacaaactaaaggattcctgcttacagtggggaaattggactgggaactaacaaaggccgttgg

SEQ ID NO: 12529 - DNA, 730 bp, Homo sapiens
gacggacctaaacaagaataagaataaaggaggatattcttcatctcttaattttaaatattttttcastagtcatcactatcttgtatttttaaaaaccaaagcaaacacaaattgttaggtgaatgcttttctaaagaaaaatataatttgtcatttagcttttactatgcttttttgaaagttagtctaatttggcctttcaagatttgtagtcatttcctttccaacaatgttatggaccgggctatcattagggtagagggtcagtccagtgcagccgggaaaccctgtgtcttccctggctttgtcattactcacaggttctcttgtccttcatctgtgtgagggggtaataatattgtgatttctacaccaaggttctttgaggtccagctggggtaacatatttgaaattgttttgtggccaggcgtggtggctcatgcctgtaatcccagcattttgggaggccgaggtaggcagatcactcaaggtcaggagtttgagaccagcctgaccaaaatggtgaaatcatgtccctacgaaaaatataagaattagctgggcgtggtggtgggcacctgtaatcccaactactagggaggctgaggcaggagaattgcttgaacccaggacgcagaggttgcagtgagcagagatcatgccactgcactccagcctgggtgacagagtgagactccatctcaaaaaaaaaaagaaattgttttg

SEQ ID NO: 12530 - DNA, 576 bp, Homo sapiens
agggcaagggggcagagtcctgaagacagggattatggcccttaatgctcataagagctgctgctatggtgtgtctaccagtgacaggccggttctgttgacttcacccagctggtctttattgatcacctcctgtgataagtaaataatcaataaatgtaatgctttctactacaggaaaaagataggcattaaaaaaaaagaataaatgtgacgctttccttggagcatcactaagaagtccaacatggtccctgcactcacagaccttacagtgcggtgggggagagttgggtggagtgggaggcctggtgacgtcttccaggctgagaggagagccaacaccagcaatagagttgcttgtatctggtaacaggaagacttccatccatgacctcgtttagtccttagagccaccccacggaatgctgctggcagtgtttccctttgacaggtgcagaagacataggtatgcccctgggtatagacagtagaagggtctgggttcagacttggggcagcatggttgactgtggagctcgtgatctccccactcggtgctgcctcccyccacag

SEQ ID NO: 12531 - DNA, 510 bp, Homo sapiens
gaatgggggtgggggcttgcctggtgatggagacgctcaggagcaggaggagtggggggagtcatggagaagactggcaatacctagctctgagtcccagccccttccagctgtcagcctgagacagggcacatctctgccatgggtctgagaaaaaccaakaagttcttttgtggaagatgtaagggagaggtgttcctcccccagaggctctttatgaccctcttcagtctaccccgcagtgaggtgctggctctgaaattcccagctgtagaaaactgagacctcctttccccatcctttaatctatcaagaaacagagatggatgtgtggtctttaatttcttttacaaaaaaaaaaaaaaaatagccccgtgcctctttgccactgttgagaggagggttagtccttcaaccttgaattgttttagagacaaggacctgagggtaccattagagaacaatgctaactaaggtaaccccttggttaataggagagcttagcaccct

SEQ ID NO: 12532 - DNA, 510 bp, Homo sapiens
gaatgggggtgggggcttgcctggtgatggagacgctcaggagcaggaggagtggggggagtcatggagaagactggcaatacctagctctgagtcccagccccttccagctgtcagcctgagacagggcacatctctgccatgggtctgagaaaaaccaagaagttcttttgtggaagatgtaagggagaggtgttcctcccccagaggctctttatgaccctcttcagtcyaccccgcagtgaggtgctggctctgaaattcccagctgtagaaaactgagacctcctttccccatcctttaatctatcaagaaacagagatggatgtgtggtctttaatttcttttacaaaaaaaaaaaaaaaatagccccgtgcctctttgccactgttgagaggagggttagtccttcaaccttgaattgttttagagacaaggacctgagggtaccattagagaacaatgctaactaaggtaaccccttggttaataggagagcttagcaccct

SEQ ID NO: 12533 - DNA, 550 bp, Homo sapiens
cctatatgtgtctgtgtttcattttccatcacgtgagcaggacccatgttctcatattctccacaggacccagtcgaggaccctcaacacaataagtgctcaccaaattctttttggaatagaatcgaattccaaaattatagagcaagaaagcatctttgaagttacgcaagcagccaacaggcatattctgattgtgacggatgtgccatgcactgcgtgaacrctgacacagggatcctagcctagctcctatgagttcctggaaactataggcaaattatatctttatgtgcttgtttacagggaaaaggtccatggcttttaccggctccttcactgggccgtggcctctccctaaaaaaggaatgaacaactgctagtccaataggaagaacagatatgaaaaccaacaaccacaacagtgtgctatgacctgggacagagatcaacacaagatgcttgaggacgtaaaggaaggcccagtctaagaggacagagccctgaaatcaggattgctcctttctaaggcagatattactagtcccgt

SEQ ID NO: 12534 - DNA, 550 bp, Homo sapiens
cctatatgtgtctgtgtttcattttccatcacgtgagcaggacccatgttctcatattctccacaggacccagtcgaggaccctcaacacaataagtgctcaccaaattctttttggaatagaatcgaattccaaaattatagagcaagaaagcatctttgaagttacgcaagcagccaacaggcatattctgattgtgacggatgtgccatgcactgcgtgaacgctgacacagggatcctagcctagctcctatgagttcctggaaactataggcaaattatatctttatgtgcttgtttacagggaaaaggtccatggcttttaccggctccttcaytgggccgtggcctctccctaaaaaaggaatgaacaactgctagtccaataggaagaacagatatgaaaaccaacaaccacaacagtgtgctatgacctgggacagagatcaacacaagatgcttgaggacgtaaaggaaggcccagtctaagaggacagagccctgaaatcaggattgctcctttctaaggcagatattactagtcccgt

SEQ ID NO: 12535 - DNA, 618 bp, Homo sapiens
ccatctgcaacttattacattttgatttttaacaaaaaatgtttttttcaaaggaatttattagaataaggaaatgagttacaaaaaaagtaaatgttttatcactgttgctcaaaacttttagttcagtttcggatttttctttatcatttggcaacagaatggtaggaaattaatgagctcaacctccgaacaagataaaattggttgagtcaatttgcagcttgttccagttgggataattactgtgtggagtgataattaccacctaattccatattttactgtctgggattttagctgcagttaattctattttctgcatctcatatctgcttataaaatcttcctcaaaaaaaatcctgacaatggaccaatgagttcattttatccaccttgcttacttagcttaaacatttsagcatttatatctatcaagttttgattgttataactttaaaaaaaaactttaaactttctgaacagaaaacacaataagggaattatattttgtctaaacaaattttctaaccacaaggttgtcctgccatctgtttgatatctcaatgacttttcctaatgtcttttcgttatctgaaatcaactgaatgtttactg

SEQ ID NO: 12536 - DNA, 539 bp, Homo sapiens
tgacttggcccagaaaaggtgcgtaaagaaggacactgctggcattagcctctgagtcattaccatttttaggggcatcacttctctcagcttagtaacatagaaggaaattaagtccttcaagattttttttcacagttattttttctcagttgataggaacaatggaggatgattgaagagctaagacccaaagactttaattttccaaattgccttaatttgatctagaaggaatgctacattttgttaaattgtattacgacaaagagaagctggtcacttctcagcatgaatctgaaagcaaataatttccacaaaaaaggactgtatttaactagacaagtaattacattgtggtgctactayctcccctgcctcagattagaaaagtattcaattatcactccattagatcaaaaaatatttttagtgatacatttcaagtgaagtaatttattcctaaatagattccaatgaatttttggattaaccttcatgaattttgctgattaaactcaatgcttttcctcaaaaat

SEQ ID NO: 12537 - DNA, 1266 bp, Homo sapiens
gcaaggctgctgaattcctaaagtccccgcctgaccaccaggcccaggtataagggaagggcgactcctactgatggacaaccagacaccccccacgtccacctgctatgtggggcgattcattattggccggcaaaggcttacacttttttctttcaagaatttttttatttagagattacacaaaaaaagtcttctgtgaaacccataacccagtccaggaatgagaaaaacatcacacaaactgcagtagagggacaatccacaaaatatactatcataatcaaaactgtcaaggtcatcaaaaataaggaaagactgtgaaactgccaccgccatgtggggcctaaggagaaagacagtgacatacgaggtgaaaaactggacaggattctgggatggaaaaaggatattagatcatcagaatacaatgtagacttcagttaatattaatgtattgataattggttcattaattttaataaatgtctcatactaatgtaatgtcaaatgataataaggaaactaggtgaggagatacggaactctccatgtaaccttctagacgtttctgtaaatcaaactgttcttaaaaatatccatttagaagggaaaaaactgcttttatatatgccatttatcaaacttcttatcttaccatctcaaaacccaggcaaaggatataatgtaaaccaaaatatgagagaaatcaaaggaaaatattaatggcacgcataaccctcattctctttctctcaaagcagtaagttatagcaagtgtcagctgtcagtctgtgcacgtagcctttagttcaaggaaggccctgacctgtacactgacccaagcatcaagtcccatgggcagggcccatggtgggactccctgacccgcgtcattctgtgccctcacctctgaagccgccaagtgcagtgtctgcccaagaagccaccgggctgcagacccagggcgggtccgatgtataccctaggaggcacccccaatttcacctctccttggtgggcctctcacctgtccrcttgccacaggatctacctgccctctggtgccaagcaacaacggatgaatacccactacctccagacagtcagatgggcctcaactcagccccaacaagcagccagaaagcaaagcgaggaagatgacagccaatttcaccatgcggcccaggcccacagactccagaggattttgggaagcttcacagctgcaccagagttctgccccacgaccatcctgatctgcga

SEQ ID NO: 12538 - DNA, 548 bp, Homo sapiens
gcaggagaatgacttaaacccaggaggcggagttgcagtaagccgagattgcaccactgccagcctgggtgacagagtgagactctatttcaaaaaaaaaaaagacacaaagccatttttataccttgtttctaagtaatttattatataattctagcaaaatataaccaggtgaagtaatttcaatttattttcaattttcattcaatattttcatttttaatgagaatctgtgttttcatgtgtgtagagtgtttaacaatgcaaaataataatccttcataaaggcataaaatttgctcaaatgtttgtacattcatttcacatataaytcttgagtatctacggtgtgctgggcacttttctacgaggcacaaagaaaagttccttcctcagagactccacagaggcaggacacaggcaaacaaaaaaataaaaaaaagagagagagaaagagagatgattacaaaacagtgtgataaagggctgagagattacatacaaggagcccaaaaatttggggaggaaaggaactgaactggaaggct

SEQ ID NO: 12539 - DNA, 662 bp, Homo sapiens
taaggctatttaaaagaaaaagaaaactaaagaaagcaacctactgagcttagaagcattcctattaaagttggaaacaagacaaattaccaactatcaccacttctactcaacattgtcctacgagcccttgccaataaaacaagaraaataagagttaaaacaattagaaaacaaattaaaaagggcttctttgctcttcaatatggatgcagaaagtccaaaagaataaacaaacaaaacaatactgggagaattcagcactactgcaggacgcaaaaccagtgtactaaaatcagtgtactcttacatagcagtaataatcaactagaaaacagtaggaaaaaagttatcatttgtgatacctgtggagctacaaagtaattaggaagaaatctaacagaatattttaaaaatatttctaatatagtaaattaccaaaccaaaaaatcttaaatatcataaaaatgtaagctgcagcctagttaatctctaaattcaatgcaatgtcaatgaaaatctccacaatgatattgatatggaaaaacaaagacaacttttagtgaaaaaacaaggtgaggagcagaccttgtctttatagctgactaaaaactataataattatggcagtgtggtggtaggtcagagttttgttttttttt

SEQ ID NO: 12540 - DNA, 662 bp, Homo sapiens
taaggctatttaaaagaaaaagaaaactaaagaaagcaacctactgagcttagaagcattcctattaaagttggaaacaagacaaattaccaactatcaccacttctactcaacattgtcctacgagcccttgccaataaaacaagagaaataagagttaaaacaattagaaaacaaattaaaaagggcttctttgctcttcaatatggatgcagaaagtccaaaagaataaacaaacaaaacaatactgggagaattcagcactactgcaggacgcaaaaccagtgtactaaaatcagtgtactcttacatagcagtaataatcaactagaaaacagtaggaaaaaagwtatcatttgtgatacctgtggagctacaaagtaattaggaagaaatctaacagaatattttaaaaatatttctaatatagtaaattaccaaaccaaaaaatcttaaatatcataaaaatgtaagctgcagcctagttaatctctaaattcaatgcaatgtcaatgaaaatctccacaatgatattgatatggaaaaacaaagacaacttttagtgaaaaaacaaggtgaggagcagaccttgtctttatagctgactaaaaactataataattatggcagtgtggtggtaggtcagagttttgttttttttt

SEQ ID NO: 12541 - DNA, 588 bp, Homo sapiens
catgaacagaaagtaattatattagtttgggggaaaattgcattttccatataaagtgatctgttgcctacaagaaacatacctcacctataaagacacacatgtactgaaaataaaaaaaaataaaaatatattatatgtgccaatgcaaacaaaaaagattgagtcactaaacttatatcatttctactaaatgataaaccaataaaaaataactacaacaacaacttttcaaaacacagtacartaagatataaatagaaacaaaaataaatttagaagcaagaaattaaagcagagagcttttattagtttccttttttttggtttgtttatttacacaaacagtgttcagttgttgtgaggttaaaataatgggttataagatagtatttgcaagcaccatggtaacttcaaaccaaaaatcgtacaatggatacacacacaaaaaaagcaagaaactaaattatatcaccagagaaaattatgttcaataaaagataacaggaaggaaagaaagaaggagaataccatgaaacaatcagaaaacaaataacaaaatagcagatgtaagtagtaataacattg

SEQ ID NO: 12542 - DNA, 582 bp, Homo sapiens
ttgcttggactttttccaatttcatagtcctagctcaaggttataacttgttacaatgcttctgaaaaaattaagaaagcataaggttgtaaaactttttaatagcagaagcttaaaagaattctcagtatcaacaactcccccagatataatgaactatggtggttttgaaactaactggatacattttcttcttcagggtagaagttcatctccctcttaacagaaacagaactttcatcagttctgcccagaagtaagaacgctttaaaaacaactttattttctaaagtaatactaaagcattgaaatctgtctttgtgtttatattagcacttatcttgcagtgcctgggtaattaactctcaagtttyatgaaattgaaaaatttgggcatttttggatactatgattgtactgtatgcctccgagtaagtgccaagtcatacatttcttttaatgcagagtttcaataaaataaaaatttatttgaatgacattaatagggatctcgggcagagcttggcattttcataagtttttcaaaattcttagaacagtttggaaaaaatacatttgtgc

SEQ ID NO: 12543 - DNA, 1448 bp, Homo sapiens
cctgtaatcctagcactttggaaggctgaattgattggaccacttgagcccaggagttcgagatccagcctgggcaacatggtgaaaccccatctcaacaaaaaaatacaaaaattagcctgacatggtggcagttgcctctggtcccagctactcaggaggctgagatgggaggatcacctgagtccaggaggtcgaggctgcggtgatgtgtgatcctgccactgcacttcagcctaggtgacagagtgagactctatctgaaaattaaaaaaaaaaaaacaaaaaaagttgttgttttttttttaaagataatacgttaaatatttagtatacttcttcctttatgaatgaaagcctgttacgcacaaaggggcctgtgctggggtccccaagaacatcctcagttttgatgattctctgggaggtttcacaagaatcagcatacagtcctgcttattcatgtggccatgatttgttatggtgaaaagacacagagcaaaatcagcaaaggtaaaatgcatggggacatgtcaggaggaagcaagacgcttgttccagcagagccacacaagatgcgcttaactcctccagcaatgaattgtgacaacctatgtcaaacactgccaaccagtgaagctccttagagacttagtgcccatgggtggccaagagggggagtgggttatcaccaaattccagacacccataaagaaagcaggtgtttagctgtttgtacaaacagcttcagcacagtgaaccactcttggtggttaatgatggtagaaaaccctccccaaattcaagttcccagacaccagagaagggccatccttctaagcaggcctttcaaatgaatgctagcaggcagccctgccatgttaactcattttcacataaagcccataaggaaatcatcatatagcaacaaattcttttgacatctgaattctgctctcagatcctctagtttgagtgtaaatgkgacagtggttaggtaaacggaaagccagagaaggtggacttaagtgctcaggagggagaagatggagatggatataatcgatttagaatatggcaaaagattaaggggccatggtggctgtttgatttcaccaggagacaggaatgaaaacaaagtttagagatttgttagagctagaagtcttaaaattagtggttgcctataatgttagagatttatatctattaaacaagacttattaacctcagcactgttgacatttgggacaggataagtctgtcagggagggggctgtacagtgtactgtaggatagcctcatttctggcctcctgaccacgagatgtcagtagtattttcccctccctactcactcccaaatgagacaaccagaaatgtctccggacgttgcctattgccaaatgtcctctgaggacagtatgaaaacatgggttttacagaaaa

SEQ ID NO: 12544 - DNA, 1448 bp, Homo sapiens
cctgtaatcctagcactttggaaggctgaattgattggaccacttgagcccaggagttcgagatccagcctgggcaacatggtgaaaccccatctcaacaaaaaaatacaaaaattagcctgacatggtggcagttgcctctggtcccagctactcaggaggctgagatgggaggatcacctgagtccaggaggtcgaggctgcggtgatgtgtgatcctgccactgcacttcagcctaggtgacagagtgagactctatctgaaaattaaaaaaaaaaaaacaaaaaaagttgttgttttttttttaaagataatacgttaaatatttagtatacttcttcctttatgaatgaaagcctgttacgcacaaaggggcctgtgctggggtccccaagaacatcctcagttttgatgattctctgggaggtttcacaagaatcagcatacagtcctgcttattcatgtggccatgatttgttatggtgaaaagacacagagcaaaatcagcaaaggtaaaatgcatggggacatgtcaggaggaagcaagacgcttgttccagcagagccacacaagatgcgcttaactcctccagcaatgaattgtgacaacctatgtcaaacactgccaaccagtgaagctccttagagacttagtgcccatgggtggccaagagggggagtgggttatcaccaaattccagacacccataaagaaagcaggtgtttagctgtttgtacaaacagcttcagcacagtgaaccactcttggtggttaatgatggtagaaaaccctccccaaattcaagttcccagacaccagagaagggccatccttctaagcaggcctttcaaatgaatgctagcaggcagccctgccatgttaactcattttcacataaagcccataaggaaatcatcatatagcaacaaattcttttgacatctgaattctgctctcagatcctctagtttgagtgtaaatgtgacagtggttaggtaaacggaaagccagagaaggtggacttaagtgctcaggagggagaagatggagatggatataatcgatttagaatatggcaaaagattaaggggccatggtggctgtttgatttcaccaggagacaggaatgaaaacaaagtttagagatttgttagagctagaagtcttaaaattagtggttgcctataatgttagagatttatatctattaaacaagacttattaacctcagcactgttgacatttgggacaggataagtctgtcagggagggggctgtacagtgtactgtaggatagcctcatttctggcctcctgaccacgagatgtcagtagtattttcccctccctactcactcccaaatgagacaaccagaaatgtctccrgacgttgcctattgccaaatgtcctctgaggacagtatgaaaacatgggttttacagaaaa

SEQ ID NO: 12545 - DNA, 610 bp, Homo sapiens
tgcatacaactccagtaaacatactgggtgtggcccctcccaagcgtgtcacgtgcgggcaacatgcaggctgcccaccccaagggaagactcaggggataagtaacgcaagaccccggaagtatgcccacatataaaacccaaaatcaagaagtcaaacggtgcacttgatctctcaagttgcctgcttggccctcttccgagtgtactcttcttcctttcattcctgctctaaagctttttaataaactttcactcctgctctaaaacttgactctgtctctccttccaccatatgcccctcagtcgaattctttcttctgaggagaattgaggttgctgcagacctgtacagatagggatacgctgccagaacaaaattagattaatacatgtaaacagaaaatgtttgaagcaccacataattttctaaaattgtctttaagacaattgcagtaaataggccttcttaactgtcatgttttcgtttactgatgttactggaagaggtcttgactgaaagttgtccaggttcttggcattttgaagaaagaattggacaaaatrcacggcaaagcaaggaaacaatgaggcaatgaaagcagagagt

SEQ ID NO: 12546 - DNA, 556 bp, Homo sapiens
ctggaaaggaggtccggcaagcaaacgatgagagctgaggcagtttagtttctctctctctacagaagtggttcatttcagaagaatgcatatatatatatatatatatatatatatatacatacatatatatatacatatatatacatatatayatatatatatacacacatatatatatatatatatatatatatatatgaagacaaagaaagcaagccaaatatgccagtccaccttctagaaaacttacaatgctcccacgagcagaagagagagccgacttccctaagtgttagttcagttttgaaaatttgctagattgaatttgactttcacttggccctaacactacaactcttcttgttcttttaaattgttagtaatcaatgtgctggctccatgcctagaactgttacaaataatgatagaaatatctttcattagacagaaaaggaaataaaatatgtgcatttaccacaaataccctgtttgaggtacaatcaagatatgaaaatttcaaaatatctggcatttcttgcctatattttaattt

SEQ ID NO: 12547 - DNA, 556 bp, Homo sapiens
ctggaaaggaggtccggcaagcaaacgatgagagctgaggcagtttagtttctctctctctacagaagtggttcatttcagaagaatgcatatatatatatatatatatatatatatatacatacatatatatatacatatatatacatatatacatayatatatacacacatatatatatatatatatatatatatatatgaagacaaagaaagcaagccaaatatgccagtccaccttctagaaaacttacaatgctcccacgagcagaagagagagccgacttccctaagtgttagttcagttttgaaaatttgctagattgaatttgactttcacttggccctaacactacaactcttcttgttcttttaaattgttagtaatcaatgtgctggctccatgcctagaactgttacaaataatgatagaaatatctttcattagacagaaaaggaaataaaatatgtgcatttaccacaaataccctgtttgaggtacaatcaagatatgaaaatttcaaaatatctggcatttcttgcctatattttaattt

SEQ ID NO: 12548 - DNA, 556 bp, Homo sapiens
ctggaaaggaggtccggcaagcaaacgatgagagctgaggcagtttagtttctctctctctacagaagtggttcatttcagaagaatgcatatatatatatatatatatatatatatatacatacatatatatatacatatatatacatatatacatatatatatacacayatatatatatatatatatatatatatatatgaagacaaagaaagcaagccaaatatgccagtccaccttctagaaaacttacaatgctcccacgagcagaagagagagccgacttccctaagtgttagttcagttttgaaaatttgctagattgaatttgactttcacttggccctaacactacaactcttcttgttcttttaaattgttagtaatcaatgtgctggctccatgcctagaactgttacaaataatgatagaaatatctttcattagacagaaaaggaaataaaatatgtgcatttaccacaaataccctgtttgaggtacaatcaagatatgaaaatttcaaaatatctggcatttcttgcctatattttaattt

SEQ ID NO: 12549 - DNA, 577 bp, Homo sapiens
atatcctcaaggaagacgaaataccgctataacaccatgacaagaggacagaacaaataaaaggaccagagagtaattgagcagaagatgagaagctctaactcatatgaggaaggtactctgaaactgaataaaggaatgaggaaagcagtgccacttcccaggcacaagatgtaaacattgtgatagaacagccagggagaaattggttactcataatctgcccaaaaaaaatcgatacaggaagtgatcatggtagaaatgcacacatagagagtacttgctctaatttaacaagtcacggctaagccctctagcctcttcagataattgccagtgacagaaatctggttcagaatgtttccataactgaatgtcctagggtgggcttggaaaattctaccatttcttgggtctctgaaagagtgcatgtccaacaggtttggattagaaaatatgaccacaccrggccttttgtatttggggcccttagattgtgagagtaagggaagcaattctacctagtgtctgaggctaggtagaggagggactgacaccagaagctgagtggctacca

SEQ ID NO: 12550 - DNA, 515 bp, Homo sapiens
aatgacaccacagggactgatggagggaaccctggattttagctatgaagggagaggttgcggtgctcagggtcaggatcttcagtgttgaaggctgtgtctgcaattgcttacgggttcatgaaatcgccactgcagctatctgcttacctgggctccaggtggaagagcccctagcttgtcccaggagtttcaggttctctgggttttacaaagggctttcctgtcctcctctccactgctctgctggtactccagggtctgggcagtggctgctgttgtcaccttattccagggctgaggacctgaggctcagggagcgaggagcctgcccgaggtgagcagcagggtcatcccagcaagtgaaggggcaatctcctcttctctgggctgagctgggtttggcccccaccactgtatggggcttcatgccgggggaacccacagtggggttaaacagaaaggcctcctggaggaaggaaaagattcccagagttctatgcttcaagycattt

SEQ ID NO: 12551 - DNA, 587 bp, Homo sapiens
cccctctacctttgggatgtaagctccacaagggatgagatggtgaaagtagcaggcccaggccacccacagcagcgtggaggcagtggagtcagaaacaggccatttgatgccattctgcctgtgccattgaaaagctaaatcacataagacagcacttgccccatttcttcttcctggtccctaattcaatgcctgtcacatagtgggcactcaataaatatttgtagagtggttgaaataaaatcccccacttaactgaactccatacttatccctgtgccaagcacatcagtatttcatcatatccccccaacaacacagtgaagaaggttttattcttcctagacccatatttttagaggaggaaacagagaggttaagtaatttgttacagatcacacaccaagtaggtagcagagttgagasttgaacccagagctgcgtgagatgtgtgtgcatcttcttaacacctagtcctagaaaagaaaaccagtcccttgcccctgggaaatgtctcacactactgggaaggcacaaggcatgaaacagtagaaatcatgcaagggaaaggttgcttctgggtg

SEQ ID NO: 12552 - DNA, 523 bp, Homo sapiens
ggggtgaatctagggacctacaactaacccatccagaatactgcaacctcctcccaccctccggggcagggggcgacacagagcagttcaacaggacccctgagccccttcatcagatgctgagaacaaaacccagagacaaaaggcagaatgacgctgaaagtaggatttggaatcagagatgcgaggttgagtttccagctgtgtaatatgagggaccagctgtgttctctagaaccctgggttccttgaaggtgccctggagctacggggtgggaggagtggcagaagagcaggcaggaactggcctctccctccccactcggcttcatccggaggacctccacatttgtctgttctgtattttgggctttgacatcaggtttcttctagagggtgaaaatcagagggtaaaasagtttggaaaaacactgatctagcccaacctcctgatttgcaaaaaagaaaacggaggcccagaagtaggaaggcctaagtctccagagctgggttagaacacagc

SEQ ID NO: 12553 - DNA, 523 bp, Homo sapiens
ggggtgaatctagggacctacaactaacccatccagaatactgcaacctcctcccaccctccggggcagggggcgacacagagcagttcaacaggacccctgagccccttcatcagatgctgagaacaaaacccagagacaaaaggcagaatgacgctgaaagtaggatttggaatcagagatgcgaggttgagtttccagctgtgtaatatgagggaccagctgtgttctctagaaccctgggttccttgaaggtgccctggagctacggggtgggaggagtggcagaagagcaggcaggaactggcctctccctccccactcggcttcatccggaggacctccacatttgtctgttctgtattttgggctttgacatcaggtttcttctagagggtgaaaatcagagggtaaaagagtttggaaaaacactgatctagcccaacctcctgatttgcaaaamagaaaacggaggcccagaagtaggaaggcctaagtctccagagctgggttagaacacagc

SEQ ID NO: 12554 - DNA, 582 bp, Homo sapiens
tgatctgtgcacttttgtctaggtatgtgatgcttcaattaaaaaaacaaaacaaaacttgctgcacatcatggctcatgcctataatccaagcactttgggaagctcaggcaagaaagagaatctcttggggccaggagttcaagaccagcctaggcaacatagcaagacccgccccaccatctcaacataaaggaaaaaaaatcagctaggcatggtggtgcatgcctgtagtctcacctgctcaggaggctgaggtgggaggattgcttgattccaggaagtcaaggctgcagtgagccatgatggcaccactgtactccagcctgggcaacagagtgagaccttgtcttaaagaaacaaacaaaaaaatctagagagccatacaaggttcttaaaaatcttcccattctacctaaataaataartaagtaatcacatttgtataattccttgaaagattggaagatctgatagcacgatctgatttcccatggagtggcagttggctagacctgtgtagtgactgcccacctccattcctcataacccacttcgctcgttagaatgtcccctgtcttt

SEQ ID NO: 12555 - DNA, 553 bp, Homo sapiens
cttattaaattctgtgctgttggtaatacaaagatgaataaatcatctgcctcacactcaaatggagagcagcagactagcatttattaaacacgatgtggcacaaatcgtgtttggtattttatttatttatttttaaatttttattttactttaagttccaagatacatgtgcagaacatgcaggtttgttacataggtatacgtgtgccatggtggtttgctgcatctatcaacctgttacgtaggttttaagcctcrcatgcattaactatttgtcctggtgctttccttcgccttagctccctacccatgacaggccacggtgtgtgttgttcccctccctgtttccatgtgttcccattgttcaactcccacttatgagtgagaacacgtggtgtttggtttggcttccagcttcatccatgtccctgcaaacgacatgatctcattactttttatgactgcatagtattccatggtgtatagataccatattatctttatccagtctatcattgatgggcatttgggttggttccatgtatttgct

SEQ ID NO: 12556 - DNA, 553 bp, Homo sapiens
cttattaaattctgtgctgttggtaatacaaagatgaataaatcatctgcctcacactcaaatggagagcagcagactagcatttattaaacacgatgtggcacaaatcgtgtttggtattttatttatttatttttaaatttttattttactttaagttccaagatacatgtgcagaacatgcaggtttgttacataggtatacgtgtgccatggtggtttgctgcatctatcaacctgttacgtaggttttaagcctcgcatgcattaactatttgtcctggtgctttccttcgccttagctccctacccatgacaggccacggtgtgtgttgttcccctccctgtttccatgtgttcccattgttcaactcccacttwtgagtgagaacacgtggtgtttggtttggcttccagcttcatccatgtccctgcaaacgacatgatctcattactttttatgactgcatagtattccatggtgtatagataccatattatctttatccagtctatcattgatgggcatttgggttggttccatgtatttgct

SEQ ID NO: 12557 - DNA, 553 bp, Homo sapiens
cttattaaattctgtgctgttggtaatacaaagatgaataaatcatctgcctcacactcaaatggagagcagcagactagcatttattaaacacgatgtggcacaaatcgtgtttggtattttatttatttatttttaaatttttattttactttaagttccaagatacatgtgcagaacatgcaggtttgttacataggtatacgtgtgccatggtggtttgctgcatctatcaacctgttacgtaggttttaagcctcgcatgcattaactatttgtcctggtgctttccttcgccttagctccctacccatgacaggccacggtgtgtgttgttcccctccctgtttccatgtgttcccattgttcaactcccacttatragtgagaacacgtggtgtttggtttggcttccagcttcatccatgtccctgcaaacgacatgatctcattactttttatgactgcatagtattccatggtgtatagataccatattatctttatccagtctatcattgatgggcatttgggttggttccatgtatttgct

SEQ ID NO: 12558 - DNA, 553 bp, Homo sapiens
cttattaaattctgtgctgttggtaatacaaagatgaataaatcatctgcctcacactcaaatggagagcagcagactagcatttattaaacacgatgtggcacaaatcgtgtttggtattttatttatttatttttaaatttttattttactttaagttccaagatacatgtgcagaacatgcaggtttgttacataggtatacgtgtgccatggtggtttgctgcatctatcaacctgttacgtaggttttaagcctcgcatgcattaactatttgtcctggtgctttccttcgccttagctccctacccatgacaggccacggtgtgtgttgttcccctccctgtttccatgtgttcccattgttcaactcccacttatgagtgagaacacgtggtgtttggtttggcttccagcttcatccatgtccctgcaaacgacatgatctcattactttttatgactgcatagtattccatggtgtatagataccatattatctttatccartctatcattgatgggcatttgggttggttccatgtatttgct

SEQ ID NO: 12559 - DNA, 537 bp, Homo sapiens
acattatactgaataaaagaggccagacctaaaacagtacatactgtgtgatttcatttatgtgacattctacagcagcaaaactaatctacagttataaaaggcacaygagtgttgcctggcatcagagttaggaggatcatcttcaaacagagtataggaacactttgcgggtaatggaatgttctacatcttgattgtggtgtggttatgagagcaggatgtgttaatttgccaaaagtcatcaaactgcttaaaatcggtgcattttattgtgtgttaactctgtctcattaaaaatgaatattgaacacataaacataaaaataaaaaatgctataatgaacatctttatacttaaaaaaatttttattccttaggataattcctgagccttttgcacttattttctgaaaccacgtgaaattgtgataatttgcttgatatcaaaaaagaatatatgaaaataaatatctaattgataggatttctggcaggaactgaagtgaaaaatttgggcttagttgggggaaaata

SEQ ID NO: 12560 - DNA, 537 bp, Homo sapiens
acattatactgaataaaagaggccagacctaaaacagtacatactgtgtgatttcatttatgtgacattctacagcagcaaaactaatctacagttataaaaggcacatgagtgttgcctggcatcagagttaggaggatcatcttcaaacagagtataggaacactttgcgggtaatggaatgttctacatcttgattgtggtgtggttatgagagcaggatgtgttaatttgccaaaagtcatcaaactgcttaaaatcggtgcattttattgtgtgttaactctgtctcattaaaaatgaatattgaacacataaacataaaaataaaaaatgctataatgaacatctttatacttaaaaaaatttttattccttaggataattcctgagccttttgcacttattttctgaaaccacgtgaaattgtgataatttgcttgatatcaaaaaagaatatatgaaaataaatatctaattgataggatttctggcaggaactgaagtgaaaaatttgggcttagttggrggaaaata

SEQ ID NO: 12561 - DNA, 485 bp, Homo sapiens
gcttcaacaggctagaggagcctggaggtggggctgggctcaggcgaactggggcaggtggtgttggctttagggacaaggttggcgtgggaggccgtgaggtcccactcaggacccccaggggggatggcaacactgcagacacaaagcaaacacctgtcagatataccctgactaaagccttagcctggtgccagaagcctccatactcccttccaacccatcaaatactagacccstgtccccagcccagctcctcaaaccctttaatttcactacttcctcctcagtctgaacaacctttctgaagcaccacgcatcatccttggctccctttcaactcaccctgggggagagaaccactgttgggctgcagtggaggcaagaggacagggccaggaggccgagatgcaggaataagcgggggcccggcaggtgaggctgaaaccatcagtgatgctggcagcacttgggggactgggcca

SEQ ID NO: 12562 - DNA, 637 bp, Homo sapiens
ctcactgtaccttgaacttctggcctcaagccattctcctgcttcagcctccccagtagctaggacacatgccaccacactcagctaatttttttcctttttggagagacaggttcttgctatgttgcccaggttggtcttgatctcctggcctcaagtgatcctcctgcctcagcctcccaaagcactgggatttcagtcataagccataacatccagcctagaagtagagtgtaatgtgtttgtttcacctaggagttcactcccaggttgtatcaacccagccctgttcatattctagcactctctcatctgaaatgcaaatgaaagtgtttcccagatgttgctattgtaccaattatattctcttcaagaaaagaactatcagtcctagtgggagaaactatttttattcattgagatcttttcccagcaatatatatggtgtgtccatccattgggttgacttcagaaagcctggaagaggacttcttaggytcagatatatttcccagaaggaaagacagccaccaactagataaccgggagaaactacagattaggaagaaagtaagccaccctgatgtcacttagacctcatctcattgatcctgctaaggccttcacaagctatgtt

SEQ ID NO: 12563 - DNA, 326 bp, Homo sapiens
ggaggattgcttgaacccaggaggcaggggttgcagtgggccgagatcccaccactgcactccggcttgggcaacagagagagacttctgtctcaaaaaacaacaacaacaataaaaaaaaaaaaaacaataaaaaagcatcgattcctacggcacttgttggcgattcatgatatgtgttttyatgcctggttctccacatgccactaggataaaagctaagcctcctccatgggcctctgaggcctggtatgggtcagcctccctatcttcccctgcttccctttgaactgtctaggtcccattaacactggctgtgaccattc

SEQ ID NO: 12564 - DNA, 514 bp, Homo sapiens
tgattatgttttttctgtcaagagccagagaaatacttgatattcttagttgtgtttctgtaatagttaataaattacacaacaaaaacctgactatataaatctattggtctaactacgtatttgtaacttgcacagtagtcaagcccttttgttactttgccccatcgtgctcttaaagccagccttgcagatctgtgcagaaacccagccccattttttttcctttagaacagccttccccattcctcaaaatggaattgaggaaatcagcattccttagtagattcctggcttcagtttttatccacggctgggaaaggagtgacctgcaaggctgctttaaacaccctttggcgtggcctgaaatcaaagccgcacccacactggagtgcagttgtctcaaatgagaactcactccctcagggcaggcacatccaggaagtgctaaracacttaaaagttcctagtgctggccaggtgcggtggctcaagcctgtaatcccagcacttt

SEQ ID NO: 12565 - DNA, 1103 bp, Homo sapiens
tggatagctttgagagatagtatggcatgcacaacagttaattactgaggacatacccatctttcatatagaaagatatttcttatttagatataatatttatctaatatgagagaatagatattatctgttctctaatattcatctaatatcagtgttatttagatacagtattttagttttataacttaaaataccttacgtaaaattgtgaatgtgtatctgtaaatatatgaagattttataccactcttaaatttcttttctccaactgacaaattcagtcctacctcagtatccacgggagattggttcctggacttcccacagataccagaatttgttcatactcaagtcctgtagtcagggccctgtaaacctgcagatatgaaaaattggccttccatatatgtgggtttcaaatcctgctaatgctatatttttgatccacatttggtggtgaatgcaggacccaccaatacagagggcaacctgtatttattgaaaaaaattcacacacaagtggacttagacagttcaaaccaatgttgttcaagggtcaaatgtagtaatatatgaaaaatgagctcagaaactacaaaacttactcaaatgtttttgcaatttaaaaatttacatgggatttaaaaatttacatgggattaaagtgataaaggaaacaattatagtcatttttattaatttagtgccacaaacatgctgaatgattattatttgaggaacaaaacactttaaaagcagaagaaacaccatgataaataaaacatggtctctgtctgaaatttcctccctctattggacctattcacctaggttgggacytcagttgctgatggcacaggccaaaccaggaactaataggcataagagagagaacccagtatcagaagaaggtattgatacctagtaggtggttatccaggcaaagcagctagtgtcaaattgcacttggggttggatataagatgagacctttagttcggactaggaccacaccctgacattaatatgtggcaggttttggaggcagggaaacaagagtagagtgcgaagaaaaagactgagttactaaacctggaatt

SEQ ID NO: 12566 - DNA, 1227 bp, Homo sapiens
ggaggcctgagcacactgctttggaaattattctaaacacaaaaaagggaaagaaaatgttatttctccctaagtcaggagcatgcagagctagcccacctcatgtccagctgtccactttccatcctggagaaagaacagtgtgcctcaaactcctgccctccccaggcctctggggcccrctggaaagggctctgaccccctggcccagccgggctctctagtggtgatccggctcattctcctgcaagttggaagcacaattttccccccaagtggaggaaaaggaaagggccccagcctactgaagaggtgtttattttttaactaacagcctcccaccccattaagactcaccaggagaggtctgagggccattcagaacccactcctgagtgggtgggtgggtgggactcagtccagagacctaacattcagaatatagcattggttgcctattttgagatggatttaatctcccacagtattcatgagaccatctgatggaatcagatccctgagccaccttgcaggacgttttccccaacctcttacaccctggatgtcactttggaaaccaagcccttggaagcaagtggggtggcatgggagagaagggaggaggtgggcacaggtggtgagcttatgtgtgggcactctactgcctcacagaagccagccaagtgccaaggtcagcttggctggtctgaggccaccttcttagccaaaaacctagggttcattttcaggactttgataatgaacaacaaaatggggacttctttgggcagatgctaggtcagttgttttcacctaatatcctcttttagctgcatgtatatttatttataattataaccctggtggactgcagccttcatctttattgggaatgagtttgttataaatcagaaatgggtccatgatgaccactgttttccaaacccagtctgttccctgctccctcgctggcaagccccaccacacaggagtgaggccaggggctaggagttctaagaacagaggctggggtgagggtggcacccaggcagctgcatctggtctgttttaatttaactgtatttaatttgctttcaaaattaaaagtcaaatacagtttttaacagtcctaatcctcttcagccctgccttattttgttctcatttattaatttagctacccaacaagtatgtatcaggtgcctgttatgaacaggcatcattcta

SEQ ID NO: 12567 - DNA, 1227 bp, Homo sapiens
ggaggcctgagcacactgctttggaaattattctaaacacaaaaaagggaaagaaaatgttatttctccctaagtcaggagcatgcagagctagcccacctcatgtccagctgtccactttccatcctggagaaagaacagtgtgcctcaaactcctgccctccccaggcctctggggcccactggaaagggctctgaccccctggcccrgccgggctctctagtggtgatccggctcattctcctgcaagttggaagcacaattttccccccaagtggaggaaaaggaaagggccccagcctactgaagaggtgtttattttttaactaacagcctcccaccccattaagactcaccaggagaggtctgagggccattcagaacccactcctgagtgggtgggtgggtgggactcagtccagagacctaacattcagaatatagcattggttgcctattttgagatggatttaatctcccacagtattcatgagaccatctgatggaatcagatccctgagccaccttgcaggacgttttccccaacctcttacaccctggatgtcactttggaaaccaagcccttggaagcaagtggggtggcatgggagagaagggaggaggtgggcacaggtggtgagcttatgtgtgggcactctactgcctcacagaagccagccaagtgccaaggtcagcttggctggtctgaggccaccttcttagccaaaaacctagggttcattttcaggactttgataatgaacaacaaaatggggacttctttgggcagatgctaggtcagttgttttcacctaatatcctcttttagctgcatgtatatttatttataattataaccctggtggactgcagccttcatctttattgggaatgagtttgttataaatcagaaatgggtccatgatgaccactgttttccaaacccagtctgttccctgctccctcgctggcaagccccaccacacaggagtgaggccaggggctaggagttctaagaacagaggctggggtgagggtggcacccaggcagctgcatctggtctgttttaatttaactgtatttaatttgctttcaaaattaaaagtcaaatacagtttttaacagtcctaatcctcttcagccctgccttattttgttctcatttattaatttagctacccaacaagtatgtatcaggtgcctgttatgaacaggcatcattcta

SEQ ID NO: 12568 - DNA, 1686 bp, Homo sapiens
tgcatttcagcccatagtgcagtgtggctcacagggctcgtgatgactcattttgcctgtgacatagcgactgtaaatcaacatagctcacgtaccctcagcagctatcactctggtggcagctgtgcttcacatcccacagaacaccagtgccttggggtacctaggccagggcctggcacacatttttgttttaaatactgaacagagggatattgagtccatccacaagtactggttcagtgtgtctccccacagccaaccaccagtgccagttcatattggtgagactcagcaaccaacttggtttgcaaagtgaccccatcagacaggaaggacattgccttcctaacagcaaatgagaaacgagggagccttggacttttttttttttcttttaatgtttcatagcatgacatccaggtgggtcctgacctctgtcaataccaccttcctgaggttagttccatttcctactctgcacctgattcctgcagctcccaccttcagtgagaggaggctacagttctgaaggaaaaggcttggcattgaagctatggtcttcctgggccagattcaggagggaatggaagagaacattcctttcaggacaggtggccaaaggataggagacagagtggttcagcagggggggtaggttgcacaagggtggggcaaagggcacctcctgaaagatgggaagtgggaatggggatctggcctggggctgctgtggagccagctgcagtgcaggttgcaggggagcaggggcttccgccttggggttgctgtcttggtcagcatggctcctgccttcggggatgtccaaatcccacagaacatctggattctggacctcagtctcagtcttggtgacagcaggggcagggcccgtgttgatggctgcattcatgccgtagcgccgtcgcttgttaatccagtacaacaatgggctgtaggtgaatgtggcagctctcatcacctccacccactgctgggcatgctcttcccgcctcaagttcttcctccagtgcagaaagataatgcaccctccagttatcacagaacacagccccaggattccaaagtacaatgagacccacactaaggcagcaagaaagaaaaagaggcatgctggctgatagctgtagcttggggcctgagctgtttctcattcctctttcacttaacccatgcatcaatcrctccatccacttaactactctcaccgttccttccctcccttattgacttgcctcatcattcccttattcagtcaaagctagatttccagggagcttaagcaccacctttaactctttacagatcacaaaagctaggtctagcgggggcatgtgctgcccaggctcagtcaagcctctgattcctaacccaggacccatccaatccatcagactgagaagtttcactatgggcaagtccatcaagaagcaaaagttcaccagcactttgtgaggcccaggtgggcagatcacttgaggtcaggacttcaagtccagcctggccaacatggtgaaaccccgtctctactaaaaattttaaaattagccaggtgtggtggtgcatgcctgcagtcccagctacttcagaggctgaggcaggagaatcacttgaatccaggaggtggaggttacagtgagcctagattgagccactgcactccag

SEQ ID NO: 12569 - DNA, 1686 bp, Homo sapiens
tgcatttcagcccatagtgcagtgtggctcacagggctcgtgatgactcattttgcctgtgacatagcgactgtaaatcaacatagctcacgtaccctcagcagctatcactctggtggcagctgtgcttcacatcccacagaacaccagtgccttggggtacctaggccagggcctggcacacatttttgttttaaatactgaacagagggatattgagtccatccacaagtactggttcagtgtgtctccccacagccaaccaccagtgccagttcatattggtgagactcagcaaccaacttggtttgcaaagtgaccccatcagacaggaaggacattgccttcctaacagcaaatgagaaacgagggagccttggacttttttttttttcttttaatgtttcatagcatgacatccaggtgggtcctgacctctgtcaataccaccttcctgaggttagttccatttcctactctgcacctgattcctgcagctcccaccttcagtgagaggaggctacagttctgaaggaaaaggcttggcattgaagctatggtcttcctgggccagattcaggagggaatggaagagaacattcctttcaggacaggtggccaaaggataggagacagagtggttcagcagggggggtaggttgcacaagggtggggcaaagggcacctcctgaaagatgggaagtgggaatggggatctggcctggggctgctgtggagccagctgcagtgcaggttgcaggggagcaggggcttccgccttggggttgctgtcttggtcagcatggctcctgccttcggggatgtccaaatcccacagaacatctggattctggacctcagtctcagtcttggtgacagcaggggcagggcccgtgttgatggctgcattcatgccgtagcgccgtcgcttgttaatccagtacaacaatgggctgtaggtgaatgtggcagctctcatcacctccacccactgctgggcatgctcttcccgcctcaagttcttcctccagtgcagaaagataatgcaccctccagttatcacagaacacagccccaggattccaaagtacaatgagacccacactaaggcagcaagaaagaaaaagaggcatgctggctgatagctgtagcttggggcctgagctgtttctcattcctctttcacttaacccatgcatcaatcgctccatccacttaactactctcaccgttccttccctcccttattgacttgcctcatcattcccttattcagtcaaagctagatttccagggagcttaagcaccacctttaactctttacagatcacaaaagctaggtctagcgggggcatgtgctgcccaggctcagtcaagcctctgattcctaacccaggacccatccaatccatcagactgagaagtttcactatgggcaagtccatcaagaagcaaaagttcaccagcactttgtgaggcccaggtgggcagatcacttgaggtcaggacwtcaagtccagcctggccaacatggtgaaaccccgtctctactaaaaattttaaaattagccaggtgtggtggtgcatgcctgcagtcccagctacttcagaggctgaggcaggagaatcacttgaatccaggaggtggaggttacagtgagcctagattgagccactgcactccag

SEQ ID NO: 12570 - DNA, 585 bp, Homo sapiens
gggtgagccaccgcgcccagcctatgatgttaataattaatgttaacatttaatgtttattattttactttatttcttcaaaatatcaatgttcttttcacatatgcttcttaagttttactaacttgatgaatagttatacaaagtaatttctattgaccgcttgtgaaagcggcacacacacgatcataaaaggaacatttcttcagaaatattttgaaaatgtcacaaatcattagcatatgattcttctgttatttgctgagtgattctcacaatarcctcaagacaactggatcagtcatgtcctttacacaaataaagaaagtgaaactcaaaatagttaactaaatgtattttaagcatgtgtagcaaaaataagattaaaaaatatatattttttcttttagtagagcccaagtcaaatctatgtcaaaacttgaaatagtccttaaagcaaaatttgaacaagtccctatgaattaatgagataaatgtacaacattactcccagctaccagatggggcacagaaaagttcctaaaacatgaataaacctaaaaaatatgtaaattattttttgaa

SEQ ID NO: 12571 - DNA, 585 bp, Homo sapiens
gggtgagccaccgcgcccagcctatgatgttaataattaatgttaacatttaatgtttattattttactttatttcttcaaaatatcaatgttcttttcacatatgcttcttaagttttactaacttgatgaatagttatacaaagtaatttctattgaccgcttgtgaaagcggcacacacacgatcataaaaggaacatttcttcagaaatattttgaaaatgtcacaaatcattagcatatgattcttctgttatttgctgagtgattctcacaatagcctcaagacaactggatcagtcatgtcctttacacaaataaagaaagtgaaactcaaaatagttaactaaatgtattttaagcatgtgtagcaaaaataagattaaaaaatatatattttttcttttagtagagcccaagtcaaatctatgtcaaaacttgaaatagtccttaaagcaaaatttgaacaagtccctatgaattaatgagataaatgtacaacattactcccagctaccagatggggcacagaaaagttcctaaamcatgaataaacctaaaaaatatgtaaattattttttgaa

SEQ ID NO: 12572 - DNA, 519 bp, Homo sapiens
aacaaaaaaaaaaaaamcttttttttttaatggagatggggtctcctctgtattgcccaggctggtcttgaactcctgggctcaagcaatcctcctgccccagcctcccaaaatgctgggattacaggtgtgagccactgtacctggctgagactcagacatagtatttaacatctgcctctagccctcttgagagtaaggtggaataaaaataaatagcctttaaaaaatgtcttaaccactctgaacctcagtttacccggctgtaaaatggggataataataataaataaaacattatttagtcatcatttttcctatcacctccctgtaagaatgtaaacttcacaaaggcagggatttttttatctcttttgtttacaaatgctcagcatggcacctaggacttagcaggtgctcagtaaaaaattactgaatgaatgaatgaatgaataaggaatacatatgatttacgggttcctcacaatgtgcctggcactgcagaaaatgctttccatg

SEQ ID NO: 12573 - DNA, 519 bp, Homo sapiens
aacaaaaaaaaaaaaaayttttttttttaatggagatggggtctcctctgtattgcccaggctggtcttgaactcctgggctcaagcaatcctcctgccccagcctcccaaaatgctgggattacaggtgtgagccactgtacctggctgagactcagacatagtatttaacatctgcctctagccctcttgagagtaaggtggaataaaaataaatagcctttaaaaaatgtcttaaccactctgaacctcagtttacccggctgtaaaatggggataataataataaataaaacattatttagtcatcatttttcctatcacctccctgtaagaatgtaaacttcacaaaggcagggatttttttatctcttttgtttacaaatgctcagcatggcacctaggacttagcaggtgctcagtaaaaaattactgaatgaatgaatgaatgaataaggaatacatatgatttacgggttcctcacaatgtgcctggcactgcagaaaatgctttccatg

SEQ ID NO: 12574 - DNA, 3365 bp, Homo sapiens
actcaactctcctttcccaatgggtgtagctgtgtttcagtaaaacattacggaaaaatagattgtgacctggatttggccaatagttttttaactcccattctaaggttttcataatcaccttttaaaaatctaaaagtagcaaatatattttccatttttttatttaacttttcattttttctttaaaaaatccctaaatgaatataaggttttgcagttctttaacctaatatttcgatttgcttcttccattgggccactatagcaagtaatataacttgctgaaactccacaaaaaatataattcacaattataaaattaattttagctatcacaataatatcaggcctcagctttacagaatcttcttttacaatcaaaacttggcccaatgcacactaataagacaggcaatttattgttttggtttatattatttactcctttctgatgaaataaagtaattttatgagttagttgtattttaggcaaaacaccaagttaagtacataagcaaacaaaagacccataatttctgagacctggaaaatacgctaaactttggtaaataacccagacagtataaatgaaattttaacactacacatgatgagaaagtatttttaagtaacaatagatctcataaatatgtttggtataagctcaaagaacaaaagttcttcaaaccattattttatacatttactttataataaaatcaatctattgttcatgcatcctatcctgacattgaatggtattattcctaagcatacagctacaaaacagaacattaaatacaacaaactattttcccacgatatttatttatatttatttatttatttttttgagacggggtctcgctctgttgcctaggctggagtgcagtggtgctatctcggctcactgcaacctccgcctcctgggttcaagagattctcccacctcagcctcccgagtggctgggatagaggcacccgccatcatgcccagctaatttttgtatttttgtagagatggggtttcatcatattggccaggctggttttgaactcctgacttcaggtgatctgcccaccttggcctccgaaagtgctgggattaccagggtgagccaccatgccaggaccccacatgatattaaatattatgtgtttccatatggatgtcaggtgaacaaaccctcaatttgagaatatgatgctaagttaaaatattttgatagttacatattatatattatgtacataatttcatagtgtcaagtatcagtgcaatagtataatttccaccataccatcttgtgtcaaaatgacagaaaaaaattccctaatattttacaaatattatttgtaaaatagatttgatagaaaagggaactaaactgaacttgaaatctaagtatctgttatccttttggtaaaagaactgtcataaaattctctgcacatgtatgtaagaggcacacagtacactatggtaagtaaattatcccagttttacttcaaatgtgttaaaggatttctagcagcaacaataacagagcattgcatcttgcatcatctgaaaagctctacatgtcatttttaaatcacratggaaataatattgtgttagagaaagtttgaaaaaggataatttttaattattcaatttaccttaataggtggatgagtggagtgtaataaaattatttttcagccataaatttaagctaggagtaaaaatattaaacaggtttttaagtgtaaatacgtttcagaaatattctgagaaactgggacttggcactgaccaaaggttagaagtcagattaattattgatggaagttctacacatttaactctagaatttcagactgagtcatgactataaacgagaaaatatttccaacagcatgaacaagtaaacaacaaataaatgtataaaaactgaatgatgttaaaactgttcaatgatttatttatgtggcatgtaaaaataatgtatggaattacaaattcagtacttttctaaaccaatgattttcaaatgcatgaaagtgaataccagtactttaaaaaaaatttaactatggttatctctgattcactaatgagatttagcatgagttcttctagttatttcagtgggcaactactggttccttataatttgaattatgtggtgcaaactgaaaccatcgtttttaatcaggaaggaatgaaatgttatcacagcatggcttggcactcactagtccctcaattccactccaggtgctttttactgggtgaatttggcctgtagactgaattggccaccctgtgtccctaagaaaatccatgattgggaagccatatggtgcaatgctgaaagctatattaaattttgagtcatattttggccagctttattctcataactgaatatcagaattgtttccatgtaaatttccacacactgctacttagtggagtacttaggctattttgtgtttcttttcctttttagacccttgctgatataaaattgctagagtttaaaggcactagttgagaaagaaaagaaatagagtggggtgacacttaaggttcacccttcatttacctttaaagaagcagtcttcattgtgaacaatggtaatcttttgttttttcaggcaagcagctctgtgcacttcacagtggttttcatagaattctccatcagatccacacacaggtttgtagtgacgtttgcaaaggtccatacaggcacattctgcttgccctgtctctctgctggtaacacagtgtcttcccaaaccacagtacttattttcacaagatccaaaagggccatcctgaatcataaatcctgaagaattaaaaaaaaattgaaaatcgtttggttcatttgtccaaataatatatatatttcagagtatcaagtggaaaacaagtgttctaagaaaagtatagtatagtgtattcagggctcaattttcagtggtggacatgcttatataaataactgcacatgaactttctcaaaatgctttcagtattcttcccttcttcctctcctctacttgagctctcttctccctccccagagaagtgtagtgcttaatgacaaggtctgtaaagctaaataaactgcctgagactaaatcctggcttgaccacttactagctttatgttttggataaattccttccttgtgccaagttgtcccatctgtaacatgggaataatagtatggaccatctctacagttgttcgaactattacatgtgataatccacagaaagcacatccttggcacatgatagatgttccataaatgttagcttttacagtaacagaattgtagataggagaaagtaatgtatg

SEQ ID NO: 12575 - DNA, 3365 bp, Homo sapiens
actcaactctcctttcccaatgggtgtagctgtgtttcagtaaaacattacggaaaaatagattgtgacctggatttggccaatagttttttaactcccattctaaggttttcataatcaccttttaaaaatctaaaagtagcaaatatattttccatttttttatttaacttttcattttttctttaaaaaatccctaaatgaatataaggttttgcagttctttaacctaatatttcgatttgcttcttccattgggccactatagcaagtaatataacttgctgaaactccacaaaaaatataattcacaattataaaattaattttagctatcacaataatatcaggcctcagctttacagaatcttcttttacaatcaaaacttggcccaatgcacactaataagacaggcaatttattgttttggtttatattatttactcctttctgatgaaataaagtaattttatgagttagttgtattttaggcaaaacaccaagttaagtacataagcaaacaaaagacccataatttctgagacctggaaaatacgctaaactttggtaaataacccagacagtataaatgaaattttaacactacacatgatgagaaagtatttttaagtaacaatagatctcataaatatgtttggtataagctcaaagaacaaaagttcttcaaaccattattttatacatttactttataataaaatcaatctattgttcatgcatcctatcctgacattgaatggtattattcctaagcatacagctacaaaacagaacattaaatacaacaaactattttcccacgatatttatttatatttatttatttatttttttgagacggggtctcgctctgttgcctaggctggagtgcagtggtgctatctcggctcactgcaacctccgcctcctgggttcaagagattctcccacctcagcctcccgagtggctgggatagaggcacccgccatcatgcccagctaatttttgtatttttgtagagatggggtttcatcatattggccaggctggttttgaactcctgacttcaggtgatctgcccaccttggcctccgaaagtgctgggattaccagggtgagccaccatgccaggaccccacatgatattaaatattatgtgtttccatatggatgtcaggtgaacaaaccctcaatttgagaatatgatgctaagttaaaatattttgatagttacatattatatattatgtacataatttcatagtgtcaagtatcagtgcaatagtataatttccaccataccatcttgtgtcaaaatgacagaaaaaaattccctaatattttacaaatattatttgtaaaatagatttgatagaaaagggaactaaactgaacttgaaatctaagtatctgttatccttttggtaaaagaactgtcataaaattctctgcacatgtatgtaagaggcacacagtacactatggtaagtaaattatcccagttttacttcaaatgtgttaaaggatttctagcagcaacaataacagagcattgcatcttgcatcatctgaaaagctctacatgtcatttttaaatcacgwtggaaataatattgtgttagagaaagtttgaaaaaggataatttttaattattcaatttaccttaataggtggatgagtggagtgtaataaaattatttttcagccataaatttaagctaggagtaaaaatattaaacaggtttttaagtgtaaatacgtttcagaaatattctgagaaactgggacttggcactgaccaaaggttagaagtcagattaattattgatggaagttctacacatttaactctagaatttcagactgagtcatgactataaacgagaaaatatttccaacagcatgaacaagtaaacaacaaataaatgtataaaaactgaatgatgttaaaactgttcaatgatttatttatgtggcatgtaaaaataatgtatggaattacaaattcagtacttttctaaaccaatgattttcaaatgcatgaaagtgaataccagtactttaaaaaaaatttaactatggttatctctgattcactaatgagatttagcatgagttcttctagttatttcagtgggcaactactggttccttataatttgaattatgtggtgcaaactgaaaccatcgtttttaatcaggaaggaatgaaatgttatcacagcatggcttggcactcactagtccctcaattccactccaggtgctttttactgggtgaatttggcctgtagactgaattggccaccctgtgtccctaagaaaatccatgattgggaagccatatggtgcaatgctgaaagctatattaaattttgagtcatattttggccagctttattctcataactgaatatcagaattgtttccatgtaaatttccacacactgctacttagtggagtacttaggctattttgtgtttcttttcctttttagacccttgctgatataaaattgctagagtttaaaggcactagttgagaaagaaaagaaatagagtggggtgacacttaaggttcacccttcatttacctttaaagaagcagtcttcattgtgaacaatggtaatcttttgttttttcaggcaagcagctctgtgcacttcacagtggttttcatagaattctccatcagatccacacacaggtttgtagtgacgtttgcaaaggtccatacaggcacattctgcttgccctgtctctctgctggtaacacagtgtcttcccaaaccacagtacttattttcacaagatccaaaagggccatcctgaatcataaatcctgaagaattaaaaaaaaattgaaaatcgtttggttcatttgtccaaataatatatatatttcagagtatcaagtggaaaacaagtgttctaagaaaagtatagtatagtgtattcagggctcaattttcagtggtggacatgcttatataaataactgcacatgaactttctcaaaatgctttcagtattcttcccttcttcctctcctctacttgagctctcttctccctccccagagaagtgtagtgcttaatgacaaggtctgtaaagctaaataaactgcctgagactaaatcctggcttgaccacttactagctttatgttttggataaattccttccttgtgccaagttgtcccatctgtaacatgggaataatagtatggaccatctctacagttgttcgaactattacatgtgataatccacagaaagcacatccttggcacatgatagatgttccataaatgttagcttttacagtaacagaattgtagataggagaaagtaatgtatg

SEQ ID NO: 12576 - DNA, 3365 bp, Homo sapiens
actcaactctcctttcccaatgggtgtagctgtgtttcagtaaaacattacggaaaaatagattgtgacctggatttggccaatagttttttaactcccattctaaggttttcataatcaccttttaaaaatctaaaagtagcaaatatattttccatttttttatttaacttttcattttttctttaaaaaatccctaaatgaatataaggttttgcagttctttaacctaatatttcgatttgcttcttccattgggccactatagcaagtaatataacttgctgaaactccacaaaaaatataattcacaattataaaattaattttagctatcacaataatatcaggcctcagctttacagaatcttcttttacaatcaaaacttggcccaatgcacactaataagacaggcaatttattgttttggtttatattatttactcctttctgatgaaataaagtaattttatgagttagttgtattttaggcaaaacaccaagttaagtacataagcaaacaaaagacccataatttctgagacctggaaaatacgctaaactttggtaaataacccagacagtataaatgaaattttaacactacacatgatgagaaagtatttttaagtaacaatagatctcataaatatgtttggtataagctcaaagaacaaaagttcttcaaaccattattttatacatttactttataataaaatcaatctattgttcatgcatcctatcctgacattgaatggtattattcctaagcatacagctacaaaacagaacattaaatacaacaaactattttcccacgatatttatttatatttatttatttatttttttgagacggggtctcgctctgttgcctaggctggagtgcagtggtgctatctcggctcactgcaacctccgcctcctgggttcaagagattctcccacctcagcctcccgagtggctgggatagaggcacccgccatcatgcccagctaatttttgtatttttgtagagatggggtttcatcatattggccaggctggttttgaactcctgacttcaggtgatctgcccaccttggcctccgaaagtgctgggattaccagggtgagccaccatgccaggaccccacatgatattaaatattatgtgtttccatatggatgtcaggtgaacaaaccctcaatttgagaatatgatgctaagttaaaatattttgatagttacatattatatattatgtacataatttcatagtgtcaagtatcagtgcaatagtataatttccaccataccatcttgtgtcaaaatgacagaaaaaaattccctaatattttacaaatattatttgtaaaatagatttgatagaaaagggaactaaactgaacttgaaatctaagtatctgttatccttttggtaaaagaactgtcataaaattctctgcacatgtatgtaagaggcacacagtacactatggtaagtaaattatcccagttttacttcaaatgtgttaaaggatttctagcagcaacaataacagagcattgcatcttgcatcatctgaaaagctctacatgtcatttttaaatcacgatggaaataatattgtgttagagaaagtttgaaaaaggataatttttaattattcaatttaccttaataggtrgatgagtggagtgtaataaaattatttttcagccataaatttaagctaggagtaaaaatattaaacaggtttttaagtgtaaatacgtttcagaaatattctgagaaactgggacttggcactgaccaaaggttagaagtcagattaattattgatggaagttctacacatttaactctagaatttcagactgagtcatgactataaacgagaaaatatttccaacagcatgaacaagtaaacaacaaataaatgtataaaaactgaatgatgttaaaactgttcaatgatttatttatgtggcatgtaaaaataatgtatggaattacaaattcagtacttttctaaaccaatgattttcaaatgcatgaaagtgaataccagtactttaaaaaaaatttaactatggttatctctgattcactaatgagatttagcatgagttcttctagttatttcagtgggcaactactggttccttataatttgaattatgtggtgcaaactgaaaccatcgtttttaatcaggaaggaatgaaatgttatcacagcatggcttggcactcactagtccctcaattccactccaggtgctttttactgggtgaatttggcctgtagactgaattggccaccctgtgtccctaagaaaatccatgattgggaagccatatggtgcaatgctgaaagctatattaaattttgagtcatattttggccagctttattctcataactgaatatcagaattgtttccatgtaaatttccacacactgctacttagtggagtacttaggctattttgtgtttcttttcctttttagacccttgctgatataaaattgctagagtttaaaggcactagttgagaaagaaaagaaatagagtggggtgacacttaaggttcacccttcatttacctttaaagaagcagtcttcattgtgaacaatggtaatcttttgttttttcaggcaagcagctctgtgcacttcacagtggttttcatagaattctccatcagatccacacacaggtttgtagtgacgtttgcaaaggtccatacaggcacattctgcttgccctgtctctctgctggtaacacagtgtcttcccaaaccacagtacttattttcacaagatccaaaagggccatcctgaatcataaatcctgaagaattaaaaaaaaattgaaaatcgtttggttcatttgtccaaataatatatatatttcagagtatcaagtggaaaacaagtgttctaagaaaagtatagtatagtgtattcagggctcaattttcagtggtggacatgcttatataaataactgcacatgaactttctcaaaatgctttcagtattcttcccttcttcctctcctctacttgagctctcttctccctccccagagaagtgtagtgcttaatgacaaggtctgtaaagctaaataaactgcctgagactaaatcctggcttgaccacttactagctttatgttttggataaattccttccttgtgccaagttgtcccatctgtaacatgggaataatagtatggaccatctctacagttgttcgaactattacatgtgataatccacagaaagcacatccttggcacatgatagatgttccataaatgttagcttttacagtaacagaattgtagataggagaaagtaatgtatg

SEQ ID NO: 12577 - DNA, 549 bp, Homo sapiens
ggtgtttgccaggggctggggagagaggggaatggggagttatttctcartgggcatagagtttcctttttacaagataaaaagttctagtgatggcagtggtgatggattcacaacgtgaatgtactttggccactgtgcttaaggccactgaattgtacacttaaaatggttaaaagagcaaattttatgttataaatatttcacaatttagaaataaaaaataaatataaggttaaaaaaatcagaatgaggttgaagtaaagatgctcagatatcattaacctgaaagtttttggcagagggtcaaaaaagaagtctagaaatctgtgagccatttcatagagcatttacaaaactgcccaagaacaaatggtgaatattttcatagatgcttctttagccatgttctagacatttctactttcactgacattaaaaatatttaagtataacaataacctgtaagtgcttagtgcttttttcatttacaaagcaccctcacatccattctcttttgctgctcagaataaccctctgggagtagac

SEQ ID NO: 12578 - DNA, 549 bp, Homo sapiens
ggtgtttgccaggggctggggagagaggggaatggggagttatttctcaatgggcatagagtttcctttttacaagataaaaagttctagtgatggcagtggtgatggattcacaaygtgaatgtactttggccactgtgcttaaggccactgaattgtacacttaaaatggttaaaagagcaaattttatgttataaatatttcacaatttagaaataaaaaataaatataaggttaaaaaaatcagaatgaggttgaagtaaagatgctcagatatcattaacctgaaagtttttggcagagggtcaaaaaagaagtctagaaatctgtgagccatttcatagagcatttacaaaactgcccaagaacaaatggtgaatattttcatagatgcttctttagccatgttctagacatttctactttcactgacattaaaaatatttaagtataacaataacctgtaagtgcttagtgcttttttcatttacaaagcaccctcacatccattctcttttgctgctcagaataaccctctgggagtagac

SEQ ID NO: 12579 - DNA, 653 bp, Homo sapiens
ggagaggacaacagaagctctgccctatgtgcttctttacttgactgattttcatccgcatcttttccccgtaataaaccataaccaggggtaataagctttcagtgagttatgtgagtctttctagagaagtatcaaacctgaaggttgactttggaaactcctcaaatttgcagaaactaaattccagagaaatccattttattttaaataaataaacttcacaataaaataggacaaaggaaaaaataaatgcttattcaagttctctaaaagtcaagttactactgttcctaaagaaaaacacacaccaatcccytctcctttttctttaaagcattagctttgcccctaaataaattttgagatttgggtacattctgaaggaatgctggcttaaaacagtgtcagaatctttttgtacagaaatctacagacaaatataaaaagtgttgaccataagtataacaaagttttaaaaatattttgtaaacaactactatgttccaataggttattccagtgtaccagacattatcacatacctgatattgcttgattcttaaaccattcttattagatattcttatccccatcccagaatgaaggaaaatgagacctcagaggtttcatgcagcatgagaaccaggagc

SEQ ID NO: 12580 - DNA, 540 bp, Homo sapiens
taaatgaaactttcatccatactataaaatagattaatctcaataaatatgctaattaatagaagctagatcaaaagagaacaaacagtatgatatcatttatataaaaagaggcattagagcctagtaattaagagtgcagcttctggaagcaaaatccttagtatgatgttttggctcattgactgcagcatttattttatgtgcgctcttgaggtttttatagaaacaatatgcctcagtttaytcatctatataatgactatatcgatagtcatctactttataaaatatagtattttataatgtaatactttataatatatatttgatatatattttaaaatgtctttattatatgttataaagtataaataatataaaataatatctatagttgttgacttataaaaataaagattaaatgaacaaaaatatgtgaagcactagtttactacctagaaaatggtacattctaaatattttcataattgtaataaataaataaatgtatccttatgttattttattaataataaa

SEQ ID NO: 12581 - DNA, 573 bp, Homo sapiens
tcaatagggttttttgaggggatgagagaggttttataaaaacatcttgaatggctaaattcaagtaaaccctaaatatgggtctccacttgccaagaaaatgtttatccaggcttgtcagacggacactggcagaaagcacacctctccccaagagaaaagaaagatgtcactgaaattatcttgggctccataggtgacattagtacagccagactgccgagcatcaggtgccaatttacatgttagcttctgttgtgctaagtggaaaccctacccttgttatgtcacttatgtaggtgagaaaactcccctggccacagggcctggcacgggactgcatgtgggcccaggggccactttatctacygtgcaggtaaattctttgctgtttggctctagaggaaaatgcatcttacataaggtgctgctccatagataagtctgttgttaatatgccttagactgcctttgccatggctattatcacggatacatgcgacgtacatcttttttatcggtgtgcattgtacttgtggtaaaaaaaataaataaaaaaggaaaagagaccac

SEQ ID NO: 12582 - DNA, 1721 bp, Homo sapiens
ttgggaatgcactcaaccacttccttcttcctgctttggccaaaacataaggggcctgtttgccggaacctgcccgttacctgtatacttgacatagttctcacagccccatctagcagagccagtcttccaatgatgactcttgtgtcttgcacttcaagagcaacaattccagtgtgacgctggggcctgtaatgccttataaggcacgtcttttacccactgagaacctagcactgaacttctctggggagcatgatttcagggggaaatcatctgctttaaggcaattctggattttcttcatgtgtgaaatggggataacactagtacagcaaaattatattccatagcattagttgatgtgatgctatataggcactgtcctacccaggctctgcaactaaagggaaagacatcctgatgtagtaacaaacagttaactttgagaacaaatgtgctgcattcttaatcttttaaggtcaaatgacactttctaggtgtgagacaggaaaaatttgaaatggggatgcccatagagagagcaggtatgtccttgtactccacagaaaatggaagacttcaaagctggaggagaaggaagagagttttgagagaagaaataagaatacactctggaggagcccaagtccctgcctctcccctctgggccaagcccatgctgggcagagaggatctgagagtggaggggacttgttgctcatgctagagtcctgagatcagccagcagccttgcagagatgacagtgaaaggtaatgggcctggatggaggagccccaggagtctgtgtgggcctaactggagagcagaaggtcactgagaatgagcacccatgagccagcctggaggtaaccatagcacaaggcaagtgaacctgagagccgaggctggcaatgcttgcccagacagatcagacaaaagtctctgcaaatgaactcagggtgtcagcagcaacacaagagcaaaagtggggccaagtcaacaaaggaaaatttccctgctcccagaataagcagcgtgcccagactgagatgggacaagagacaaagaggagcatctgcagcagattgctacattggtgagacaaccacaggccagacacctgctaccccaaggccacttgattctgaagattcccttgaataaaatgcatgagcatgaggggcagagaccttgaaatggttacattttgaactataaataaccaaggaattaatatgttgggctaaaagtcttggaacattgctagactacacattcttctagaatcaaaaataagaatttgcaaactgaattcaatgtttgagaaatttttagtttcatttctcctcatctgagtcttattgtactatgaaactcacagtcattgtacttgcttcacagttcttattgtgattaaatgaggctccttctgtaaggtccttaaccctgggcttggagcatagtaaggactcacaaatgttaataacccccacctgcctttgtctatgcctttcagagttaatacctgtgggctagagcaaggacagtgaaagaatgcaggaagtaaacactcactctcaaccttggagcygcgcttaatcccctggtagccctaaggctggtgaagcctcccagacactgacaccccactcttgtatctcttctctgtacagtcaggcaagcttggcctctcactctgacacccacagggagtccc

SEQ ID NO: 12583 - DNA, 1721 bp, Homo sapiens
ttgggaatgcactcaaccacttccttcttcctgctttggccaaaacataaggggcctgtttgccggaacctgcccgttacctgtatacttgacatagttctcacagccccatctagcagagccagtcttccaatgatgactcttgtgtcttgcacttcaagagcaacaattccagtgtgacgctggggcctgtaatgccttataaggcacgtcttttacccactgagaacctagcactgaacttctctggggagcatgatttcagggggaaatcatctgctttaaggcaattctggattttcttcatgtgtgaaatggggataacactagtacagcaaaattatattccatagcattagttgatgtgatgctatataggcactgtcctacccaggctctgcaactaaagggaaagacatcctgatgtagtaacaaacagttaactttgagaacaaatgtgctgcattcttaatcttttaaggtcaaatgacactttctaggtgtgagacaggaaaaatttgaaatggggatgcccatagagagagcaggtatgtccttgtactccacagaaaatggaagacttcaaagctggaggagaaggaagagagttttgagagaagaaataagaatacactctggaggagcccaagtccctgcctctcccctctgggccaagcccatgctgggcagagaggatctgagagtggaggggacttgttgctcatgctagagtcctgagatcagccagcagccttgcagagatgacagtgaaaggtaatgggcctggatggaggagccccaggagtctgtgtgggcctaactggagagcagaaggtcactgagaatgagcacccatgagccagcctggaggtaaccatagcacaaggcaagtgaacctgagagccgaggctggcaatgcttgcccagacagatcagacaaaagtctctgcaaatgaactcagggtgtcagcagcaacacaagagcaaaagtggggccaagtcaacaaaggaaaatttccctgctcccagaataagcagcgtgcccagactgagatgggacaagagacaaagaggagcatctgcagcagattgctacattggtgagacaaccacaggccagacacctgctaccccaaggccacttgattctgaagattcccttgaataaaatgcatgagcatgaggggcagagaccttgaaatggttacattttgaactataaataaccaaggaattaatatgttgggctaaaagtcttggaacattgctagactacacattcttctagaatcaaaaataagaatttgcaaactgaattcaatgtttgagaaatttttagtttcatttctcctcatctgagtcttattgtactatgaaactcacagtcattgtacttgcttcacagttcttattgtgattaaatgaggctccttctgtaaggtccttaaccctgggcttggagcatagtaaggactcacaaatgttaataacccccacctgcctttgtctatgcctttcagagttaatacctgtgggctagagcaaggacagtgaaagaatgcaggaagtaaacactcactctcaaccttggagctgcgcttaatcccctggtagccctaaggctggtgaagcctcccagacactgacaccccactcttgtatctcttctctgtacagtcaggcaagcttggcctctcactctgacacccacakggagtccc

SEQ ID NO: 12584 - DNA, 534 bp, Homo sapiens
gttgtacaaagaattatactttgggctgtcaagactgctacatcatttagaaacatctcccctctctccaccaaatatttccattggtaccrtggttagagagatcactttctctgatggcccaggcataataatagagttcgtagatttaaaaatgtaatataaggagctatagtattactgaactgaaacaaaacttatttccattaacttcattttatagctacagaaaatcaggtgcagaagcgacttgagcagaatcaaacagcaagtcaatgacagccttgagatctgtccagcactgatgattggctagttattctctaacgtgtctctcccacagtgtctgtggagttgcttaaggggcctcatgggtagatatgggcccatgtagatgattcagagaagttctgtcttagtctatttgatatatgaggcttctagcagtgtttgaaaatcagcctattaggtcataatattccttctctgcaatttgcctgatgagtataaaccaacacccctggtgatccagcc

SEQ ID NO: 12585 - DNA, 557 bp, Homo sapiens
agggactgggatggggctatcttgaaaggatgaccatggaattttctccgaggaagtgacatttgggcaacagtctgaatgatgagaaagatccagtcatgcaaaaagaattccrggctgaagcagcagcacatttaacaaacttcatgatgggagaggagggtagagattcctattccaggaacagaagaagtaccagtgtccttggagcacagggcattgggagagccagatttagtagaacacttgtaggccttgctaaaaagtctcactcttcttcccccaactgcagtggtaaccaataagatgattttaagcaggagagtgatatggtctgttacagggatttttgaaagactctgtggttgctgggaagcaatagattctaatgtacacataacgagtatagtgagtattttttattgtttattcagaacatatttactaagcatcaaaaataggctaggtagtagacaaaagaaaacagctaatgctatacagagtcttgtggagtatttttatcatttgttttttacttttatcaaaactactcatga

SEQ ID NO: 12586 - DNA, 1052 bp, Homo sapiens
caaacaaaatttgaataaaggattaggcatagcatgctcttggatgagggaggcaatattatgaaaatatcaactttccccaaattaacatatatatttaatgccattttatttagaaatccaacaaattttttaattgggtgaaattatagtttacatggaaaaataaatgtatgagaacagccaataaaaatgcaagaaggatgaattaaaaggaggcttttaaaaaatatcagggcatacaataaagcccctctaatcaagtcaatacaagaaaagacgattagtagaagagaatatgaaataaagaatatgataaatataatgaattcatattggcaaatatagcggctgcaatttattctggaaaagaataaaaatggaccccatcttataccatgttcaaaaataaatttcaggcagactgaaatatatgaagaaaaataaaaatctgtaaatgtctcaaaaatatggtggttaggaaatctccttagactaatagtccgttacctatatagaaaaaataatgggttttacttagtcagttaagaattgaaaacctatgtatgaaaacccataccgaaaacagagttggtaaacacacagaagatctggaaaacacatgtaatagtgatggttaatatctatataaacaagaaagtyggcaagacacagacaaagagaaaaatagacaaatgttatgaatatatgattcacagaagaggaagtacaaatggccaacagacaaataaagagatacttaaatatatatgtaggaaatgcaaataaaagtaaaaatgagatataactttataaatactagaatagcagaaattaaaaaaactggtagcacaaattattggtaggaatacagggaaaaaggtacttatctattgttgatataaatggacgctttcaaaaagtctctagaaaaatttagaaatgcaatgttgtaaatttataccgtagaataaaaaaagcatatacgtataagaaaacatttattatggcatttttgttctgtcaaaaatcagaaaagaaggcactagggt

SEQ ID NO: 12587 - DNA, 1052 bp, Homo sapiens
caaacaaaatttgaataaaggattaggcatagcatgctcttggatgagggaggcaatattatgaaaatatcaactttccccaaattaacatatatatttaatgccattttatttagaaatccaacaaattttttaattgggtgaaattatagtttacatggaaaaataaatgtatgagaacagccaataaaaatgcaagaaggatgaattaaaaggaggcttttaaaaaatatcagggcatacaataaagcccctctaatcaagtcaatacaagaaaagacgattagtagaagagaatatgaaataaagaatatgataaatataatgaattcatattggcaaatatagcggctgcaatttattctggaaaagaataaaaatggaccccatcttataccatgttcaaaaataaatttcaggcagactgaaatatatgaagaaaaataaaaatctgtaaatgtctcaaaaatatggtggttaggaaatctccttagactaatagtccgttacctatatagaaaaaataatgggttttacttagtcagttaagaattgaaaacctatgtatgaaaacccataccgaaaacagagttggtaaacacacagaagatctggaaaacacatgtaatagtgatggttaatatctatataaacaagaaagttggcaagacacagacaaagagaaaaatagacaaatgttatgaatatatgattcacagaagaggaagtacaaatggccaacagacaaataaagagatacttaaatatatatgtaggaaatgcaaataaaagtaaaaatgagatataactttataaatactagaatagcagaaattaaaaaaactggtagcacaaattattggtaggaatacagggaaaaaggtacttatctattgttgatataaatggacgctttcaaaaagtctctagaaaaatttagaaatgcaatgttgtaaatttataccrtagaataaaaaaagcatatacgtataagaaaacatttattatggcatttttgttctgtcaaaaatcagaaaagaaggcactagggt

SEQ ID NO: 12588 - DNA, 1257 bp, Homo sapiens
tgtaaagacagagtcaccctatgttgcccaggctagtgtccagctcctggcctcaaataatcctcctgtctcggcctcccaaagtgcttggagtaatgttttaaaagtgcgaatgagaccatgttgctctcctgcttgaactccctcaaagcttcccatctcacctagaagaaaaatcactctccttactcaggcttacaaagtcctacatgatcattcacctgtctcctctttgagcttattttgtgatccttttctcacccccgcttcctgtgctctagccacatgctgaccttcccgggtccgagagctgttccttcttagcattccgatttcagcctaaatgccacctttctagagaggccttttctattgctttccatcacattgttgcatttagtctttctgtagcacttataccctctgatcactaggctgtcagcttcatgagaggaactccacagattctcttcatcactgtattcacagtactcagaactgtgtctgcaagaggtttaatacgttatttgttgaaagacttcttttgctttttacttaagtagcattatttgcagtttgcatcttaaacaggacttaacttcacattaataatgtaagggcattaagtgatggtgggttgtgccaatttatttcgtatgttcagatttgataattctatctgaaatttggtgcagctgaaacattcatgttttataaccaaaagctgaacaataagaatataataaaccagacactgtcccctgcaatgatgaacgtgaaaaacagaaaagagaaaaaataaataagaaagagtgtagtgacagcttataatatactaatatgatattcatgattatttagcctttaggtaaagtattcggagtccaaggcagttaggaggcttttctgtggaaagctgggatgctattttttttgaagtgcaaatgatttctgaatttgttatcagatcactctgaactcattggataattacaattgatttttcttttactctaggtgtagccctaactactagcagaggcaagagaatagagctatgccacttcttccatcagtaagggagcactcaatgtaaactccctaggaaagagctgctaacaaaagtctttgtgtttcaattaaaccaaggaaagtgaagtatcaggttgttgactataattgcttttgtggttattgctcttagctggtatattttaatgccrtttttcactatgtgtctcatgagctttgtagcat

SEQ ID NO: 12589 - DNA, 484 bp, Homo sapiens
tgatgtaaagaggcaaattccacctcattttgatgctaaagccctgccccaaagtaaatatgggrtgtatgttacatacatgcccttgactcccctcataaatatgtatagcttttcccccaaacctgtcaaatttgtgtgattctgttgtataatacaggccctgtgaggcatagacaccaacctgctctctccctcctcaaaaacagagcacctgcagtacacaccagatactgcccttggtttgcaaacagatattaccaataaaggtctccgttctactatttagctatcctggtgtttttctggatgatactttttctcatacgattcataaatctttaaaagacctttatggttaagggaactctatggaagatgttttaaaactattctgtctattgtgcctagaagttactcaaaggaaattactttatgttcaattactttaaaattctgcaagcattgtacaagcaaattagca

SEQ ID NO: 12590 - DNA, 484 bp, Homo sapiens
tgatgtaaagaggcaaattccacctcattttgatgctaaagccctgccccaaagtaaatatggggtgtatgttacatacatgcccttgactcccctcataaatatgtatagcttttcccccaaacctgtcaaatttgtgtgattctgttgtataatacaggccctgtgaggcatagacaccaacctgctctctccctcctcaaaaacagagcacctgcagtacacaccagatactgcccttggtttgcaaacagatattaccaataaaggtctcckttctactatttagctatcctggtgtttttctggatgatactttttctcatacgattcataaatctttaaaagacctttatggttaagggaactctatggaagatgttttaaaactattctgtctattgtgcctagaagttactcaaaggaaattactttatgttcaattactttaaaattctgcaagcattgtacaagcaaattagca

SEQ ID NO: 12591 - DNA, 484 bp, Homo sapiens
tgatgtaaagaggcaaattccacctcattttgatgctaaagccctgccccaaagtaaatatggggtgtatgttacatacatgcccttgactcccctcataaatatgtatagcttttcccccaaacctgtcaaatttgtgtgattctgttgtataatacaggccctgtgaggcatagacaccaacctgctctctccctcctcaaaaacagagcacctgcagtacacaccagatactgcccttggtttgcaaacagatattaccaataaaggtctccgttctactatttagctatcctggtgtttttctggatgatactttttctcatacgattcataaatctttaaaagacctttatggttaagggaactctrtggaagatgttttaaaactattctgtctattgtgcctagaagttactcaaaggaaattactttatgttcaattactttaaaattctgcaagcattgtacaagcaaattagca

SEQ ID NO: 12592 - DNA, 543 bp, Homo sapiens
acaggtcaagggtgaggatataataagtgataggtttttaatggtccccataaagtttagttaaaattccacggtttgtccaggtcactcatgcgtagttagtgataccaaggaaggagtttgttgaagagtctttttcaagtttcagaagacttgttcatgtttgggcccccacagaactyggtttcttattgaggactttgtcaacttataaagagctattataatctcagaataatttgctcccattgtctgcgatattcagttaaacctagaaataatcccaattttcattttgtaatgaatctaggataagcctacatagtctttagtttgtcatcagagagtggctttccctccttaggtaggttatttcctaatgcagagtatttcagcaaaattgtaatgtatattttgaaactttatgtcactttctgccattgctaagagcaagcatagatgtttttaaagattttcttattctctaaataaagtaggaaatattctacatattgtatcaaaactgaatcacagcagaaatct

SEQ ID NO: 12593 - DNA, 572 bp, Homo sapiens
gaagtggatcatcctaaaggtctccattctcgtcgtgttcacaatgagtaggctgaggaggaggaggaagaggagggcttggtcttgctgtgttaggaatggcagaggcagaagaaagtttgcgtgtaaggggacccatgcaagtcaaacctgtgttgtccaagtttcaaactgtgtatgatattttggttcagttgggattattccaggaatccaaggttaatttaattttagaaaatgtctaagtcactccattcacatattaaaggagaaaaaccatattgtcatctcaatggttgccccaaaagcacatggtgcttctaaagaagggagagacttgctcatcagaccgcgcacctcagaacaaagctgtgataatgaatatagaacaacacagcacggagagaaacggatcaacggaatgggaaagagaaccgggacaaagacccgcacatgtggcgacttgagttcrtcagagctggccagacacatctgttggaggaagacggaatagtcttaaatacccacgaggaaaagaagtgaaatggaactctgcctccagccttccaaag

SEQ ID NO: 12594 - DNA, 553 bp, Homo sapiens
agccaaagccatctattttttrctctgccaaaccagcaacatttccaacatgaaatatccataatgcaggaaattccagttctaggactcagacatgaatggtccctgcaattattgttaaattgcatgtgtcaagaagtagttttttcctgttggcggtagacagtacggcatgtgcattgtggttcacagaggcaataaaagtgtgttatgttactagatcctgaaagtaggtagcaaatacaaacagtaaatttaaaaggattatttttgtttctgattttgcatacaacttagaattttatgaaaattttctgagaatttatgagaactttatgattactgtgcccatgctttaggaatcattaaagaaagtttgtggattacttcttttgaacaacttacttaaaaagtattcaagttcaattaagtttgatatttgggatacctttatgaataataaatgaatctttatcactctatattatcttgaaacattcctaaggttatcagaactatccatatgatttctgtccttatacgttctgcttca

SEQ ID NO: 12595 - DNA, 553 bp, Homo sapiens
agccaaagccatctattttttactctgccaaaccagcaacatttccaacatgaaatatccataatgcaggaaattccagttctaggactcagacatgaatggtccctgcaattattgttaaattgcatgtgtcaagaagtagttttttcctgttggcggtagacagtacggcatgtgcattgtggttcacagaggcaataaaartgtgttatgttactagatcctgaaagtaggtagcaaatacaaacagtaaatttaaaaggattatttttgtttctgattttgcatacaacttagaattttatgaaaattttctgagaatttatgagaactttatgattactgtgcccatgctttaggaatcattaaagaaagtttgtggattacttcttttgaacaacttacttaaaaagtattcaagttcaattaagtttgatatttgggatacctttatgaataataaatgaatctttatcactctatattatcttgaaacattcctaaggttatcagaactatccatatgatttctgtccttatacgttctgcttca

SEQ ID NO: 12596 - DNA, 1162 bp, Homo sapiens
agaggtagttgaagaggtaaatccctaagctttctgccattgtagacaggtgttcttctctgatcctcagggccacagtcggaaaggaagttgtctgcactgagaaccgggagggatccctccgttgcttccatgagggtgcgggactcatggctctgggcctccaaggcaccacggcctctggctccattccaccctccccgcgctctcctcaaacctcaggcttcctttttctgcctgctgcagggcttctcagcctgggctggatcctggacagacaggcccaggcaggctgtgcactgtgacctggggccttgctgtgaacaaagaggacttcaagaggagatggcctggaggagttcgcctttgtggtcattttgcttcaggtaaatcctgtataaccaggaaccagggataatgagtcagggaccgaccatgagaaacacactgttctaacacagcttctgaagagccttctggagggggctcgagcttcccacatggggggcctctttccaagacccaactgcctaatttggaatctcccaaaaagtttgtttgcttttgtgcgcacatgattcccaagacagtgtgttaaatgacttgaatgaatcatccactgctccctccatttatctaccacctgcttccttttcagtccgtgacaacctggcttccatcaaaccaatcagcccatcacccaatactagctgttccaaatataaattgttgtctttgtcactttgcgtagtcactctcctcttgaaatatrcacatgttgtgaaaggactctagaaataaatctttcctcattaaaattttctacacatgcgttaatttttcctcccttttcaacagcggaccagtcagcaaataatgactgcccttggtcatccctgggaagataaaggattattaaaagagggcccggcagcttgcagattacacctgctacatttggagtggaaagaggcttctctgtcagtgccccttgcccccatggaaagacactaatagcaatcttcaaccataattgtttggtccattttgttctggaccaagtttgcataagttttaagcctgaaagtcaaagaaaaacgaaatcttacacgtcaacatggcctttccatcacttgaaaaaggcaccctctctctctctttc

SEQ ID NO: 12597 - DNA, 1162 bp, Homo sapiens
agaggtagttgaagaggtaaatccctaagctttctgccattgtagacaggtgttcttctctgatcctcagggccacagtcggaaaggaagttgtctgcactgagaaccgggagggatccctccgttgcttccatgagggtgcgggactcatggctctgggcctccaaggcaccacggcctctggctccattccaccctccccgcgctctcctcaaacctcaggcttcctttttctgcctgctgcagggcttctcagcctgggctggatcctggacagacaggcccaggcaggctgtgcactgtgacctggggccttgctgtgaacaaagaggacttcaagaggagatggcctggaggagttcgcctttgtggtcattttgcttcaggtaaatcctgtataaccaggaaccagggataatgagtcagggaccgaccatgagaaacacactgttctaacacagcttctgaagagccttctggagggggctcgagcttcccacatggggggcctctttccaagacccaactgcctaatttggaatctcccaaaaagtttgtttgcttttgtgcgcacatgattcccaagacagtgtgttaaatgacttgaatgaatcatccactgctccctccatttatctaccacctgcttccttttcagtccgtgacaacctggcttccatcaaaccaatcagcccatcacccaatactagctgttccaaatataaattgttgtctttgtcactttgcgtagtcactctcctcttgaaatatgcacatgttgtgaaaggactctagaaataaatctttcctcattaaaattttctacacatgcgttaatttttcctcccttttcaacagcggaccagtcagcaaataatgactgcccttggtcatccctgggaagataaaggattattaaaagagggcccggcagcttgcagwttacacctgctacatttggagtggaaagaggcttctctgtcagtgccccttgcccccatggaaagacactaatagcaatcttcaaccataattgtttggtccattttgttctggaccaagtttgcataagttttaagcctgaaagtcaaagaaaaacgaaatcttacacgtcaacatggcctttccatcacttgaaaaaggcaccctctctctctctttc

SEQ ID NO: 12598 - DNA, 607 bp, Homo sapiens
tttwaaagatttgtatagagttagattgctgtcttgctccagcttttgaaaataactagaaatcttggataaaatataaaaagcaagatatcaattctcaagccgggaactgagatcagaagagcactagatccagctttgcagtggggtctgttactaagccaggtgtacttgagttttaattttcacagcctcaaggggtatgggaaacagaatgccccagggtcagccccaggttggatgtcacaggtgatggttcagatgaagatgggatcccaaagggttacaacctaatataggataggaaaaaacaataaataaatactccaccctcagactcacgctactgcagggaagatcaactgtctcaacccttgactctgggcagattgtgtaggaagaatgccctggagaatttggagcccaccagttgaatcctatatataaagccctaattcaaactcctcatgaggtccagaatgcctcaagccaaaaatttaatttagaagagggttttcatccaatgaggataccacctaacacaggaggtgtttggaaatgttttgggatgtttgggggttctcacagttactgggtgcactacaaa

SEQ ID NO: 12599 - DNA, 939 bp, Homo sapiens
atggtaattcctgtggggtcaaagagaagattcagatttgtgatcaaagacaaaagtagttcatgcacatgaaaataaaatcaatgccttcatttttattgttagggactgtgagagtaaggattattagaaaaaaaaatgttgattgtatatatgtactttttagcatccacttggaaaaaaggaaattaattctgtcactaatggctgtttcaaactaactaaaattaagtagataaaggtatatatatatttgtgtgtgtatatatatatttgcacatatatatttgcatatatatatattagatggagtttcgcttttgttgcccaggctggagtgcaatggcgcgatctcggctcactgcaacctctgcctcccaggttcaagtggttctcctgcctcagtctcccaagtagctgggattacaggcatctaccaccacacctggctaattttttgtatttttagtagagatggggtttcaccatggtggtcaggctggtctcgatctcctgacctgaggtgatccacccacctcggactcccaaactgttgtgattacaggcgtgagccacttcgccgagccaaaggtatactttttattaggttaracattgaatattttttaagggaaattcaagaagagcaaagaatatgaacaaatatgtttgggggtaaataccaacaatatgtctgtatacaagtttttcaaaatgtcagtgtgatttttaacacacaagtttaataatttcagaaaaatgattcagtctgtgctcacttgggtcacacctagatcctgtggagggaacagatcaggatagacgttttagagagaaaccgtatttagtggttgacaagtgaatagattttcatgaagttaaaaaaaataaagaaggtaacttgattaaactctgatgatttcaacatctgattaatcc

SEQ ID NO: 12600 - DNA, 631 bp, Homo sapiens
atttaagttgctccatctttaaaaggatgaagatgcaaatgcaatagtttagcaggcataaacagaattccagaatgatgtttagcagtagataggtattttggccatttacaataaattctggttaaaacagaagctgaaacttcaactattcaaatttagaaaaagttctaaaatgcttactattgagtttttaaagaagcataatgatggcaagactactaaaatctttaagaattaaagaacagcagcaacaacaaaaacccccttcttacatataacagtatttcgcyaacatccagaaggaaataaaatgtagatggacatatttacattcatgctaattgtatggacacacattttgttgcattaacaattatgagttacttctcacaaaaatctccaatggaaatggagtattataccacatgagtaataacaggtgcctgcttagataggtgatagtgaaaagtcaaatttgtgtgcctatccacgaggaatgaggacttgttttttccttggtggaacatgtgcagtttagcatgctactgcagctggcactaaacatcaagtaattttctgcagctcttcaacagacaaaaacattatacatataaagttgttatgttct

SEQ ID NO: 12601 - DNA, 631 bp, Homo sapiens
atttaagttgctccatctttaaaaggatgaagatgcaaatgcaatagtttagcaggcataaacagaattccagaatgatgtttagcagtagataggtattttggccatttacaataaattctggttaaaacagaagctgaaacttcaactattcaaatttagaaaaagttctaaaatgcttactattgagtttttaaagaagcataatgatggcaagactactaaaatctttaagaattaaagaacagcagcaacaacaaaaacccccttcttacatataacagtatttcgctaacatccagaaggaaataaaatgtagatggacatatttacattcatgctaattgtatggacacacattttgttgcattaacaattatgagttacttctcacaaaaatctccaatggaaatggagtattataccacatgagtaataacaggtgcctgcttagataggtgatagtgaaaagtcaaatttgtgtgcctatccacgaggaatgaggacttgttttttccttggtggaacatgtgcagtttakcatgctactgcagctggcactaaacatcaagtaattttctgcagctcttcaacagacaaaaacattatacatataaagttgttatgttct

SEQ ID NO: 12602 - DNA, 593 bp, Homo sapiens
ataagaattttttagacttaacccaaaatatttctatgtgttgatttggggaatgtatgaataaacgtccctggtcaggtttttctttttgtagaaaacgggaaaggtaagcaggtccatgcctgttgcatgaaagagatgctgggttaggattatgaagacagtggagctaggtttgtacacagccggagagaaatagtgattcagagctgttattattcctacaaggtcaaaagaaatggaaaagstttgtaacccatgtactctattaccagcatgaacatacccataaatacatttgattcctttctagaacatctcaaagagtttggaaatatatgtacacagacaccatacaaagataaattttaaaatgtgagcttttagctttaactttctaaagcctacattaaagtgttcaaatacaaattttgttttgcgtatgtgttcttaacagacacaaatgacaggattctcataaaatgcttaaaggcagaaaaagaatataaaagataaataacttcaaagaaagatatttccttaacatatgtatattcatctgagtatctaataagtaaacaactgttcatgca

SEQ ID NO: 12603 - DNA, 509 bp, Homo sapiens
ggtcctttctgcactcagagccattgtgtggtcttggggatgcacttgggttgacacctgtggaccctgccagttaggaatgtgcagagaaaaggctaggagcctggtctcatatgtgtggaagcagggagaactcccgtctctcctctccattcattgtcctctcctgattagaatcccagctttcagaactaggagtccttctgtgatcatccagctcacactccttatcagtctttgggatggcaccatgggccctttggtatccagtgtcttcctcactgttgggcttaaaagggctgcagggattcaactccacaacccctgggacccatagagaggagtcgggcccctcccatttcccaccctcccattccctyccctctctaaaggctcctggcctagatgggagagagacctgcaatcagcatcgggtgagggccaagcttggtcaggattcaggttccagccctgccacttaccagctctgggtaactttaggcaagtta

SEQ ID NO: 12604 - DNA, 522 bp, Homo sapiens
aaaaaacttccaagactaataaacactgctgtaatttttttcattatgaattatttaaattgaatataaaattttaaaactgcattatgagtcttaggaattttaactgttatgaattatttcaactgcagattcaaccataccaaattaacaaagagaacttgcctccactgcaattatctggaatgggccctatcaattttcacctaaatattttgagtgaaattctttttcagaaattaaagtttagctaaacagttatatgttacatgactacagcatttaaaacacttataaatgtcatcaaratggtaggtgatactatttccatttcagagggaaaaaataggacagaatccagtagtgaaaagtagtacagtacacagggttatgtgcacgtgtgttcacatatgcatataatcgcacgtccatctatatgcatataccaacctgtacctacaaagtctaataaatcaatcaaggacacttaacaatgtctacattatctacacaagtgattca

SEQ ID NO: 12605 - DNA, 580 bp, Homo sapiens
gcgatagcttgctgagaatgatggtttccagcttcatccatgtccctacaaaggacatgaactcatcattttttatggctgcatagtattccatagcgtatatgtgccacattttcttaatccagtctatcattgatggacatttggcttggttccaagtctttgctatattttattacctttttgtatagttggtgtttcactgtctgcaatcagttgcaagcagtcttgagtgactaaaaagcaaaaatttatcattttagttacttgagtagaaataataaagaaactgagaacacaaagctagaaacccactcttccagaaacactaaatcaattatactttttacattgattgcatgacattattcttaaagttactttatatttgcccattgatttatatatatgatatatatatatgaaattcatgacattycagaaaagctctatgtgctgttaaaatataatatcacccttacagtttaacctaatttgctctgagaaatggctgaagagaaagcaagtttaatcatttgttttgcaagtctaccaaatacatgaaacagttaaccttata

SEQ ID NO: 12606 - DNA, 453 bp, Homo sapiens
atcatttataaggaaagaaaccaagaaaagcagttttcacctccatttagttgttaagctacctctgaaacttagaagataattccatcctaaaaaaaaaagaaagaaagaaagaaaaaaaasgaaaaaggaatacaagtcacattactgcactggattctttgccatcacttatatgttaacctgggttaatatatcagatacaagaacctgagagctaaccctttatatgaatgtctgggttttccctttattggtctatatttcggctatttcataataaaggctgatctggataagagagtttgaagcaaagagtggacaaaatttctctgaataacacactagtagagattttcctttgattcccagagaggaaagagtatctgaagagtttggcaaaatgtttccagacgaagaaatctctccattccttggcccaaatgtggcaac

SEQ ID NO: 12607 - DNA, 592 bp, Homo sapiens
tttttgtttgtttgagagcaacttaaagctgattaaatagaaatgtcaattatcatgaagaatcagcaaaagacttaattctgatgggcatggcagtaatactcagaagctctggtgaggctgatcaaaaaaaataataattttaactgttttcatgcagacattctccttgcaaattgtcagcatttgaaacatttcatttatagaagtataagtcaatatggcccactccttttctttgtgaacttgaacttgtcacctaaaagcaaattgggctgctttagaaaacaatctcacagtttttcaaaaaactaaatatagagttaccatagaacccatcaattccacttctagatatatacccaaagagaaattaaaatatacatccacacaaaaacttgtatactaatgatcatagcagcatagtccataatagccaaaaggtagaaataactcacatgttctttaactgatgaatggataaactgtggcatatccatacaatggaatattwttcagacataaaaaggaatgaagtattgatacatgctgcaacatggatgaacctttaaaatattatgctaagtgaaag

SEQ ID NO: 12608 - DNA, 309 bp, Homo sapiens
tggagcgtgtggggattagagaaagagttttccaaatggaaaaggtctaagaattctgatcagtaagaaaaacagtagaattaaggacatggactttaaagaaatacatagcaacctgaaggtttaagccatctaaataattataattatttccyagagcaaaaatgtaatagacaggcccatctgtctgaatcaacttttacaaaacccagggaaggatttctggtctgttttttctgtatggaaactcagccacagagctcaaataattgcagctcccaatactgtaatcctgcaggggcccatttg

SEQ ID NO: 12609 - DNA, 544 bp, Homo sapiens
gtttcatttgcaaaggtttgcccctgcccccattcaaattgttagtaatagaatgtgccrggataatgccacgtgggctgtgtgttattccgggtatgcccactgcaagacatcaccatcttctgctcattcctaagactgaattggtacttggccaaatatttgtcctgttccccaccctgctctcctgttttgcattggcttctaaagtggaagcaggtggaggcaaatatctgccctcccaggtggtatcagtgccttctgttctccccagtgggccggcccctgggttttatgatacaaggctgggcctccacccttccaggttatggcagaggctgccccagagatgccagagggcctggaggtgaaagaggaagtgaaaagtgaagatgcagatcactttctcacggcaggcccgagtcctcagatggagagacaaggggcctgagctggacaccacttttcatttcgagggtggcttcacatttggatcttttgtgtagatatttgttttcatttctctttggtaaatttctaggag

SEQ ID NO: 12610 - DNA, 544 bp, Homo sapiens
acatttagttaatttatttttctctaaccagcaggtggaagttcagagaaagacaagattatagacaaaataaaggcactacattttctctggtaaaaatgtctcaacattttcatatcctgttggttttccaggaaacatagaaatacgctgtaagaaataatcycaaaattgacgtgatggattaaagatgaaaaaacatgccttggaatacctaatgggaacattagtctatctctacacccagatcaacatgactgaatatagctttcttaaaaaagcagttgaattcagcaaggcaattattctattgctcaataagacttaatatttggattgattgaatttcctttgctttttattttggagtctatgttcatagcctcaatataagagtgaaaattttcacacagaaacaatacataatccaataaagagccagatacaagacattcttttatttggaaatattcaagggagtgtttaagcaagggatgtcttctgatagagataagtacagtctaattggacaaatgttgacagt

SEQ ID NO: 12611 - DNA, 544 bp, Homo sapiens
acatttagttaatttatttttctctaaccagcaggtggaagttcagagaaagacaagattatagacaaaataaaggcactacattttctctggtaaaaatgtctcaacattttcatatcctgttggttttccaggaaacatagaaatacgctgtaagaaataatcccaaaattgacgtgatggattaaagatgaaaaaacatgycttggaatacctaatgggaacattagtctatctctacacccagatcaacatgactgaatatagctttcttaaaaaagcagttgaattcagcaaggcaattattctattgctcaataagacttaatatttggattgattgaatttcctttgctttttattttggagtctatgttcatagcctcaatataagagtgaaaattttcacacagaaacaatacataatccaataaagagccagatacaagacattcttttatttggaaatattcaagggagtgtttaagcaagggatgtcttctgatagagataagtacagtctaattggacaaatgttgacagt

SEQ ID NO: 12612 - DNA, 544 bp, Homo sapiens
acatttagttaatttatttttctctaaccagcaggtggaagttcagagaaagacaagattatagacaaaataaaggcactacattttctctggtaaaaatgtctcaacattttcatatcctgttggttttccaggaaacatagaaatacgctgtaagaaataatcccaaaattgacgtgatggattaaagatgaaaaaacatgccttggaatacctaatgggaacattagtctatstctacacccagatcaacatgactgaatatagctttcttaaaaaagcagttgaattcagcaaggcaattattctattgctcaataagacttaatatttggattgattgaatttcctttgctttttattttggagtctatgttcatagcctcaatataagagtgaaaattttcacacagaaacaatacataatccaataaagagccagatacaagacattcttttatttggaaatattcaagggagtgtttaagcaagggatgtcttctgatagagataagtacagtctaattggacaaatgttgacagt

SEQ ID NO: 12613 - DNA, 544 bp, Homo sapiens
acatttagttaatttatttttctctaaccagcaggtggaagttcagagaaagacaagattatagacaaaataaaggcactacattttctctggtaaaaatgtctcaacattttcatatcctgttggttttccaggaaacatagaaatacgctgtaagaaataatcccaaaattgacgtgatggattaaagatgaaaaaacatgccttggaatacctaatgggaacattagtctatctctacacccagatcaacatgactgaatatagctttcttaaaaaagcagttgaattcagcaaggcaattattctattgctcaataagactyaatatttggattgattgaatttcctttgctttttattttggagtctatgttcatagcctcaatataagagtgaaaattttcacacagaaacaatacataatccaataaagagccagatacaagacattcttttatttggaaatattcaagggagtgtttaagcaagggatgtcttctgatagagataagtacagtctaattggacaaatgttgacagt

SEQ ID NO: 12614 - DNA, 563 bp, Homo sapiens
tcaccagtgctaaggaaaggtcttggcttacatttggcactaaatgaatattcacaaagaatgaaataagattcttgctccagctatgttacaatttgcctgctcacaagaaaaattctttattacatatcttgtatgtaagatcttttttctttccccattgatcttggttctctttttctgcctttacccatatgtatctatgatstctccttgacaaaattttctggagaatgagagtttccagggaagttactctacattttctcttaaaggctgattttttttgtttgttttagtcaccaaggagtgggaagaaatggggttcatttccattattcatattacttctgattattatacacatgcacttttgatttttacaggagtgaagtggaacttcctttagctttttactctgtgtaaagagatcccttctcttcatgctctaaaatgaggtcttcagagtccacctcttaaatatagtgtgatataagttggtatacctaatccacagcactgttgtattggatctaatttaataagtttgttttatgtatacc

SEQ ID NO: 12615 - DNA, 524 bp, Homo sapiens
acaagccaggtcacacccagcatcggtgcttgggaacaggcccctgtgccaggacagagccctaagacatccaggagaacaagggctggctggtgatctaggtcaggccccgcatgccagcctcaaagcacagcaaacgcagccrtcagcactctgctttcgggggcccgctcgcgtctggacatgccacaggttgtaatatttcatggccaatcattccaacaaagcataaagagaataaaaggaaaggactctatggagatgctggtcagaatactaggcctctgtgtcatgagaagccttctagagaaggagaaccttgctgagcagccaagggacatggagctgtccagtagccatgtgggttatgggcaagatggcagacagtgaagcgctcctcagccacaggtgtacatcccgggactccccagtaaccacctggctgcatgaccaagtggcttactgttcccaaatcccagtttccttgcctgttaagtggaagtattaataatacaaatagtagc

SEQ ID NO: 12616 - DNA, 1547 bp, Homo sapiens
tctaatacatttaaaaatgtacaatttacactttcatgatgtttacattgcaaaaaaatacaatgccatagaattggtggttcctagagcttatatgaaatattatccagaatctgtacatgtcttagcctaaaagaaatcagcagcaccctaacattctccagaagacccaacacatctggagaaatgagcatcattggggctcacggtgaaaggtaacagatgagctaacttcatgatcagccctggagcctggcgtccaataggactcctcaccccccaccccacactactgtatggccacattacagagtccttcccctgggggccttacctgcttctggaaattaacttcaggcaaacaggtgctcaactgtgaggggagggctgtggctgggcagaagtaggaaggtgccgccctgcagaaacacagaacacaggttgtgggaggagtcgggagggcccaggcagctgccagggctgggcctggagcacacgccccatgctgaggatgcacaaccgctggcgggaagctcatggagctgggttctgccgtggtccagaaatacctgtgtgtctggcaagcccaggaaacctgcacccacacctctgggataaataaggtgctgaaggcagctcagctggcctggcatttccggccgaagcaggtcagtccgctcaacaccacaccccctgctccccttggcttagtcaccaagtctaattgagacgctgtgttcagagacactgtggaccagaatgcatcactccaggaaagttgatggccaagttctgcacctgcacaagagaatgccccacctaccaaatctaacatgacaagtgaggcacaggtagctcagcaccccgcagcctctgtgctcagtgcatgtatatgtgtctgtgtgcttcagttgtgcacctaaacatcaactaacacacatgctagaaacacacgaaaagcacagtcgcagcttgttcacagacctacagcctagccacatgtctacgtgcccccaatacacctctggcaggaatctcagaacactgccttcttttcttctgcctcctacacaggagctcatcgttcaggtcacctgcacaggttaatggagcaagagcatggattgccgagtgggcggagacacaggagaagcaggaggctgtgaggggcgctgggagccttgcccaccygctccagctgcaccacctgctctgctggggtgcaagacccagtacctcacatctccaaggcatgtatcaatcatcccaataaatggtgagggcacaggtctgtggttatatattatgcggtagacaaccacgttctgtaaaaggtgcgtaattttgccaggcgcggtggctcacacctgtaatcccagcactttgggaggccgagacaggtggatcacaaggtcaggcgttcgagaccagcctggccaacatagtgaaaccctgtatctactaaaaatacaaaaaattagctggacgtggtggcgggcgcctgtaatcccagctacttgggaggctgaggcaggagaatcggttga

SEQ ID NO: 12617 - DNA, 517 bp, Homo sapiens
gcttgaccacgtttagcatgattcagtgattccttccttttaaaggctgagtgatactgcaccatatgatacagcatctttttaatccaatattatgtttatcacatgctggacatttgggttgttcccactttttggcttttacacacttggacattcttgtacaggcttttgtgtggacgcgatttcgtttctctcgggtagattcctaggagtggagctgctgggccgtgtggagtcgtgtgtccctcagtggaggagggacaaaccatgttccagagagtggctgcgcgttggacctcctctccrgcgtcggatgagggctccacttgctccactcccttgcctgcttctgttcccatctctcttcttggttatcttcatcctggagggtgggggaggcgctgtctcattgtggttcgaaagatttgatttgagcatcagcaatgtgcccaaggtggtggtaggtgctgcgggagctgactccactccttgtccctaaaaaggttgtggtctg

SEQ ID NO: 12618 - DNA, 525 bp, Homo sapiens
acagagtggcgtgttcagacagggtgaggggagccagggaggcctcaaaagtacagacgcagggggcagggggaccagatgttacttggtgctgcccctgctgagactgtggtggacacygaggctcagagagagcgtgggccctgctgcggctccagggtgagagctggggcctgtggttctttccagcactcggatggcattaagctgcactatcacgaggggttttgatgaaggacatcgcacatcggggcatgcctgcctgatggtgtgagcgtgtgggctgtgggagaatggctggtggagggagctgtccgctgaagggaaagccccatgtacctgcagcacagccagctcctctgtgtatgtgggatccaggaggaaaccgccacgcagccctattctgttctccctccctgccgagaggaggatgtgtggaaggcgggatgcttggtggccttcaatacctggagaccagaacgaaaggctgtggccacccccaggcctcccatcgagcacctgctg

SEQ ID NO: 12619 - DNA, 1292 bp, Homo sapiens
gggctgaggaagacacctcctggaggcgtctgctgaaatgaggctaatttactgtttccactttttcttcaaaaatggggaaaatctcatcagggccattgcagctgacttgacagaacagtcacactagaagtaaggctgagctgcccatctcaattattccaacattaattaggaagggaaacagaacaccagcaggaatttgcctaaagcaattgattaattgtctcaagatttccaaggccgttacaaaaagtggaaaatcccaggttttgaaacgagacagacttgaattattaataatagctcttcccttcactggttgagttcccaccagaagccagtttctttatttttaaatagaggggaacagtctgtaccttccagtttgttcgaggattaaatgggagcgtctatttaaagccactgcacagtgactgccactcagaaagggcttggcgacctgaggccgtcagcactgcctgtgtctttccttggcccctgcagccttgcggtcctggccatcactctctgtggagtgggacagggcatccagcctcactttgctgatgccctcggctgccgtctctgcaggcacacgtctgtgccacagaaactggcacactgcgggtcagcctcgagtgcatgagggtgttttacttcctaattagcaaaggcatagctcttgttaaaatactggcagatsgaatgtctcattaccttttattcattactggcttctaattattctgaattgtttcttaattagagtctgtccggtggaaaatagatgtgaacagagtgagacgcagggcagacctctggggtgaaacggacagtggagggtccctcagagatggtctttgtcatcagtggggatgcttcattgggaggttctgtttccctgccagaacccgcccaggcccacttctccagcccctgaggaagtgccactctccatggctcccagggaggacaagccatggcctattgggagaaattcttagcagacttccagtcccggcaggaggcctccctggcgcaggggtgagtagagcctgtggcagtggtgtctccttacccggggtctcctccagggttcctctcccaatccttctgcaagtgaaagcctcatgccccgccccccccccaccctatagggcatgactccaggaaggagtgtgactcttagtccctaccttcagtttgtattaaagatcctattcttaccaggggactcaagatgtttcttattacatctcattgctaattgtcaataagaggttatttcc

SEQ ID NO: 12620 - DNA, 1292 bp, Homo sapiens
gggctgaggaagacacctcctggaggcgtctgctgaaatgaggctaatttactgtttccactttttcttcaaaaatggggaaaatctcatcagggccattgcagctgacttgacagaacagtcacactagaagtaaggctgagctgcccatctcaattattccaacattaattaggaagggaaacagaacaccagcaggaatttgcctaaagcaattgattaattgtctcaagatttccaaggccgttacaaaaagtggaaaatcccaggttttgaaacgagacagacttgaattattaataatagctcttcccttcactggttgagttcccaccagaagccagtttctttatttttaaatagaggggaacagtctgtaccttccagtttgttcgaggattaaatgggagcgtctatttaaagccactgcacagtgactgccactcagaaagggcttggcgacctgaggccgtcagcactgcctgtgtctttccttggcccctgcagccttgcggtcctggccatcactctctgtggagtgggacagggcatccagcctcactttgctgatgccctcggctgccgtctctgcaggcacacgtctgtgccacagaaactggcacactgcgggtcagcctcgagtgcatgagggtgttttacttcctaattagcaaaggcatagctcttgttaaaatactggcagatcgawtgtctcattaccttttattcattactggcttctaattattctgaattgtttcttaattagagtctgtccggtggaaaatagatgtgaacagagtgagacgcagggcagacctctggggtgaaacggacagtggagggtccctcagagatggtctttgtcatcagtggggatgcttcattgggaggttctgtttccctgccagaacccgcccaggcccacttctccagcccctgaggaagtgccactctccatggctcccagggaggacaagccatggcctattgggagaaattcttagcagacttccagtcccggcaggaggcctccctggcgcaggggtgagtagagcctgtggcagtggtgtctccttacccggggtctcctccagggttcctctcccaatccttctgcaagtgaaagcctcatgccccgccccccccccaccctatagggcatgactccaggaaggagtgtgactcttagtccctaccttcagtttgtattaaagatcctattcttaccaggggactcaagatgtttcttattacatctcattgctaattgtcaataagaggttatttcc

SEQ ID NO: 12621 - DNA, 532 bp, Homo sapiens
agaatcctcaaaggaaacatttgattaatttttcattaattgatatatactgacayaataaccattaagtagtttatgttaaacacacccagtgtattttaaccatcctcgtttgggtgagaaatgaagataaaatattttcatgtgacctctatcttgatattatacaagcactgacattcaaactaaagaatatggaaagaagatttttgatttttctctgcctgggaataatattatcaaagaactcataaaataatcataagcaaatactaagaatacaccaccaccacactctaccaaatttaggttaatggcacatagcaaagagcagagcagataaggcatcacagaaattcatatacaaatttaaaacacacagacacactaatgactatgtttttaaatcactgattgtaaaaaaacaaataatgttttcccaacgctttcctacacatcatgtaaactaaacaggattttttttaaacaggcagggaaaaaagtgaacggaagtaaacttcatgaaacccca

SEQ ID NO: 12622 - DNA, 828 bp, Homo sapiens
tgtgaaaatgattgaatctaaacatgtaagttgaatatgggcaaaaccttagttaataattgctgtttacactgttaaacttatcctaatgtgttgttatgaggttattacattttagtgactcaataatatagaaatatatattggtttctagcataaatatggaagatactgtggtcttaccacaaaactaccacatctctggactcagaaccccaaattagctcacatatctggtgacattgtgcctcagaggaggctatgtctctaaatgagatgagtcttgaatagtctagcttaaaaacagtaattccattctcttttaccaggaagtattttgcaaatgtacatgtgattccattttgagtaatgaaaaaatttctcttaattgcaaagatagagagaagctaaaaatcccttttcaggttatagaagtttctgtcaggatataaaatttagaacttcagcagccatttggggactattgataaaattaattacggagaaatagctaacatgctagtgatagcagagtataaaataaaaagagcccggatctgtgttgtctttgagttgctgagcaaatcttgatattaccccatctctgaaaaacttattatgatagataataaattacctttttggttaaatcatctttaatttagttttttacatatatataatatatatataatctatattatatattattatatataatataatataatctatattayatattattatatataatataatataatctatattatatattattatatataatataatataatctatattatatatataatatatata

SEQ ID NO: 12623 - DNA, 828 bp, Homo sapiens
tgtgaaaatgattgaatctaaacatgtaagttgaatatgggcaaaaccttagttaataattgctgtttacactgttaaacttatcctaatgtgttgttatgaggttattacattttagtgactcaataatatagaaatatatattggtttctagcataaatatggaagatactgtggtcttaccacaaaactaccacatctctggactcagaaccccaaattagctcacatatctggtgacattgtgcctcagaggaggctatgtctctaaatgagatgagtcttgaatagtctagcttaaaaacagtaattccattctcttttaccaggaagtattttgcaaatgtacatgtgattccattttgagtaatgaaaaaatttctcttaattgcaaagatagagagaagctaaaaatcccttttcaggttatagaagtttctgtcaggatataaaatttagaacttcagcagccatttggggactattgataaaattaattacggagaaatagctaacatgctagtgatagcagagtataaaataaaaagagcccggatctgtgttgtctttgagttgctgagcaaatcttgatattaccccatctctgaaaaacttattatgatagataataaattacctttttggttaaatcatctttaatttagttttttacatatatataatatatatataatctatattatatattattatatataatataatataatctatattacatattattatatataatataatataatctatattayatattattatatataatataatataatctatattatatatataatatatata

SEQ ID NO: 12624 - DNA, 828 bp, Homo sapiens
tgtgaaaatgattgaatctaaacatgtaagttgaatatgggcaaaaccttagttaataattgctgtttacactgttaaacttatcctaatgtgttgttatgaggttattacattttagtgactcaataatatagaaatatatattggtttctagcataaatatggaagatactgtggtcttaccacaaaactaccacatctctggactcagaaccccaaattagctcacatatctggtgacattgtgcctcagaggaggctatgtctctaaatgagatgagtcttgaatagtctagcttaaaaacagtaattccattctcttttaccaggaagtattttgcaaatgtacatgtgattccattttgagtaatgaaaaaatttctcttaattgcaaagatagagagaagctaaaaatcccttttcaggttatagaagtttctgtcaggatataaaatttagaacttcagcagccatttggggactattgataaaattaattacggagaaatagctaacatgctagtgatagcagagtataaaataaaaagagcccggatctgtgttgtctttgagttgctgagcaaatcttgatattaccccatctctgaaaaacttattatgatagataataaattacctttttggttaaatcatctttaatttagttttttacatatatataatatatatataatctatattatatattattatatataatataatataatctatattacatattattatatataatataatataatctatattatatattattatatataatataatataatctatattatatatatawtatatata

SEQ ID NO: 12625 - DNA, 612 bp, Homo sapiens
catttatttttcttatttcaaaaatataactagaaatataattagaattgacatgacatacagttattccataaaagaaggtggtaaaaacaaaaatacagttgtcccttgscatagccagattattagttctaggattcatgtatataccaaaatctgcacatactcaggtccctaattgaccctgtaaaacccacagaggtttcacatccatgaatattgtatttccatctatgcttagttgaaaaactgcatgtacaagtggaccctcacagttaaaattcgtgttgtccaagggtcaactgtaaagtttaataaaatatttcctcaaaaagaaatgcttcatggtgaaaataggtgtattttacttttagaataatattttaggaatcatgattggatgaaagcagaaactgctggatataattagaaagctcattgtcatcatcgttcctaccattcaatgagtgttatctattcattgcatgcacccagcaccataggtctcatgttacattctctgtatcctttaacctttaataactaccctaaaagtattatagttttttttaattgagaaaactaagtccattagaaattaattaattttcc

SEQ ID NO: 12626 - DNA, 612 bp, Homo sapiens
catttatttttcttatttcaaaaatataactagaaatataattagaattgacatgacatacagttattccataaaagaaggtggtaaaaacaaaaatacagttgtcccttgccatagscagattattagttctaggattcatgtatataccaaaatctgcacatactcaggtccctaattgaccctgtaaaacccacagaggtttcacatccatgaatattgtatttccatctatgcttagttgaaaaactgcatgtacaagtggaccctcacagttaaaattcgtgttgtccaagggtcaactgtaaagtttaataaaatatttcctcaaaaagaaatgcttcatggtgaaaataggtgtattttacttttagaataatattttaggaatcatgattggatgaaagcagaaactgctggatataattagaaagctcattgtcatcatcgttcctaccattcaatgagtgttatctattcattgcatgcacccagcaccataggtctcatgttacattctctgtatcctttaacctttaataactaccctaaaagtattatagttttttttaattgagaaaactaagtccattagaaattaattaattttcc

SEQ ID NO: 12627 - DNA, 612 bp, Homo sapiens
catttatttttcttatttcaaaaatataactagaaatataattagaattgacatgacatacagttattccataaaagaaggtggtaaaaacaaaaatacagttgtcccttgccatagccagattattagttctaggattcatgtatataccaaaatctgcacatactcaggtccytaattgaccctgtaaaacccacagaggtttcacatccatgaatattgtatttccatctatgcttagttgaaaaactgcatgtacaagtggaccctcacagttaaaattcgtgttgtccaagggtcaactgtaaagtttaataaaatatttcctcaaaaagaaatgcttcatggtgaaaataggtgtattttacttttagaataatattttaggaatcatgattggatgaaagcagaaactgctggatataattagaaagctcattgtcatcatcgttcctaccattcaatgagtgttatctattcattgcatgcacccagcaccataggtctcatgttacattctctgtatcctttaacctttaataactaccctaaaagtattatagttttttttaattgagaaaactaagtccattagaaattaattaattttcc

SEQ ID NO: 12628 - DNA, 582 bp, Homo sapiens
agcttctcggttctcttcctattttactacccattttttctcattctcgtttggtggtttccccttttctcccctacttaattttggagtggcccagaagtgaggagttattcatcttttctttatactcactcccttgctcaatctagtctaatctcacaccttaaaaatgtcagtactattatgactcctaatttcaatctccaacctggatttctcctttgaattccacagtccatatccaactgtgtacttcgtaacactgcgtaagtatctaacagacgtttcagatataaatacctgcaacaatgaaattctgattaccctgcacgaacctcctccactcatggtcttttccacttctttaatggcagctacatasttacaggtaccgaaaacaagaaacttggaggcacctcttgcttcagtggatagatatggaaaaagtgaaaaccacttttttgaaaattgaatttgaagttccatcttctcatttcacaatacagtattagcagattatatatgccaagaaatattctatgttagtaaacttgagatgaaaaaatactcttatgtcaatgt

SEQ ID NO: 12629 - DNA, 1745 bp, Homo sapiens
tagccatctcctttcaacctttccaatattcttctcattacagaagttggtgttttcctcgcacttctaaattccctttccaaattcctggggagctctcacattaccactcagaatgaataatattttcctagaaaataactgtcaagcaaaccacaaaagtcaatgggcagctatctgagcagtcattattgccacttgaaattagcttccaagtgtgaccataattaacatcttgagaagcatcaacagatggctttaagaaaccaacatgacaacaacactgaaacccataagacatacctttagtatctacaaaataccttgaagaatagcagtttttccttactaacaatttacaataaatatatattttactaaaatcttaacttgggctaattagcccaagttccctagaaaaaacacatgaggcatggatcaacattctgtgctttacttgggaaacccaacacagtgagagtgaggaaaaagggaaatgcagaaaggtcggagacacaatgcattcagcaccaaacwtcctaatgagctataaagacatacagcaggtcatatgggcagctgcatccaatgggcacatggtacttctccagagacattgtaccaggctactactccttgaagaagtccataggaagaaggaagaagggggaattcacctacccagtaatttcctttgtttcccattgctgaaatttggcccatgggttaacttttccatttttctgggaggtatatggggtctcattggcagtcatttgtgatggtatattcctccacaggagatgtcctatctcattcaaacccaaaagtagctataacagccagaaattttaggcatatgcttgcttggcctaacctgcatgaaacagctaaagggcattcacttcccttggcttaggtagcaagtaggcagaaaaaaatataaggcggcccatcagagttttgtccaatcacagtgcattctagagtttttatctgttactaggtgctatgatttgaatgcatcctccaaaagttcatgtgttggaaacttaattgccattgtatcagtattaagaggtagggcctttaggagatgattaagtcatgaggtatgtgctctcatgagtgatttattgccgtcatcctgggagtgagatagttatgatgggagtggctcttgatgaaaggatacgttcagttctgtttctctctgtgacacaagcacttgcttcaggatcctgcccatctgccatgggatgacccccttccagaactatgagtcaaatacattgctgtttattatctagaatgcggtattctgtttatagcaacagaaaatggactaagacaccaggtaaactaaattgacagcagtggactcatagtcttgcttctctaatttatggtgtattattgctcatcagaaagaaccttgtctccatttatttgtcattgctcttgttactaacatgaagtggatagccatcaaatggattgggcacctggggtttttctgtaatgccttgtcctagctcctttacttaaacggccctaagtattctaatggtctttgatatactttttgaagcttatacacagaaaaaaatttaaaatttaataaaagaaattatacaggtttttatagtttcaagactccatgacactcaagatttcttaaaactgaaagaaatcccaattttcctgtctgtccccatggtaggggagaaagaagtagataagag

SEQ ID NO: 12630 - DNA, 1745 bp, Homo sapiens
tagccatctcctttcaacctttccaatattcttctcattacagaagttggtgttttcctcgcacttctaaattccctttccaaattcctggggagctctcacattaccactcagaatgaataatattttcctagaaaataactgtcaagcaaaccacaaaagtcaatgggcagctatctgagcagtcattattgccacttgaaattagcttccaagtgtgaccataattaacatcttgagaagcatcaacagatggctttaagaaaccaacatgacaacaacactgaaacccataagacatacctttagtatctacaaaataccttgaagaatagcagtttttccttactaacaatttacaataaatatatattttactaaaatcttaacttgggctaattagcccaagttccctagaaaaaacacatgaggcatggatcaacattctgtgctttacttgggaaacccaacacagtgagagtgaggaaaaagggaaatgcagaaaggtcggagacacaatgcattcagcaccaaacatcctaatgagctataaagacatacagcaggtcatatgggcagctgcatccaatgggcacatggtacttctccagagacattgtaccaggctactactccttgaagaagtccataggaagaaggaagaagggggaattcacctacccagtaatttcctttgtttcccattgctgaaatttggcccatgggttaacttttccatttttctgggaggtatatggggtctcattggcagtcatttgtgatggtatattcctccacaggagatgtcctatctcattcaaacccaaaagtagctataacagccagaaattttaggcatatgcttgcttggcctaacctgcatgaaayagctaaagggcattcacttcccttggcttaggtagcaagtaggcagaaaaaaatataaggcggcccatcagagttttgtccaatcacagtgcattctagagtttttatctgttactaggtgctatgatttgaatgcatcctccaaaagttcatgtgttggaaacttaattgccattgtatcagtattaagaggtagggcctttaggagatgattaagtcatgaggtatgtgctctcatgagtgatttattgccgtcatcctgggagtgagatagttatgatgggagtggctcttgatgaaaggatacgttcagttctgtttctctctgtgacacaagcacttgcttcaggatcctgcccatctgccatgggatgacccccttccagaactatgagtcaaatacattgctgtttattatctagaatgcggtattctgtttatagcaacagaaaatggactaagacaccaggtaaactaaattgacagcagtggactcatagtcttgcttctctaatttatggtgtattattgctcatcagaaagaaccttgtctccatttatttgtcattgctcttgttactaacatgaagtggatagccatcaaatggattgggcacctggggtttttctgtaatgccttgtcctagctcctttacttaaacggccctaagtattctaatggtctttgatatactttttgaagcttatacacagaaaaaaatttaaaatttaataaaagaaattatacaggtttttatagtttcaagactccatgacactcaagatttcttaaaactgaaagaaatcccaattttcctgtctgtccccatggtaggggagaaagaagtagataagag

SEQ ID NO: 12631 - DNA, 622 bp, Homo sapiens
ttacaaacatgagagttctcactgatagaccataattagcagagaaatatgcaaggtctccttagagagagctcatagctccaaaaccagcagcatctgactataaactgctctattaatgtaactaaagaaggaatacatccataaaaaagagtcagctaaagaggtgttgaaaaaggagccaytataggcatattgtggcaatacccaaattagctaggccaggagactcttgcttgaggacatgggaacatgtgaacaagagtatcttcatagtggattagagccatctaagctttattagcaacataaagccacttcaaatttgttctaaggttcagagaagttaagtaaattattctaggttagttagttatctttcagttgtagagtcaggattcacaactgtgagtctttcaaaaaaacaactgctgccagaactgtatggctttaagctactgatgcttacttccttcagctgacttattattcttaaaatgtgaaaatagtcaaaatgttataatgtttaaagtctaataatatgttgaacctgctctaaggaagtgtcaacatatatatgaacaaaattcagatgtgtatctgttacacatacatatgtagt

SEQ ID NO: 12632 - DNA, 954 bp, Homo sapiens
gcagcgataaatatacgtgtgcatgaaaagccccatttttatwgtttgcatgaagacactttacacaggcaccaaggggtcctgctagacaccatgtgtggtttgttctatactctatccccagcccttagggcagtggctggtccacataagtgcctaataaatagttattgaataaataagtgaatgtaattatctttctatctttgtgaatgtacaaatgcacattcatttttgtcgtgaatatgcatattcagccttgtgccctttttgtcagttttcattataagaataacactgctatatttatctttgtaaaattactttgttttattttatttatttgaggtttaattcccaaaaatcggaataagtaggccaaaaggtagaagcatttctataactcttgtaatatatgggcagattattttccagaaaaaaattgaaccaatttgcattacaaatcacaatgtatagctatttttcttcagtattactgatattactttattatccccattgccattgcattttaataggttattttaatttgcagttctctaaatagtgcctggaaataatagttcctccataaatatttgctaaatgaattgatttcctatgggcccatttattttcataaacgtgatcatttaccttctgcatttctttcattgttcaccatccttttttcatcacagataacaagttattgagtagaattcaggcattgatatattcttgtatgttttagatatctggttgccattcaaaacatttaaatgctgtcttttcccctattacattagtcaaatcacctatttgagaatttctttctgatatttactttatatcaatgtgaaatggcgaaatattttgacaaatcatcttaaaactccttttaacctttaaatcattattgtctatttcttctgaatactcagtttttaaaat

SEQ ID NO: 12633 - DNA, 954 bp, Homo sapiens
gcagcgataaatatacgtgtgcatgaaaagccccatttttattgtttgcatgaagacactttacacaggcaccaaggggtcctgctagacaccatgtgtggtttgttctatactctatccccagcccttagggcagtggctggtccacataagtgcctaataaatagttattgaataaataagtgaatgtaattatctttctatctttgtgaatgtacaaatgcacattcatttttgtcgtgwatatgcatattcagccttgtgccctttttgtcagttttcattataagaataacactgctatatttatctttgtaaaattactttgttttattttatttatttgaggtttaattcccaaaaatcggaataagtaggccaaaaggtagaagcatttctataactcttgtaatatatgggcagattattttccagaaaaaaattgaaccaatttgcattacaaatcacaatgtatagctatttttcttcagtattactgatattactttattatccccattgccattgcattttaataggttattttaatttgcagttctctaaatagtgcctggaaataatagttcctccataaatatttgctaaatgaattgatttcctatgggcccatttattttcataaacgtgatcatttaccttctgcatttctttcattgttcaccatccttttttcatcacagataacaagttattgagtagaattcaggcattgatatattcttgtatgttttagatatctggttgccattcaaaacatttaaatgctgtcttttcccctattacattagtcaaatcacctatttgagaatttctttctgatatttactttatatcaatgtgaaatggcgaaatattttgacaaatcatcttaaaactccttttaacctttaaatcattattgtctatttcttctgaatactcagtttttaaaat

SEQ ID NO: 12634 - DNA, 487 bp, Homo sapiens
ccttccatagaattgttgaactttagcagcaaatgacattcaaatcttgttgccatagatatattaaagcttctggcaggtcactgcygtgtgtcatgatctgtctctgggtaacacattcttgtctagggaagaaatacctgccaggagcagaatggggattaacatggtgtcagcattgcggaaaagtcaacatttgttctgtagttcactgcaagactaacgaaaatgaaaggcaagtctaatagagtaatagtaaggaacaaagtaatcaaggtgaaaggagggctgggttcctaaaattatttcattttatacttcttgtgtattaatttgctagggctgccgttacaaagtatcacaaactgggtagtttaaacccaaagaaatgtattatttcacagttctggaggctagcagttccagatcaaggtatgtctttgtccacttgtgttgctataaaataatacctgaggtggggtaattt

SEQ ID NO: 12635 - DNA, 554 bp, Homo sapiens
agtgtgcacaaacaaaaaaaaaaaaagaaaaagaaaaaagccactattttttttccagtaacatatgttatttctttctcaataaattttaaccactgatttgatatatgatttttgaacatccttgaataaattttattttaaatagaataaaattaggttggattttacttttttaatagacatttttctaagacaggcagagtttgaatttaaatacatctgctgcatataatatatgtctaatagtcctttttttctcaaagctaatatttccattcttcctaaataggcaataaaatgaaagaaaaaatacaaagtacttgagttttataagtgaaataatgcttctgtgaatattgataatgctttgcaattgcttagttttatctgggaaatacttttaaaggatagaacatttaagtgtgataatttaaagcttcttggttttagtgtttagaaaaattgaacttatacgtattctgaaatcactttttttaccaaacttgcactcwtatcatttcctcttttcaatatgtcaaaaagataaaagc

SEQ ID NO: 12636 - DNA, 548 bp, Homo sapiens
atcacaatattcagatatattacataaagagaatctgatgattcacacacaattcttcctcctaatctctgaacctagcactatggatccaagaacgtaatcatttgattggcttaatataggttaaagattactcttttggctcctagggcgtaatccagtatatacacattacatggatttagagcattggagcaatatttgaatttgacaactagaaggaatatgaaagatgacaagaggtaatgacaatagtcacagtagtgctgatattcacttttatatgactatcaggagatttggtgaaatatcagtttccagtcattaatcagtgtgtataacttaagttctgattatggcactaaattaactttctattgatctccaatgaagacattaaatttgtatggggatgccttgcacatggactaaacacaatwtcttgcattattaaaatgttcaagcatttacaaaagtagataaacaaagattctcccattttacctatctctcagtatcaacttttaacaattcatagcagatcatgt

SEQ ID NO: 12637 - DNA, 542 bp, Homo sapiens
tgtagaaagaagagataataacagtacctgctcatagggttatggtgttgatgtaatgagtttatccatgaagagagcttagcacagytcctagcacatagtaagtgtttgattgatgttagttattatcaatacagttatttggtaaatatgtttattcatccacctagaactctataatcataacgttatctaagaagaagaaagaggtgtgagaactaacatttattgagtactgtgagataggtcttggctgattgctatttattatcttattaattctttttatgatcttaggtagtagatactatctccacagatgataaaacaaattctaaaaaggcaagaaactcagaaagtgaccatcagctaagttaggagagctagtgtcagccaactacaaatccatgcttgggcttaagggttggggatgtagatttaatttcacctacatctcttataaactctctgatcttgggcaatttaacttctttaaactaagtggatactgatagacactacctcacagatatggcagaaat

SEQ ID NO: 12638 - DNA, 542 bp, Homo sapiens
tgtagaaagaagagataataacagtacctgctcatagggttatggtgttgatgtaatgagtttatccatgaagagagcttagcacagctcctagcacakagtaagtgtttgattgatgttagttattatcaatacagttatttggtaaatatgtttattcatccacctagaactctataatcataacgttatctaagaagaagaaagaggtgtgagaactaacatttattgagtactgtgagataggtcttggctgattgctatttattatcttattaattctttttatgatcttaggtagtagatactatctccacagatgataaaacaaattctaaaaaggcaagaaactcagaaagtgaccatcagctaagttaggagagctagtgtcagccaactacaaatccatgcttgggcttaagggttggggatgtagatttaatttcacctacatctcttataaactctctgatcttgggcaatttaacttctttaaactaagtggatactgatagacactacctcacagatatggcagaaat

SEQ ID NO: 12639 - DNA, 542 bp, Homo sapiens
tgtagaaagaagagataataacagtacctgctcatagggttatggtgttgatgtaatgagtttatccatgaagagagcttagcacagctcctagcacatagtaagtgtttgattgatgttagttattatcaatacagttatttggtaaatatgtttattcatccacctagaactctataatcataacgttatctaagaagaagaaagaggtgtgagaactaacatttattgagtactrtgagataggtcttggctgattgctatttattatcttattaattctttttatgatcttaggtagtagatactatctccacagatgataaaacaaattctaaaaaggcaagaaactcagaaagtgaccatcagctaagttaggagagctagtgtcagccaactacaaatccatgcttgggcttaagggttggggatgtagatttaatttcacctacatctcttataaactctctgatcttgggcaatttaacttctttaaactaagtggatactgatagacactacctcacagatatggcagaaat

SEQ ID NO: 12640 - DNA, 633 bp, Homo sapiens
tgacagtccagcccggagtgaaggcacccattctgaagatttgctgtaaatgcggaggactcggatggaatacctgggagctgagagaagggacaaactgtccacccaaggaacagcctggcaatctttttaatgaagactgggacttggwgttgaaagcagatcaaggaaatccatatgatgctgacgacatccaggggagcgtttctcaagatctcaaaccttgggtcagctgtgccccaaaaggagacatgatctatgaccccaggtggcactatccacctcaactgataacccattattccaagatggtctttgaaacaggatagtttgatgatgctgaagattgtgtgtggagttttctgccttgtaggtggttgggcctccaggtcaagatctcttttcctttgaaggtgaaaagtcatatctgagaaaacattcccagtgatccctcatctgggatacacagaccagtgttcaataaccctcctattgttctccccagtctgctgttcttaatgggatcctccttggaatgcgtgtgttctttgtaaattaaggtttaaaaaaaaggagaaagaaaaagaaagtaatgtcaaagcccgcaattacttttgcatcagcgtagtctgc

SEQ ID NO: 12641 - DNA, 633 bp, Homo sapiens
tgacagtccagcccggagtgaaggcacccattctgaagatttgctgtaaatgcggaggactcggatggaatacctgggagctgagagaagggacaaactgtccacccaaggaacagcctggcaatctttttaatgaagactgggacttggagttgaaagcagatcaaggaaatccatatgatgctgacgacatccaggggagcrtttctcaagatctcaaaccttgggtcagctgtgccccaaaaggagacatgatctatgaccccaggtggcactatccacctcaactgataacccattattccaagatggtctttgaaacaggatagtttgatgatgctgaagattgtgtgtggagttttctgccttgtaggtggttgggcctccaggtcaagatctcttttcctttgaaggtgaaaagtcatatctgagaaaacattcccagtgatccctcatctgggatacacagaccagtgttcaataaccctcctattgttctccccagtctgctgttcttaatgggatcctccttggaatgcgtgtgttctttgtaaattaaggtttaaaaaaaaggagaaagaaaaagaaagtaatgtcaaagcccgcaattacttttgcatcagcgtagtctgc

SEQ ID NO: 12642 - DNA, 633 bp, Homo sapiens
tgacagtccagcccggagtgaaggcacccattctgaagatttgctgtaaatgcggaggactcggatggaatacctgggagctgagagaagggacaaactgtccacccaaggaacagcctggcaatctttttaatgaagactgggacttggagttgaaagcagatcaaggaaatccatatgatgctgacgacatccaggggagcgtttctcaagatctcaaaccttgggtcagctgtgccccaaaaggagacatgatctatgaccccaggtggcactatccacctcaactgataacccattattccaagatggtctttgaaacaggatagtttgatgatgctgaagattgtgtgtggagttttctgccttgtaggtggttgggcctccaggtcaagatctcttttcctttgaaggtgaaaagtcatatctgagaaaacattcccagtgatccctcatctgggatacacagaccagtgttcaataaccctcctattgttctccccagtctgctgttcttaatgggatcctccttggaatgygtgtgttctttgtaaattaaggtttaaaaaaaaggagaaagaaaaagaaagtaatgtcaaagcccgcaattacttttgcatcagcgtagtctgc

SEQ ID NO: 12643 - DNA, 549 bp, Homo sapiens
tttcctataactttgtttcctggaagagactattaaaactcatttgatagatatgaaaaattgaggccaagaaagtttagatgagtaaacatcatagaactaaatgaaaaaaaaatcaattcttttatgtaaaccaaacctaattcttttatttcttgttgtcttgaagttgaataaaaaataattaattagttcctgatcaaactacatttgtccttttaaaattttactacccacatttaaaaatacttaagtaacactttatgagatttcagagttcttctcacatgtrctacctgacgtcgatctgaattacaaagaaaaaacatcagcatgcttctaaatcagcccacaaagggactgcagctatttcacctgtgctcccatcatctggtgaagggtataattattatcaccataaacaagcatttataatttattacatactaatataggctatgtcctataaacttataatagtttatttacacagattttataatttatgatgcattttaatatacagtacattatcctattttaactcca

SEQ ID NO: 12644 - DNA, 549 bp, Homo sapiens
atcatgcagtatttgtctttctgtgcctggcttatatcacttaacataatgtcctcccggttcatccatgttgtcacaaatgacaacatttgtgaatagtattccatgacgtatatataccacatttagtggtacatcaacatacatttagtttgttttcatatctcasctattgtgaatgacactgcaatgaacataagagtgaagatatctcctcaacgtgttgatttcactgtctttggatacatacccagtagggggactggacagcaaccttgatgtagtcttagaaccaggctgtgcatgtgaatgtgtgtgtgtatgtttatgtgtgtgcacgcatgtgcctgtatgtttgtacacattacataattgtaaactttccatcagcacaattttatattatttttgcttcatgtcacttaagaatatattatgaatatctttacatgttaaattttgggaaacctcttacgtttgctgcacatatatgatttgcttctccttactgggcatttgagtaccttgcatatttttccattttaaatg

SEQ ID NO: 12645 - DNA, 549 bp, Homo sapiens
atcatgcagtatttgtctttctgtgcctggcttatatcacttaacataatgtcctcccggttcatccatgttgtcacaaatgacaacatttgtgaatagtattccatgacgtatatataccacatttagtggtacatcaacatacatttagtttgttttcatatctcacctattgtgaatgacactgcaatgaacataagagtgaagatatctcctcaacgtgttgatttcactgtctttggatacatacccagtagkgggactggacagcaaccttgatgtagtcttagaaccaggctgtgcatgtgaatgtgtgtgtgtatgtttatgtgtgtgcacgcatgtgcctgtatgtttgtacacattacataattgtaaactttccatcagcacaattttatattatttttgcttcatgtcacttaagaatatattatgaatatctttacatgttaaattttgggaaacctcttacgtttgctgcacatatatgatttgcttctccttactgggcatttgagtaccttgcatatttttccattttaaatg

SEQ ID NO: 12646 - DNA, 566 bp, Homo sapiens
aatttaagaaaaaaagggaaaaatracatggaaaatgacattcattacggtttttaaaaacctcacaaaacatacacaaaactcattttgtttggtttttattgtttttataacattataaaaggttatgctcaaaacaatataaagttatacattaatatagaggaaaagctaagagtatacgtaaaaataatatgagtagtagttatgtttgggtgatgtcttctctccctgttgctcattcaatttctaagtttctttcaatgagcatatattacttttataataaaaatgtataaactttaacagcacatagtatattcaaatatattttacttacaaacaaagaaaggttagttattgaactaacactttaaacatttcggtaaatgtcggtttatattacagctttaactgagagttaaattattacagttaaagaattaatgtcccttgtttatttcctctctctttcaccccacctccccatcatgtgtgcttacaggctgctatggtctgaacatttttgttcccccagaatttatatgttgaaatcctaaactcca

SEQ ID NO: 12647 - DNA, 519 bp, Homo sapiens
aggtacattgtgtgggaaaataaagtcatagttattcattgattgtctgaacatttcccaactgctttttctctgtatttttttttgtgtgtgcgtcagatgttgtggcaccaaataaagaagatataggctctgttcctacgttgttcattaccagcatgccttagtatcccaatatttcatcatttttgttacagacttttaaaaatccactggtagacagctgggaagagggaggaggccracatttccaggctggttggaatacccagtcactatcatattatgctctctagctttcatgtgccaattctgatcaactagggaatggcttgtctagaacactgtgtgtaagttattgggatcattgagatgatcagttggtaatgtctattctagacacagaaaggaagtatagtggtctagatcctctgtattttcttccctgtaatagggcaaaaataaaagctagaataacagacctagtttttgatgttgattccagagggggcactgggc

SEQ ID NO: 12648 - DNA, 502 bp, Homo sapiens
tgttctagattacattatgctgatgctgcacaactctgtaaatatactaaaagcaacagaattatgcactttcaatgggagaattatatagtgtgtaaattataggtcagtaaagctatttttaaatggrtaagaggcatgcacataaaataagaaaaaaataacattagatactatgcttttctgccaaaatgcttggaatacttttaaatatctttttaaatataagggatttacattagccaggaaggacaatgaagtgtatccccaaccccctctcagtttatggctgagaaactggctcatcaaatcagaacctccaatctactatatttatggtctgaatatttttaatgtccccttttattcatcccaccctccgtcacacacacacaaacatacaatgcacaattgtaggttagaacaatgaaatgctttttaaaaaactgggctcactttttaagtttttctcaaaaaatgaaataaaagttgataataccca

SEQ ID NO: 12649 - DNA, 502 bp, Homo sapiens
tgttctagattacattatgctgatgctgcacaactctgtaaatatactaaaagcaacagaattatgcactttcaatgggagaattatatagtgtgtaaattataggtcagtaaagctatttttaaatggataagaggcatgcacataaaataagaaaaaaataacattagatactatgcttttctgccaaaatgcttggaatacttttaaatatctttttaaatataagggatttacattagcmaggaaggacaatgaagtgtatccccaaccccctctcagtttatggctgagaaactggctcatcaaatcagaacctccaatctactatatttatggtctgaatatttttaatgtccccttttattcatcccaccctccgtcacacacacacaaacatacaatgcacaattgtaggttagaacaatgaaatgctttttaaaaaactgggctcactttttaagtttttctcaaaaaatgaaataaaagttgataataccca

SEQ ID NO: 12650 - DNA, 2492 bp, Homo sapiens
  misc_feature (1)...(2492): n = A,T,C or G
aaaaaaagtacaaatatggcttctgcatctaagtaagatgtaataagtagcagaaagttattactcctactgcaacataaggaattgctcacttttcctcccgccgtggacggactgttcctgggtacggtagttttatatcattctcaggagatatcctgcaagatcaagcagccagcttgtccagttctatgaggcacttctttgtatttgtgtttcctccttcctttgcctcacttcctcttttcgccttattcttatttctctgggattgcgtctctcccccaacccccataaaagtaacagcacatacaattttgattcaagcattgttattgttttctasggaacccaggacaagttattagggaattaatttataaatctgtctccatagttacgagggttaggagttttatttagtaaaataggagccaagaaagtttcattttctagatttttcacttcctaactctcaactattagtagtaatagtacaaaccatttgagactcgaatcccctttccagcctgtttcttttaataaggcagacattatttaaagggcactgtttttgataagttcctatgcattgcctcctgagggaggccctctttttttatgtgagttgaaaaagcatttaaccctaacaaactgtgtttagaacagtattttttcactgaattttttgaatgcctaagagggcagctttcatgttggatgataaccaagacaagcaagttttctccaggtcaggtataaattcatctgaagcagacaatctttctaagaatgttgatgatagcattctacaggagcaagagggagaggagtgaggaaggttggaattagctatttaaggaaggcagtggtctattctgtgtcaatgaaaagaggtcaaattctataaaatatttgaagagatttattgtgagccaaatatgagtgaccatggcccatgacacagccctcaggagaccctgagaacatgtgcctaaggtggtcagggcacggcttggttttatacattttaggaagacatgagacatcaatcaaatacatttaagatatacattggcttagtccagaaaggcgggacaactcgaagatgaagggtggttccgggttataggtagatttaaaaatgttctgattggcaattggttgaaaagtgaaatgtgtaggttatgataagaggttgtggagagcaaagtttgatcatgtagatgaaacctccaggtagcaggattcagagagagtagattatacaatttcttatcagactcagggtctgtgttgatgtaaatgctgtcggcttttcntgaatccaaaagggaggagagcataatgaggcatgtctgacacacccacccttcccatcatggcctgaagtagtctttcaggttaactctggggtcccctggctgaggagggagtccattcagatggttgggtagggaggtgcttagaattttatttttggtttccacctgaatctttagtgttgtccaaagggaccatggagtagaagcagtgaaagaataacatataggtgcagccataaaaataaaatgagttcatgtccattgcagggatatggatgaagctggaaaccatcattctcagcaaactaacacaggaacagaaaaccaaacaccacatgttctcactcataagtggaagtcaaacaatgagaacacatggacacagggaggggaacatcacacactggggcctgtcaggggttggagggaagaggagggagagcattaggacaaatacctaatgcatgtggggcttaaaacctagatgatgggttgataggtgcagcaaaccatcatggcacatgcatacctatgtaacaaacctgcacattctgcacacatatcccagaacttaaagtaaaattttaaaacaatggaaatttgtctttacttataaaattgaaacaaaagtttcctctttataatattgaaaaaaagggaataacttataggcacaacatgggcaaattcataggattctttttgtttgtttcagtcaagttttttacatataaacttagtagaagttcaatgtgaagtatctgtgtaaaaggacgtgttctctctcttaatgagaattcttaaggaattctcatttcttttctcaaaacaagttgagataagaaacgagaattcctgatacctagttacagtgctaagtagcatccacccctggaagcagtataagttaggtctgtgcttcccaggatagaccatcagaccaacttattattgttattattgttgttgttttacagatcaacccctgtattacatcttttctatttatttatttacttttgaccatctagactccccacttttggtcaaagcactctaaatttttactaccactccaatatagatccatgtttaggagtagaattaatccctacttctggatctagggttgaacatgggatcctagtctagccaattagtatctcc

SEQ ID NO: 12651 - DNA, 556 bp, Homo sapiens
ctccttatggccaaggacctcaaaataaatcgaaagctaagggaagtatttcggccagaataaagcttatgtagcccaggtgtttttgatgatttagcaagacaacaggacatctcttagagaaggcactcaaccaaggaatagaactcagatggtggccagctggtcagcagcctatttctggtaagtactatctcatgagatcatctgttaacgtccttctggtttaagactcatacatcttaagaaccacaycatacatatttgaaaggatgcttattttccctttttttttgtttcttagaaggtggcaaatctatgaatgggatcaagttattaatcaacaatttaagaaggaaaaaggggaggggacaaaacactctctggatttccacaaacaacttctttttttaaaaaattgaaaatagttatgggtacatagtaggtatgtatatttatggggtacatgagatattgtgatgcaggcatacaagatgtaataatcacatcagggtaaatggggtatccagcacctcaagtatttataatttctttg

SEQ ID NO: 12652 - DNA, 1093 bp, Homo sapiens
tgcattcagctgaaccccgtcactgcaaacgccacgcacaatgaaactccaccataaaagaaaacagagaaaaaagggagtaggttgggggaaagccccagtctgagccgccaattttggggaagtggtctagctggttatataatcgctttagagggagaaggagggtgagcattgagcttgttcgattaagtgttttctgtgcagtcaaagccgaacgaaagtgtctgggataaagaaactacctgtgccaggtctatccttcgacctcaggagctgggcccccggtgtaattctgtcccgactgtggggtgtaaacacacgatgccacgcaggtgtagcaggagccatcgttagcgggcaatgtaatgacaacggaacgcagacctgggcaatgcgcgctgcgcccaaggggcaagcgagtggcagggtcgcttattctcccagtgctcggcgctcgcagacccggagccttccgcccagcgccctgtgtaggtagcgagtgtcgggagaaatcatcactacgaattcgtttccatataggggcaacgccaggcggggcacaatgatctgtccttgaggacaaagagtgattccggagagagcaggtttttgtccctccacgcaggtttctctccccagaccccagccttcggcttcctcccttcctgtcacggacgcagccggagaaactggggcccagacgcggagctcactccgccagaaaccctgggtcccttcccctacgctggcaggctgggtccggttccatcgtcgcggctccgtttatccctccarggagcgcgggcagagcgccgagcgcggcgcagggactggagttctcgccagcttcgggttctttctccccggagctgcccggggggtctcggcctcgggcgctcccgccgccgtcctgttcccctcagggttcatgtcctgttcccggggccccagaggtcccgtctgagagcggcccccgcgagcttgggtgtcgcggaaccaccgctgtcggaagccgaggttacacaaacgccacgggcaggagcgggagggcaccggcggcggctgcgaggccgggccctgacatgccgct

SEQ ID NO: 12653 - DNA, 1145 bp, Homo sapiens
gagatgtccagaatatgcaaattcacagagccagaaagtagattagtggttgccagggcctgggagagtaagacaggaataggagtgactgctaagagagtatgcagtttcttttttgggataatgaaaatgttctggaattagcagtaatggttgcacaaccttgtgactatactaaggactactgaattgtacattttaaaatggtaaattttatagtaagtgaattatttctcaataataacaaatttaaaagcctaagtccaggactaggaccaattataccagaatagctacactggaagaagacggtattaatatagccctattttcaattaaggtttcttcaattgtatattctctccaagttatacttcttaagggcacatacagacactacattcctaaaattctttatttgggcatgtagctatgatttctcagaaatagcacaggtagtagctcctctataataataggagtgaacaattgttgagtataatattcctggctctgttctaaaatttttgcatgaatcatctcatgaaatcctcacaaccacataagatagtgtggctatcagtctggtgaattcaatgatgtaaaaacaaaaaaagtgagttatataatgcaaattatctgagaaacagtgagatattagcaacaagatctacttggctgatggattgaagccactgggaccaaaagggccttgagggaacctttgcataatatctctcagtaggaggctctcctgaaattatttctagaagggaggttcagtmagggcttgacaggaaatctgtgcttcctctggtcctgtgaagctgtattcctctgagacaggaccctctagggaactcctgcctggtctgcttctcccgaatgatgcattcagagttggtgaggccctacttttaggactcctgtctctcacacgtataattttttaaaacttgctcacaattctattttaacaatttctacgttttatataaccttgaaggcccagggacacaattattgctgtttgccataaaaactggaatgctacaggattacatgaagagggtaagactcttgaacaggcagagccagaaaacagctacaaatttaaagctgaggagacccatcacaatcccaga

SEQ ID NO: 12654 - DNA, 1145 bp, Homo sapiens
gagatgtccagaatatgcaaattcacagagccagaaagtagattagtggttgccagggcctgggagagtaagacaggaataggagtgactgctaagagagtatgcagtttcttttttgggataatgaaaatgttctggaattagcagtaatggttgcacaaccttgtgactatactaaggactactgaattgtacattttaaaatggtaaattttatagtaagtgaattatttctcaataataacaaatttaaaagcctaagtccaggactaggaccaattataccagaatagctacactggaagaagacggtattaatatagccctattttcaattaaggtttcttcaattgtatattctctccaagttatacttcttaagggcacatacagacactacattcctaaaattctttatttgggcatgtagctatgatttctcagaaatagcacaggtagtagctcctctataataataggagtgaacaattgttgagtataatattcctggctctgttctaaaatttttgcatgaatcatctcatgaaatcctcacaaccacataagatagtgtggctatcagtctggtgaattcaatgatgtaaaaacaaaaaaagtgagttatataatgcaaattatctgagaaacagtgagatattagcaacaagatctacttggctgatggattgaagccactgggaccaaaagggccttgagggaacctttgcataatatctctcagtaggaggctctcctgaaattatttctagaagggaggttcagtaagggcttgacaggaaatctgtgcttcctctggtcctgtgaagctgtattcctctgagacaggaccctctagggaactcctgcctggtctgcttctcccgaatgatgcattcagagttggtgaggccctacttttaggactcctgtctctcacacrtataattttttaaaacttgctcacaattctattttaacaatttctacgttttatataaccttgaaggcccagggacacaattattgctgtttgccataaaaactggaatgctacaggattacatgaagagggtaagactcttgaacaggcagagccagaaaacagctacaaatttaaagctgaggagacccatcacaatcccaga

SEQ ID NO: 12655 - DNA, 521 bp, Homo sapiens
aatataaatgtaaaggttgagattaaatagctgaaaaatcaggcagtgagctcctttctggctgcatatggaagacaaagcctcttctctgtcctttcccagtactgcattttgtaagtgtaatatttacaaagagaccatttgcaggctctgagttatccagacaccacaaaaggggaaaagctcttgtaaacatgtgggcatctttggccacaaggtggcgctaccttccgcctaagcagggccagaggctcattataaacccracctacacccctgggactaggcggcagggacctcatactgtctaggtcctgggtccatcatcagtgtccagctgcatatggagcggtcacctaggggttagggtgggagagtcggcaggggttggtgtaggtgaattagaatgtttactgggccagcccaggcacagtggttcacgcctggagtccctggccgacacaggaggatccctggagcccaggaggtagaagcttcagtgagctgtgatggagccactg

SEQ ID NO: 12656 - DNA, 521 bp, Homo sapiens
aatataaatgtaaaggttgagattaaatagctgaaaaatcaggcagtgagctcctttctggctgcatatggaagacaaagcctcttctctgtcctttcccagtactgcattttgtaagtgtaatatttacaaagagaccatttgcaggctctgagttatccagacaccacaaaaggggaaaagctcttgtaaacatgtgggcatctttggccacaaggtggcgctaccttccgcctaagcagggccagaggctcattataaacccgacctacacccctgggactaggyggcagggacctcatactgtctaggtcctgggtccatcatcagtgtccagctgcatatggagcggtcacctaggggttagggtgggagagtcggcaggggttggtgtaggtgaattagaatgtttactgggccagcccaggcacagtggttcacgcctggagtccctggccgacacaggaggatccctggagcccaggaggtagaagcttcagtgagctgtgatggagccactg

SEQ ID NO: 12657 - DNA, 521 bp, Homo sapiens
aatataaatgtaaaggttgagattaaatagctgaaaaatcaggcagtgagctcctttctggctgcatatggaagacaaagcctcttctctgtcctttcccagtactgcattttgtaagtgtaatatttacaaagagaccatttgcaggctctgagttatccagacaccacaaaaggggaaaagctcttgtaaacatgtgggcatctttggccacaaggtggcgctaccttccgcctaagcagggccagaggctcattataaacccgacctacacccctgggactaggcggcagggacctcatactgtctaggtcctgggtccatcatcagtgtccagctgcatatggagcggtcacctaggggttagggtgggagagtcggcaggggttggtgtaggtgaattagaatgtttactgggccagcccaggmacagtggttcacgcctggagtccctggccgacacaggaggatccctggagcccaggaggtagaagcttcagtgagctgtgatggagccactg

SEQ ID NO: 12658 - DNA, 884 bp, Homo sapiens
tatgtgaaagtggaagggaggcttctgaaaaggacaaaaatgggctctaaatacattaagcatgcaaaagagcaagagacagaaaaatagaataagacctagtaaaataaaaatgaatttacagagggcactaataacaggcatttaaaattttgtttgtttgtttccttggttattaactacatattacttttaaatttataatatattaatgaaaataaggaaaaaataagggtaaagatgtttttgcattgtgcattttgagacgttggatgggaacatggcagttgaaatggaaggacttgttaggcattgttttatttgtaatcaggaagttatatctataattaaccattacgctattaagcaataaaaatatatgggtaatgygattaactttatttccataaacatacaactaaatgacttgttttgctgataagattagatcattgttgattattctccacattagtaatcttatccatataaaaatcagtacttcctataatatacaaattatagcaccttcaaccagtaacttggaatataaattcttcataaggcattttattaaaaatattccagttttattaaaaaaagtcagagtgatatttaaagtggaaattccaagtgaaatgctatttacttatctatctagacttttaatattctaaagtcaatccttggatcaagttagacctctagaaaatgccatatttgatttcacttacttagctcttacagaattacctccatttattttaattttaattttatttatttaatttgttttgagagacagggtcttgctctgtcacctgggctggagtacagtggcacagtcatagcttactgcagcctcaaactcctgggctcatgca

SEQ ID NO: 12659 - DNA, 1341 bp, Homo sapiens
taaagttatgaaatatagcttattgctataataggaaaaataagaaaacattctataaggtgataaacagggaaactgttaaattatggtacatttatatgatgactattacacagccattaaaattatattttcaaagaatatttaatgaattaaagaaataacaatgattcgttgctaagtggaaagagagggacctggagctatacttagagtgtctcaaccatgggaggaaataaacacatcaagaaagaaaagccaggaaattaatgcaatcaaatatcaggagtggtttctctgcaatcagattccaggtgattttcattttttcttaatactttttttttatatttttcacactatctacattgtgcatgtgtaacttcagagaagtccaaaaaaattaaaagcaaatgaaattgtctcctttgataaaagtgtacacatgaaagagaaagaatgcccctcaaagtctgcctttccagatgtcctgtgtagctgaattacagaccctgtaacagattttctatactggaggatgagtttgcttgtcacaaaagcatcttccagggtattccttatctacaaatattcgtaaaaggaggcctggaccttcagaatcagaagatgagtaggtataattttgtgttatctcctgtatataagtatcagtcaaaacaaactctccaagaactttatcttggaaaggttacatcagtctgagttttgttccattggatggccctttttttttttaatttttttaaagagatggggtcttgccatgttgcccaggctagtctcaaactcctgggctcaagcaatcttcctgccatccaggccaggcacagtggcacttttgactgcaaagtatgaaagcactaagagtattgctctacagaatggtaaatatgatatgcaattttaaattaatttatattaaaaggttgccaaagttatcaatgttgcttatatttcctaaaatggattatgacctaaacaatatttatgaacacctaaaactcattaaaaatctcttttccatttttaatattttatcctcatattttattgtatatgcagtcrttgtcataatgcctttcttccagagattttttacaatgcctttttttaaagattaagtagaaaactttccaagaatttcaaataattttaaagaaagaaatttatacatcagccactccatctaactcttcatattaaagatgaaatccaagtactttttaaatgacattagttaaagcttccaatgtccacggaaataaaactagtattttgcctttttggtttctccagcccagcaaagaaagaatgaaaaaa

SEQ ID NO: 12660 - DNA, 585 bp, Homo sapiens
aaaattaaattagtcttcatttaaagaataaaatagaaagtcaaattttaccttaaggcatttcaacataaaaccaattgaaatattatggcaggtaacaaaacgttatttaccagtaaatgagaaggtttaacctccaaatcagcggttcctgaagaaamatttcctaaaaacactcagttgaaattatttttttctgtcttggaatactttcttaacagacacttctttgctacaatgcagctggttaatttcctatgccctgaacataatgtaataacattggaatatccccgggtttaggatcaatatttccaagacaattatagattcaggatgaaatataaaactccccaactcggactgcatacttcttgcatacatattctagccaatggctttctacctctccctacccacgtggcatagcccaaatgtgtatatctctgctctgagatatatgcctctacttgaatcataaaattattaaagaaaataagggtccagtcaaaacaaacttcagagttggagaataacatgacagcattcaaactcttcaaattatagctaagatattaagtcttt

SEQ ID NO: 12661 - DNA, 520 bp, Homo sapiens
aaagtatgcatgtcatggatatacttagttgctcaagagtctgcacacagtgagcgtatttctacctcacaaataaaatctaggaaacaatagaaaggaagaagaggcaattactgtttgataagtacctakccctgtctgacatgatgcttttccttctcagttcttggaaagcaattttctaatatcctctttggaaatatccagtgatgttccttaagacttagagaagacgcttttgaaaacacgcagtcagttgctaaaaggatttatgtaacacgtgattttaaatgatcaaacagcagctagactatagttggtatgactgttgggggaaaaagtataaatgttttgaaatgagggaggagatagaagatatttctacaaactccaataatcccagataagacacaatttattctttcagatggcttaatctgagaatatatgccagcagtaaaacaccaaacttgaccctgatgaaagtgtcactacaaggcagaaatataatcactcgaaa

SEQ ID NO: 12662 - DNA, 520 bp, Homo sapiens
aaagtatgcatgtcatggatatacttagttgctcaagagtctgcacacagtgagcgtatttctacctcacaaataaaatctaggaaacaatagaaaggaagaagaggcaattactgtttgataagtacctagccctgtctgacatgatgcttttccttctcagttcttggaaagcaatttyctaatatcctctttggaaatatccagtgatgttccttaagacttagagaagacgcttttgaaaacacgcagtcagttgctaaaaggatttatgtaacacgtgattttaaatgatcaaacagcagctagactatagttggtatgactgttgggggaaaaagtataaatgttttgaaatgagggaggagatagaagatatttctacaaactccaataatcccagataagacacaatttattctttcagatggcttaatctgagaatatatgccagcagtaaaacaccaaacttgaccctgatgaaagtgtcactacaaggcagaaatataatcactcgaaa

SEQ ID NO: 12663 - DNA, 520 bp, Homo sapiens
aaagtatgcatgtcatggatatacttagttgctcaagagtctgcacacagtgagcgtatttctacctcacaaataaaatctaggaaacaatagaaaggaagaagaggcaattactgtttgataagtacctagccctgtctgacatgatgcttttccttctcagttcttggaaagcaattttctaatatcctctttggaaatatccagtgatgttccttaagacttagagaagacgcttttgaaaasacgcagtcagttgctaaaaggatttatgtaacacgtgattttaaatgatcaaacagcagctagactatagttggtatgactgttgggggaaaaagtataaatgttttgaaatgagggaggagatagaagatatttctacaaactccaataatcccagataagacacaatttattctttcagatggcttaatctgagaatatatgccagcagtaaaacaccaaacttgaccctgatgaaagtgtcactacaaggcagaaatataatcactcgaaa

SEQ ID NO: 12664 - DNA, 520 bp, Homo sapiens
aaagtatgcatgtcatggatatacttagttgctcaagagtctgcacacagtgagcgtatttctacctcacaaataaaatctaggaaacaatagaaaggaagaagaggcaattactgtttgataagtacctagccctgtctgacatgatgcttttccttctcagttcttggaaagcaattttctaatatcctctttggaaatatccagtgatgttccttaagacttagagaagacgcttttgaaaacacgcagtcagttgctaaaaggatttatgtaacacgtgattttaaatgatcaaacagcagctagactatagttggtatgactgttgggggaaaaagtataaatgttttgaaatgagggaggagatagaagatatttctrcaaactccaataatcccagataagacacaatttattctttcagatggcttaatctgagaatatatgccagcagtaaaacaccaaacttgaccctgatgaaagtgtcactacaaggcagaaatataatcactcgaaa

SEQ ID NO: 12665 - DNA, 548 bp, Homo sapiens
gcttgtcccattttaaccactgttcatggtacccagtaagtcagtcactgacaaagggttcatttaagagacagaacaaagccaaaatattcctcacaaatcagacgaatatccagaaatggaactggcagcattatagatcttaaatcctgatcattattgtattcatatatccatatgtagatacgggctgaaatgtttaagatggttgaacactctctgatacacacacacacacaaacacacacccgtcatctggtaggtagaaaaaaggcaataagaaaataatgaaaataaatccgccgaataaaactaattcctaataaggaatgaagcatagcagaaaaacctttagggagcgagggaaaaacagatggagaaagacaaataatgatggtaatgataatgacaatgatgtgaataaaaaataatgagaataataatgaatgttcctatgtatattttatccaaggaattcacaaggggcttatcatgtgaaaaaccctttctgcaaataaacaatttattatgggggaaaaawttgttca

SEQ ID NO: 12666 - DNA, 600 bp, Homo sapiens
tgcctgtttaatacataccaacctgcaagaaaaattccttcatggatgtgcatctcttaattttggggggtgcatgtaaagctattctacgtatttggtaagatatgcagaatcaggacatgttccaaaagattacctaacccagtcttgtaaagtacaagaacacactgaggtttcaatcagtttttcagataagctgaagaatgtctcactaggcacaggattttttttaaaaaactttcgcttttccccatgctatttatttctactttttttttttttaatcttcatctcttattcctgcactcttgggcayctttcagaatccttctctattcagtgctctaggtagcttataaattgcaatctaaccttgatatggacaatcattgagcccatttctggccacctttaagtttcagggctctcctgatcacctgttatctcttccctttccttgtccgtattattttccttctagaactgtactactgcttctctctatttgtgcaccacaacagaaagacctgctgctgatgagggcttcctgttacagatgaggttaaagtagctgaggagtagctgaacaagaccttacgt

SEQ ID NO: 12667 - DNA, 600 bp, Homo sapiens
tgcctgtttaatacataccaacctgcaagaaaaattccttcatggatgtgcatctcttaattttggggggtgcatgtaaagctattctacgtatttggtaagatatgcagaatcaggacatgttccaaaagattacctaacccagtcttgtaaagtacaagaacacactgaggtttcaatcagtttttcagataagctgaagaatgtctcactaggcacaggattttttttaaaaaactttcgcttttccccatgctatttatttctactttttttttttttaatcttcatctcttattcctgcactcttgggcacctttcagaatccttctctattcagtgctctargtagcttataaattgcaatctaaccttgatatggacaatcattgagcccatttctggccacctttaagtttcagggctctcctgatcacctgttatctcttccctttccttgtccgtattattttccttctagaactgtactactgcttctctctatttgtgcaccacaacagaaagacctgctgctgatgagggcttcctgttacagatgaggttaaagtagctgaggagtagctgaacaagaccttacgt

SEQ ID NO: 12668 - DNA, 635 bp, Homo sapiens
catattttttcctctttcagttatgaaagatattctcagactcacaaagctttaaattttattcaagacattgaaacataaaagttcagggattattcaatgatgttaactattgaatgtacacaaaaatgatcttasttgcaatctagtttgtatgctgtttcaaacatgcccaggactcccaagttcaaaggttctctctacacgtaagcggtagtcaaaaatattagttgttttattgcggacagccttaatttatataaatggaaaacatctaaaactgcaaagtacaatagtccagaaagttttcattagcaatccagttcttggacatcacagggaaactcggcagaaagaaatgataagttaattgttgaaatgtttcatattcccaggttcagtttcttacaggtattcgcacctgcctcacctgcacctctgttactctctgtgacatgttccaccaccctggacaagacaaatgtatatttgaaagaataagggtgtttgttagtgggtaggtgtgattatgggaggcaattctagtgaggaaaagatgggttggcgtatggggcagcagtgaagaaaaataaataaaacagtttatttgtagtgggactgatccctcttgctca

SEQ ID NO: 12669 - DNA, 635 bp, Homo sapiens
catattttttcctctttcagttatgaaagatattctcagactcacaaagctttaaattttattcaagacattgaaacataaaagttcagggattattcaatgatgttaactattgaatgtacacaaaaatgatcttagttgcaatctagtttgtatgctgtttcaaacatgcccaggactcccaagttcaaaggttctctctacacgtaagcggtagtcaaaaatattagttgttttattgcggacagccttaatttatataaatggaaaacatctaaaactgcaaagtacaatagtccagaaagttttcattagcaatccagttcttggacatcacagggaaactcggcagaaagaaatgataagttaattgttgaaatgtttcatattcccaggttcagtttcttacaggtattcgcacctgcctcacctgcacctctgttactctctgtgacatgttccaccaccctggacaagacaaatgtatatttgaaagaataagggtgyttgttagtgggtaggtgtgattatgggaggcaattctagtgaggaaaagatgggttggcgtatggggcagcagtgaagaaaaataaataaaacagtttatttgtagtgggactgatccctcttgctca

SEQ ID NO: 12670 - DNA, 623 bp, Homo sapiens
gctttaattttagtaatgatcttaataacaattgaaatcccttgtaaactgtctcataaatttcttatatccttgggagaggtatgatttttgcctttctttgttactctttgctttggtgaccatgaaaaggtagggctggaaaacttcagaattcctttccatctctaaaatactgtactatgctatactacaatgtaatataactcaattctttttcacatagagcataagtgcatgcatccattttttattttattcaaatgtacttctttgataaaatatactttctataaagaagacccatgttttcagtgtataataatttttattgttcatttagctaatacagattgagtaagcattatccaatacacttgattctgtggtcagtgctggaatataacatagatcttaaaattcagtgttttttttttttgtttttttgttttttttttgagacagggtctcactctgtcacccagactggagtgcaatggcgtgaacatggcttactgcagcctcaacctcctgtgctcaagtgatccttccacctcagcctcctgtgyagttgggaccacaggcacatgttgccatgcccaactaattttttaaattattca

SEQ ID NO: 12671 - DNA, 533 bp, Homo sapiens
gaacccgggaggggagcttgcagtgagtctagatcgcgccactgcactccagcctgggtgacagagcgagactccgtctcaaaaaaaaaaaaaaaaaaaaaaaaaaggccctacctgcagtcatcttagacttttgaaaaatgacctagttccagcagtggactggaacgacctcatattgacttgttaagagccacttgttacattaatttcaaggaattttgtgagcygcttccaaaaacctggcagtttgaaattggcatggagagggcatttacaccacagaaactggcaaacactacagatcagagtcttcccctccccttcccagaaagccatattcccatcacaccactttctagttctaagtcttgggatctagcttttgtttttaaataaccctctactggattcagacccttagtagcttcagctaaaaacaatctttacttatacaggtaatgactaacagtacagggaaagagaaaagaaatacatttatgtctaaaattaggtttaatatagtgcctctt

SEQ ID NO: 12672 - DNA, 506 bp, Homo sapiens
tgggccatgcctggcacacgctccgaggacatggcccgatgccatggctccctctctgtctcaatgctccatcaacacctggagtggaactcaggagctacggcagcttgtactcaaaaaatgacctcagcattcatggatgggcttgaaaaatgaagagcgatgttctgtatctcttgaccccactctagccattaaatctagtaagaactaacacctattgtgtgttgctggaccaagcaaggtactgagtacttttctggcatcagcccctctaacccccctcacaatcctgtgtggtataygtcaaatggggcctagaaaacttacagagcttgccctggatcattcagcagggctcagaccaagtagaaggacccaggtgctcaatcacaatattgactgttctttgtagcaaagaataaaaatggtgcctggatcatggctttaaaattgtgaaaattaatgttacaactaggaagaagcctcaaaatcacttagcatga

SEQ ID NO: 12673 - DNA, 540 bp, Homo sapiens
catctaaatgctccctccatgtccatgtgtgttggctgagttctgcccagtgttgacaggagtgagttttaatgcaaagccccacaattgctgtgcttttcttcttccaagcacatagattctctctccccacccctgaggccactgccagggaataggagatgggtggcatcggaaawtcaagactgtctttactactctcttcagtgtctctttcagcgatatgaagttaaaaaaccaagtactgtgatcactcacctgagttttggtttttagaaggtgcttttttgtgtcaatagttgttaaatttggtgttcctgaagggaggatgattgatgaaggcttccatttggccatcttgcttcacctcccactcctaaatagaatgtgattttcaaaaattgtgcacaaaattatattttataacatatgaggacacaaaaatgccactaaattgagatgtatctaaggtatttctctatcataatatattttcaatatgggaaaggaatccacctcaaagaatgaatatgcaaacta

SEQ ID NO: 12674 - DNA, 466 bp, Homo sapiens
ttatttgggctttttaaattcttttatagtaagcctgacaattataaatcattacaagattgttgtacttttgtgcttattttgtataaagaaagtgttattaagataattaagaaaatgttaaggatatggcttttggaacattcaagaagaggcatgtaggctttggaaatcagggctgtttatgagaatattcccatggtctgagatgctggggttctagacccacaagatgatgattttcctgtttaaaaatatatgttccatatgtttagactatgacattagaaaataagtccttgcagagaaatgaagaagataaaaattctagacaagaaaaaattgagaaatctgtcttcagttgaagactctctcttccactaaagctagaagtaacatctcaaccatgagaagtttctyataaatctctcctttccaatcactaccctctacttttgagtggaaa

SEQ ID NO: 12675 - DNA, 1603 bp, Homo sapiens
tgcatttatctgttgatattccttataagtaaaacttctttattgtttacattttcagtaaaatttctagattttaagagaaaatgttataaaatacaagagcaatacattgaaagttaagaactggataataatatttctcagtaaactgtgcttggaaaagtaaattatatctttgggcctatgtttcttcatgtaaaaaaattcaactcttgcaatggtccttaaagcataagtcatgattccatttatagtaagataaaataatttatggaaaaggtattttaatattttcattcaaaaacttcttttttttaattataaagcagcagagccaatgagtatagaaataaataaacgttaaatgtggttgtcgtgcagcaggtttgacttgcactcactagtgactaccactgaaatgaacacacaaaggatgtgtcttgccaattactgagagggctcacctgtgattgatttacctattcaagagtagaatcttcaggaagagatttcctcccatgaaaagaaaagccaatttacttcattataatgacattgcaaggacataaaatttcaaattttaaaccttatgacgtatatactcacatttgtgtcttagcacacctcctttattcacctcccttctcacaacatggattaataactgggtgtaatgggagaaagagaaccatgagcaaaaatagtaatgggactattccactaaaaaatgtgtaacatagtcctttgttcattcaaaaatactatgtaataatacaagtcatttctacatgctgagactattgcagtgaacaaaacaaagaaaatttccttccttcttacagggaaatattaataacactatcaaaacagccttagttgtatactcatgttgggggagtgaaaactaaggaagaaatagaggattattattattttttcatcactataggaaacacaaattgacttcgatattttggtagacacttccaagcataagtctattactaatataattggccatggtgatttgttggaaattatatgacacctaatggaaatttgaacagtgtcaggcaaatagtattcatgagttcagaaatgaactagcaaaagtgtctaacaaagggaaatayagccagaaattgtagctgaagtgactcaggccttcctgattacagcagtgcccattaagcagagtggtaacacactatggagctgcagtagaatttttaagaaattgggtactaccaggtacccaattggacatacatgtaatataccttttacaaattccccaaattacctagaatactttttgagtaatggtgtttccaaaactattggtgaccacagcacatctccagactttagctaaagctgctgtgaataattgctgtgattggtggccctgttcccactatgaactcagtaccattcagctttctcagcctttgggccttgaaatgcccaggagcttgctcagccggtccctagaactttgagaatgttaacaccgacaatgtactccacaaccaaggaaagatgtgagtcatggatgaatgttccagcctcccatctttcagaggagccattctgaaatgca

SEQ ID NO: 12676 - DNA, 499 bp, Homo sapiens
aaacaaaaacgctgttgaaacttggaaaagacttggtaataaaaatgtggccatccacatgtgctgctgctgcaaataccaccaaatctgaaattaagatgaattcaataaaagtattttttattcactagactactaagagaatagagggcaattttaagatttttactgaaatgaaaggagcacagacacacaaacacatagagcactcggcaacattaatagtgatgacggtgtgccactaatgctgctttttttttttttttttctgactgagtctygctctgtcaccagactggagaacagtggcgcgatcttggctcactgaaacctctgcctcccaggctcaagcgattctcctgcctcagcctcccaagtagctgggactacaagcacgcgccaccacacccagggtgtgtactgggaagatgactggcaggcaagatgaaagtgctcctaaattctttaatttctcaatgccctaatgttcaaggaagca

SEQ ID NO: 12677 - DNA, 543 bp, Homo sapiens
atctcaaacaattggtattctctctgtttttaatattccccttgacatttgcctgtgacaatgcccattgacaagtgattcctgactaccatctgaaggtgcctgattcccayggagcactgggtcaggaatttgaagactagggtaggggttctgctgcctctccctaagtgggtaacaatgggcaagttattcaaccttgctgaatcttgatttccgtgtttgtaaaatgaatatgtaatatctcatttctaagattttgtgtgaggtttaataccaaatatgagtctaagatgtctgggatggggtccagaagagaataaagatatgtattgtatatattaatatctgtgtctatatatatgaaaccacataacatactatcaactgagatagagaatcataagatcctacagacttggaatgaggggacccctaagagctgatgatttggttcaggctctggatggtgcctgattctcggttgagcatgctttctagcacaccatattctagtatgtagcataactccaggtaccaatg

SEQ ID NO: 12678 - DNA, 520 bp, Homo sapiens
tgactgtcactcagcaatttcaattttatgtttacttgatttaaaaagggaggataaattgttctgaaaagttttttgtttccttaacatttcaaagttttcaytgaaatttgttgttttggtaaaaataaacagttaactacagaatatttttacgtggtgctttgcttttaattacttactagggaattaccagtggaaaaaagaatgtcaccagtgtttttcctacttacaccagttctgcagcatgaatatttatattaaatgtatgtgctatatgaattccccaaagggtcagtagttttggggggtttatttccaactatagttgtttagaaagccagtgtttaagagggagagagcaggttagggctactatctaagtagtggcaccaactcaaatgatacgtggggtgtagtcacagctactttacatcctgtttataaattgagacacgaggatcttaatttctagtcttctatccaatttgatttatcaaaaaaatgaatcttgattatt

SEQ ID NO: 12679 - DNA, 1246 bp, Homo sapiens
gagtctattaattttttaaaaatgggattccatacccggaatttgttggccagccccaaattcaaggaattcagttctctttgtcccaaaagtacagtgacttcagaccacatgcatattaatatccctgtatttcacaggttctgtacatttctgccacagccttgtgacattagtgtgtcagtagaaaaagcaatggcctgtaataagaagagtttcagttgtgtgtatacaggacggtgaatgagtgtatragtcagctagctcaccaacctggtctattttctttctttcttttttgaaagagatcacctcaccagctacctcactgggttactgtaaggatcagatggctataaaaatgtcccacaaactggaaagcattatgcaaaagtattataaatcagtatgtcatctgcctagagctgggatagagtcagcactgcaatccacgtattgactctaatttcagtgctcagctcctgggtaaagatagttcctttctttctttgggataaaaattttagggatactgatttctctttttaccagctaagccacatgaagggtatccaaacggcataaatcaaggtgtcagtctggttctgtttttgagctctgaatgacattaccaaaacaggccacattatataatcttcagctggactggaatgaccaatcacccttcccagactccatagttgttcttggatgatacagcgcaacaaagatgggctcatcccagcagagagaaccacacccgtttctgatgaaatccctaggaagagccagcctcagaataatcctttcaagtcattctggggccaccggtggaggatttcctgggcacccacagggtgccatggtgcacagggaccatggtacacagggtgcacacttgctgggtcctgggcacctaggctgccaggctgaggaaaccagaggacaggaggagaaaaaggtggggccggccacccgtgctggacaagggcagggcgagcccatttgagactctgaatagagaacaatcaggctcactcacccttctccccacatcagcatccaagctggcttatgacatctcgcttaggcaacttcccctgcactttcaattagctaagaaatatgccagaacattcccagtggctatgtatgaggattttagcaattttcgtggttttcttctattcttttctggattccagtagtattcaactttgatccattactacttttatacaacaat

SEQ ID NO: 12680 - DNA, 1246 bp, Homo sapiens
gagtctattaattttttaaaaatgggattccatacccggaatttgttggccagccccaaattcaaggaattcagttctctttgtcccaaaagtacagtgacttcagaccacatgcatattaatatccctgtatttcacaggttctgtacatttctgccacagccttgtgacattagtgtgtcagtagaaaaagcaatggcctgtaataagaagagtttcagttgtgtgtatacaggacggtgaatgagtgtataagtcagctagctcaccaacctggtctattttctttctttcttttttgaaagagatcacctcaccagctacctcactgggttactgtaaggatcagatggctataaaaatgtcccayaaactggaaagcattatgcaaaagtattataaatcagtatgtcatctgcctagagctgggatagagtcagcactgcaatccacgtattgactctaatttcagtgctcagctcctgggtaaagatagttcctttctttctttgggataaaaattttagggatactgatttctctttttaccagctaagccacatgaagggtatccaaacggcataaatcaaggtgtcagtctggttctgtttttgagctctgaatgacattaccaaaacaggccacattatataatcttcagctggactggaatgaccaatcacccttcccagactccatagttgttcttggatgatacagcgcaacaaagatgggctcatcccagcagagagaaccacacccgtttctgatgaaatccctaggaagagccagcctcagaataatcctttcaagtcattctggggccaccggtggaggatttcctgggcacccacagggtgccatggtgcacagggaccatggtacacagggtgcacacttgctgggtcctgggcacctaggctgccaggctgaggaaaccagaggacaggaggagaaaaaggtggggccggccacccgtgctggacaagggcagggcgagcccatttgagactctgaatagagaacaatcaggctcactcacccttctccccacatcagcatccaagctggcttatgacatctcgcttaggcaacttcccctgcactttcaattagctaagaaatatgccagaacattcccagtggctatgtatgaggattttagcaattttcgtggttttcttctattcttttctggattccagtagtattcaactttgatccattactacttttatacaacaat

SEQ ID NO: 12681 - DNA, 526 bp, Homo sapiens
tgaaatcaaagaagtataaaaacaaaccttccctcaaagagcttatgatccagtttggaggagatgggcttaaacatgtggaaagagttttaatgataccaggcagtaaatgctaagtgccacatcagttaggaagttcagaagcagtgagagtttcttggaaagacagtgccatggcacagttgttcaagtagcatgctggggctgcagcaactgtaacaagctcttggctgatgtagagcagtgacagcctagggagcagagaacaggaattctcattttctgaagagctacaatgtgccaggccctgtggtgactgttttayatccagcgttatgacttttataatttccattctctgtgatatcccatatttcagccaagcaaaatcacaagcattttgcagataaacacagtctatacttatttaatacttgcccatgtttcttctactcctgatgataattttgggaaatgctcaaagcctaattctactaatttgacatttcaaaaaatccataagata

SEQ ID NO: 12682 - DNA, 536 bp, Homo sapiens
acattttatgcaaatcaataaatgagaaggaaacagcacttgcagaaagataaaatccactttgtagaagtagcaaggccacttccagtcagttcttatgtgcagcataatcaataggatggccatgtgctgtaaagctcaaaaactaaactgacaattaggtatactttattcctaatcattcctaatgttggtgtagtacttttacagcttgcaagatgcttttgtagccatttgttatgggttgaattgtgagcccctccaaatttcatattctgaagtcctaacccccagtatcctagaatatgaccttatwtgtaaataggctcatttcagatgtaattagataagatgaggtgatgctgaaatagggtggtcccctaatccaatatgactggtgtccttataaaaagggaaaatttggagagagacacacatggaggaaagatgatataaaataaaacagggagaaaaatgcctgaggcttccagaagctgggagagagttctggaacagatgtttccttcacagccctc

SEQ ID NO: 12683 - DNA, 534 bp, Homo sapiens
catggaaggtagattctttgggttacgggaaagggagactcagtcagggtatcttaaggatccagtattattgtatattgattcatggatgaataaagaagacaagaatattggccatgcagttactcctctcagaagcttgagtattgtttggataatggagggatctgcacctctcagtgatctgggtatcacactgcccatcagcagagcaagttccccaattcctaatcctgtcctctgcttctccttctctctcctgtgatttctgccaaaggaggctgcaggaaacagaaaacccaaaatgtgacacagatattatggccagtgaaagttctggggcaggataaagagtgtttcccaagggaaggcatggggaggtagatgcctggccaatttactgtttgaataatagcagaaaawttttgttctgagaatttgaggatacaaaagtgatcaagctaccgattcaaatttagttaattttttaaaaaaagaattggctatgcactatacttgatgcctttacctaaa

SEQ ID NO: 12684 - DNA, 567 bp, Homo sapiens
tcctatcaccttttttctatstttcttggctatgttacatctggcaaagcaagaaaatgaatagtagttcagctgctaagccttttcttctcatgatattagctaactaagttatggaagaatactaaatatttaagcaaaatgtgtgtaaaacataagcaatacaaggcagaaaagtagcaattaaattaatcataattgcaatgtttgtaaaatggttttgtattttagcataaaaaaattacatgagataatattttgaaactctaaattttagttattcaattctacttaggcaatctatttttaaataaaaagtcctattctcaacaaagagaataattttcaccttactattttaagaatttacaaaggaaagaactgcaaatctattaataaaggccattataaattatttattattcaaacatagtaatgaattcattgtatgaatgagagaaggaaatgttagagaatattaataatgaaatttttttcttgcaagcttcaaaaacactagacttttgacattactttaaactattaatctttatagttttgagtcaa

SEQ ID NO: 12685 - DNA, 499 bp, Homo sapiens
cagtgagctatgattgcactgctgtattcctgggtgacacctgggtgacagagtgagactctacctctaaataaataaacaaataaatmcataaacacagatttataaaaattataaatatttaaaataatttgagccccaaaaagcaagctgcataataataatacaagataatgatttatatacaggttgaaaaatactatatagtactacatactattttatgagctcttcatatgcattaatactgtaaacagccatggtaatgataaatgtttaattcaggatagtggttatccttcagtagggagcaaagggaatggtgtctgtgagaagtatatacatatataaggaactttggctctatccatagattttcatcctccctctaatgatgtaaatacagccaaatgttaagatttaaagaagatcaatggtgaatacacacatatttaattaatactatattaacagcctctattaaatatatagaataaat

SEQ ID NO: 12686 - DNA, 525 bp, Homo sapiens
ggccttggctcctctagtggctatacgggtgacatctcaggtgacatggtgattagtttgctctcrcattgctataaaggaaatacctgagactggggaatccataaagaaaagaggtttaattggctcatggttccacaggctgtacaggaagcatggcagcatctgcttctggggaagcctcaagaaacttacaatcatggcagaaggcaaagtgggagcaggcatcttacatgataagagcagcaacaagagagagagagagagaaagagaggaggtgccccaaacttgtaaacagccagatctcatgagaactctatcatgagaacagcaccaaaagtatggtgctaaaccattcaggaaggaccatctccatggtccagccacctcccaccaggctccacctccaacactggggattacaatttgacatgagacttgcctgtggatatggatgcagagtcaaaccatatcattccacccctggccattcccaaatctcatgtccttctcatattgcaaaa

SEQ ID NO: 12687 - DNA, 525 bp, Homo sapiens
ggccttggctcctctagtggctatacgggtgacatctcaggtgacatggtgattagtttgctctcacattgctataaaggaaatacctgagactggggaatccataaagaaaagaggtttaattggctcatggttccacaggctgtacaggaagcatggcagcatctgcttctggggargcctcaagaaacttacaatcatggcagaaggcaaagtgggagcaggcatcttacatgataagagcagcaacaagagagagagagagagaaagagaggaggtgccccaaacttgtaaacagccagatctcatgagaactctatcatgagaacagcaccaaaagtatggtgctaaaccattcaggaaggaccatctccatggtccagccacctcccaccaggctccacctccaacactggggattacaatttgacatgagacttgcctgtggatatggatgcagagtcaaaccatatcattccacccctggccattcccaaatctcatgtccttctcatattgcaaaa

SEQ ID NO: 12688 - DNA, 575 bp, Homo sapiens
ctagggttgtcataacaaagaccacagactgagtgactcaaataacaaatttcttttctcacagttctggaggctagaagttcaagatcgaggtgtcagtgggattggtttcgttctgaggctgctctccttggcttttagatgttttcttctccctgtgtcttcacgtaatctttcccttgttcatatccatgtcctaatagtatctttttacaataccagtcatatttgtattaggatctaccctaagaacctcattttatcttaattacctctgtaagggccctatctccaaatatagttatattctgaagtattaggggttaggacttcaacctaccaactttgggaaggacacaattccattcacracaaacccgaatcctgctttctagaaactttccatctaaaacaacatggatgaacaaaaaccaaattaagcaagcactgaggaactcctgaatggtgctttggtccagtgcaattagcactaggattatggagactttcattgccaatattttacccttaatttaaatcatgtcatgaaccatgtcacccaggaatttctagca

SEQ ID NO: 12689 - DNA, 651 bp, Homo sapiens
tcattttggattcttttttggtatatgggatgaggactagaccaattttcattttttattttgttattcatatattccattaccattcatcaagaagttcatctttcccccagtagtatgaaatgttatggtattataaattcaatttttgtatataaatctattactggttctgttcacaatgttttaatcagagagattttagctatttttgctttttgttcttgtaaatgtactttataattaacttgtctggctccagaaaaaaaaaacatataaaaatttttccttttaatttggtcctatgatatttatatattaactttaaaataatatattttaatgatgttgaatgttccttccaggaatatgatacatcgttctatttgtccaactctacttcaggagtgttttataatttttctcayataaattttgcctgttttaaactttttttatgttactgatggagtcttctctttaatacattgttcaggtctatttttgaattaattattgtctatgttgtaaggcagtagtccaacttcattcttttgcatttcatatccagttatcctagtatctttagttggaaacactattatttcccccactgaactgccctagcatccttgacaacagttgagtcga

SEQ ID NO: 12690 - DNA, 521 bp, Homo sapiens
ccgctctccagactcctgtgatggtggtgggggctggacccaccctcggaaggcaggcaaattcctgccaggagtcagctgagccgagccatctcttgcagaaagctcctagccccgcaggggtgaaccggctgctgctcccgcgctgggagtgctgtccatccctcggtgcyccagcagccgcccctgggaggacagccccgtttgaagcccacgtgcaggcgaaaccccttcagagctgggcatgggtttccagtcatcgccacatcactctctgtctgaacttgaacatacctcaagcttgctggttgttactgggtcgcagtaactagattttcttggggggttggtgtgggtgggtggaaagatacatccagaaaatgaaatgtaatgttgcctcttattcaccaagaagtttttcaagccagaagaccatggtgtttttcgttgattggtattgcttgatttagattcggaagctgggctctcctacagttacccagcccttcactggactggct

SEQ ID NO: 12691 - DNA, 521 bp, Homo sapiens
ccgctctccagactcctgtgatggtggtgggggctggacccaccctcggaaggcaggcaaattcctgccaggagtcagctgagccgagccatctcttgcagaaagctcctagccccgcaggggtgaaccggctgctgctcccgcgctgggagtgctgtccatccctcggtgctccagcagccgcccctgggaggacagccccgtttgaagcccacgtgcaggcgaaaccccttcagagctgggcatgggtttccagtcatcgccacatcactctctgtctgaacttgaacatacctcaagcttgctggttgttactgggtcgcagtaactagattttcttggggggttggtgtgggtgggtggaaagatacatccagaaaatgaaatgtaatgttgcctcttattcaccaagaagtttttcaagccagaagaccatkgtgtttttcgttgattggtattgcttgatttagattcggaagctgggctctcctacagttacccagcccttcactggactggct

SEQ ID NO: 12692 - DNA, 806 bp, Homo sapiens
tggccaacatggtgaaaccccgtccctactaagaatacaaaaaattagccaggtgtgatcccagcctgtaatcccagcaacttgggaggctgaggcaggagaatcgcttgaacctgggaggtggaggttgcagtaagccgagatcgtgccattgcactctagcctgggcaacaagagcaaaactccgtctcaaataaataaaagctattttcaagtgtcattttctgagtttcaaaatggacgtcttctctactgaattgtctgaacactcctgtgaaacatttgatcatcaagacacttttttgttcatagagcttaactctttctacactatgtaaaatgcagatagtttactcctatggcagttattcttaactaaggaagcaaaccaagccctccagagagcttctaaaatatactgaagcccaaacttcagtcccagagactgatttgatggctcttgggtagggtccaaaatcagtgtgggttccaagttcccctcctaactgtattgtgcagtcaagatcgccagtcagtgcttgatggttaggtcgaatcttgatgccctttttaatgtccagstaaacttgcaatttaaggaattgggaaagtgctgcatttgtattttatattaataattgagcttaatgtatgtgaagtgcttagaacagtgcctggcacatagtaagtgctttctaagtgttagctattttaatgaggttagtcacattatgagataacttggagtcagccaggcatggtggctcacacctgtaatcccagcactttgggaggctgaagcagga

SEQ ID NO: 12693 - DNA, 647 bp, Homo sapiens
atgcacaggacaggctcccataacaaaggattgtccaacccaaaatgtcagtagtgccaaggttgagaggcattaacctagagacaagattaaaaggagaagagctctgaggactgagccctggagtaccccagcatttaggggtctagaagagaagactggataggatagcagtgaggtagaaggacagccaggagcatatggtgtcccagaagccaagattcaagaaggaatgagcaactgtgtcaaatgctacttagtaattgaattagatgaggactgagaactaaccatgaaatttagcaaaatgtgaaggtcatgagtggccttgataggaagcaaataataatcagctctgagactggaaagtgagttaaccaggacagtacagtagggtggtcctagagtttagtcaaggtaagtttcaagtgagattactcagcactaccctttcttccagccattttcggctccctcgatgcaggtatagagtagaccaagagagctgagtttaatgagagttgaggttctcccartgagtatagcagagatcagcaaaggtgttgatggaatgtgccctagagtgagtgacaggtcacactgagccatggaatcctcactgggggctgggtgcagtggctcatgca

SEQ ID NO: 12694 - DNA, 529 bp, Homo sapiens
ttccactgacacagagcatgtcaaaggtctagaatagcagctggaattgtactgctgatcaaggacacgwgtggttgagggcctaaatcagacaggaactcactgataggtgttgtattacagggtggattccctagcggtttgaccctgagcaaattacttaacctctttagacctctcttctctaatatggaaaatgtgaattaataactaccacctataatattgctgcaaacagcaaatggtagtgcatggaaagtatttagcattctgctttggtttgttgttgttggtcttccaatactaccaaattctccaactctctggacaccatctgggtgccctataatttaactcaattctgatgctaccaggagttagtgtggaccccacaagactgcaccccatttcagatgccagttgcaagtggtgggtccccaggtcacctacaacttctgtctgacttggcaacaaattgggaatttccataacctccttcttagatttgataatttgctataatggctca

SEQ ID NO: 12695 - DNA, 480 bp, Homo sapiens
ggaaaaaaacaatttttgtttcaattctaagaaacacttgcagctctagtattcacttgagtcttcctgtttttcctgtaccgggtcatggtaatttttggttgttttggttgttttcttaaaaaacaagttaaaacctgacgatttctgcaggctgtgtaagcatgtttacctgttggcttgctttgtgtgtctgttaaatgaatgtcatatgtggatgctaaaataaatcgacagtgtctcagaactgaataactgcagtgacttgatgctctaaaacagtgtaggayttaagaatagatggtttttaatcctggaaattgtgattgtgacccatgagtggaggaactttcagttctaaagctgataaagtgtgtagccagaagagtacttttttttttgtaaccactgtcttgatggcaaaataattatggtaaaaaacaagtctcgtgtttattattccttaagaactctgtgtta

SEQ ID NO: 12696 - DNA, 506 bp, Homo sapiens
acatataataaaataaaataatgaatatatattttttctcagagttttagagaccagtaagtctcatattcaggtgccagcacagtctggttctgatttcttttcctggcttgaaaaggctggcttcttgctgtgtcctcacaggatatagaaagaaacctctgatgtctcttcctcttgtaataaggccaccagatttataggattagagacccactctcatgaccttatttaaccttaattacttactttacttatgtaaggaccttatctcctgttaccttgagaattagggctttaatatgtgaactggagggtgaggaggcacagcgcagtccatagcagtgcccacatcttctctctgacatcttctctgaccgtaccrcccggaatcattttcctgtccatgatgtcccattgtcactgttaactgcctgtcatctttgctgcttaaatttggccttatacatttatgacagcacattctgttccttcaaagaaactgc

SEQ ID NO: 12697 - DNA, 429 bp, Homo sapiens
aaaaaatattatttattcatgtagactgacaacttcttgaggcagaaaaatgttttttatactttttttactccctaatgtgtctatcttttggctgagcrtatattcagtagccaaaaacatctggtaatttgctaattttaaaaagaattgtagacatcgacattgcatagcattggctttggttaggctaatgcattggatgtccttagatctcattctgtatgataatgttaacatacagcttgaaaaaaattgcaccaaatttagtttttaatccaaatttaaaataattgcatacacacacacacacacacacacaccatttataccaaggcacaccagtggataattatgtacaaaaataaacagaacctagatcaaaattccacatttcacttttctttaataaagcatgggctttaaaat

SEQ ID NO: 12698 - DNA, 556 bp, Homo sapiens
gatacatccaatgtattattctttagcagtaaaaaaagaaacaaactattgccataagcaacaactaaaaaacaaaagataaaaatgaaaaaatggtgactctttacagagttgttaaatgagcttttatacagatatatgaagttcctctaatagagaccagcatgcagtgtgtgcttcataagtgcttgctattattatttcttcaaaaaaataattgatacttcaggattctaataaatattattttttttcrtaacttggacaaattaaagagtataattctgtgagtttcatatgtttactatatgtcactatgtgtgtgtgcttacacacacacacccccacacttctcatttagatgtacccatagacaaaaagcacaggtgagctgcgagaattcagcagtgaacgtgcaaggtgtggtctctgcaactatagaacttccactctagaatgatatttttttaaatgcctaagtttaaatttttcaaataagtgcttaaaattattccaatttattacagtttttaaaaattacactaattatgggatt

SEQ ID NO: 12699 - DNA, 527 bp, Homo sapiens
caaagtggttagttacaatgggataagcaacagctacactgaaaaattctatatgtaatgcagttttctttttgtgtggaaaagagtaggacaagatatgagattcctggtctggagagtgggtgagatattaacatattaaagcaggaatgtctgaaacatgcattgtgtattttccrctgtctcagcccaaatcaggcatagctctggggagaagggagaagggcaataccaaccagaaagtatctctgtgattcttcaggctgcttgggcagtcagcctccagaagagaccccactcaaatctgggtcatccaggcacactggccactcaccacctctgcggtgttatttcaaggatgctaaccccaaggttcccaccactgccactggccaatatctgaaattcccctgacaaagcttcctcattagcataaggtttggactcctgaaatgaaccaaccatgtctcttaaacttttccttgaactctatccccccaccggaaatacagagagatgagtaaata

SEQ ID NO: 12700 - DNA, 527 bp, Homo sapiens
caaagtggttagttacaatgggataagcaacagctacactgaaaaattctatatgtaatgcagttttctttttgtgtggaaaagagtaggacaagatatgagattcctggtctggagagtgggtgagatattaacatattaaagcaggaatgtctgaaacatgcattgtgtattttccactgtctcagcccaaatcaggcatagctctggggagaagggagaagggcaataccaaccagaaagtatctctgtgattcttcaggctgcttgggcagtcagcctccagaagagaccccactcaaatctgggtcatccaggcacactggccactcaccacctctgcggtgttatttcaaggatgctaaccccaaggttcccaccactgccactggccaatatctgaaattcccctgacaaagcttcctcattagcataaggtttggactcctgaaatraaccaaccatgtctcttaaacttttccttgaactctatccccccaccggaaatacagagagatgagtaaata

SEQ ID NO: 12701 - DNA, 527 bp, Homo sapiens
caaagtggttagttacaatgggataagcaacagctacactgaaaaattctatatgtaatgcagttttctttttgtgtggaaaagagtaggacaagatatgagattcctggtctggagagtgggtgagatattaacatattaaagcaggaatgtctgaaacatgcattgtgtattttccactgtctcagcccaaatcaggcatagctctggggagaagggagaagggcaataccaaccagaaagtatctctgtgattcttcaggctgcttgggcagtcagcctccagaagagaccccactcaaatctgggtcatccaggcacactggccactcaccacctctgcggtgttatttcaaggatgctaaccccaaggttcccaccactgccactggccaatatctgaaattcccctgacaaagcttcctcattagcataaggtttggactcctgaaatgaaccaaccaygtctcttaaacttttccttgaactctatccccccaccggaaatacagagagatgagtaaata

SEQ ID NO: 12702 - DNA, 882 bp, Homo sapiens
ccgagccctgggccttccccggaactttctagcctagatttagtttgtcaggtttcagaaagaataaaattatctaaaattgagggaaaaaaattggcaggcaatttggaaaagactctcagttggcctgccaacaacactggcagaagaaatgtagtcgagttagaatccttccagcatgttccctaggggatgctcacacaggaaccacaggtgaaatagggaagtccctggctcctaaagcctaagcaggaaccatatactccaccactcccctcctgaagtgaaattgagtcccaaaccaggagtaacaggagcacaaaggtgacggagctcatacaaactgagatgaattgcagcttccaggacggaaatgactagtagcttattatttgtcattggctccagatawatcttacaacctgattaaaagcaaatgtattgactttttttttttttttttttggctatggctattctgactattctcttttactgaaaatggtttttttctaattagatagcagcagcctgaaggtaggaccatcttagtttctgtgttccttatagaatctaggaaattattttgtacattgtaagtattcaataaagattggattactcaacttgaataaaaacaagcagatgataataccttaatagtcccagaattaagtttctttggacagtgatttgttgatatttttaaattagctattagacacaacaccctgcagcaaaaaggctttgcttacttgagctcacgcttgttatccttttggagtctgaagcctaattaatgtagaatagagcctcttttagaataaaagtcctctgccctatgggcttattctttgggtctctaaacacagattggggaac

SEQ ID NO: 12703 - DNA, 636 bp, Homo sapiens
aaacagtgcattaagcacacagataccttggtttttccccaataaagttttgaacatcaaaaaaaagaaaaataagaaaacaagacataacaaagctaagtccaggtttctttgtccttgaaaactttctgaggaagactggccttatatctaattgttggggtcaggaggtaaagaggaaacctctctccaaagacagaaacagctaaatcaaagcctgtccctagagagtttctacagcagggccggctaaaatccaggggtggatgatcatgtcacatcgtttggacacaagtcacttggaagccaaagttttaaggtgtatagaatggatttaggggctastaggaaggtttctgagcccatgtactcccatcatatcctgtactatccactataggagtgtttaaattatcttaaggattgttctcaatagagtgcaaacctctctgtctctgtctctccgtctctgtaagcttcttgatgatagcaaacattatggtcacctttgtatccacagtggctgggtcttagttggtgttggataagtaaatacacattgaattaatgacagaaagcatgaataaatgaatgaatattattgtaagctacagaatatgaatattggatcagagg

SEQ ID NO: 12704 - DNA, 621 bp, Homo sapiens
tgctcttttagataaatatatctttacctacctaatgtgacatgattattactggaagaatataatacccttcctttttactccaataagttggtatattttaactttatttttctaagtgtattttattacctgaaattggctgcaattactatatttagaaagtagataataaaacaacgtagcatcttaaactattgatattttaaaataagcagaatctagaaaactcatacatttttatactttattaactattgtaacatcattggacctgtttcatagaatggctgtgtctagagactccctagagaaaaatttttatctctagacaatcattatcatcgcagagagactactcataacaaatgcttttctaaatttaattggtaactttgctcttgatatagatcaaggaccaacaataccaaagttatatgctgacttgcatttgttttttccggagagatatgaaattctctgtgattaaactgcagctgaaattgctttcacataaatacttagtagtttattttgcaatggtaaaagtagtaacaaacctcawattttcaaagttgaagatgatatcaaaaataacttttaaaatctgtaaacagaaaa

SEQ ID NO: 12705 - DNA, 928 bp, Homo sapiens
gtaaaatatctctctcttttctttttttttttggctctgcactctttttatttttattttttggatctgtcttatcagtttttcacacgttgcttgggaagtaatattcaggtgctattattctcagtaaacaagtgagaaaatggaagtggaatttaaatcatgatttcatgatttccctggagtggaaagcatgggtctagatatacaagtataactttagttagaaaaattgcaaatataattttagattgagcctcactaattaggattcgtggactcgtgtgtggtagatattttaatatgctttgtcaaaatactacttctcatatttctaccaaataacccccaaaacctcttaggatttaattagctactgcagtttatcaataagaaatgaaagaagtcaaaggtaagtggaagacattttacagacccaggattagaatgagagaagatagcaccttgagatgagaaggcgagaagcagcttgcagtttgaaaaaaaatccaaaggaagcttaacaatgctttccaaggtatatgtcagtgttatacaggtgcattagtccattttcatgctgtagataaagacatacccgagactgggcaatttacaaaataaagaggtttattggacttacagttccacatgactggggaggcctcacaatcatggcagaaggaaaggaggagcaagtcacatcttatgtggatggcagcaggcaaagagagagcttgtgcatggagactctcctttttaaaaccatcagatctcatgagacttattcattatcaggagaacagcacaggaaagacctgttcccatgattcaattacctcccactggatccttcccacgacatgtgagaattcaagatgagatttgggtggggayacagtgaaaccatatcaacagtttatggtca

SEQ ID NO: 12706 - DNA, 573 bp, Homo sapiens
cacaatgaatagcacttgtaaacacttacaaaatgtttgttgggtgaatgctactcctggaggtttttaagtcttctagaggatataataaagtgtcaacgtcttaatgacttggacagcagaataaaagaaagaaaactgcagattctactgaatataattttattaatgatctcaattcktacaaatgcattccttatcatgtcatggctatctcaaagacctaggtctggtcgatgatgacctgttatttaaaatacataagaattggtgtgacttgaattcaactcaaggaatattgaaaaaaatttaatattgccttgtaaaagtctatgctggaaaataagaggtgtgatgagggcatggattccacttattaataaatactcttatgagaaaacattttttcttatgtatttccatcaaaaatgattttagaatggactgaatgtcaatgacaatatgtacattgccaggtcaaagacaaattcaaaatatcctttttgcattcacaagaagtcttttattgaaatttagtgtttgagcagaattgaatattacttattaatttac

SEQ ID NO: 12707 - DNA, 573 bp, Homo sapiens
cacaatgaatagcacttgtaaacacttacaaaatgtttgttgggtgaatgctactcctggaggtttttaagtcttctagaggatataataaagtgtcaacgtcttaatgacttggacagcagaataaaagaaagaaaactgcagattctactgaatataattttattaatgatctcaattcttacaaatgcattccttatcatgtcatggctatctcaaagacctagktctggtcgatgatgacctgttatttaaaatacataagaattggtgtgacttgaattcaactcaaggaatattgaaaaaaatttaatattgccttgtaaaagtctatgctggaaaataagaggtgtgatgagggcatggattccacttattaataaatactcttatgagaaaacattttttcttatgtatttccatcaaaaatgattttagaatggactgaatgtcaatgacaatatgtacattgccaggtcaaagacaaattcaaaatatcctttttgcattcacaagaagtcttttattgaaatttagtgtttgagcagaattgaatattacttattaatttac

SEQ ID NO: 12708 - DNA, 568 bp, Homo sapiens
attaaaaagattattattttcaaaactccaaatttttcaaagaaaattatggcaaaattgttgatgttttttattctcacaaaagggtaattcagtcacttactaaaacaacaaaaactcatcatttatgcatccctgactcatatgaccatcttattatctattttcctttttttgtataatgacatgaattctgagaatttggtgcgtaaatggactcatcatgtccatcaaatggcaaaggatgtgactagatcgtcttagaactctgccttcatttctgagagctactccmaaataatccactgaaccttatgttcagtgccccaaacataagcatgcacttgcacacatgtacacatatacattgaagttttttctttggcatgaaaaaatgtcttatatagtcttatatatatgtcatagtcttttaaaacaaatatgatgatttagaattaggtttaatgatgtgtgataataacagaaatcagattatttttagcaacttaaaatatcttctaggataaatagaaaaggacaaaaatatttgtgggaaaaggtgtataat

SEQ ID NO: 12709 - DNA, 528 bp, Homo sapiens
cataatttaaaaaggaaaggaaggaaggaaagaaagaaaaacaagtctcctacaatttggctcttgaaaacatttttagaagttcataaaaatgagaaaaagacaatcctatcattgaagttttttgttttatcaagttaacacctagttaaaacaggtaatggaagccatataaatacaaaatccagactctcaataaacttcctacaccagatgtggactgagatacactccattctgggaagttggccaccataaacctctgacagccrtagatgagtcatctaaccatctcattccatgtgatcacaggtctttgtagtgttactcgtgcttgggctgaatagaaatatcaccataaatctcctaactaaaaggatgcagtttctcattttcatttagacagatttgaaaatagggatgagattgatcaatacactcatctttctgcaatcatctgagaggccaaaatggccttgaggatgatatatggcatgcacaatgtgaatctctaaaagcttttggtct

SEQ ID NO: 12710 - DNA, 509 bp, Homo sapiens
gaaccaggaggagactgatagacagggagaaatggaggagtcaagaagctgatgtcatgaagaaggtsaaggactgatggtccaaagtgagcatgttgtgttcagacactgagatgcatgggtttgagaatttagaggtggagcatttcacactgggagatgataaagtctccagtgtggcctcataactgggtggctaaagaggagtgtaatgtgagaccaacaatttacccacagatcattctttgggaaactgggggttctacccagatcccacttagtgtggggagtatagtggtcttacctcttactcttctcttgtgatcataattaaaattcaaatttctatcattaatgttgtcatgggggtcctatgacagatgctgacagtcaatacaacctttgcaaatatgattttcttggacctactctgcattggtgggttgattcaggcctgatccaacccttccagagtaggcgctgcccagattcccatttctagcaaaggt

SEQ ID NO: 12711 - DNA, 569 bp, Homo sapiens
ttgggaggctgacgcaggagaatctcttgaacccggraagcagaggttgcagtgagctaagattgcgccactgcactccagcttgggcaacaagagcaaaactccgcctcaaaaataaaataaatagaataaatgattttctttggtttgatctttcctaaataaaaatgaatcacaagcagtatacaggagcaaggtacaaaaggaacacaaagagagtgacccttcacaacatggatagaagatacaattgtatttaagcctcaagtattaagctttgcaagtaagagaaaattaacaaacagtatccgcccccaaaaacaaacataacagatgtgtatgaatgtagtatttagaattattctagcacagcaagactttttactgtaacttcactataaatatagacataaatgcaaagtttgagacatcaagaaccaatttttaaaggtacatttcctggaattagagccactacctaccaaaaattcattttggaattcatatgtagaaatattttaaaccttaaaatttaaaaatctatccctattaaaactaaatacattatt

SEQ ID NO: 12712 - DNA, 514 bp, Homo sapiens
ttggaaaagtagcactgatagacttgctggatgcagggttgccacaaaccttaaatttgtaaaaaatgcaatatatgtgaagtgcaataaatgaagcccaataagatgagatattcctatataacatcaggtattctccctaagaattcatgtggtgtgttttatttacttggataaattttgcttgggtgtcttaggtacctgaagttcctggacttccaggtatctaactctaggcatcatcctttgcagggagctttcactgttgtcatattttggaagtccatatcccacttttcctacttrttcaaaactacttctcaggggctatccccatttcacactctactttgccttgtttccagatgaaattcctttagtacttaagctgcgtgtcctattaggccatcatttatacttcatactttgaaagcttcttcctctactccctaagtatgactcagctttgattctgggctttggataactggccttcattagacaaagtttgcag

SEQ ID NO: 12713 - DNA, 1029 bp, Homo sapiens
tgggttcatgtgattctcctgcctcagcctcctgagtagctgggattacaggtgcataccaccacactcagctaattttttttyttttttttttttgtatttttagtagagacagggtttcactatgttgaccaggctggtgtcgaagtcttgacttcatcatccacctgccttagcactcccaaagtgctgggattacaggcgtgagccaccacacccagccccacatttacattataacattttgatcctcggctccccagctgccttctgactgtgtgtgtgggtgtgtgtgtgtgagtgtgtgactgtgtgtgtgtgtgcacgtgcgcacacactcatgtgttgtgacaggcaaggaaaagccagtagagagtcatcgccattggcctggcaggaggagggggccctcaggctgcagttcactgtgctgtttgcactctgatccttggaagaatctttcctgaagtcacggagcctccagctcctccagaacagaactagttgtgtaggagtgtgtccttcatgcccctcaggtccctgaccttctccccacccttcctgaagggaatccaggaccctcactctgagcgcatcacctgctggtggcaaagcccctgcccatcatggccaaactgggccctggtgatgtgcagagcgtggagacccgggagctggagtgaggcagttgacacagatggcaaaaatgcagatgcctcggcactgcctgaggacacagggtctggtctgtagggcttttctggctttagtgaggtcttctccttttaatttgactgaaataaatagttacagaaagttcagatcaattagagttgaaatttccagaagaaatatgggaccatcctcacacttgccccagcccctcagtcttccctgaggacacctcagcatctaaatcacaactccagagtaggtgctgcagttgtcctgtggccaagatgagaactgtgcatcctccaaagaggggagacacaaaacactcaaaataatccatgcagaagggcgttt

SEQ ID NO: 12714 - DNA, 561 bp, Homo sapiens
tgcaattctatcggtttgcaccatcccaagacccaactaagacccaaggatttgagtctgggaatatttaagccaatgtcattgccaagtsagaagtcttagaccccaggaatttttcttcattgagagtccgggcagcaaggaagcctctcctctttctgcggagtttagggtctttaattgccaatgtaagtttgctcagggtcaggcagtgacccgttggatcagccagatgtgtttctgagtgaacatacacttgtccttcttaccggttgggcaagcagagtggtctgcatgagggactctgggctgtcccgctcagctgctcctgctcagctccctcatcacgatgaagaccattccaaggtcaaataggaccctggcacacatgagaccccagagaagacatactagtatcactcagtcattctcattcattcactgactcagtagctatggagcctgtgctataagccagggggcacaaatagaggagctgtctgtaccagggatcaaaatggtaaaccagcagactatccttccctgctttctccaggttat

SEQ ID NO: 12715 - DNA, 561 bp, Homo sapiens
tgcaattctatcggtttgcaccatcccaagacccaactaagacccaaggatttgagtctgggaatatttaagccaatgtcattgccaagtcagaagtcttagaccccaggaatttttcttcattgagagtccrggcagcaaggaagcctctcctctttctgcggagtttagggtctttaattgccaatgtaagtttgctcagggtcaggcagtgacccgttggatcagccagatgtgtttctgagtgaacatacacttgtccttcttaccggttgggcaagcagagtggtctgcatgagggactctgggctgtcccgctcagctgctcctgctcagctccctcatcacgatgaagaccattccaaggtcaaataggaccctggcacacatgagaccccagagaagacatactagtatcactcagtcattctcattcattcactgactcagtagctatggagcctgtgctataagccagggggcacaaatagaggagctgtctgtaccagggatcaaaatggtaaaccagcagactatccttccctgctttctccaggttat

SEQ ID NO: 12716 - DNA, 574 bp, Homo sapiens
ctgttcctctagagaaccctgactaatacagttcccttaccttcaaaaggttgtcaattctgagctaggcatgatggctcatgcctgtgatctcagcactttgggaggccaaggcagktgagttgactgagctcaggagttggagactagccagggccacatggtgaaaccccacctctccaaaaacagtaaaaataaaaaattagccaggcatggtggtgtgtaccagtagtcccagctactcaggaggctaaggcaggaggattgcttgagcccaggagatcaaggctgtggtgagctgtgatctggagcgccactgcactccatcctgggcaatggagccagaccctgtctcaacaacaacaatgaaaccaagattgtctgctgtatgacaagcttacctctctgaacttcactgtccccatttgtaaaataaggataaaaagaactaccaaatgaggatttcaaaaaaagataatgaaaggttttgaaaattataaaagcagggtaaacagaaagtattactcttattatttataccaatactctcatgtttatacaaattatataggca

SEQ ID NO: 12717 - DNA, 521 bp, Homo sapiens
tgatttcttagtaatgtttgccattggtatatgtatgaatatcatatattttctgatcttgctgaaaatgatctaccacagagtagacgtaaaaggaagaaaagtsggggggtatggttggcagaataatggcccttaaaaaagtccatgtcctaatccccggaacccgtaaatatgttaccttgcatggcaaaaataaattaagactgcaggcggtattaaggttactaatcatctgagattaagataaggacattcattgttgtgggttatctcagtgggttcagtataaccaccagggtccttaaaggtagaagaggaggcagaagaggagagtcagagaaggagacatggtgagagatgccatatttctggccatgaagatgaagggagtggccatgagccaaggaatacaggtcgcgtgtagaagccagaaatgcaaggaagtgaattttttttcccagaacctctagaaaaaatgcagccctgccaacaccttgattttatcttagtgagatgtg

SEQ ID NO: 12718 - DNA, 521 bp, Homo sapiens
tgatttcttagtaatgtttgccattggtatatgtatgaatatcatatattttctgatcttgctgaaaatgatctaccacagagtagacgtaaaaggaagaaaagtgggggggtatggttggcagaataatggcccttaaaaaagtccatgtcctaatccccggaacccgtaaataygttaccttgcatggcaaaaataaattaagactgcaggcggtattaaggttactaatcatctgagattaagataaggacattcattgttgtgggttatctcagtgggttcagtataaccaccagggtccttaaaggtagaagaggaggcagaagaggagagtcagagaaggagacatggtgagagatgccatatttctggccatgaagatgaagggagtggccatgagccaaggaatacaggtcgcgtgtagaagccagaaatgcaaggaagtgaattttttttcccagaacctctagaaaaaatgcagccctgccaacaccttgattttatcttagtgagatgtg

SEQ ID NO: 12719 - DNA, 1930 bp, Homo sapiens
tgtgtgtggatgtatataaaatagattttttaaaaatatgtatcttatacagaaggctatttcatacaggtctcagggaagacaagtgacttgcccaaggccacagggcctgtgagagtgttggagacagtgtttgaatccaggtatccaaccccaaagcccatgctctgacctactcaccacacccaaacacctgactttacccttagtgacaaactgttatgatttttatgccaggaaaccatggtagcacatcaaatgtctgaagcttcactttttgctgtctgtagcataaaaaggcattcaattaaaacagaaccacacctggggccagatgtgcttcctttataacttgaagaagtctcaaatcactctcaggtgtcagcctcttgagttagattagaatttgcaaaaataagcattcattcattgtgttacaagatcctccaccaaagacctaaagaaatttacctttgtgaatattaacagcatattgaattaacatttcacttttttaaaataaacgtgcttcaaagacattctctcccagagactaaaataaataacacaaaactgtgacaacagtggtcatcaacatctactatgctcttactctgaaccaaatactgttctcatcactgtacagcattatctaattcaacctctcaaccacgttcagtaggagctattactgttatctctgctattaattattctttaaaatgtcatttgagaaattctgactttacttctactctatagatatctcttctgtagactttatctgatgctaaaaaaatttgcacaggaaacaatttattccatctaatctcttttttcaacgtattagagactcttgctgtgaaaggaacctgggaagcctctgccacgtgcacagctgtgtaaggagaaggatctctctatgttttcagggctgacctgcagcagagacacctacatataagcataaacttgagaaagcaatgagcacccaggggagacggggctgccgcttgggcttgctacttaccagtgctgtgtgaactttaagatgtgcctgtagcttatatttatctggagttgagtagtcacagccatcggtgggacacttcagcaagatgttactgtgtttctgaattacgtggcgtttaaggcagtttttggtgatggaagaataatgacactgagagcaataatacagatgttcccgggtgtgggtgcggacatgcatatcaaaatgcacttggtaccaaaaaagtttgcctaaaaaaatattttcacatgagaacaaggaagtttcattttgactgattttgaattttttaaattattattattttttatctacaatatctatctccctcttgcgcttgtccgggtcacccttcatacttttcaccacatttctgtctgaaaattactcttcaaaggtgggaggttgcaaatattaagggtgctactattttttgcatgatgttagggcccagagaggaggaagccagtgtttactgagaaccagttatggctccaaataccatgatgcacrtgcataaatctacaaatctctaagttctaccggccctcctgggacagcaggtctggagctggattttctatatcctgaccaccagctccccaggagttccaggagccatgctttcattgtgagttgcagggtgctatttgggacctccctacagagagctgcagccactttcataacctctcttggctgatatagtagttggccacaatttaaagctcaactttaaacttgtcatgtgccagaagaaagattcttcttggttagagttctggtagaggtcatgggtaaccctcagcacacacacctgaccaggccaacacagtcaactgtgcagccatcccggccacctccacaagactccaagcgctaacggccacacagggt

SEQ ID NO: 12720 - DNA, 543 bp, Homo sapiens
ttcttttcctccactcctatctgtaagtgtctcaagagagacagcatattttattcattttgttgccttctgaaatcaaaaagtattcttatgcacctggcactttctactcaatattttatacaaatgtctgtttatacaaatgtcttacttcctgaattaaaacgcaatttccttgaggacatgggtgttaagctcagattcttattgaaagtgggtattcaacaaatatctgcaaatgaatgattaaacaaatraatatattaagtaaatactgaaggagaactaagtaacatatagttctgtgaattaaaaaacaaaacacaggaatcaatacggaagatttcaagattcaggtatgttcttattactctttctttcttggttttaatatacctagacaaccaactcttatttttagaaagtgctttgagttctgctcaaaagaaaaattatttggttgagagaagatcctaaattacagaatggtgtttgccacagattaacagcaggtagagccgtctactattagagcaaacgcca

SEQ ID NO: 12721 - DNA, 511 bp, Homo sapiens
agccatgtcctcatccccagttgccatcaaataactaaatctggatgtgaggctctgaaggtgaaggcaagaaactattagcagcttggagtcctttgtagaaatgtctgggttggtggggagagggtagtgtttataacagtgtatcttttataaatatttaaagtttgaaaatcagtttcttttcacagtttttttcaagttgtgtgtgatctatttttcatgtgttgcgtctctgtaggtgtgtatatgatatatatgtgaattagtaaaaaagaaaaatcctgctcagactcagcctgtacataggaatttctttttttggtactttacttaccagatttcagtcrgtctactttgcaaccttacctgctacctatcatgatgactctttggcattagagtctcaaatctttcttggttcctgaaggaaaaaatgaaattgaggggtgacagcgtgctgacagccctcactcgctctcagcgcctcttctgcctgggctcccacttt

SEQ ID NO: 12722 - DNA, 527 bp, Homo sapiens
  misc_feature (1)...(527): n = A,T,C or G
gattcagtatctcttgtcatctgtgattaagtcatctgtccctgaacaatgtccatggagtttctatgcctgtttcaggaagctggcagccttgcctttgtatttggaaatattgttccccaggcttcactgctctcagctttcatccggatctcctttaagtcagcttgcttagctgcacagtcaccctgaaatcaggayggaaacttttcttctttactttgctgatatatttccataaagcaaggctggaccctggttctccaccctgtcaatgcaatggctgatccaatgtttctttgtagcatcgtggattttttttnttttttttttttttttttttttgcgatggagtcttgctctgtcacccaggctagagtgcagttgcaccatcttggcttggtgcaacctctgcctcccagattcaagtgattctcctgcctcagcctcctgagttgctaggaccacaggtgcacaacatcacatctggctaatttttgtatttttagtagagacagggtttcccc

SEQ ID NO: 12723 - DNA, 527 bp, Homo sapiens
  misc_feature (1)...(527): n = A,T,C or G
gattcagtatctcttgtcatctgtgattaagtcatctgtccctgaacaatgtccatggagtttctatgcctgtttcaggaagctggcagccttgcctttgtatttggaaatattgttccccaggcttcactgctctcagctttcatccggatctcctttaagtcagcttgcttagctgcacagtcaccctgaaatcaggacggaaacttttcttctttactttgctgatatatttccataaagcaaggctggaccctggttctccaccctgtcaatgcaatggctgatccaatgtttctttgtagcatcgtggattttttttnttttttttttttttttttttttgcgatggagtcttgctctgtcacccaggctagagtgcagttgcaccatcttggcttggtgcaacctctgcctcccagattcaagtgattctcctgcctcagcctcctgagttgctrggaccacaggtgcacaacatcacatctggctaatttttgtatttttagtagagacagggtttcccc

SEQ ID NO: 12724 - DNA, 593 bp, Homo sapiens
tgaaggaaatcttccattgtaacaaaattaaattaaaatgcagaagaaacgctagataattttcatagatgttatacctcctgtttgtaatctagcaattcttaaaaagatgtagttttgctatctagcaatctaccttggttgtcattccatttgtataccagtttatttagatttaatcctcaataaaaattattttgaaatgtaaactaggttcaaatggcagacagggtaccaaggaatcaggccaagttccctaattatgctacggctgttcataagccagttaatctttctgagtcatttttctttttttctttcctttctttaattttcttmttattatttctttcttttttttttttttttcttgagacagagtctcacttggttgcccaggctggagtgcagtagagcaatctcggctcactgcaacctctgcctcctgggctcaagcaattctcctgcctcagcctcctgagtagctgggattataggcacacaccaccatgcccggctaatttgtgtatttttagtacagacggggtttcaccatgttggccaggctggtctcaaacccctgatctcaggtg

SEQ ID NO: 12725 - DNA, 593 bp, Homo sapiens
tgaaggaaatcttccattgtaacaaaattaaattaaaatgcagaagaaacgctagataattttcatagatgttatacctcctgtttgtaatctagcaattcttaaaaagatgtagttttgctatctagcaatctaccttggttgtcattccatttgtataccagtttatttagatttaatcctcaataaaaattattttgaaatgtaaactaggttcaaatggcagacagggtaccaaggaatcaggccaagttccctaattatgctacggctgttcataagccagttaatctttctgagtcatttttctttttttctttcctttctttaattttcttattattatttctttcttttttttttttttttcttgagacagagtctcactyggttgcccaggctggagtgcagtagagcaatctcggctcactgcaacctctgcctcctgggctcaagcaattctcctgcctcagcctcctgagtagctgggattataggcacacaccaccatgcccggctaatttgtgtatttttagtacagacggggtttcaccatgttggccaggctggtctcaaacccctgatctcaggtg

SEQ ID NO: 12726 - DNA, 535 bp, Homo sapiens
atggcaaccttattcagatgatatcaatagaaagacaagatggtgcattagaaaaagctcagactttggtattaagtccagctttaaatcccggaccatccacttgacagctgggtgtttgggaagttgtttttctcccaagctaaagagtcttcacttactggttctgcttgstctgactcttccaccagctaagatgcatcttgctccagattgccctttgattttctgtttttctgccacaaccatttatatttccttttatgcttctccttgccacagtgactttgcacaagctctagctttgcttggaatgacacccatctcaaatctcactccacttcacgaagttaacccttatcctgtcttcagactgtgcccgatcatcattttctcaagagcaccttttgcacctaggtaaatttcttctataacatattttcagaaccacatatccattaaaatattacaaaaccattttttcagtgcttattttattaaattctgtctgtaccacataatgatgtaaaactag

SEQ ID NO: 12727 - DNA, 543 bp, Homo sapiens
tttcactattcagtttaaactttcaagattaaatgttatcaaatgtctaatagcagggatatgcttgtttgatatagtgggtgtaatgaatatttattataggcctcaagaattatattgcctgtgaaattctagaaaaacatgttatttattttatataaacattttagagagtactaggaatcttcttttcatcaatattagtgtaattttctagcaagtctcagagaccaaatgaaaaactttattgtggcccttatgtacttttctcccatgacctttagagacctctctgattattagcataacattttctcccctcttaggtcccatttacccttcaacagcctcatttacatttgacttactcactcagcaatactgaagagcttcatagaaagaaaatagactgtatrtggacagaaaaactaagcaatagttctagatttgtctgtgtgtgggaaggggggtttaatatcgttattttcattcatatcaacatctttctgaggcttaccgcttttcttttattcactgttcatg

SEQ ID NO: 12728 - DNA, 541 bp, Homo sapiens
ataaaagtcttttaaaaaaatactactggaacaackggaaatctgtatgggaaaaaaaaaattaacaccagtctttaccccataccatactataaaactaaccctaacgtattgtaaccctaaatataaaagctaaagttgtaaatcttctagaagaaaactagaagaaaaatatttgtgaccttggctttgtgatcttgtctgagatttctcaggacacaaaaagcatgactacaagagagaataattcgtcaagtgggtactctcaggataaaaacttttgcttcttgaaaaatattaagaaaacagaaaatgtacagaataggagaaaatatttatgatatatatatctaaaaacttgtacctagaaattatagaggtctcttataattataacaagacaaccgaagaaaagatacttcacaaatgaaaatatatatttggtcaaataaacacatcaggagaggctcaccatcgtgagtggtgtttggggaactgcaaatgtgtaaaggcctgcactttgtagaacgtacccagactc

SEQ ID NO: 12729 - DNA, 400 bp, Homo sapiens
cctaaatatggcaaatcccaaggctctgttctctttctccctcctatcttttccagggttttttatttccttcctccaatctcatgatcccgcttttacctctatgtggttttctcgaaaaccattctgttcctgtcctggtctccctccccagctggtcctcagtctgactacatgctagtatttcaacttgagtattatactgctaaaacttcaaataggcatatagccctaggccctttggacctgttaaccctgtccaactctacctcttaacctcattcccactgtcttttaaagcaggtgtctccttttaccttttaaattttgtcagggtactagcatctctcaggcactaaggctcaatgttttggaagaactgtgaattmaatgtaattaa

SEQ ID NO: 12730 - DNA, 615 bp, Homo sapiens
tgacacagtctcttcataggtccatttttgaaccacgtgaactcattattttgttaattatgttacagatgtaacaagcatgcataaacttagtattcgataggaatgctaggatcttcacaataacctacctctacccatatacaatcatgcaccctgcaaaatagagtaaagtgtaacaatgtttcagtgaatgattgaccacaaatatgatcatggtcccacaagattataaatatgctatttttactgtatcatttctatgtttagatacacaaatacatccattgtgttatatttgcctatagcaytcagtacagtaacatgctgtacagcttatagcctaggagctataggctacagcctgggcgtgtagtaaactatatcatctaggtttgtgtaaattcactctataatgtttgcacaaggatgaaatcttctaatgacacattcttcagaacatatccctgtcattaagcaacacacaactgtatatatcgcagtccatcccctctcaatagtttattaatatttatactgcaacctagggaatgaaaatatttggaagccatatctgataaaggattaatctccaaaatatataagaagctcttg

SEQ ID NO: 12731 - DNA, 581 bp, Homo sapiens
ggtgggaaccctggggctcccccttgtgagctcaccgaccgtctttagtacttgccgcccataggaagtgcctcaggaaagtcatccatgcagctggggagcaggagcaagttctgccttcagtcaggagcgatgctgttagactggcgggagcggcacagatgtcttgtttgccaagtaacacttcttgtcattccgcctcttcttccctcaccaactcagctaggggacggcactgtaaatctcagagttatttgtgtgcacctctcacaccgctccaattgtcctcatttctctgagctcacgatatccatgtcttcagcctcagtccccaagtggcacacccagtgccgtggcacagctgagactctttccttcccacgactgctcataagcaccgtggctcctccgaactgtctgtcgtgaaaacgctggagccgtctctgactcatracttcccctcactcaccttcagggctccttctctaccgtgtatatgattttagagtcaagaccgctcgggaatgggaatatagctacatatgggaaaacgcggtgcagggagaaaaccaattcagtga

SEQ ID NO: 12732 - DNA, 581 bp, Homo sapiens
ggtgggaaccctggggctcccccttgtgagctcaccgaccgtctttagtacttgccgcccataggaagtgcctcaggaaagtcatccatgcagctggggagcaggagcaagttctgccttcagtcaggagcgatgctgttagactggcgggagcggcacagatgtcttgtttgccaagtaacacttcttgtcattccgcctcttcttccctcaccaactcagctaggggacggcactgtaaatctcagagttatttgtgtgcacctctcacaccgctccaattgtcctcatttctctgagctcacgatatccatgtcttcagcctcagtccccaagtggcacacccagtgccgtggcacagctgagactctttccttcccacgactgctcataagcaccgtggctcctccgaactgtctgtcgtgaaaacgctggagccgtctctgactcatgacttcccctcactcaccttcagggctccttctctaccgtgtatatgattttagagtcargaccgctcgggaatgggaatatagctacatatgggaaaacgcggtgcagggagaaaaccaattcagtga

SEQ ID NO: 12733 - DNA, 446 bp, Homo sapiens
atccatactaattgattaccaacatctacttaaacatttcctgggaaaaggagttcaatttcttgtaacagagcccaatctatatcttgtgatctttttgagtcctaggctgctgctttttaactttaactcattgatcctgattctgtcttttgagtaacacataattaatttacttgctcactctacttgacagcccttcaaatattcatagggctcttaatgactccaataagttttctcagttccataatacttccaataactacttagttgagatgcattgcatcaaaatttgcacaaygctatatgagcatgcacttccttcccacattttcacctcacatttatacacataaagagaatcagatctttagttaaataaaatttgtttaaataataaaaaagttaaaaatcatgaaaatttcaggttaagttcagataat

SEQ ID NO: 12734 - DNA, 1690 bp, Homo sapiens
accgcgctttgagcacgttcttgcctgacatctgttcgacaagacctatagcgctcgtagtgtccactccaagctttatttagagtcagggataaaggtgtttggaattgggagaagggcagagatcttttagtgaagtcttctcctgtgaaytcagtgtcagactgtaatctccatgaaggtagagacatactgtttttgtttactattgtatctcctgtgcctggtactgcatttggcccatgatgggcactcagcaaatgactagatggacaaatggctgaaccagggccattccagtgtttctgtttccatagttccttttcttctctttaggccctgaggaaggagctgaagacctggaaggttgatgttgtgctcaatgatggggcccccaacgttggggctagctgggtccatgatgcttactcacaaggtacagggagtgtggtgcttggagatcaggtgatggtggaggtgggcgcatgccctcctgggctgcagagtgcgtcaactaattgtctctatcctacagcccatttgacactgatggctctacgtttggcttgtgactttttggcccgtggtggcagcttcatcacaaaggttttccgttctcgtgactatcagcctctgctatggatctttcagcagctgttccgccgtgtccaggccaccaagccccaagcctctcgccatgaatctgcagagatctttgtagtctgccaaggtgggcatcatttcctttctcttgatccaggctcccaactcccaaagcacactttttaatatatcctgtcatttttaggattcctggcccctgacaaggttgacagtaaattctttgaccccaaatttgcctttaaggaggttgaagttcaggctaagaccgttactgaattggttactaagaagaagccaaaggtgtgttttggggaatggggtcactcttgggtcctggaactctagggaggttgggcctggtgggtcctacaggtaccttagaagggcctgaccaagcttctctcttttccttcctaaggctgaaggctatgctgagggtgacctcactctctatcaccgtacctcagtcactgacttcctccgagctgccaaccctgttgacttcctctccaaggccagcgaagtgagtctccagccttgagggacatgagggtagccccagaaacatggcctgaggatctcccctgacacctttccatcctcccaaacagatcatggtagatgatgaagagttggcacagcatccagctaccactgaggacatacgggtgtgctgtcaggacatcagagtgttggggcgcaaggagctcaggtatggagtggggtaggcacgggggccaggagccctggaggcagggaaaggccatgatgttggacctctgggaagaggatattgctgtgctaaaggtttgggatgggggcctgagccttttgatttatgtagccgaagcccgaaaggtgggtagtgagcctaaaacagaagggggcggggacaaagagggagatggcaagatcagtaatagtatctctggggcaggtcgctactaaactggagaacaaaacttcggcgatatgtggccaagaagctgaaagaacaagcaaaggcactggacatcaggtgaggagagaacgcagcgaggcaggtgtggactgggtgtccagggga

SEQ ID NO: 12735 - DNA, 600 bp, Homo sapiens
acaattcttcctttgttcttgagttttagtcttatttatccttctattgaatacagtaatcatttctgtctaaaataagagatagtaaaagagatgatattaacttagaattgaaaagaaatgaattttagttatcatgagggccttggagttagggataaatcctcattactaataacctaaaatattcattaaatgacagtgrtagaaaaatgagaagagaaagagtgtatattatatatataggagaaagagtgttggggtttctaataatactttgcctttcttatgctactgttctcctatttaagtcagtgactttcagtgcatttgcaaccataaaatatttaacaactttcacatacatccagcagcagcaaataatataccttcacattgatcctcttaaaggtttagagatgagttggggcatgtcacttcagagatgcttggcatcttaaaatgttctcaggatggtgatgcttgaaaatatgtagttggaaaatactccctcacacatgtgatcctgatatacctaccttcaactcagttactttcattgaaaataaataaaaactattccaacaccaattttcttca

SEQ ID NO: 12736 - DNA, 600 bp, Homo sapiens
acaattcttcctttgttcttgagttttagtcttatttatccttctattgaatacagtaatcatttctgtctaaaataagagatagtaaaagagatgatattaacttagaattgaaaagaaatgaattttagttatcatgagggccttggagttagggataaatcctcattactaataacctaaaatattcattaaatgacagtgatagaaaaatgagaagagaaagagtgtatattatatatataggagaaagagtgttggggtttctaataatactttgcctttcttatgctactgttctcctatttaagtcagkgactttcagtgcatttgcaaccataaaatatttaacaactttcacatacatccagcagcagcaaataatataccttcacattgatcctcttaaaggtttagagatgagttggggcatgtcacttcagagatgcttggcatcttaaaatgttctcaggatggtgatgcttgaaaatatgtagttggaaaatactccctcacacatgtgatcctgatatacctaccttcaactcagttactttcattgaaaataaataaaaactattccaacaccaattttcttca

SEQ ID NO: 12737 - DNA, 600 bp, Homo sapiens
acaattcttcctttgttcttgagttttagtcttatttatccttctattgaatacagtaatcatttctgtctaaaataagagatagtaaaagagatgatattaacttagaattgaaaagaaatgaattttagttatcatgagggccttggagttagggataaatcctcattactaataacctaaaatattcattaaatgacagtgatagaaaaatgagaagagaaagagtgtatattatatatataggagaaagagtgttggggtttctaataatactttgcctttcttatgctactgttctcctatttaagtcagtgwctttcagtgcatttgcaaccataaaatatttaacaactttcacatacatccagcagcagcaaataatataccttcacattgatcctcttaaaggtttagagatgagttggggcatgtcacttcagagatgcttggcatcttaaaatgttctcaggatggtgatgcttgaaaatatgtagttggaaaatactccctcacacatgtgatcctgatatacctaccttcaactcagttactttcattgaaaataaataaaaactattccaacaccaattttcttca

SEQ ID NO: 12738 - DNA, 600 bp, Homo sapiens
acaattcttcctttgttcttgagttttagtcttatttatccttctattgaatacagtaatcatttctgtctaaaataagagatagtaaaagagatgatattaacttagaattgaaaagaaatgaattttagttatcatgagggccttggagttagggataaatcctcattactaataacctaaaatattcattaaatgacagtgatagaaaaatgagaagagaaagagtgtatattatatatataggagaaagagtgttggggtttctaataatactttgcctttcttatgctactgttctcctatttaagtcagtgactttcagtgcatttgcaaccataaaatatttaacaastttcacatacatccagcagcagcaaataatataccttcacattgatcctcttaaaggtttagagatgagttggggcatgtcacttcagagatgcttggcatcttaaaatgttctcaggatggtgatgcttgaaaatatgtagttggaaaatactccctcacacatgtgatcctgatatacctaccttcaactcagttactttcattgaaaataaataaaaactattccaacaccaattttcttca

SEQ ID NO: 12739 - DNA, 600 bp, Homo sapiens
acaattcttcctttgttcttgagttttagtcttatttatccttctattgaatacagtaatcatttctgtctaaaataagagatagtaaaagagatgatattaacttagaattgaaaagaaatgaattttagttatcatgagggccttggagttagggataaatcctcattactaataacctaaaatattcattaaatgacagtgatagaaaaatgagaagagaaagagtgtatattatatatataggagaaagagtgttggggtttctaataatactttgcctttcttatgctactgttctcctatttaagtcagtgactttcagtgcatttgcaaccataaaatatttaacaactttcacatacatccagcagcagcaaataatataccttcacattgatcctcttaaaggtttagagatgagttggggcatgtcacttcagagatgcttggcatcttaaaatgttctcaggatggtgatgcttgaaaatatgtagttggaaaatactccytcacacatgtgatcctgatatacctaccttcaactcagttactttcattgaaaataaataaaaactattccaacaccaattttcttca

SEQ ID NO: 12740 - DNA, 625 bp, Homo sapiens
tgtttctgtttgacctttttgatttgcctgaatcagaccactagcaggatattaaggctacttctttacttgggtaaagctcagcttacatcttttctttttctttttttccatctagtatcagatttttgactcagtatcaggtgtgtagcctcactggtaaacgtcttctttagggtctgtatgtctgcatcagaaataggctccacatctcttaaagccttgttggttcaaaaccatgatcttctctctctctctctctctcttttttttttttttttttttttgagacggagtcttgctccgtcacccaggctggagtacagtggcgcgatctcggctcactgcaacctccacatcccaggctcaagtgattctcctacctcagcctcctgagtaactgggattacaggcacgtgccaccatacctggctaatttttgtatttttagtagagacggggttttgccatgttggccaggctggtttcgaactcctgatctcaagtgatgcacccacctcagcctcccaaagtgttgggattacaggcatgagccacygcgtctggcttctttttctgcttgaagcatgcctccttggattccttttttttttttttttttttt

SEQ ID NO: 12741 - DNA, 513 bp, Homo sapiens
ctccaatgaaatagaaggaacatggagaactgaggtaaagaggtaaagagagagaataaacagattctcctttcatcttagaaatggcagatgagactgcttcccagaatggatattcctggtctttcaagccccaccttctttgacctcatgcaacaggcccctcattcaccaatcactccagtcttcatgacttttgtctaggcagttccaaaaggattacttacaccaagggggcttctcagagcgctgctggagttgcaggggaggtgaatgaagagtacgtggtggagaaaatgggttatctgaggcctggctgctgtgcatggaatcaaagagggctggaaaggaggtagggtgaagggagagggaagaaaaaaagacatatgaggaagaatccaggagccacacgttctcaacataagtcaaagccaacttacccttccttggctgagaagtagcatttcctggggacccttcaaycaaaccattttcaattttttaaacgttata

SEQ ID NO: 12742 - DNA, 846 bp, Homo sapiens
ggtttgaggctgggccctctttcaggttggtccctgtgtccttctgacatacccacatccctttcatcttgagcactttcttacttcccagaaccacaaggtgttccggactcatcttcagcatttccagccccagtcctaggatccgccatttttgaacattttgaacagagcagactggccasttttgacccctttttccattaagatgtaggtagttctcttgcgggaaagaacccagccttattatctggtgcaagccagtcaattgcaagtaacttgaaagggagttcagtgttttacagggtgtttgtttccatggctggcatagctaggacctcaccttcaggcccatcgccctttctctcaaaaggttttcagtttgctagaagccactttcctccctcactttacttagattgcaatgtagacccgccccaagtgagtcaggctaaggagttgagagaataatttagagaggccctcttctcctcctgcaagtcctttgacctgccagcctgcaaatctgctatataaagatagataagtagccagctagctacacacacacacaaacacacacacacacacacacacacacacacacacccatataccaaaaccgagaaggctacggagagagggcagtggaggcattcactctgagaattactgttcaaaggggaaaaacagggaggcacttgggcaatccagaaatgcaggtctgagctggcctagggttttagcaaaggaggagtgagttcttcagaacaggaccaattaaaaccttttaaagtaattgttcccctgccttctttcaaagttgagctctaatcgtggcctttc

SEQ ID NO: 12743 - DNA, 533 bp, Homo sapiens
gaaatygctttacatttttatatttattttcacagaaggacatatgtgaattatttatagttctttcccattatccataatgtcctgtacaaatataacataactgattaaagtaacttaaaaacaatactctggcagtgtatcctcaggggaatatattctaaagacaaaaataaaattaagaggcaaagacattttaaacttagtattggatgtgttttttaaaaatggtgttggcaccttaatactaaaactcttgggtgtgaactgtgggttagcacacaggaatcaatatatccctgttttgggaagcagggttttcactgtggaagaagtggaatgagagaagctgtggaagaagcctgtgttactggatttgatactgtggcttcaaacaccaacaatactatgtgttcctgctgtgaagtagtgagaggttcagaaattcaccaaacagtgttcttgccagaaatgttgcacctaaatatagtcacaaggaaagggacgaatatagaatgtgggatgttttgcag

SEQ ID NO: 12744 - DNA, 533 bp, Homo sapiens
gaaatcgctttacatttttatatttattttcacagaaggacatatgtgaattatttatagttctttcccattatccataatgtcctgtacaaatataacataactgattaaagtaacttaaaaacaatactctggcagtgtatcctcaggggaatatattctaaagacaaaaataaaattaagaggcaaagacattttaaacttagtattggatgtgttttttaaaaatggtgttggcaccttaatactaaaactcttgggtgtgaactgtggrttagcacacaggaatcaatatatccctgttttgggaagcagggttttcactgtggaagaagtggaatgagagaagctgtggaagaagcctgtgttactggatttgatactgtggcttcaaacaccaacaatactatgtgttcctgctgtgaagtagtgagaggttcagaaattcaccaaacagtgttcttgccagaaatgttgcacctaaatatagtcacaaggaaagggacgaatatagaatgtgggatgttttgcag

SEQ ID NO: 12745 - DNA, 533 bp, Homo sapiens
gaaatcgctttacatttttatatttattttcacagaaggacatatgtgaattatttatagttctttcccattatccataatgtcctgtacaaatataacataactgattaaagtaacttaaaaacaatactctggcagtgtatcctcaggggaatatattctaaagacaaaaataaaattaagaggcaaagacattttaaacttagtattggatgtgttttttaaaaatggtgttggcaccttaatactaaaactcttgggtgtgaactgtgggttagcacacaggaatcaatatatccctgttttgggaagcagggttttcactgtggaagaagtggaatgagagaagctgtggaagaagcctgtgttactggatttgatactgtggcttcaaacaccaacaatactatgtgttcctgctgtgaagtagtgagaggttcagaaattcaccaaayagtgttcttgccagaaatgttgcacctaaatatagtcacaaggaaagggacgaatatagaatgtgggatgttttgcag

SEQ ID NO: 12746 - DNA, 547 bp, Homo sapiens
ggacaataaggaggacatcctagagaaatctctcctggtgaggaatgcaatgcgctctcctctaggagaatgtttcctcaaaaaaatggctgtttttccttgagtcttcatcctgtcacttccaatggccaaatacccaaacccagccaccccaggtcctctagaaggaggggatagtcagatactmggcaagaaccaggaaccctaaggatatgactcctctcctcagtggcacagctccaacagaggtcccatctggagaaaatgctgccttaagatttgaaaataaaagctttttgttatgtacagaagctaaaaacctgacatggctttacctctgctggtcacttaggggcacaggatagcaagggacgagctctctctctcagatgtgttttggccgcatcccagagggatgagaaaaaataaaagaaaaagaaacagtaagacctcctgatgcttgggctatccagctgctggagtggccatgaaatctgctcttctaaacttatttcagtcacaagtttttcttctacttacctctgag

SEQ ID NO: 12747 - DNA, 508 bp, Homo sapiens
ctccaatctctgcttccatagtcacatcttctcctctgaccctgccttctcttataaaagtaattatatctgtaattatatcaggcacacccagctactccaggataaccccaaaatctcaagaaacttaacttaatcacatctgtaaagccccttttgcaatataacactcataggttccagggattaggacagggacatatttggaggagggactattattcagcccaccacaggaggtaagtggggcagatcaattggtgactctgaaagataatatgcccaagaccctgtgcccagtggtccaatcaggctccttccctactgccggtcttaccactccyatcttagattgaagtaactttattgcacaattcatatgtaaatatttatctttttaaaaatggaaacattatcaatagaactaagtcctctgaccatcttccataatcctgatcctctcttcagctccttctcctaccccacaggtcagcactgttctttgctt

SEQ ID NO: 12748 - DNA, 521 bp, Homo sapiens
ggcctaaacctaatgacctggagtccttataagaagaggagagagagcacagagacaagagagaaggaggccaagtgaggacagaggcagagattggagccatgaagctgcaaacccaggagctccaaggactgccagccaccatcaggagccagaagaggccagcccgagagggtcctccccgagaggtctcccccgagaggcttccaaaggagtgtggcccttctgacgcttggtctccagcttcctgtggcactgttacagctgccctaatacatgactccagacactcccctcagccggacaccaacatttctccagccatatacttcacacaggcgatctgagatgggaagagaggttggcttacattagaacattttacacaaccatatatgaacacgatgttrgggcttcttctcagtcctagaagttgccaatgcatggctgcttgagggaacaggctagggtccgcccaccacagaaccaagcgtccatctctgaagacatccgggtgagct

SEQ ID NO: 12749 - DNA, 1359 bp, Homo sapiens
ctgttttataatagcatattccttctacgtactcrgtcactgctagcagatccccccaatgcatctatatctaagtgtacaatgactcttccagaatgaacatgacaaaggcccccagatgtcttatctgctagggacaagcctaatattttcctgctactgagcttgatgtagtgtacacttgctcaaacctcaatgcaaagtatggagtgtagggtctctaaatttaataataataataaacacaggaaaaaaccactagaacaccctctctgtatatatatgtactgctctgtttcggtcttctgccataaaccccacaggaagtgactattttgcacaagagctcacttgaggaaatgcaaagtcaaacccccttcccctggtaccactgaagtgaatcactgcagctcaggcaactctttcagctcaaatccttgagtggtttttagtgtcttgaaggcataagttttaagtactctaggaaagagaagagtcaggtgtcactgaaaaataaacctgagctgatcccttgaggtgctaaaacttgacgtgctgacagcagcgatggatcagggtctgcagaggggtggcacgctccactagaggcaggtaatcttgttactttctagagaggcttggcctggtctcagcaataggccattccttttactcctcagtcctttgtaatgctcacaggtaaaaccagcaagtgaacaacgcatgcttggcaggagggatgaaatgcaatttgaactcaggacataaaaggctctccttaaagggttcttgtcgaggatgattgttccagtgggtctgatactccttcctgcttcccctcatggtagaactcttctttcccatggggagctcattcctggtggttcaagtggaaccaatccagcaactccaccaattctcctccactggtccagctcttccaccaacccaaatggatgggctggtgcccaggctcggacaaatcctctccctggtcataatgaccaattcagtgatgggcatttgacctatagtgggccagagtcatccctaggaattatctgttacattttcccaaaaacccctctttccttcaggttcctaagctagaagaaggaattgggctaccaggggccatttcatcaaccaggtacaaagagctcaataaataagcacagccgatgggcaaagctgaggcaggcctggtcctgattcactgtctgaccacctggatccagctgtgcttgaggtgtacccctggattgcccaaggccatgagcccatacatttccttttttgttacagctacttttgagtctgtttctgtcacttttagtccaaaggcacaattgtggaatt

SEQ ID NO: 12750 - DNA, 1359 bp, Homo sapiens
ctgttttataatagcatattccttctacgtactcagtcactgctagcagatccccccaatgcatctatatctaagtgtacaatgactcttccagaatgaacatgacaaaggcccccagatgycttatctgctagggacaagcctaatattttcctgctactgagcttgatgtagtgtacacttgctcaaacctcaatgcaaagtatggagtgtagggtctctaaatttaataataataataaacacaggaaaaaaccactagaacaccctctctgtatatatatgtactgctctgtttcggtcttctgccataaaccccacaggaagtgactattttgcacaagagctcacttgaggaaatgcaaagtcaaacccccttcccctggtaccactgaagtgaatcactgcagctcaggcaactctttcagctcaaatccttgagtggtttttagtgtcttgaaggcataagttttaagtactctaggaaagagaagagtcaggtgtcactgaaaaataaacctgagctgatcccttgaggtgctaaaacttgacgtgctgacagcagcgatggatcagggtctgcagaggggtggcacgctccactagaggcaggtaatcttgttactttctagagaggcttggcctggtctcagcaataggccattccttttactcctcagtcctttgtaatgctcacaggtaaaaccagcaagtgaacaacgcatgcttggcaggagggatgaaatgcaatttgaactcaggacataaaaggctctccttaaagggttcttgtcgaggatgattgttccagtgggtctgatactccttcctgcttcccctcatggtagaactcttctttcccatggggagctcattcctggtggttcaagtggaaccaatccagcaactccaccaattctcctccactggtccagctcttccaccaacccaaatggatgggctggtgcccaggctcggacaaatcctctccctggtcataatgaccaattcagtgatgggcatttgacctatagtgggccagagtcatccctaggaattatctgttacattttcccaaaaacccctctttccttcaggttcctaagctagaagaaggaattgggctaccaggggccatttcatcaaccaggtacaaagagctcaataaataagcacagccgatgggcaaagctgaggcaggcctggtcctgattcactgtctgaccacctggatccagctgtgcttgaggtgtacccctggattgcccaaggccatgagcccatacatttccttttttgttacagctacttttgagtctgtttctgtcacttttagtccaaaggcacaattgtggaatt

SEQ ID NO: 12751 - DNA, 1359 bp, Homo sapiens
ctgttttataatagcatattccttctacgtactcagtcactgctagcagatccccccaatgcatctatatctaagtgtacaatgactcttccagaatgaacatgacaaaggcccccagatgtcttatctgctagggacaagcctaatattttcctgctactgagcttgaygtagtgtacacttgctcaaacctcaatgcaaagtatggagtgtagggtctctaaatttaataataataataaacacaggaaaaaaccactagaacaccctctctgtatatatatgtactgctctgtttcggtcttctgccataaaccccacaggaagtgactattttgcacaagagctcacttgaggaaatgcaaagtcaaacccccttcccctggtaccactgaagtgaatcactgcagctcaggcaactctttcagctcaaatccttgagtggtttttagtgtcttgaaggcataagttttaagtactctaggaaagagaagagtcaggtgtcactgaaaaataaacctgagctgatcccttgaggtgctaaaacttgacgtgctgacagcagcgatggatcagggtctgcagaggggtggcacgctccactagaggcaggtaatcttgttactttctagagaggcttggcctggtctcagcaataggccattccttttactcctcagtcctttgtaatgctcacaggtaaaaccagcaagtgaacaacgcatgcttggcaggagggatgaaatgcaatttgaactcaggacataaaaggctctccttaaagggttcttgtcgaggatgattgttccagtgggtctgatactccttcctgcttcccctcatggtagaactcttctttcccatggggagctcattcctggtggttcaagtggaaccaatccagcaactccaccaattctcctccactggtccagctcttccaccaacccaaatggatgggctggtgcccaggctcggacaaatcctctccctggtcataatgaccaattcagtgatgggcatttgacctatagtgggccagagtcatccctaggaattatctgttacattttcccaaaaacccctctttccttcaggttcctaagctagaagaaggaattgggctaccaggggccatttcatcaaccaggtacaaagagctcaataaataagcacagccgatgggcaaagctgaggcaggcctggtcctgattcactgtctgaccacctggatccagctgtgcttgaggtgtacccctggattgcccaaggccatgagcccatacatttccttttttgttacagctacttttgagtctgtttctgtcacttttagtccaaaggcacaattgtggaatt

SEQ ID NO: 12752 - DNA, 1359 bp, Homo sapiens
ctgttttataatagcatattccttctacgtactcagtcactgctagcagatccccccaatgcatctatatctaagtgtacaatgactcttccagaatgaacatgacaaaggcccccagatgtcttatctgctagggacaagcctaatattttcctgctactgagcttgatgtagtgtacacttgctcaaacctcaatgcaaagtatggagtgtagggtctctaaatttaataataataataaacacaggaaaaaaccactagaacaccctctctgtatatatatgtactgctctgtttcggtcttctgccataaaccccacaggaagtgactattttgcacaagagctcacttgaggaaatgcaaagtcaaacccccttcccctggtaccacygaagtgaatcactgcagctcaggcaactctttcagctcaaatccttgagtggtttttagtgtcttgaaggcataagttttaagtactctaggaaagagaagagtcaggtgtcactgaaaaataaacctgagctgatcccttgaggtgctaaaacttgacgtgctgacagcagcgatggatcagggtctgcagaggggtggcacgctccactagaggcaggtaatcttgttactttctagagaggcttggcctggtctcagcaataggccattccttttactcctcagtcctttgtaatgctcacaggtaaaaccagcaagtgaacaacgcatgcttggcaggagggatgaaatgcaatttgaactcaggacataaaaggctctccttaaagggttcttgtcgaggatgattgttccagtgggtctgatactccttcctgcttcccctcatggtagaactcttctttcccatggggagctcattcctggtggttcaagtggaaccaatccagcaactccaccaattctcctccactggtccagctcttccaccaacccaaatggatgggctggtgcccaggctcggacaaatcctctccctggtcataatgaccaattcagtgatgggcatttgacctatagtgggccagagtcatccctaggaattatctgttacattttcccaaaaacccctctttccttcaggttcctaagctagaagaaggaattgggctaccaggggccatttcatcaaccaggtacaaagagctcaataaataagcacagccgatgggcaaagctgaggcaggcctggtcctgattcactgtctgaccacctggatccagctgtgcttgaggtgtacccctggattgcccaaggccatgagcccatacatttccttttttgttacagctacttttgagtctgtttctgtcacttttagtccaaaggcacaattgtggaatt

SEQ ID NO: 12753 - DNA, 1359 bp, Homo sapiens
ctgttttataatagcatattccttctacgtactcagtcactgctagcagatccccccaatgcatctatatctaagtgtacaatgactcttccagaatgaacatgacaaaggcccccagatgtcttatctgctagggacaagcctaatattttcctgctactgagcttgatgtagtgtacacttgctcaaacctcaatgcaaagtatggagtgtagggtctctaaatttaataataataataaacacaggaaaaaaccactagaacaccctctctgtatatatatgtactgctctgtttcggtcttctgccataaaccccacaggaagtgactattttgcacaagagctcacttgaggaaatgcaaagtcaaacccccttcccctggtaccactgaagtgaatcactgcagctcaggcaactctttcagctcaaatccttgagtggtttttagtgtcttgaaggcataagttttaagtactctaggaaagagaagagtcaggtgtcactgaaaaataaacctgagctgatcccttgaggtgctaaaacttgacgtgctgacagcagcgatggatcagggtctgcagaggggtggcacgctccactagaggcaggtaatcttgttactttctagagaggcttggcctggtctcagcaataggccattccttttactcctcagtcctttgtaatgctcacaggtaaaaccagcaagtgaacaacgcatgcttggcaggagggatgaaatgcaatttgaactcaggacataaaaggctctccttaaagggttcttgtcgaggatgattgttccagtgggtctgatactccttcctgcttcccctcatggtagaactcttctttcccatggggagctcattcctggtggttcaagtggaaccaatccagcaactccaccaattctcctccactggtccagctcttccaccaacccaaatggatgggctggtgcccaggctcggacaaatcctctccctggtcataatgaccaattcagtgatgggcatttgacctatagtgggccagagtcatccctaggaattatctgttacattttcccaaaaacccctctttccttcaggttcctaagctagaagaaggaattgggctaccaggggccatttcatcaaccaggtacaaagagctcaataaataagcacagccgatgggcaaagctgaggcaggcctggtcctgattcactgtctgaccacctggatccagctgtgcttgaggtgtacccctggattgcccarggccatgagcccatacatttccttttttgttacagctacttttgagtctgtttctgtcacttttagtccaaaggcacaattgtggaatt

SEQ ID NO: 12754 - DNA, 1359 bp, Homo sapiens
ctgttttataatagcatattccttctacgtactcagtcactgctagcagatccccccaatgcatctatatctaagtgtacaatgactcttccagaatgaacatgacaaaggcccccagatgtcttatctgctagggacaagcctaatattttcctgctactgagcttgatgtagtgtacacttgctcaaacctcaatgcaaagtatggagtgtagggtctctaaatttaataataataataaacacaggaaaaaaccactagaacaccctctctgtatatatatgtactgctctgtttcggtcttctgccataaaccccacaggaagtgactattttgcacaagagctcacttgaggaaatgcaaagtcaaacccccttcccctggtaccactgaagtgaatcactgcagctcaggcaactctttcagctcaaatccttgagtggtttttagtgtcttgaaggcataagttttaagtactctaggaaagagaagagtcaggtgtcactgaaaaataaacctgagctgatcccttgaggtgctaaaacttgacgtgctgacagcagcgatggatcagggtctgcagaggggtggcacgctccactagaggcaggtaatcttgttactttctagagaggcttggcctggtctcagcaataggccattccttttactcctcagtcctttgtaatgctcacaggtaaaaccagcaagtgaacaacgcatgcttggcaggagggatgaaatgcaatttgaactcaggacataaaaggctctccttaaagggttcttgtcgaggatgattgttccagtgggtctgatactccttcctgcttcccctcatggtagaactcttctttcccatggggagctcattcctggtggttcaagtggaaccaatccagcaactccaccaattctcctccactggtccagctcttccaccaacccaaatggatgggctggtgcccaggctcggacaaatcctctccctggtcataatgaccaattcagtgatgggcatttgacctatagtgggccagagtcatccctaggaattatctgttacattttcccaaaaacccctctttccttcaggttcctaagctagaagaaggaattgggctaccaggggccatttcatcaaccaggtacaaagagctcaataaataagcacagccgatgggcaaagctgaggcaggcctggtcctgattcactgtctgaccacctggatccagctgtgcttgaggtgtacccctggattgcccaaggccatgagcccatacatttccttttttgttacagctacttttgagtctgtttctgtcacttwtagtccaaaggcacaattgtggaatt

SEQ ID NO: 12755 - DNA, 576 bp, Homo sapiens
tattcatcaacgagataaagacaaatagaacaaaataggcaaaagactgatgtctggcatagaggaaatgttttgtgatttgttttaaagtaaatagaataaatatgcgaaccttgggtaactgactcactgggaagatccacacatagtgtcagaaaaaaggttcagaaaatgttaaccratattattacaagccagaaacaggggtgaaggcagaataaaggtcccataggattgtaacttctcaatgtttaagaaacccagaatagtagcaaaatacgatacacataaataatagaagatagagtagactcaatcagaaaagaggaacaaaattctgtgacgatggacaccgtctaaagaatcttgtcgtgattttcttgccttgacataatgaggattgctggggaccatcttggggactttctaccacatcatgttaacaaatggtcaatttgctttcttatcaccttctttcagtggctgggtcctaagacttgttatacaatgacatgttaattctgtcctcttaaatatgtccatgttttccaccatggcctgttgtttaaattccaa

SEQ ID NO: 12756 - DNA, 872 bp, Homo sapiens
tgacaaactaaattatactgtgattcattatagtaatatctcagggcaattgagrtattaaattgaaaaatcagggcggtgatttttcctttatgagagaaagtgccccttttagcaaaaagtaatgcagacttcccaaaagtaatcattgtggttttgtattggtagagtctgtgatttagagattctttgccataatattctgtttctccacagaatcagggatatatccaggaacaaaaagaaattaagaaaagcgtttccaagcagttaaaatcactgtcttaaagagtactaatgtgcagacagggtttacttttgattttatatagttcttacgtctatctcttgcatctcctcccaaaaagaaaaagacaggctttcagaaacaagttgtggctcatttctgctttcctttctctcataactctttttattttcattatattatatatgcacatagtttaaaaagtcagatctgtagaagcatattatagaaactagtattccttaacactacgctctaattcctgctatcatttttcttttctctagaggcaaattctgaaacttctaaagctgatttttttttttttttttttttttttggtatttacctcttgtgtggaggttgctagttgtctgtcaatatgtttttcccatgttaaaacttaagctgaattaaatctaaaggagtttaattgagcaatgaacagtttgctaactgggcagatcccagaatcacagcagattcacagagactccagtgcagccacgtggtggaagaagatttatagacaaaaaatgggaaatgacatagagaaatcggaagtgaggtacagaactgctggattggttacagctcagtgttt

SEQ ID NO: 12757 - DNA, 872 bp, Homo sapiens
tgacaaactaaattatactgtgattcattatagtaatatctcagggcaattgaggtattaaattgaaaaatcagggcggtgatttttcctttatgagaraaagtgccccttttagcaaaaagtaatgcagacttcccaaaagtaatcattgtggttttgtattggtagagtctgtgatttagagattctttgccataatattctgtttctccacagaatcagggatatatccaggaacaaaaagaaattaagaaaagcgtttccaagcagttaaaatcactgtcttaaagagtactaatgtgcagacagggtttacttttgattttatatagttcttacgtctatctcttgcatctcctcccaaaaagaaaaagacaggctttcagaaacaagttgtggctcatttctgctttcctttctctcataactctttttattttcattatattatatatgcacatagtttaaaaagtcagatctgtagaagcatattatagaaactagtattccttaacactacgctctaattcctgctatcatttttcttttctctagaggcaaattctgaaacttctaaagctgatttttttttttttttttttttttttggtatttacctcttgtgtggaggttgctagttgtctgtcaatatgtttttcccatgttaaaacttaagctgaattaaatctaaaggagtttaattgagcaatgaacagtttgctaactgggcagatcccagaatcacagcagattcacagagactccagtgcagccacgtggtggaagaagatttatagacaaaaaatgggaaatgacatagagaaatcggaagtgaggtacagaactgctggattggttacagctcagtgttt

SEQ ID NO: 12758 - DNA, 872 bp, Homo sapiens
tgacaaactaaattatactgtgattcattatagtaatatctcagggcaattgaggtattaaattgaaaaatcagggcggtgatttttcctttatgagagaaagtgccccttttagcaaaaagtaatgcagacttcccaaaagtaatcattgtrgttttgtattggtagagtctgtgatttagagattctttgccataatattctgtttctccacagaatcagggatatatccaggaacaaaaagaaattaagaaaagcgtttccaagcagttaaaatcactgtcttaaagagtactaatgtgcagacagggtttacttttgattttatatagttcttacgtctatctcttgcatctcctcccaaaaagaaaaagacaggctttcagaaacaagttgtggctcatttctgctttcctttctctcataactctttttattttcattatattatatatgcacatagtttaaaaagtcagatctgtagaagcatattatagaaactagtattccttaacactacgctctaattcctgctatcatttttcttttctctagaggcaaattctgaaacttctaaagctgatttttttttttttttttttttttttggtatttacctcttgtgtggaggttgctagttgtctgtcaatatgtttttcccatgttaaaacttaagctgaattaaatctaaaggagtttaattgagcaatgaacagtttgctaactgggcagatcccagaatcacagcagattcacagagactccagtgcagccacgtggtggaagaagatttatagacaaaaaatgggaaatgacatagagaaatcggaagtgaggtacagaactgctggattggttacagctcagtgttt

SEQ ID NO: 12759 - DNA, 931 bp, Homo sapiens
tctctttgaactgttgtctgcacattggaatcatctggggagctttaaaaaatggagatagtagaatacatgcttggctctagaaatataacggtgaaccacacaggtgtggtctgttggaacagaagtcagagcgttatgatgaaacacagcttatttattttcaaggaagcagtttacaaagtgttaaaattttgccaagtggataatcagaagaaaaacctccacgttaagtctttagcagagaataagtttaaaccacattggagataaaaaccagaaacttgataatcagacaagatgatggatgccctcccaacctcctcccatcctcaattgatttcatgccttttcagtaactgccaaaactggctaagatgcttagtaaagacaccacatgtgtgagtcccatcctaggcctactgaataataaccaacatgtaacactatgttcctggcactgttgtaagtgattggcataattatccattcacttactcctgacaataactctataaagtggatactattattatccacttcttaaagatgaagaaacacaggtacagagaagcttaatgatgtgcccaaagtcacactgctagtaggtgacagaaataaggtttgagcctaagactgcattcttaacctccataccatattgtggctggattttaagagcagaattttctgctgtttactaaaaacaacaggcttttagcccatgtccaagactgatgatgatacacgtatgcaggtcagctaaggggatccactccagatctgaataaggaygattgtcacataaaattagtccccaaaacagagtcagggtgcaaaaggattgtatttcggttcaactaagaaatgctataaagccacttttatgtagctggccaacaatgtgttagtttttatgaaatatgaaacg

SEQ ID NO: 12760 - DNA, 931 bp, Homo sapiens
tctctttgaactgttgtctgcacattggaatcatctggggagctttaaaaaatggagatagtagaatacatgcttggctctagaaatataacggtgaaccacacaggtgtggtctgttggaacagaagtcagagcgttatgatgaaacacagcttatttattttcaaggaagcagtttacaaagtgttaaaattttgccaagtggataatcagaagaaaaacctccacgttaagtctttagcagagaataagtttaaaccacattggagataaaaaccagaaacttgataatcagacaagatgatggatgccctcccaacctcctcccatcctcaattgatttcatgccttttcagtaactgccaaaactggctaagatgcttagtaaagacaccacatgtgtgagtcccatcctaggcctactgaataataaccaacatgtaacactatgttcctggcactgttgtaagtgattggcataattatccattcacttactcctgacaataactctataaagtggatactattattatccacttcttaaagatgaagaaacacaggtacagagaagcttaatgatgtgcccaaagtcacactgctagtaggtgacagaaataaggtttgagcctaagactgcattcttaacctccataccatattgtggctggattttaagagcagaattttctgctgtttactaaaaacaacaggcttttagcccatgtccaagactgatgatgatacacgtatgcaggtcagctaaggggatccactccagatctgaataaggatgattgtcacataaaattagtccccaaaacagagtcagggtgcaaaaggattgtatttcrgttcaactaagaaatgctataaagccacttttatgtagctggccaacaatgtgttagtttttatgaaatatgaaacg

SEQ ID NO: 12761 - DNA, 531 bp, Homo sapiens
tccagtcacaagggcccttcatgactgtgctcaaggaacacaaaaaaggtcaacttgtttttatgattgtctattgttttttaataactaccatataggaagagattgaaatagaggtttctccaaaacagtgctggatgaaagcctcaaggggctcatacaacctgttccaggacttggtgaccattgtttgtgtccatgttcaattgagtttgaatttaatttttaacttttcctctacacttggcctcaatttgatactcaattgtaggaaaatacccttagagatacacggggaagtcatagttgctataggttacagatacagggtaagcagaggagaattaaaaccacaattaataaaaaccacaccaccacggcttctcaaggagagtaatattgtgagaattgtcagggatatacacataacattaagtatgcagtaaggcataaacccctccttgggctgtggtaagcatatctaatgtcattcgattttccaacacaacagtactyagctgagcaaattca

SEQ ID NO: 12762 - DNA, 646 bp, Homo sapiens
tttccatagttatagatttgaccaccatttaaccatttttttacttataaaaatgggaatttgtataatcgaaactaataacttaaaccatatctcagcaaagtgatgccatcatccacaatattatccttaatgggctagttgctctgaaaagtcaggtttacttttaatgtcttctaggcaatccagagtataatagtgcaaaacctccttccttactacaacactggccctttttcggggaacatggtttatatgaaattcatgtttttgataaaaataattggagtgggcattttgatatgtgagagaagagaactggtacataaaccttctgggaatttgttttgattcagcttttttccaaacccacctactccacttcagttttaaaaccaatatataacaccattttgttctcattcctcataattttatgttcatatttcatccagytttaatgttgaaagtatgcagaacaagacagcttgttcaacaagtggctgttttcctactttatgcccttctctgaaagaatgtacaactgtgggttattccttgaacttctgtgtctttcagcctattccagagccaaaaggaggtcggcttatccaggttgaaggctactggattgcggtgggagaca

SEQ ID NO: 12763 - DNA, 524 bp, Homo sapiens
tgcccacgagaataaagtctgctctgaagtttgtgatctatagaagccgaccctctgatcccagcacgtgctcctaatgctctggcgggaccgctgctctccttcatgtgcagccacacgtcctgctgtcccctactttcccagccaccctccctcttcccatctggaccaagagccctcagcacctgggactctgtcttagtcatctttgtattcggagcgtttaggacagttcctaatacctcaaagacaagcagcaaatgcctgacacacaaatgcaggaatgaatgagagatcatgtgaggcaataaaaaaacaggaggaaacaaagggctcatcccagacacrcactcagctaatgagggctgggggacaaagcccttcccacacacagatgactaggggacagccagaaacccaaactcaccgcaggcagagcagctgtaaggccgctcccccgtgtgccgaattctgtgctttactaacttcctttgcatattaaaagactttccacactcatcaca

SEQ ID NO: 12764 - DNA, 509 bp, Homo sapiens
atcttagcactttgggaggcagaggcgggtgtatcacctgaggtcaggagtttgagactggcctggccagcatggcgaaaccccgtctctactaaaaatacaaaaattaacckggtatggtggcacatgcctacaatcccagctacttgggaggcagaggcaggagaatcgcttgaacccagggggtggaggttgcagtgagccgagattcagccacttcactacagcctgggcaaaagagcaaaaactctgtctcaaaaaaataaataaataaaaaataaacacatgcctcactttgaaatggaattcagaaagttcagatttcaaacaccatgcaaaacaagacatgcaggggccaacagtgaagtgatgccatcagaggcagcaggagggctatgctcccaggcatctggaaggagcggcagatgacactgggccctgaacttgactttcagcgttcaggtagctacagcagaaagggagatgcgctgcccgccgcagcttttgtt

SEQ ID NO: 12765 - DNA, 509 bp, Homo sapiens
atcttagcactttgggaggcagaggcgggtgtatcacctgaggtcaggagtttgagactggcctggccagcatggcgaaaccccgtctctactaaaaatacaaaaattaaccgggtatggtggcacatgcctacaatcccagctacttgggaggcagaggcaggagaatcgcttgaacccagggggtggaggttgcagtgagccgagattcagccacttcactacagcctgggcaaaagagcaaaaactctgtctcaaaaaaataaataaataaaaaataaacacatgcctcactttgaaatggaattcagaaagttcagatttcaaacaccatgcaaaacaagacatgcaggggccaacagtgaagtgatgcyatcagaggcagcaggagggctatgctcccaggcatctggaaggagcggcagatgacactgggccctgaacttgactttcagcgttcaggtagctacagcagaaagggagatgcgctgcccgccgcagcttttgtt

SEQ ID NO: 12766 - DNA, 1226 bp, Homo sapiens
taccttttggcttaatgatttcattttttaggaatttatcctaaggaacaaggaagagtagcaaataaggaattttatacaacggtgttcatcatattttscaacaataagggaacattattagatgtgttatcaggcattcatagggtggactattttgcagtgattagaaatgattttgaatattactaatgagatgcttatgaggtaaggtaaaaatagaatacaaagctacatgtgtgattttgttttgtagaaatagtatatgtaaaatatgcagatgatatgtataagcattatgcatagaaaaaataaacaagaacatcaaaaggtttaatggtgttgggttattaggtaatacaattacaattacaatgagtaattttggctttcctctttgtatttttctgtagtttcaaactttccttaataaatagatttccttaataaataaattttatagacagatttatttccagaagaatacctcattgggtgtgttccactcagccctgaatcctcaccttgtgaatgaatgtggtgtttactgtgtttattcttttagtgtcagtgcacttgttacaccttccttccccaacacacgtatgtgtgtgtatgtgtgtacgctcatgcacagatgtacacacgtgctcaccagagtggcaagaggccatttgtaggcagcagaactgaggccttgtattggaaagcaggaaggaaggcctgagcccccagctgccttttcctcccctggccacctgcttttggccaaggcagctggagaatattggtttttggaatgagatgggtcatcatctcggagaaagggcagcacatcagaaaagctgcagctcccatgcagagctcagccgtggtagtctgatgttttttcctttggtagctatgacccagggattataaactgctcttggcagcggatgctgggaagaggttgagtctgagagtggaggaaggctggagtgtgtctaggtgtctttgattcctaggtagggtgacctgcatctcatcacggctgtttatttgtgtgttgtggtctttaggagtagggtggagaatgtcatgttaatttcagaaacagcagaagaatggagtggctgtttggatcctgggctgcgcagtggtgcctcagacaggcagcacaatcctgcatggaaaagaaagcccccacctgagtttgaatggaagacctttctgtcatcgggaac

SEQ ID NO: 12767 - DNA, 1226 bp, Homo sapiens
taccttttggcttaatgatttcattttttaggaatttatcctaaggaacaaggaagagtagcaaataaggaattttatacaacggtgttcatcatattttccaacaataagggaacattattagatgtgttatcaggcattcatagggtggactattttgcagtgattagaaatgattttgaatattactaatgagatgcttatgaggtaaggtaaaaatagaatacaaagctacatgtgtgattttgttttgtagaaatagtatatgtaaaatatgcagatgatatgtataagcattatgcatagaaaaaataaacaagaacatcaaaaggtttaatggtgttgggttattaggtaatacaattacaattacaatgagtaattttggctttcctctttgtatttttctgtagtttcaaactttccttaataaatagatttccttaataaataaattttatagacagatttatttccagaagaatacctcattgggtgtgttccactcagccctgaatcctcaccttgtgaatgaatgtggtgtttactgtgtttattcttttagtgtcagtgcacttgttacaccttccttccccaacacacgtatgtgtgtgtatgtgtgtacgctcatgcacagatgtacacacgtgctcaccagagtggcaagaggccatttgtaggcagcagaactgaggccttgtattggaaagcaggaaggaaggcctgagcccccagctgccttttcctcccctggccacctgcttttggccaaggcagctggagaatattggtttttggaatgagatgggtcatcatctcggagaaagggcagcacatcagaaaagctgcakctcccatgcagagctcagccgtggtagtctgatgttttttcctttggtagctatgacccagggattataaactgctcttggcagcggatgctgggaagaggttgagtctgagagtggaggaaggctggagtgtgtctaggtgtctttgattcctaggtagggtgacctgcatctcatcacggctgtttatttgtgtgttgtggtctttaggagtagggtggagaatgtcatgttaatttcagaaacagcagaagaatggagtggctgtttggatcctgggctgcgcagtggtgcctcagacaggcagcacaatcctgcatggaaaagaaagcccccacctgagtttgaatggaagacctttctgtcatcgggaac

SEQ ID NO: 12768 - DNA, 499 bp, Homo sapiens
caaccacaggtatccttcttttctttttaaacttttacctctgagcttcctctaaaaaatgagtcatgaatgttcaaaaaatgtttttaagttactactataaggtaaagtctatgataaatgaacattaacatacacaaaattctgtatctttatatatttttcagggcagaggacttatagttttcactggattatcaaaggagtctgagggccaggggcagtggctcacacctgtaatcctagcactttgggaagccaaggtgggagaattgctcaagcccagaatggctgggcacggtggcacacacctgtggtcccagctattcaggaggctgaggtgggaggataacttgagcccagaagttcatggctgcagcgagctatgatcgcaccactgcactccagcctgggcagcggagcgagaccctgtctcaaaaaaataaataratataaaaataaaaataaaataaaggagcctgaggccaaaacgtgggta

SEQ ID NO: 12769 - DNA, 1072 bp, Homo sapiens
atgtccttcctttgttgttttcttcatgtcttttacagtttggtaacttattaaatgttccattaggtacttgaccaagctaaacttttcatgtatcctaatacataacaataattgcctataaatcacgtttttactcttaaatttcctttggtacatgcagattaatgagattaatgtctactgaatttagtatttttgatttaactagtttggaaaaactcatagtgaacataygttttgtgtttacatgcttctattacttaatatttcagaatataaaataatagatgtaacatatatacacatgtatgtcacgtgtggacgttacgacgcacagttttaaaatacctgaaaacaccagtaccattacccagcaacttgaactacccctgaggtagtatttttaatttcatatttgaatttaattaaaaatgcatagtatttttaatttcatattttaaataattaaaaatgcatagtatttttaatttcatatttatgctcctcttgtttttgttattcaacaaaacaatgttatttcatttttcttatttcgagttttctacacattgtaccatactgtagttagtcttttgaaacttgatttgtcacttaacactatatttctaagcttaattgatattagttcacgctgctgctgtttgttttcactggataaggtactgcagcatatgattactttaaaatgtatttatttgtcttcctgctgatggacatttaagttgcttataattttactgctactagggataagttggttatgatcgtccttgcatacagctcctgcacaccatgtgcacaccatacacaaagtttctaggatatatttaggagtagaattgctagatcatggcatacatgaatgttcaaccttcatgataatagcaaattattttccaaagtagttataacagatcatgctttaaccagtgtatcagagagatcattgttctagcctctccaaatctgtattatctgacttttaaatttttcccacctagttggtatactatatctcatatgctttttaatttccttattaatgaag

SEQ ID NO: 12770 - DNA, 606 bp, Homo sapiens
caggaagtcctgagcaaagcagtcctgggcacgcactcttcgcgtggatccatggccaatgacctggatgcctgagctaagacatcatggaatgcctgtcctttccaatgggcctcggcctcaagattcctccatgcaactgacatacttctaggacgtcttcagtctgagcctggaaacatggtcacgtctttcaraggaatggaactgactctgctgagtcatctagatgggttggaaacccagatccactcctcatagctctccacagaggcctgactgcaggggctaaggccagaacaggccctacatgggcagctacctgtttaatgtttggatggtagcccctaaatctacctgcatgcaagacagcatgaagaatgtggagaaagcccaggcctcaagagggccccagggtattggctgtccagaggaagagagtaatgggggagatctaagtcagcaaggctgtggcgaaagcctgaggcaagctttgcccactttgaagctttctgttgctatttgttcctgccatgtcagttgagagtgtttgtgtgtgcatgtataggtgtgtgtgtgtgtgcacatgtgtgcatgggcatgcat

SEQ ID NO: 12771 - DNA, 606 bp, Homo sapiens
caggaagtcctgagcaaagcagtcctgggcacgcactcttcgcgtggatccatggccaatgacctggatgcctgagctaagacatcatggaatgcctgtcctttccaatgggcctcggcctcaagattcctccatgcaactgacatacttctaggacgtcttcagtctgagcctggaaacatggtcacgtctttcaaaggaatggaactgactctgctgagtcatctagatgggttggaaacccagatccactcctcawagctctccacagaggcctgactgcaggggctaaggccagaacaggccctacatgggcagctacctgtttaatgtttggatggtagcccctaaatctacctgcatgcaagacagcatgaagaatgtggagaaagcccaggcctcaagagggccccagggtattggctgtccagaggaagagagtaatgggggagatctaagtcagcaaggctgtggcgaaagcctgaggcaagctttgcccactttgaagctttctgttgctatttgttcctgccatgtcagttgagagtgtttgtgtgtgcatgtataggtgtgtgtgtgtgtgcacatgtgtgcatgggcatgcat

SEQ ID NO: 12772 - DNA, 522 bp, Homo sapiens
tgccaggcactgcccggattgkcacgcaggctcagtcgccactcctctcagccacagatggttcagttccagatgtctgcactccctagtgtcctttccaatcctctgggtggaaaacgagggaaaatcctactgggtggtctcacatggtgggttgggaagaaaggcctagtgggttaggaacatgttttggaaagttcaaatccaagagaaccatcatgctagtgatggataggtcaccaaactacagagaagttacactgggatgtgtttcattccatcagcagcacctccccaagtagactgggaagctaaaattcacacaaaattgttccatacttgttctctttatcacccacacagggtttaacacacaacagatccctcttgacaaactcaccatgagaggagacgtcagccggcaggtgcctgtgggcttgagttctaatcacgctctgccactatccaagcctttcaaaccccctgcatcccccctcctcgcctcactgggctgtcatatgg

SEQ ID NO: 12773 - DNA, 541 bp, Homo sapiens
tacttttttgtaagtattagtgattagtaaataaatgggtacacacatatctggtatctgtaatacagataatgttatctaataaaaacaaaaatgatgtccagttcaaatgcaagcttattccatcagtaaaatgctgatgtagaaaagttgacaaaataattccaatttttcttcttaagttgtatgtcccctcatcaacacccaaaacaaaaataaaagaaagaaagaaagaaagaragagagagggaaggaaggaaggaaggaaggaaggaaggaaggaaggaaggaaggaaggaaggaaggaaggaaggaaagaaagaaagaaagaaaaaaaagaaaagcataaaaatatcactgtgtagcaatcagtttgggcagaatctccctacccactcccctggcttcatctcttgtccttctacaaatcacccttcagaagcagctagaaggatcttaaacctttcatcaaacactgccattccccttattaaatcctttagtagctgtctaccatccttagagtccaattcaaactctt

SEQ ID NO: 12774 - DNA, 541 bp, Homo sapiens
tacttttttgtaagtattagtgattagtaaataaatgggtacacacatatctggtatctgtaatacagataatgttatctaataaaaacaaaaatgatgtccagttcaaatgcaagcttattccatcagtaaaatgctgatgtagaaaagttgacaaaataattccaatttttcttcttaagttgtatgtcccctcatcaacacccaaaacaaaaataaaagaaagaaagaaagaaagagagagagagrgaaggaaggaaggaaggaaggaaggaaggaaggaaggaaggaaggaaggaaggaaggaaggaaggaaagaaagaaagaaagaaaaaaaagaaaagcataaaaatatcactgtgtagcaatcagtttgggcagaatctccctacccactcccctggcttcatctcttgtccttctacaaatcacccttcagaagcagctagaaggatcttaaacctttcatcaaacactgccattccccttattaaatcctttagtagctgtctaccatccttagagtccaattcaaactctt

SEQ ID NO: 12775 - DNA, 541 bp, Homo sapiens
tacttttttgtaagtattagtgattagtaaataaatgggtacacacatatctggtatctgtaatacagataatgttatctaataaaaacaaaaatgatgtccagttcaaatgcaagcttattccatcagtaaaatgctgatgtagaaaagttgacaaaataattccaatttttcttcttaagttgtatgtcccctcatcaacacccaaaacaaaaataaaagaaagaaagaaagaaagagagagagagggarggaaggaaggaaggaaggaaggaaggaaggaaggaaggaaggaaggaaggaaggaaggaaggaaagaaagaaagaaagaaaaaaaagaaaagcataaaaatatcactgtgtagcaatcagtttgggcagaatctccctacccactcccctggcttcatctcttgtccttctacaaatcacccttcagaagcagctagaaggatcttaaacctttcatcaaacactgccattccccttattaaatcctttagtagctgtctaccatccttagagtccaattcaaactctt

SEQ ID NO: 12776 - DNA, 401 bp, Homo sapiens
attatcaattaattatattttcatttactaccttctctttatgccttgttcctttaaaaatcccccaatattttggattctccacagaactgaatttttcacatgacttggagaagtatgaaggaaagacaaaatwacataagaaaagcatcttaaaattatcattaaaaatctaacttggtgtgatggttaattatgtatgtcaacttggctaggccattatacccagatacttggccaaacattattctagatgttgttgtgaagctatatttatataagattaatatgtaaataagtagacattgaatacagaaaattttgggacacatccaattatttgaaggtcttagcagaaaagactgaactgctattcttttctgggtccctaccttactggc

SEQ ID NO: 12777 - DNA, 675 bp, Homo sapiens
aattttctttgtggttaaatccttaaatttttatgtcctagtacaaaaatgtcttttatgctgctgactgaattacttataattcagtacaaagaaaaataaatcaataaagaaacaagcaaaawtaatgacggtgagactcagctatcctatcaactacacattcaatcacgtaaattcaagtcttttacttgccagctgtgtaatctctcatgtgattatttacccttgctgatccacagtatattttccagttaaaaaaacgaaaacaaaaaatactgccacacatgattgaagtaggaattgcagagttaatatatggaagcccctactattgtgcctagtttagaaaatgcagaatacattttagctagttataatatgcatgaagtccaacacacttactggggggagatttctatttcaggtctgaatttctagaaaccaaagcaaacagagactataatcagttataagacaagatgctttcgaagtccgaaataaatttttcctgcagatcctcataaattatgacatggtagacaacactgtagtagtattcccacaacaaatacaacaagttccataaaacattgtatctatcaatgagacataatgctgtcactaatgaggagtattcacaacacaaactgtggaagatcattttaaaagtcc

SEQ ID NO: 12778 - DNA, 675 bp, Homo sapiens
aattttctttgtggttaaatccttaaatttttatgtcctagtacaaaaatgtcttttatgctgctgactgaattacttataattcagtacaaagaaaaataaatcaataaagaaacaagcaaaattaatgacggtgagactcagctatcctatcaactacacattcaatcacgtaaattcaagtcttttacttgccagctgtgtaatctctcatgtgattatttacccttgctgatccacagtatattttccagttaaaaaaacgaaaacaaaaaatactgccacacatgattgaagtaggaattgcagagttaatatatggaagcccctactattgtgcctagtttagaaaatgcagaatacattttagctagttrtaatatgcatgaagtccaacacacttactggggggagatttctatttcaggtctgaatttctagaaaccaaagcaaacagagactataatcagttataagacaagatgctttcgaagtccgaaataaatttttcctgcagatcctcataaattatgacatggtagacaacactgtagtagtattcccacaacaaatacaacaagttccataaaacattgtatctatcaatgagacataatgctgtcactaatgaggagtattcacaacacaaactgtggaagatcattttaaaagtcc

SEQ ID NO: 12779 - DNA, 582 bp, Homo sapiens
tatcttcaaaggcaaatgaaaatttgggcaattcttaagttaacaaaggagaatgggccaaaatcacaattagcccaatttttttttcattatcttcactgtacatgttttctctgtgcccttattgttacccattcttcttgccagtattagctacgctagtctagtatttaactttacatgttataaattattttgttgattgtaaaataccacatgatttctttgaactaagtggcagtaaaatgacccctgtagacacacttttgggtaagggttgggggcaggagacacccagtgtgattttattctaaatgtggctcagatttttctaaaaccctagagttaagagccaaattaatcagctsagctcttcttccaaacatagcttgagggagttggatggaataaggcttaaagaatgagactagaaaactaaaagttttatttgaatttttaaattatcttctgtcttttaagaatttaagttttgtttctgggttaaaatttgaagcctaaggaaaagtgaccaaatgacttcataaatgttcctgaagtataatagaatgcttgactttttca

SEQ ID NO: 12780 - DNA, 984 bp, Homo sapiens
atttttcatttttaaaattagcaatttagtttagaaattagtaaccactaaaacacaagtatgtcatctatatcatttgtgccatttaaatatacatctagtttttcttattaaataaataaataaataaataaaagcctccaggcaaaagggaaacagagaaaggaactgcagataaaaggaggacatcaccaaacacactttgcttcagcaaaaaaaccataacctaatttcagtggtaattgcagatacaaaaatctgcctatgcccacctctttacatttcaaagacaaataaatttagttgtgaagataatttactacttaccaatcctgctattggtgtagacagtctattgatcttcttaatgacgccaggtttaagcttattaatcaaactgaaagtaaataaataacagatgcaattacaagatgccaatatcaggttttttgttagcattctcaaaaatcacatatatcactattccctcccctcaatgtgttatacagagagccaacagcccatcaaaaagcaaataaccaagatatcaagtctagagacaaagaagagcaccacatacaatggtgagttgttctccatagtctatatcctttatgtgtagacacagacccacttctatatccaaagccatccttcaaagagttagtttcacattaaagaaaagtaatatttcgttstgcttcaactgccagtttaagaatctcttcatcataatttatctcacttcacccaaagaatactattttctactaatagttttcattgattgtttttctcaaactgatcatttttaaaggtagcttcaaaatcatattattttgccacatttaaaaggtgagctggactcatacaaatagtcaactagtttttattggtaactcattcaagtccataattgattgctttattaccgcagcagaacgactgggcaaacattaaattcaatgtaccagaactccccca

SEQ ID NO: 12781 - DNA, 543 bp, Homo sapiens
gtttagattttaaaaagtgagggaaataaaactttctaaggaaacattcaaatcagatttwaaaatttcaaagattttagaaaatacagaaagaagtttggtcttgaaaaagttaattcaattgtgttggccccacatacacagaggcaagagcaaataacttagctgtctgttctctgttctccagctttgctattctaataaaatggataaattgttgattttatcaacaatttgattaaccataaatgtcagaaaaacacatttgttttaatatctgctcccaatggagaaaagggataagttttaaatggcctaaattctcaaaaataaagagcttgtagtttgtaagcaaaatttaagcagccagaggccagattttttcctctgtgttttcctacaggagacatgtatcttcttaaagtcaaaacaagggaagccaaattatgaaaatgatcagaatgataattcaataccatttatggagcacttactatatacaggcactatatactttatatacctgacttcatttaatcatta

SEQ ID NO: 12782 - DNA, 543 bp, Homo sapiens
gtttagattttaaaaagtgagggaaataaaactttctaaggaaacattcaaatcagattttaaaatttcaaagattttagaaaatacagaaagaagtttggtcttgaaaaagttaattcaattgtgttggccccacatacacagaggcaagagcaaataacttagctgtctgttctctgttctccagctttgctattctaataaaatggataaattgttgattttatcaacaatttgattaaccataaatgtcagaaaaacacatttgttttaatatctgctcccaatggagaaaagggataagttttaaatggcctaaattctcaaaaataaagagcttgtagtttgtargcaaaatttaagcagccagaggccagattttttcctctgtgttttcctacaggagacatgtatcttcttaaagtcaaaacaagggaagccaaattatgaaaatgatcagaatgataattcaataccatttatggagcacttactatatacaggcactatatactttatatacctgacttcatttaatcatta

SEQ ID NO: 12783 - DNA, 498 bp, Homo sapiens
gaattaactatgctgaattatagattgacaacagatttaatagtgtttaattttaccataggccagaaaacatcatctatgcagacatggaattttcaatataaagaaatgtcatcatcatgaataattgaaaagggatttactatgtgattcattgataccaagaataaaatcyttcaaatctgttgctgttcaaagtggtaatattgcaattctataggcattctctaaaaacatccttaaataccatgtcagcagagagatgcagaaagctataatttgcaagtggtaaaattgaaacaaagatattataaattagttcttctacttacatgattaaaaacatttttatttctttattttcaaggtaacagctagcacatctttcttttagtagtttatatttgtattttacattaaaatgtaaatgcttaggatatggacaaaaggaaaaatataaaatttactagtggaaaatatacatttagcttatttctt

SEQ ID NO: 12784 - DNA, 538 bp, Homo sapiens
ggtcagcttaggtgagtaatttaattttgataattatcgtgaaattatcctccaaaatgttactccaawttacacttacatggagaccatttgaaagtgtctctttctccataacctacttataagaaaacaaaacatattccaaattgtttgtcaacatcttggaataaaatgatatctccttgtaattatattcatttatatcattatatattgtcttatgattatatatttattaataagtgaatataacaaggagatatcattttattcattgtttccctttagctggattttaggaacactttatacattttagtgattaaatttgtattatatagtgtttctgtttcactctttctctcaattaccttaatattatttttggtgtcattaacagttttctattttaattgtaaacatttatggttttgagatttttttctatgctaagaaaaccttcccccttttcagataatggtaaaggaatcctaacttttttcagtagttattcagattatcttccatttagatacat

SEQ ID NO: 12785 - DNA, 562 bp, Homo sapiens
acatagattagtatgtataacattgttaccaaatatccagtactattttccaagctgactgttcccctctatgatgatacttatgcctacatttctttacgtttcacaaggaacagatcagataaatcatgtattttgcatttagattcagattacactttatcaatagacttctcataagaccctactcttccctgatgattgccaaatagacatcaaaacatttcaaaataacttaccattgtctaaaattcagtgtttataccatggaaatatctgaggtcttccatagagtcacatattaatgtttcagcaaaaaccatatgtatataaatatgtgtgtatatatacatatatgtgtatatacatatatgtgtgtatatacatatatgtgtatatacatatatatgtgtgtatatacatatatgtgtatatacatatatgtgtgtatatacatatatgtgtatatacatatatrtgtgtatatacatatatgtgtatatacatatatgtgtgtatatacatatatgtgtatatacatatgtgtatatgtgtatataca

SEQ ID NO: 12786 - DNA, 562 bp, Homo sapiens
acatagattagtatgtataacattgttaccaaatatccagtactattttccaagctgactgttcccctctatgatgatacttatgcctacatttctttacgtttcacaaggaacagatcagataaatcatgtattttgcatttagattcagattacactttatcaatagacttctcataagaccctactcttccctgatgattgccaaatagacatcaaaacatttcaaaataacttaccattgtctaaaattcagtgtttataccatggaaatatctgaggtcttccatagagtcacatattaatgtttcagcaaaaaccatatgtatataaatatgtgtgtatatatacatatatgtgtatatacatatatgtgtgtatatacatatatgtgtatatacatatatatgtgtgtatatacatatatgtgtatatacatatatgtgtgtatatacatatatgtgtatatacatatatgtgtgtatatacatatatgtgtatatacatatatgtgtgtatatacatatatgtgtatatacatatgtrtatatgtgtatataca

SEQ ID NO: 12787 - DNA, 528 bp, Homo sapiens
catataaaataagtgcattttgcaggtagctaaaattccattcttgggaaatttaaagagtaaaggggcattacaacctaaaaagagtttctacatactttaatttgacatcttttaaaactgactttagaataattttgcttgaaatattagtctaaccttgaacagaaactgttgatgaaaaaggactacattggccgggcgcggcggctcacgcctgtaatcctagcacttgggaagccgaggcgggcagatcacgaggtcaggagatcaagaccatcctggctaacacagtgaaactccgtctctactaaaaatacaaaaaattagccgggcgcggtggcgggcgcctgtagtcytggctactcgcaggagaatggcgtgaacccgggaggcggagcttgcagtgagccgagatcacgccaccgcactccagcctgggtaacagagcgagactccgtctcaaaaaaaaaaaaaaaaagaactacattaatcatttatattatgcaaataatatatattcattgg

SEQ ID NO: 12788 - DNA, 528 bp, Homo sapiens
catataaaataagtgcattttgcaggtagctaaaattccattcttgggaaatttaaagagtaaaggggcattacaacctaaaaagagtttctacatactttaatttgacatcttttaaaactgactttagaataattttgcttgaaatattagtctaaccttgaacagaaactgttgatgaaaaaggactacattggccgggcgcggcggctcacgcctgtaatcctagcacttgggaagccgaggcgggcagatcacgaggtcaggagatcaagaccatcctggctaacacagtgaaactccgtctctactaaaaatacaaaaaattagccgggcgcggtggcgggcgcctgtagtcctggctactcgcaggagaatggcgtgaacccgggaggcggagcttgcagtgagccgagatcacgccaccgcmctccagcctgggtaacagagcgagactccgtctcaaaaaaaaaaaaaaaaagaactacattaatcatttatattatgcaaataatatatattcattgg

SEQ ID NO: 12789 - DNA, 537 bp, Homo sapiens
ctgtcccagaccctgtattgagtttcttctttcatgaccgtttgaaaggtaaaaaattattcttatctcacgtgttgttaaaagaaaaaaaaagcgaaaacaaaccaggtcatgagctgaacttaacctatgattgtaatttgctgacttctatagtagagcattaaaattttggtgactacggccatgtagtctatgtggataattctatctaatatttcattttacattcagtgattaactcagctctgttatgttttgaaatatccgttttatgcgagaatgcctcacagatgtactgggaatttatctatgtggttttcctagtaytttgtttatttgttggagatctggcatagaactctcagaaagagctgataaagtttaagatggcctattaaattgtctgatccagtcttcttgacagtcagtcactgtgagggcaggataagttcaaatttgtacttgcttcaaaccttatccttgtgtctttctctatatcacttttagaacttgtctcctacacacttcaaaatt

SEQ ID NO: 12790 - DNA, 537 bp, Homo sapiens
ctgtcccagaccctgtattgagtttcttctttcatgaccgtttgaaaggtaaaaaattattcttatctcacgtgttgttaaaagaaaaaaaaagcgaaaacaaaccaggtcatgagctgaacttaacctatgattgtaatttgctgacttctatagtagagcattaaaattttggtgactacggccatgtagtctatgtggataattctatctaatatttcattttacattcagtgattaactcagctctgttatgttttgaaatatccgttttatgcgagaatgcctcacagatgtactgggaatttatctatgtggttttcctagtattttgtttatttgttggagatctggcatagaactctcagaaagagctgataaagtttaagatggcctattaaattgtctgatccagtcttcttgacagtcagtcactgtgagggcaggataagktcaaatttgtacttgcttcaaaccttatccttgtgtctttctctatatcacttttagaacttgtctcctacacacttcaaaatt

SEQ ID NO: 12791 - DNA, 516 bp, Homo sapiens
tttacaatctattgcagtagggctcatcagamcttatgagttggtggtaacacaacccagctcacaatggcctattcagactacatagtcatgtgaggtcttaggtcaggcactccatctctatcaaagtacagtctcatacaagagcaacgatcctttttttctacctatctttttcctagatccatcattttctccatattttattaacaatctccaaaaaactgtggctgaggatacttggctgccattctgatcttgctgaatattgcattaattatgccccaaataatgcagtagcttacaggatataaaactacctaagagttgaagattctcaagtttctttatacacattctccaccatctgaagtttcaaggtcccactatttccctactacttttgtgattttgccattttgtatatgccccaactaagaatccatctttgataccttgataatcttccattaggttgtgtttctgggtttttagatctatcttatgtgaagctgc

SEQ ID NO: 12792 - DNA, 516 bp, Homo sapiens
tttacaatctattgcagtagggctcatcagaacttatgagttggtggtaacacaacccagctcacaatggcctattcagactacatagtcatktgaggtcttaggtcaggcactccatctctatcaaagtacagtctcatacaagagcaacgatcctttttttctacctatctttttcctagatccatcattttctccatattttattaacaatctccaaaaaactgtggctgaggatacttggctgccattctgatcttgctgaatattgcattaattatgccccaaataatgcagtagcttacaggatataaaactacctaagagttgaagattctcaagtttctttatacacattctccaccatctgaagtttcaaggtcccactatttccctactacttttgtgattttgccattttgtatatgccccaactaagaatccatctttgataccttgataatcttccattaggttgtgtttctgggtttttagatctatcttatgtgaagctgc

SEQ ID NO: 12793 - DNA, 1355 bp, Homo sapiens
ggcaatgatttagattatacaagattatgtgcaaatactacaccattttttttctcagagacttgaccatctgtggattttggtatccatgggaggtcttggaagcaatccccttcagataccaagggatgactgcagtttcagttcattagcccactctaacatagtcataagaacaggcactactccccatatgccacaaagtaagaggaccaaaaggagatcacgatgtatgattcaaataagtaaatgtaataataaagaaaatgtggctaaaaaaaaagaaacttcaaagtgtgatattgttaatgtgtctcaaatatttggcagaatgatttgaagagactatgaagaaacgaaatcttaaacaagatgacaaatagttaaagatagaaaagaggttgtgtacagaaaggcagctaagacaaaagttgggccagcacagtaagtcaaaggaattattgttttctgtccccccttccctcaaagaaagagggagcagaagaagtataagcggtaaatatattgaggtggcaaaagtgacttttgacttacctcaacaggaagctgattaaactttgtcactaaggtatctgcaggctgtagctacaccaataagagccacgaccttctctggtcgtgcaattgcagcatgaagcataagccaccctccaaggctagatccaacaagaatctaaaaataaaataaaataaaacattaggtctttaagatagaacaggttataaacataaaacaaaatatgtacaataaaaaattagaaagtaaaaatagaatcattttaaatcaaatatcaaaatggattaaacatttaaattaaataaaaacattttcatatctaaagaaacagcttaggccgggtgtggtggctcacgcctgtaatcccagcactttgggaggcccaggcgggcggatcacgaggtcaggagatcgagaccatcctggccaacacggtgaaaccccatctctactaaaaatacgaacaattagccgggcgtggtggcgggtgcctgtagtcccagctacctgggaggctgaggcaggaggatgccgtgaacccgggaggcrgagcttgcagtgagccaagattgcgccactgcactccaggctgggtgacagcacgagactccatctcaaaaaacaaaacaaaacaaaacaaacagcttaaatacgaggttacagtaattatcatcatacttaacaaaacagtcacctgtggcccatcagctaagtcatcaattatagaaagaacatcttttctccatttccccagtgtgctttcctctgagttaccatctgaacttccaactcctgagtaatcaaacctggaaaaagg

SEQ ID NO: 12794 - DNA, 525 bp, Homo sapiens
actaaaacccactgctagattgctagctccttgaaggcaagagaaaggaaccatgtcaacgctgaatccygactatagtaagatccctaggacagatgaggttcaaaaaatgcactcagtagaaatcacacatcaaactgcaaacaggttaagtaagaggttaacattaagggaagctgggtgaagggtctacaagaactctccatactatttttgcaacttttctgtaaatctaaaattatttcaaaataaaaaaatctcttttaaaatgctgatagggccaggcatggtagctcatgcttataaatcccagcactttgagaggccaaggtgggaggacagcttgaggccaggagtttgagaccagcatgggcaacacagtaagaccccctctctacaaaaaattgaaaaaaatattagtgggcacagtggcatgcatctgtggtaccagctactcaggaagctgaggtggaaggatcacctgaacccaggagcttgagtctgtagtgagccatgactgcacca

SEQ ID NO: 12795 - DNA, 525 bp, Homo sapiens
actaaaacccactgctagattgctagctccttgaaggcaagagaaaggaaccatgtcaacgctgaatcccgactatagtaagatccctaggacagatgaggttcaaaaaatgcactcagtagaaatcacacatcaaactgcaaacaggttaagtaagaggttaacattaagggaagctgggtgaagggtctacaagaactctccatactatttttgcaacttttctgtaaatctaaaattatttcaaaataaaaaaatctcttttaaaatgctgatagggccaggcayggtagctcatgcttataaatcccagcactttgagaggccaaggtgggaggacagcttgaggccaggagtttgagaccagcatgggcaacacagtaagaccccctctctacaaaaaattgaaaaaaatattagtgggcacagtggcatgcatctgtggtaccagctactcaggaagctgaggtggaaggatcacctgaacccaggagcttgagtctgtagtgagccatgactgcacca

SEQ ID NO: 12796 - DNA, 657 bp, Homo sapiens
gaatgaatgcaggaggaactatcaaacacttataaaaccatcagatctcatgagaactcactatcatgagaattgcatgggggaaaccacccccatgattcaattacctccatctggtctctctcttatcacacagggaatatggggataatgggaataacaattcaagatgagattttggctggggtaacagccaaaccctatcaccaatctttctcttagagatattgtttgggccaaggttatacaggaaagactgactagctgttcatcagactatttatttttcttcctctgtgcccagctagactattattcccagcttcccttggagttaggtgcagccatgtgataaattttgcccaatgtaatgtgggcagaagccatgtatacgttaggcctcccttccctctgttttctttgtatgtcagcccaacatgaagatcaaacagaggactctgaaatggagccactagctgcaaggagcctgggtctctgaaaaaccctgtggagcagagtctccctgtytacccttattgagctctgatgtaaactagaaagacaaacaaacaacaaaacccatagatgtgttacaccactaagattttaggactatttgttacagcaattaactcaccttgattaatacatcttatg

SEQ ID NO: 12797 - DNA, 534 bp, Homo sapiens
gcatttttagtagagacagggtttcaccatgttggccaggatggtsttgatctcctgacctctcaaagtgctgggattacaggcatgagccatcacgcccggccccctcttctaagtgactcgagactggaagtggattcctctggtagtataaaggaagcttagtaaaatgaaaggagttctgaacacatccaggattccatccccacctgtgccacctcaatagtccttgataagattatacataaaaggagataatttgactcatgtggattctgaaagcagacagaaggtcagaaactgctagggcactctttaccaatatatgtgcagatcccaactggtaaatttagcaggcattatataaaggctggcaatctgtatttaataatcatttcagaggattagaatgcatctgatccatggaaaatgcaggaaagccactagattaaatgcttgtcagacattagtggcatatcttgtgttaaaaacaaaaacaaaaaaggcctaaatttattatgttttaaaatgatt

SEQ ID NO: 12798 - DNA, 541 bp, Homo sapiens
tcatgactaatcaagaataatatgtggaaacttggttagccaaaaaaaatcaaaaactcttaagagtaaaaacaatcaaatctggcacagaaaattttctccattaaaaaaaaagtgaataaaaaaattcctcttatagtccaatttttctgaagtttaaaaattccatattatatctgaaaacacatgtttcacaacaaaatacaaagagcttaggcattaaatataaakaattaaagcagaatttttcatttcatattttattaatataagaccaaaggcttgaggaatgtaattttttaaatcctaaactgatcttataaaatatgtattatgtaaaaataattactgcaggtatgtgcaatgtagccaagtgtacacttgtaaacataatgtcaacttgctgactgttttaatggatatcagaccaactccaacattgtatgaaaagagataactggacgtaaaaagttactcaacctattaatttccatttttaataacttgaaaagagaactggtagccatacagctaatgagta

SEQ ID NO: 12799 - DNA, 523 bp, Homo sapiens
ccaggctggaatgcagtggcgtgatctcagttcactgcaatctctgcctcctgggttcaagtgattctcctgcctcagcctcccaagtagctgggattacagccatctaccaccccgcctgactaattttttgtatttttaatagagacggggtttcatcatgttggccaggctagtctagaactcatgaccacaggtgatccaccctcctcagcctccgaaagtgctgggattacaggygtaagccactgcacctgcctggatatagcttttgtgacaactataatggctattagatccctgatatgtaaacttggtccctaagaaggaggtggatacatttacataaggaagctagagtcttctaagctagaagaaattgatactcaatgattactttctgaaatacaaagttagagagacctgtggctgttgacaggctggctgtggccaaaggacagtgacagggaagggccacaaagtccttgaaataattaatttcagtcaagagggagtccagtct

SEQ ID NO: 12800 - DNA, 592 bp, Homo sapiens
atctttttttttttcttttttgagatggagtctcgctctgtcgcccaggctggagtgcagtggcgcgatctcggctcactgcaagctccgcctccggggttcacgccattctcctgcctcagcctcccgagcagctgggactacaggcgcccrctaccacgcccagctaatttttttgtatttttagtagagatggggtttcaccgtgttagccaggatggtctcgatctcctgaccttgtgatccgccctccttggcctcccaaagtgctgggattacaggcggaagccaccgcacccggccataaatatcaatcttaaaaagacttagtatgttaaaaagtttaaaaaaaaacacaaaaggtcactagctcttccttcaggtcctgctcctctggtaaccataaccaaccactttcagttctttcactgggtcaaataatccctgctgttcttttttttttttttttttttgtgacggagtctcactgtgtcgcccagactggtgtgcagtgacactatcttggctcactgcaaccttcgcctcctggattcaagcaattctcctgcctcagcatcccaagtagctggga

SEQ ID NO: 12801 - DNA, 592 bp, Homo sapiens
atctttttttttttcttttttgagatggagtctcgctctgtcgcccaggctggagtgcagtggcgcgatctcggctcactgcaagctccgcctccggggttcacgccattctcctgcctcagcctcccgagcagctgggactacaggcgcccgctaccacgcccagctaatttttttgtatttttagtagagayggggtttcaccgtgttagccaggatggtctcgatctcctgaccttgtgatccgccctccttggcctcccaaagtgctgggattacaggcggaagccaccgcacccggccataaatatcaatcttaaaaagacttagtatgttaaaaagtttaaaaaaaaacacaaaaggtcactagctcttccttcaggtcctgctcctctggtaaccataaccaaccactttcagttctttcactgggtcaaataatccctgctgttcttttttttttttttttttttgtgacggagtctcactgtgtcgcccagactggtgtgcagtgacactatcttggctcactgcaaccttcgcctcctggattcaagcaattctcctgcctcagcatcccaagtagctggga

SEQ ID NO: 12802 - DNA, 787 bp, Homo sapiens
gaccagccttgagacccagggcaattatgaaaattgtacctgaagccctcaaaattctgctttactttttaaaaactgaatctattccagagtataccactcaggggcctttaattaattcagtctgtaagatttaatagtcaggtctcaagcctgtattccacaatgtatccatttgcaaaaggctactgagcatttactttgttcagaatccttttatataagtatatgacatagcctctggaagttaaaaaaaaaaaaaaaaactatgtgactataagctttgtttgcttgttttggtttcctgctttaaaaatactgaactaaacagccacacagtatagctagtcattaagctatatacacatatataattwtatatatatttttttatttactgaaaaagcctattttaatataaaatacatatattttatttactaaaaactattttattataaaatacgtcttttttaattactgaaagaggctatttttaatagattagaagacagtttgagatttgtttcaatccagacagaaaacaatttttatttagggctaccttttctctgagagaatacatgtaacatgcagaagtatataacttgctaaataagatggaaaaaatctctgacattgagattttctagtctcaaacttttccaccaaaatacccataattggtacctagaatagaagaagcttctgctcctgaagtgtctgattgtttagcctaaaaccagacactcaaaatttaatgtttttgaaggctcatatttttaaa

SEQ ID NO: 12803 - DNA, 514 bp, Homo sapiens
tggaggttgagtaactggcccgggcctcatagcaaaaggtggcagagccagggtctgagccttgaggcatcccactttgttagacgcctaggcctcctgggttcaactgacatgttcccctcaaggggcagcctgagggggccaggtgctcagcccacctgcaggccccaagatttccagtgtctgctctgggctgcctggggcagatgggagcaacaggaaggaacagtggctgcagggggcctggagtgacccatggagctgtgctgaggytgctgatttcacaaggcagctaggaaagtcaaccgcagaacatgcttctggagcagcctgttgggcattgatgatggaaacacccggcagtgcgagatccgctgccctttggtattcagcacccccactgcattgcgggagccagcagccgtcaggttaacgtcagggactgaatgttttcataccccccaaactcctatgctgaaacctaatccccaacgtgatgttattcggaggtggg

SEQ ID NO: 12804 - DNA, 524 bp, Homo sapiens
cttctcctcctgcaaaaagaatataagaatataagtattagagtagaagctgccctagcaaataaggaatatgccaaatcttaccctaaatctctagtagacagtgagtcaaaaaacaagctctacttaagacttcattaaaagcactgtctgcagggaatcacagtttttagttaaagatattaaagagaatttatgtagtacaaaattgggcaccagaagcaccaaacaamaattggggaagaaaaggaagaaatgtttaggtttaggagaatggaagtcctaaacagcataaagatgaaaattttttctttttaatgaccagagaggctaatatttgggcacttaccaagagtgacaggaatgtggggtataacagaattagtagacctcaaagtattttttaaaaaaccatcctagtagcctctctggctggagaatattatagtcagagtcaattgtactttcaaggaattctgagttttaattactagaaagtttcagttgcagtatgtcatagctac

SEQ ID NO: 12805 - DNA, 563 bp, Homo sapiens
ctcagagcaagcatatgatataattttcattcaatatagtatttcccccagcacagttcagtagagcacttacatattttaaacattcttagtgtagaatgtaaaccctatatactttcaagctaaagggaaatttaatgtcaacatacccaaaatacgtagaagtatatatttaataaaaaattacattggcatagtgaagagaagagcaatatattttggaactgattcgtatttattaaagaaaaatacatattagatttaagaatagaactttcagccaagtgcaatggctcacgcctgtaatcccagcactttgggaggcccaagacgggcagatcactagaggtcagcagttcaagaccagcctggccaacatgatgaaacccagtttctactaaaaataccaaaaaattagttgggcatggtggcacatgcctgtagtcccagctactcggaaggctgaggcaaggagaattgcttgaacccagaaggcggaggttgcagttagccgcaatcacgccactgcactccagcctggstgactcgagcgagactctgtc

SEQ ID NO: 12806 - DNA, 663 bp, Homo sapiens
gtaagtgcctttgcccagactctgcgaagatacacgtcgcttaatcacctggcccaggcagctcgtgcagtgcttcagaacacttcccaaatcaaccagatgcttagtgacctcaaccgtgtcgactttgccaatgtccaggtattctatttccttgcaaagcatgtctcttaaggaaagatacccaatttgttcttcttaattgggatcatcaaatttcttttcaaagtctcatctatatatggcagcatctatattcacagtgttctgaargagaggagtttgacccagatacagctgtagtgctcccatgtttgtggttaaagtaagctcacatttacagtcctaaaagacaacgtaatatatcaccagcatttgctgaatagttagtagagtaataaaggtcacagtcattgaagttagacaggcaagaaattaagctgtctcatatactagctgtgggatcttgggcaattgcgttacttaactgctctaggcttcactttccccaccttacaacacctgtcttagattattgtttatatatttaataatttgtaccatgacatgcagagatatttctattttgttgcccctccttgaaagaactaagaacaattctatttcagagtttactatagctgcctagtaaatatttattca

SEQ ID NO: 12807 - DNA, 683 bp, Homo sapiens
gacacgtaacattgctcccgaagtgtcattctctgcaagcctggctgctgaaaccacttgctccaacctgaaaccagttttacctaatgacttctgaagctgctgcaactctaaaactaactttacccactgctgtcactcaccaaccaaacttgccagctcccccagtcctgactagtgccaataaactttctcaaagagcaagacagaacatgtctcttttataatacccaaccttctctttgttctttggacatagtgaagacacctagtgggtgtgtatgtcctgaactgcaattcattcttcttaaataaaatattaaatatagagattcatctcttcatttttattttgactttgatgcttttcttttctttctttctttatttttttttgagatggagtctcactctgtcacccaggatagagtgcggtggygtgatctcagttcactgcaacctccgcctcccaggttcaagcaattctcctgcctcagtctcttgagtagctgggattacaggtacccgccaccatacccggctactttttttgtattttttaagtagagatggggtttcaccctgttgcccaggctggtctcgaactcctgaggctcaagcaatccacccgcctcggcttcctgattttgacacttttaaagcaatttcttttcttggaaagc

SEQ ID NO: 12808 - DNA, 683 bp, Homo sapiens
gacacgtaacattgctcccgaagtgtcattctctgcaagcctggctgctgaaaccacttgctccaacctgaaaccagttttacctaatgacttctgaagctgctgcaactctaaaactaactttacccactgctgtcactcaccaaccaaacttgccagctcccccagtcctgactagtgccaataaactttctcaaagagcaagacagaacatgtctcttttataatacccaaccttctctttgttctttggacatagtgaagacacctagtgggtgtgtatgtcctgaactgcaattcattcttcttaaataaaatattaaatatagagattcatctcttcatttttattttgactttgatgcttttcttttctttctttctttatttttttttgagatggagtctcactctgtcacccaggatagagtgcggtggtgtgatctcagttcactgcaacctccrcctcccaggttcaagcaattctcctgcctcagtctcttgagtagctgggattacaggtacccgccaccatacccggctactttttttgtattttttaagtagagatggggtttcaccctgttgcccaggctggtctcgaactcctgaggctcaagcaatccacccgcctcggcttcctgattttgacacttttaaagcaatttcttttcttggaaagc

SEQ ID NO: 12809 - DNA, 590 bp, Homo sapiens
ttaagtttaagatatttgaaactgaagtaagacaaatattcagtagtagacagctgttacttttagtttcttagcatctcttttccctttattcttttcttttttttatagagacagggtctcactatgttgcccaggctggtcttgaacttccaggctgaagccatcctcctgcctcaacatccgaaagtgctgggattacaggcatgagccactgcacccagcctcccctttattctttaaccatgccctttttctagaaggaatttcatctcctccatgacaattgtggygttctatttgatcctggcaagctgagacaatcatgaacttcacccctctctctgcagcagttggttcaaagcagtgagcctgtgacccaagagagaatacctagattcagcactctggtattaagaattgaagcaggattccatttcctttgtgatagttaagctaaggaggcaaaagcttggagttgtccacagatatggctccagagtcagagagaaaggcagtttgaggaaacgaagttagtatgcagagccaaggagagatcagagagcttcagttgtacacaggatactgca

SEQ ID NO: 12810 - DNA, 583 bp, Homo sapiens
aagactcagttttgcatggtcttgcctttgatctagttctcaaatttcctcctggcacagaatatttatagtgagccttctggaattgccacttgataaccmgcaacatgttgtaagatgttgttatagctacaacatctcccacttcttttcgataatttgcttcagcttaaacttggctctgtcttactgccattcaggaagtgtctgtttatgcattcaacctcgcttacctcacggttgaggggtgggctacctatcctctttgctctccattgcagagtagtatatcaccatctctaaaaacaaaaactactcatttgagacccatggcatttatttattctacccttgcccctcctcaaagctgccctcgaatgaccacctattcaccatccgtcattcatcaaagacattgacatttgtctcgtcaccttcctctctactctaaccttgctatcctcttgggtatcctcagtcctccaacgactgcatgaacaacccagtgaataccatggctttctggtttccagcccccactcttccagtttccttctcctccgtaccccttcaaccacccact

SEQ ID NO: 12811 - DNA, 583 bp, Homo sapiens
aagactcagttttgcatggtcttgcctttgatctagttctcaaatttcctcctggcacagaatatttatagtgagccttctggaattgccacttgataaccagcaacatgttgyaagatgttgttatagctacaacatctcccacttcttttcgataatttgcttcagcttaaacttggctctgtcttactgccattcaggaagtgtctgtttatgcattcaacctcgcttacctcacggttgaggggtgggctacctatcctctttgctctccattgcagagtagtatatcaccatctctaaaaacaaaaactactcatttgagacccatggcatttatttattctacccttgcccctcctcaaagctgccctcgaatgaccacctattcaccatccgtcattcatcaaagacattgacatttgtctcgtcaccttcctctctactctaaccttgctatcctcttgggtatcctcagtcctccaacgactgcatgaacaacccagtgaataccatggctttctggtttccagcccccactcttccagtttccttctcctccgtaccccttcaaccacccact

SEQ ID NO: 12812 - DNA, 583 bp, Homo sapiens
aagactcagttttgcatggtcttgcctttgatctagttctcaaatttcctcctggcacagaatatttatagtgagccttctggaattgccacttgataaccagcaacatgttgtaagatgttgttatagctacaacatctcccacttcttttcgataatttgcttcagcttaaacttggctctgtcttactgccattcaggaagtgtctgtttatgcattcaacctcgcttacctcacggttgaggggtgggctacctatcctctttgctctccattgcagagtagtatatcaccatctctaaaaacaaaaactactcatttgagaccmatggcatttatttattctacccttgcccctcctcaaagctgccctcgaatgaccacctattcaccatccgtcattcatcaaagacattgacatttgtctcgtcaccttcctctctactctaaccttgctatcctcttgggtatcctcagtcctccaacgactgcatgaacaacccagtgaataccatggctttctggtttccagcccccactcttccagtttccttctcctccgtaccccttcaaccacccact

SEQ ID NO: 12813 - DNA, 583 bp, Homo sapiens
aagactcagttttgcatggtcttgcctttgatctagttctcaaatttcctcctggcacagaatatttatagtgagccttctggaattgccacttgataaccagcaacatgttgtaagatgttgttatagctacaacatctcccacttcttttcgataatttgcttcagcttaaacttggctctgtcttactgccattcaggaagtgtctgtttatgcattcaacctcgcttacctcacggttgaggggtgggctacctatcctctttgctctccattgcagagtagtatatcaccatctctaaaaacaaaaactactcatttgagacccatggcatttatttattctacccttgcccctcctcaaagctgccctcgaatgaccacctattcaccatccgtcattcatcaaagacattgacatttgtctcgtcaccttcctctctactctaaccttgctatcctcttgggtatcctcartcctccaacgactgcatgaacaacccagtgaataccatggctttctggtttccagcccccactcttccagtttccttctcctccgtaccccttcaaccacccact

SEQ ID NO: 12814 - DNA, 583 bp, Homo sapiens
aagactcagttttgcatggtcttgcctttgatctagttctcaaatttcctcctggcacagaatatttatagtgagccttctggaattgccacttgataaccagcaacatgttgtaagatgttgttatagctacaacatctcccacttcttttcgataatttgcttcagcttaaacttggctctgtcttactgccattcaggaagtgtctgtttatgcattcaacctcgcttacctcacggttgaggggtgggctacctatcctctttgctctccattgcagagtagtatatcaccatctctaaaaacaaaaactactcatttgagacccatggcatttatttattctacccttgcccctcctcaaagctgccctcgaatgaccacctattcaccatccgtcattcatcaaagacattgacatttgtctcgtcaccttcctctctactctaaccttgctatcctcttgggtatcctcagtcctccaacgactgcatgaacaacccagtgaataccatggcttyctggtttccagcccccactcttccagtttccttctcctccgtaccccttcaaccacccact

SEQ ID NO: 12815 - DNA, 542 bp, Homo sapiens
ctttcatttttgttgttttattcctgttagatatcaatttcaatgttttctttgatttttgatcatctacttttattttttaaagtttatttactktaattaaaatattatatctatgggtgctgggtgtgtcttatacctgtaaccctagcactttggaaggcctaggtcagtggatcacttgagcccaagaattcaaggccagcctgagcaacatggtgaaaccccatctctactaaaaatacaaaaatattagctgggcatgttggcatgcacctgtagtcccagctatccgggagtctgagggaggaagatcacttgagcccaggagtttgaggctgcagtgagccatgatcacgctactgcacttctacctgggcaacagagcaagactccatctcaaaaaaaaaaagagagaaaaaaattctgcatatcacatcctagatttatcaagtgatacctcatttgtgaaactctaggccaaaggaatttggctaagtcactaaaataaactgttaatggagatatactgatttcagctt

SEQ ID NO: 12816 - DNA, 540 bp, Homo sapiens
gtcaaatgttagcagggctgtttagggccaattcacgtatatgtggacaaaattcaggaaacaaaaaactccctgtttagcaattgtcttttcttttgcagcttctcttttcttctctcttttctgaagaacgaatggatgtacagccatttctggtattcctaattgtaagaacacactgttctttaaaaattatcactttttactaaatttaataattttcagttctgtacacactgtgaaacttcttttattaagttagagatayaggtatctatagcccaaggagatataatgcttgtaaaatccggaagaattatttttacaaagatcaaatgaccaggtaatgtgcctcccaaattttaaggactctgtacaactgttagaggaaatgagaaagtaataatatcacataactatagttgtttcctacgtttctataaaaaagattgaaaatgaacttgatagtttcacaatttgctggataggttattaggagtttgtaattatttcactgaatgtatttttttagaagttcgg

SEQ ID NO: 12817 - DNA, 547 bp, Homo sapiens
tgactgctctgaaaaggcagctcaagcggcatcacttcctgcctgggcatgttgacctggcatgttgccaatctttacctgccagcatctctggccctgatatccctaatggctcacaccctctgccatgtgtagacccctcccttctactcccaaaatgcaaatttacagagaattccccatcactggaattcttcatgcctaaaggacttcagcaatacatgggcacagatttaaacatggtgtctattgggacaygcagatgggagagaaatgagctagggcgacccaggagtgtagcatctcctgttacctgtaccagtggatataatttgcaaactatgtgtacctttgaaaataatcccttccaaaccagatatagtggacagttttactgtttttttttatgttttgataaactatatttttaagggcagttttaggttcacagcaaaattatgcagaaaggtaagaaatttccctttccccacccttccccacacatgcacagcctcccccatcatccacatcccccaccagagtggcc

SEQ ID NO: 12818 - DNA, 554 bp, Homo sapiens
tggaagctggccagtaggatcaggattagacaatatcttcgatgccataataacagaaggaaatttcaaaatcttctagcttaaactccctcctttgrcttcattccacaacacaaagatgaccatggggctcagacaaataaagtcatagaataactgatgggataggaaaggtattttgaattttttggcagtagtgacaggtgacacctttctctagtgtccaccttcccggtcccctgcagagaagtggaaaggaaatagtctaggacaatgctgtccaacaaatcattctaccagttccagaaagagactgtcttcatggagatatgaagtttctcctagccaaactgaacttcctaccatttcctgctattagggtcccatgggtgtttgacaggcccaggactagggtgaggcaagagctgaatctgcactcacatgacccaagtgtgagggactcgctacacttgttcctaggtgtctcacttgcctcaccctagtcctagccctggagttgggttgtgtgtcacaaatgctgtggtcccctcccc

SEQ ID NO: 12819 - DNA, 554 bp, Homo sapiens
tggaagctggccagtaggatcaggattagacaatatcttcgatgccataataacagaaggaaatttcaaaatcttctagcttaaactccctcctttgacttcattccacaacacaaagatgaccatggggctcagacaaataaagtcatagaataactgatgggataggaaaggtattttgaattttttggcagtagtgacaggtgacacctttctctagtgtccaccttcccggtcccctgcagagaagtggaaaggaaatagtctaggacaatgctgtccaacaaawcattctaccagttccagaaagagactgtcttcatggagatatgaagtttctcctagccaaactgaacttcctaccatttcctgctattagggtcccatgggtgtttgacaggcccaggactagggtgaggcaagagctgaatctgcactcacatgacccaagtgtgagggactcgctacacttgttcctaggtgtctcacttgcctcaccctagtcctagccctggagttgggttgtgtgtcacaaatgctgtggtcccctcccc

SEQ ID NO: 12820 - DNA, 648 bp, Homo sapiens
tgctgtctgctaaggatagtcatcccatccccacagtagctgaccagaaagagctgagaagccgtgcattacagcgcagcccctctcctgacaaggcttcctcccgaagtccagtggacctggctcaccgacaggccctccagatggaggacgccctgtgtgtgcaggactcactcccgaccctgctcagtgacctcctgagaggggcacctacaactctcatgaaagcacaaatcagattaggatccaggstctgttcaacctgtcttcccctaggagtcttcatctgatactaccagaaacactgccctttccatgttcagctagatttgtgcctgtttctcagttttcaaaattaaacaagatattgttagggatacacacatagttgacagatttatgaagaagagtaatgaaaagatcaacacaagaatcaggacagtggctgcctctcgggggaaaggggatgcaactgaggagggatacactggaaacttctgcagcagtggcaacggtcgattccttgacttacgatggtggtgcgtggatgttcattctgtaatattttggattgcacatgtgcattcagtatgttcttctatatgtgtgatatgtttaatttctgaagtaaaaacacacagaggaata

SEQ ID NO: 12821 - DNA, 466 bp, Homo sapiens
cggtgtgaacagtggcctatttgcctagtcaccatgctgtgaattgtgatgctgccatcctattgcagggcatggatgaaagctgagtctccatttataatccttgtggtcgaaatagagaacatcacttcactgttgtaggacaaagatagaagacagagctctgctctcagtctctgcactcgataagaaaggagaagcaatacagctggtttttgtttgtttgttttaatcttcacccagagcaagatggtcaaaatatttctgtcctcgtttgtgtgttttgtctgaccctattgatgtttrttagtagtagacttcccaggacccaaactggaatatttataaagtaacaaaaaaagaagaaaatcttagaatttacttctgggtcacttcttaagtcctgtagttcttagcatctccaccctccttccttcatctttcaaagccattagtcaattgctta

SEQ ID NO: 12822 - DNA, 2336 bp, Homo sapiens
aaatatcgtattagaaatcccattaaagccctaaagaaatagtcttcctatcataaattctgaagaattactattgactgactttagttcaacaaagtattaccctcattgtaactgctgtgtaagatatagtatcaatgctaaatgaactaaattccagaatgtggcaagactttctcagcagaggagagaccaatactgctgtcaacttggtggactggccgaaggagaaagaatatcccatagagaatggaaaggaagaaactgacagayatataaatattgtttgtcagtcatgttttggccagcataacttatgatgattttaaacttaagtcttgaaatttaaggcacaaccaaaacacaagcaagtcctcctctgcccaacaactcctctttacaaatcttcatcaaatgtgtgaaggaaatacatagaacggtgagaatgggacaagagaactgacgagaaccagggattctcatggattctgtggttttacaaaacaggaatggcttatgtgattcctctgtagagcaccacacagattataattaaggttccccagttctggtatctcatccgagtcttgacagagaaataatctacatccatgctccctccagacattggcatatttcattttcttacacctgtgagattaataggagctgtctttgggaagtggtagagaaagggagaaggagcaattcggaaaaagaagaaagaggatctgactctagacataggtgctatattcttatgtaatcatgcatgccttgtcacattgtacacatccatttattagaagaaattacagttcttgaatcaaacagaattagacaattgtacaaatagcaggaggtgagaagcatgagagacactattgaatctttctgccataccaagtaaaaggtagcaacatgttgaaatctacagtccaggaaaagttagagaaactcatttaagattctacaggctgaagatttgatgctgaacaggagactggaaaaagattacctaatagcaaggaggctagggtgagaggattgaggcttgagagcaatgagaactattaagatacttacaagctggcagcaggaagaactgtaatatgatttaggaaactgaaggctttattcttacataaagtatagaaagatcaaaggctttatggtgctcagaccctaagccctgctaaaaagcaagcccaaattctgccaccaaaatatctgaagtcagttaaactgcctctaactaaatttgcaacaaagtccaggcccaagacaacaatatattacattgactcagttaccctatggcagcctgaaagaagaaaggatgtgtccttttctgggaaaaaactattatttgcttcagcctctattgagcttttacaagttaaaaataaaataaaattttaaaagtaatgagatagcaaaaaaatgtgaccttaggtcaagagaggaagtagtcaataaaagcagaccaagatatggttctcatagcctattgaccaaataagaactttgaaagaactatgataaatatgttcaatgagtaattgtaaaaggttgaaaacacataaaaacaaatagaaaatttctacagagaaaaatgaataaaaaatggaaattctagaaatgaaaatatatgttattagaaataaagaatttatttgatacgattagcaacatcatgaaatcaacagatgaaaggattagtgaagttgaagacagatcaatagaaagtatccaaacttaatagtaaaaatagaaatttgtaaaggccctaaaaaaatgtcagagatgtgtggagcaaaatcaaattgtctaaaataatgtgtaattagagtctgcaaaaaagaggaaaaagagtaggacagaagaaatgtgtgaatatgtaatatgtgagtattttccaaaattagtgaaaaactaaccacaaatttaagaattgtagtgaacatgaaggcagataaaaggaaaatatggctaggcatattgtagattaattgttaagaattcaaaggaaaaatgtcatattctacaaacagaaaaatgacaccagtgacagctgacttctcttgtcagatttaaaaataagtaggaagatatctttaaaatgctaacagaaagtaaaattcaagctagaattatatacaaagtaaaatacccttcaaaaatgaatgtaaaataaaactattttctgaaaaatgttatctgagaaatttcatttctcatggatatgcacttcaataaacactaaattcctcagattaatgggaagtgataaataaatggaagcccacattcacaagaagtaggagggaagaaca

SEQ ID NO: 12823 - DNA, 2336 bp, Homo sapiens
aaatatcgtattagaaatcccattaaagccctaaagaaatagtcttcctatcataaattctgaagaattactattgactgactttagttcaacaaagtattaccctcattgtaactgctgtgtaagatatagtatcaatgctaaatgaactaaattccagaatgtggcaagactttctcagcagaggagagaccaatactgctgtcaacttggtggactggccgaaggagaaagaatatcccatagagaatggaaaggaagaaactgacagatatataaatattgtttgtcagtcatgttttggccagcataacttatgatgattttaaacttaagtcttgaaatttaaggcacaaccaaaacacaagcaagtcctcctctgcccaacaactcctctttacaaatcttcatcaaatgtgtgaaggaaatacatagaacggtgagaatgggacragagaactgacgagaaccagggattctcatggattctgtggttttacaaaacaggaatggcttatgtgattcctctgtagagcaccacacagattataattaaggttccccagttctggtatctcatccgagtcttgacagagaaataatctacatccatgctccctccagacattggcatatttcattttcttacacctgtgagattaataggagctgtctttgggaagtggtagagaaagggagaaggagcaattcggaaaaagaagaaagaggatctgactctagacataggtgctatattcttatgtaatcatgcatgccttgtcacattgtacacatccatttattagaagaaattacagttcttgaatcaaacagaattagacaattgtacaaatagcaggaggtgagaagcatgagagacactattgaatctttctgccataccaagtaaaaggtagcaacatgttgaaatctacagtccaggaaaagttagagaaactcatttaagattctacaggctgaagatttgatgctgaacaggagactggaaaaagattacctaatagcaaggaggctagggtgagaggattgaggcttgagagcaatgagaactattaagatacttacaagctggcagcaggaagaactgtaatatgatttaggaaactgaaggctttattcttacataaagtatagaaagatcaaaggctttatggtgctcagaccctaagccctgctaaaaagcaagcccaaattctgccaccaaaatatctgaagtcagttaaactgcctctaactaaatttgcaacaaagtccaggcccaagacaacaatatattacattgactcagttaccctatggcagcctgaaagaagaaaggatgtgtccttttctgggaaaaaactattatttgcttcagcctctattgagcttttacaagttaaaaataaaataaaattttaaaagtaatgagatagcaaaaaaatgtgaccttaggtcaagagaggaagtagtcaataaaagcagaccaagatatggttctcatagcctattgaccaaataagaactttgaaagaactatgataaatatgttcaatgagtaattgtaaaaggttgaaaacacataaaaacaaatagaaaatttctacagagaaaaatgaataaaaaatggaaattctagaaatgaaaatatatgttattagaaataaagaatttatttgatacgattagcaacatcatgaaatcaacagatgaaaggattagtgaagttgaagacagatcaatagaaagtatccaaacttaatagtaaaaatagaaatttgtaaaggccctaaaaaaatgtcagagatgtgtggagcaaaatcaaattgtctaaaataatgtgtaattagagtctgcaaaaaagaggaaaaagagtaggacagaagaaatgtgtgaatatgtaatatgtgagtattttccaaaattagtgaaaaactaaccacaaatttaagaattgtagtgaacatgaaggcagataaaaggaaaatatggctaggcatattgtagattaattgttaagaattcaaaggaaaaatgtcatattctacaaacagaaaaatgacaccagtgacagctgacttctcttgtcagatttaaaaataagtaggaagatatctttaaaatgctaacagaaagtaaaattcaagctagaattatatacaaagtaaaatacccttcaaaaatgaatgtaaaataaaactattttctgaaaaatgttatctgagaaatttcatttctcatggatatgcacttcaataaacactaaattcctcagattaatgggaagtgataaataaatggaagcccacattcacaagaagtaggagggaagaaca

SEQ ID NO: 12824 - DNA, 2336 bp, Homo sapiens
aaatatcgtattagaaatcccattaaagccctaaagaaatagtcttcctatcataaattctgaagaattactattgactgactttagttcaacaaagtattaccctcattgtaactgctgtgtaagatatagtatcaatgctaaatgaactaaattccagaatgtggcaagactttctcagcagaggagagaccaatactgctgtcaacttggtggactggccgaaggagaaagaatatcccatagagaatggaaaggaagaaactgacagatatataaatattgtttgtcagtcatgttttggccagcataacttatgatgattttaaacttaagtcttgaaatttaaggcacaaccaaaacacaagcaagtcctcctctgcccaacaactcctctttacaaatcttcatcaaatgtgtgaaggaaatacatagaacggtgagaatgggacaagagaactgacgagaaccagggattctcatggattctgtggttttacaaaacaggaatggcttatgtgattcctctgtagagcaccacacagattataattaaggttccccagttctggtatctcatccragtcttgacagagaaataatctacatccatgctccctccagacattggcatatttcattttcttacacctgtgagattaataggagctgtctttgggaagtggtagagaaagggagaaggagcaattcggaaaaagaagaaagaggatctgactctagacataggtgctatattcttatgtaatcatgcatgccttgtcacattgtacacatccatttattagaagaaattacagttcttgaatcaaacagaattagacaattgtacaaatagcaggaggtgagaagcatgagagacactattgaatctttctgccataccaagtaaaaggtagcaacatgttgaaatctacagtccaggaaaagttagagaaactcatttaagattctacaggctgaagatttgatgctgaacaggagactggaaaaagattacctaatagcaaggaggctagggtgagaggattgaggcttgagagcaatgagaactattaagatacttacaagctggcagcaggaagaactgtaatatgatttaggaaactgaaggctttattcttacataaagtatagaaagatcaaaggctttatggtgctcagaccctaagccctgctaaaaagcaagcccaaattctgccaccaaaatatctgaagtcagttaaactgcctctaactaaatttgcaacaaagtccaggcccaagacaacaatatattacattgactcagttaccctatggcagcctgaaagaagaaaggatgtgtccttttctgggaaaaaactattatttgcttcagcctctattgagcttttacaagttaaaaataaaataaaattttaaaagtaatgagatagcaaaaaaatgtgaccttaggtcaagagaggaagtagtcaataaaagcagaccaagatatggttctcatagcctattgaccaaataagaactttgaaagaactatgataaatatgttcaatgagtaattgtaaaaggttgaaaacacataaaaacaaatagaaaatttctacagagaaaaatgaataaaaaatggaaattctagaaatgaaaatatatgttattagaaataaagaatttatttgatacgattagcaacatcatgaaatcaacagatgaaaggattagtgaagttgaagacagatcaatagaaagtatccaaacttaatagtaaaaatagaaatttgtaaaggccctaaaaaaatgtcagagatgtgtggagcaaaatcaaattgtctaaaataatgtgtaattagagtctgcaaaaaagaggaaaaagagtaggacagaagaaatgtgtgaatatgtaatatgtgagtattttccaaaattagtgaaaaactaaccacaaatttaagaattgtagtgaacatgaaggcagataaaaggaaaatatggctaggcatattgtagattaattgttaagaattcaaaggaaaaatgtcatattctacaaacagaaaaatgacaccagtgacagctgacttctcttgtcagatttaaaaataagtaggaagatatctttaaaatgctaacagaaagtaaaattcaagctagaattatatacaaagtaaaatacccttcaaaaatgaatgtaaaataaaactattttctgaaaaatgttatctgagaaatttcatttctcatggatatgcacttcaataaacactaaattcctcagattaatgggaagtgataaataaatggaagcccacattcacaagaagtaggagggaagaaca

SEQ ID NO: 12825 - DNA, 695 bp, Homo sapiens
ttttgtgttccctaaaaggacttactgcaaagaacaacccttcttatatgccttagagaagattcatggatgctgtcttttttttcacctgtgacaaggccaaaagcagactctccaaattgccattctttgcctcatatatgattagctgcactacttgtcctcattgwttaatcagaacaaaatacttgtcaatgaaactttggttaagtatcttcttttcccctaggtccttgcattttggtcttcaccctgctagagacaaaatacatcccctccttagcagtccctcccaagaataggctggcttcatgatcattctctgatctgctagtacagcaagacatctgatttttttctttgttcactcctccctatagtacagaaatcttttttgcctaatccttgcagatattttgatctggagtattctccctattgtgatatttcctttcccacattggaataattcttctccctcctcttgcaatgattcaggtgaataaagtctctccttagtaagtctggatttatttcttatttaatgcagtatgtttagaattccaatttcaacattttttttctattttcccagcctttccagaaatctcctttgcctctctctattggtgcagatatggtttctgagacccacagactatcctagaacacttgctctttattataatgagacc

SEQ ID NO: 12826 - DNA, 624 bp, Homo sapiens
gtttccctcaaaattcatatgttgaagctctaaatccctgtgtaactatatttggagtaagaaaggaattaaggttgaataagwtcataagggttaggccttaatgcagtaggattagtgtccttataaggagagacatcatagaactcactctcactttgtgcatgaataaagaagaggtcatatgaacacaggaaaatggtagctgcctgcaagccaagggaagaggactcatgaggaaacctgtcttgctggcaccttgatcttggacattccaccctccagaactgtgagaaataagtttctgttgtttaatccacccagtcattggtattttgttatagcagcccaatcatactaatatattcttaagctaccattataccccaacatactgctagtgttcatctactaggaaagcagcaatcaatagaagtatatattcacaaaatgtatggctgttggcttgcttagaccatgatatgactctgctgaatataactgattgacagaacacttctgctactttcattactgctcttaaaagtgaaagcatttaccgtggcacagttctaagcagggatcttactattttattcttcctaatttgaatatctacctgtg

SEQ ID NO: 12827 - DNA, 624 bp, Homo sapiens
gtttccctcaaaattcatatgttgaagctctaaatccctgtgtaactatatttggagtaagaaaggaattaaggttgaataagatcataaggkttaggccttaatgcagtaggattagtgtccttataaggagagacatcatagaactcactctcactttgtgcatgaataaagaagaggtcatatgaacacaggaaaatggtagctgcctgcaagccaagggaagaggactcatgaggaaacctgtcttgctggcaccttgatcttggacattccaccctccagaactgtgagaaataagtttctgttgtttaatccacccagtcattggtattttgttatagcagcccaatcatactaatatattcttaagctaccattataccccaacatactgctagtgttcatctactaggaaagcagcaatcaatagaagtatatattcacaaaatgtatggctgttggcttgcttagaccatgatatgactctgctgaatataactgattgacagaacacttctgctactttcattactgctcttaaaagtgaaagcatttaccgtggcacagttctaagcagggatcttactattttattcttcctaatttgaatatctacctgtg

SEQ ID NO: 12828 - DNA, 624 bp, Homo sapiens
gtttccctcaaaattcatatgttgaagctctaaatccctgtgtaactatatttggagtaagaaaggaattaaggttgaataagatcataagggttaggccttaatgcagtaggattagtgtccttataaggagagacatcatagaactcactctcactttgtgcatgaataargaagaggtcatatgaacacaggaaaatggtagctgcctgcaagccaagggaagaggactcatgaggaaacctgtcttgctggcaccttgatcttggacattccaccctccagaactgtgagaaataagtttctgttgtttaatccacccagtcattggtattttgttatagcagcccaatcatactaatatattcttaagctaccattataccccaacatactgctagtgttcatctactaggaaagcagcaatcaatagaagtatatattcacaaaatgtatggctgttggcttgcttagaccatgatatgactctgctgaatataactgattgacagaacacttctgctactttcattactgctcttaaaagtgaaagcatttaccgtggcacagttctaagcagggatcttactattttattcttcctaatttgaatatctacctgtg

SEQ ID NO: 12829 - DNA, 597 bp, Homo sapiens
gacaggatctcactctgtcacccaggctggagtgcagtggcacaatcatagctcactgcagcctcaaactcctgggtgaagtgatcctctcacttcagcctgcaaagtacctaggactacaggcatgtgccaccacacctggctaatttttaaatttttatttttttagagatagggtctcactatgttgcccaggctggtcttaaactcctggcctcagtcctcctgcctcggcctaccaaagtgctgggattacaagtgtgagccactacgcccagcctgctaatttttaacttaaaaawtttttttttaatattttatcattcagatgtcattctgctctacctttgccttgttaagtccttgtcagtacaatttaattaaatctccctagtgtactgtgagttagataaaggcctaaggtaaagctgatgtttatttcctttttaggtctatgtgttgaaacttctgtgacctattttggaaatttttttacacttagtgcctgctttgtaaattgtcatgatgtttttttgctctaatttgatctttctgcacttccaaggtattctacagcagggaaagaagagtagctag

SEQ ID NO: 12830 - DNA, 558 bp, Homo sapiens
ggtcaagactgcagtgagtcatgatcacaccactgcactccagcctgggaaacagagcaaacccytgtctcaaaaaaaaaattttttttttggttttgtttttgctttgcaaaattttctattccaaagcccattaaagaaaaattgataaactggatttcatcaaaatgaaacacatctgctttttgaacaaaaccattaagagaatgaaaagacacaagttgtatgtcttatgtccacaatacctttaaagaactaactccccacagtcagtgaatagaggaactaaatttctcatatttcatacattgctgttggtacagcttctctgggaaataattttgcatttacttaaaatattaatatgtacttaccatagaacccagcaatttcagtcctggggcagattgttcatattataaaattcatgttgttcaggatgatgtccagatttactcaatggtttttttcctgtggttactacaacaaattgccatgaacttgggagcctaaaatatcaaaaattattctcctacagttttggagggcaaaaatcta

SEQ ID NO: 12831 - DNA, 580 bp, Homo sapiens
agattgcagagcattaagaagaaaacgtggtgaagaaaaggaggcagtctgtatttttgtttgagaaattttatttagaaaataaatgctagttaaatggaacaggagactaaacagagaattgtgagagacccaatgcatatttgaaggtaaattctgtaaagagtgaaagcttgaaaaggctcaagtagggggacaatgggagtgggcagagtagagtcctggaaagagctctgggagaggatgygataaagagcgcagttggagggattgtttggtcttggaaggagctggctagcctgaaactggagggaaggttaaattgatgggaaaaagcaggaagagagaaaaagaaggtctcagtttccatgaagttgcaaccatttgctggttgtacagtgggatggaagacttaaagagaagcttggaatagccaatgctggcaatggatattgaaacagtaagataaatctaaggatttagaagcagttctagggacttagtgaaagtaaaacctttaacacactaggtctttatattgtaactttctctaacaatgctctaggaacacggtagagga

SEQ ID NO: 12832 - DNA, 184 bp, Homo sapiens
ggccccccaaagtgctgggattacaggcgtgagccactgtgcctgtgccccacactctttcatctgtctcccacgcactacttgtaccaagtaatcatcaacatttcatggtaacagcccctccatcagattcttccttcctggaaacatcaatggtcacacaaacgtcccmcaaagaagaaag

SEQ ID NO: 12833 - DNA, 1324 bp, Homo sapiens
tggagtgcagtggcacaatctcagctcactgcaagctccgcctcccaggttcatgccattctcctgcctcagcctcccaagtagctgggactacaggcacccaccaccatgcctggctaattttttacatttttagtagagacagggtctcaccatgttagccaggatggtctcgatctcctgacctgatccacccacctcagcctcccaaagtgatgggattacaggcgtgagccactgcacctagccaatcttatgcatttcatttggaccatatgtgggaaaattctgtttagtcttagaaagtgacagtttaagttacaaaacaccttcaagcaatgaccactgtcagtaaaacatgctgcaagtctgttctgttcatactgctcatatacactgagtaagatgacattcactaatggttttttgtttgtttgtttgattgattyggtgtggggataaaatatactgtgtccttgctccatcaaagaacttacggtgtatggatgaagtatttctggttatatactttcattaaataaacaaacataacaccatgaagcatagtgggaaaagcacaaaactttattcatatgccttttatgcaactttttaggtgcaaaaacttaggtaagatatttaatgcttaacttctttgtgtcacttattcttcctatacaaggtatgaagagtaacaccttagggtttgatatggtttggctccgtgtccccacccaaatttcatctaaaattgtaatccccatgtgtcaagggaggaatctgctttccccgcatgtggaggaagggaggtgattggatcatgggggtggtttctcccatgctgttctcgcaatagtgagggagttctcacaagatctgttgattttaaaagtttggcacttcctctctcactctctctctcctgccaccttgtgaagaaggtgtctgcttccctttccgctgtgactgcaagtttcctgaggcttccccagccatgcagaactatgagtcaattaaacctcctttctttataaagtacccagtcttgggcagttcatcatagcagtgtgaaaatgaactaatacagagtttatagttaaggtttaaatgggtaaatgaatataatgtgcataacttaaggaagttgtgcagcagattctttacaatatccaatatttatcgtggcatgcaaaaaaagctgaagaaattcccaccatttcgtagtgaattcttaagaatgggcatatttaaaatacattttatacgacacaatcaatattcattttgacatctttcagagttgggagtgcaactcaaaggaaaa

SEQ ID NO: 12834 - DNA, 1324 bp, Homo sapiens
tggagtgcagtggcacaatctcagctcactgcaagctccgcctcccaggttcatgccattctcctgcctcagcctcccaagtagctgggactacaggcacccaccaccatgcctggctaattttttacatttttagtagagacagggtctcaccatgttagccaggatggtctcgatctcctgacctgatccacccacctcagcctcccaaagtgatgggattacaggcgtgagccactgcacctagccaatcttatgcatttcatttggaccatatgtgggaaaattctgtttagtcttagaaagtgacagtttaagttacaaaacaccttcaagcaatgaccactgtcagtaaaacatgctgcaagtctgttctgttcatactgctcatatacactgagtaagatgacattcactaatggttttttgtttgtttgtttgattgattcggtgtggggataaaatatactgtgtccttgctccatcaaagaacttacggtgtatggatgaagtatttctggttatatactttcattaaataaacaaacataacaccatgaagcatagtgggaaaagcacaaaactttattcatatgccttttatgcaactttttaggtgcaaaaacttaggtaagatatttaatgcttaacttctttgtgtcacttattcttcctatacaaggtatgaagagtaacaccttagggtttgatatggtttggctccgtgtccccacccaaatttcatctaaaattgtaatccccatgtgtcaagggaggaatctgctttccccgcatgtggaggaagggaggtgattggatcatgggggtggtttctcccatgctgttctcgcaatagtgagggagttctcacaagatctgttgattttaaaagtttggcacttcctctctcactctctctctcctgccaccttgtgaagaaggtgtctgcttccctttccgctgtgactgcaagtttcctgaggcttccccagccatgcagaactatgagtcaattaaacctcctttctttataaagtacccagtcttgggcagttcatcatagcagtgtgaaaatgaactaatacagagtttayagttaaggtttaaatgggtaaatgaatataatgtgcataacttaaggaagttgtgcagcagattctttacaatatccaatatttatcgtggcatgcaaaaaaagctgaagaaattcccaccatttcgtagtgaattcttaagaatgggcatatttaaaatacattttatacgacacaatcaatattcattttgacatctttcagagttgggagtgcaactcaaaggaaaa

SEQ ID NO: 12835 - DNA, 553 bp, Homo sapiens
atagacaatgttaagctcacttagaaaacctgaggccaggtttcaggcgtgcctaatatagtagaggggcttacagtggggttagggaagtgtgaagtagcagcctacgaagaagactactacagacaattagaagtagtatccagtccaataaaagcaaaatgacataaaaacaacgacaacaacaacaacagaaacckctaaaacattttcaaacatagagtaaaaaccatatatgataaagctctatatttacttgagagctattaaaagtcagtgtagtaagagtttccacaaaggtgcactttttgtgccaaccacagaaatttgaacagagcccatgtaggctgctgggctatacaatcacttgagtgcaccttggccaaacatattggagaaaattggaggcacaaaagcaacctcttgaactcaaaattaacaaatgagctgacaggagaagaaatgggaagaattttaatttgttaattcctgctatattaccagcatcttactagggaatgagtgcttgccccatcttgtaaaacaatatgaa

SEQ ID NO: 12836 - DNA, 555 bp, Homo sapiens
gtaaaagagtcaagccaaacactttcttcttttgagacactgcatttgggggctgggtggggaggatggaggaaaagcccccttcacaggaactgtttctattcaaatggccagactgtgcacatggcgatctgaggcttaaaggaggctggggatagataggtttcattttataggctcagctgtagaggaagacaaggaagatcatggctggaatggtagatgaaccaggcttggagtacaactgccacaggacatgtgtgaataggggtgttggagagattcctagaactggatttgttgtcaacagctgcttggcatggtactcaaggcctgagacctggagtgttaycttcttctctttcctacaagtccctctgactcagcccagtgtcttcatttctgacctctcagttgcacccatgcctgaaccacactctcctagaaggtccgtgcggcttctgtgcaccaataccctctgaggttcattctgtcttccattttccctggagcatgtgctggccaacgtggctgggcaaaatgtttctttctcga

SEQ ID NO: 12837 - DNA, 1431 bp, Homo sapiens
tgtacagaattatcctgggtatgacccccgtcaaagaatgttttttattctcctggtacagggagggcatctttcacgtgggacttttatctcctgttttaaggaagaaaaaaagattaagattcactttttgcatctgctattttctttttctttttattattatttcaacagttttggggggaacaggtggtgtttggttacatggataaattcttcagcagtaatttctgagattttggtgcacccatcacccgagcagtgtacactgcacccagcgtgtarccttttatccctcatcctcctcccacccttcccccaagtcctcagagtctattatttttatgcctttgggtcctcatatgcatctgctattttcaagtgcctttagctccaaataatccttatgccaaaatggcatatttgggggcaacacattctgccacccttcagtacctttggccaaacagaggtttgctttccagacctcctgggttctgtgactggcaactgcacaagcagggcacgctcacatgccatcttcccacagtgacccgtggggaagtgacgaaagaaggctgcttctgtcctaattgtgttgctctgttgtacagttccctaaaatgtctgcccccaccccaccccaccctaccccatattttatggaattaggtgaagagctttttcctcctttacttgcccatcatcctcttcttccctgtaggcatgagttcctgctgttcatgaaaccaattggaaagtaaggggcactactgcactgataatcttggctccttgctcaaaggcacggagaaccacctctccctaacctgcaatgtgggaaatgtctcacatactatatgggagactgcagagaagaaaggggtcaccagaacaataaacccaaacaggatatacaatggaatgtacgctatgattacaactctgctaaaatatatctgccagtggactagcccaggaaacgaacaagcaaaagtgaaagcaactgcatgattcagcggtaataatagggattgaattttcttttgtggttctctattttctaatctttctataatgtaattatatagaacttgtaatgacaggtatatcttttatgtttcttggtatacaaaatgctctcctctgaacgtttcttattatgtaagtcatttaagtaatcatattgattttgtagaaaaattttagaggctaaaaataccatcagtattctaagtgtatttgatccaagcctcagcataaaatcaaatgaattactgtcaacacagaaggagacttacgtctttaactttgatgtacaaacagaagaacatagaagctaacatggactttggagtcagacagacatgagttcagatctcagattcagaacttactagttctgtgatcttgggtaaggtattattattc

SEQ ID NO: 12838 - DNA, 1431 bp, Homo sapiens
tgtacagaattatcctgggtatgacccccgtcaaagaatgttttttattctcctggtacagggagggcatctttcacgtgggacttttatctcctgttttaaggaagaaaaaaagattaagattcactttttgcatctgctattttctttttctttttattattatttcaacagttttggggggaacaggtggtgtttggttacatggataaattcttcagcagtaatttctgagattttggtgcacccatcacccgagcagtgtacactgcacccagcgtgtagccttttatccctcatcctcctcccacccttcccccaagtcctcagagtctattatttttatgcctttgsgtcctcatatgcatctgctattttcaagtgcctttagctccaaataatccttatgccaaaatggcatatttgggggcaacacattctgccacccttcagtacctttggccaaacagaggtttgctttccagacctcctgggttctgtgactggcaactgcacaagcagggcacgctcacatgccatcttcccacagtgacccgtggggaagtgacgaaagaaggctgcttctgtcctaattgtgttgctctgttgtacagttccctaaaatgtctgcccccaccccaccccaccctaccccatattttatggaattaggtgaagagctttttcctcctttacttgcccatcatcctcttcttccctgtaggcatgagttcctgctgttcatgaaaccaattggaaagtaaggggcactactgcactgataatcttggctccttgctcaaaggcacggagaaccacctctccctaacctgcaatgtgggaaatgtctcacatactatatgggagactgcagagaagaaaggggtcaccagaacaataaacccaaacaggatatacaatggaatgtacgctatgattacaactctgctaaaatatatctgccagtggactagcccaggaaacgaacaagcaaaagtgaaagcaactgcatgattcagcggtaataatagggattgaattttcttttgtggttctctattttctaatctttctataatgtaattatatagaacttgtaatgacaggtatatcttttatgtttcttggtatacaaaatgctctcctctgaacgtttcttattatgtaagtcatttaagtaatcatattgattttgtagaaaaattttagaggctaaaaataccatcagtattctaagtgtatttgatccaagcctcagcataaaatcaaatgaattactgtcaacacagaaggagacttacgtctttaactttgatgtacaaacagaagaacatagaagctaacatggactttggagtcagacagacatgagttcagatctcagattcagaacttactagttctgtgatcttgggtaaggtattattattc

SEQ ID NO: 12839 - DNA, 676 bp, Homo sapiens
ttatttccaatgctatcagttatcaaggctgcttacttgaattatatcaaataaaagtggccatcaccaaagagttttatggtacagggactaaggtcttaaaatacggcaaaactttaaaaagccttccataaatactactgtatttgtttaaaaacaacaatgtatctcaaaaaaatcaaaagcaacagagacgttatccttttttttttgcttttgagacaaggtcttgctatgctgcctaggctagtgttgaactcctgtgctcaagcagttctccggccttggcctcccaagtagctaggactataggcatgccaccatgcccagcttaacagagaytttaaatcaggagtttagggtgaggaaaaataacttaccagaaacaagaggaaatattactactacattaacattactaccattatcattaggggacaacaaatagcttaaacacttgcaaccagaacaagagctaaaaattcaagttttgttttcacatattacttagcacactcgatgaacaattatatgctcttgataatgttataaattctaaattctaacatttcacatgtaagtactcaatgcaaagaattcacagcattgtttaactgactcaacagtcctcctttagcttaagaattacttgaactagccaggtgcattagctcat

SEQ ID NO: 12840 - DNA, 546 bp, Homo sapiens
tgagttaattaggaataactaagtcagcatggtgctttcctgctacagaagcagggatttacaatgcatagagaaaataatattgcctttcgtttgcattgatttttcacttaccaagcactcatgtctgacaaatgacctcacttggtccttaaaagaactcagtgagataggaaggtgggtggcattattattattattatttacatgtaactgatgagaaaattgactcagagagggaaaatgatatagtcaatcartacagatgaaacagaaacccaggatgcccatctctaagatgaggtatatgggagaaagtagtaaggctttgctgtaaatatctaccttaatattaaagtccaggtcccagaggtaaagtaagcaacttcatgtattctgccaggtgtaggtggaatgcatacacctgcagatgattgtcccaggagctctgtcccagaaggcaaagtcattgtccctacccatccctgtctctgtctgaagaccagcctgcaagcaggagagaaggaaggaaggagtcttcccatt

SEQ ID NO: 12841 - DNA, 545 bp, Homo sapiens
ggatcctcaaaatggaaccatgcctggaccttgagtgagctccttattgtgagggatgaagattgctgggtgacaggtagtctggccagaagccatgggtaagaaaagcttagtggaccaaggaggatgggttgacatgttagagcagcccaggtttcccagggttcctggctatgaaacgctaagttctagagagaaaaatgaaackgtcttttgaagtcttcatccctgaaaggatgcaaggttggggctagtgcagtcactgtggtattggttgagtttatttgggatttggctggatatgccaagactagctcactttgtgttctgtttttatagcaaaatgtatgtcttcatttagaaaatatcagctgcatccttcactttaaccttagatggaaagaataatccaattatttggatattggaaataattggaacaatatccaattatttgtaccagcaaacatctaggtacaaacagaggtggtttcatgaaattaactgccaggagatagtgttactgggagtgcctttaattggca

SEQ ID NO: 12842 - DNA, 252 bp, Homo sapiens
cccaaagtgctgggattacaggcgtgagccacatacccggctcagagtgagtcttaaaaggacaaaaagaacaaacttcattgctaatgctccagactgacccagctgtgaaaacagcgataccatcttacccttgccmtttttgccaactctggaatcttgccaatgaggaacttaatcaaatgtgggttccaaaataggaactcattagcacaaattttgcaggatgcattcctcacttgcaggatttta

SEQ ID NO: 12843 - DNA, 492 bp, Homo sapiens
tttgaggaactgccaaaatgtttcccatggtggctgcaccattcttcattgccaccagcagtgtatgaggtttccagtttctccacatccttgctaacacttgtgattttctttttgattttagttatatcatactagtgggtgggaagtggtgtctcattgtgattactagagatcacatactactaataatgccaagcctattttctgaaatacttcagaaactcagatacacataaagaaaggaattatgtwctagaaaaggaataaatgaaggtaaaatattttatccttcttatttttaattgataaaaaatatatgaaaataatagcaacaatgtatttggttattacagcttgtgcatagctaaaatgaatgacaacagtgttataagggtcaagagggaggaactgagaatattctaaggcacttgcattacccatgaagaagaatagtgttattcaaaagtggaattaggttagttgtaaatg

SEQ ID NO: 12844 - DNA, 537 bp, Homo sapiens
tggttcgtcaactaaggtacttcaaatcagtttaattcggarcagttgggcagaatcttttcggccgcaacgtgcatgagaatcacctggaaaccttgttcaggtgctgattcagagtctggggtaggtctgggtggggtctgagagtctgcagctactcccaggcctcctctgctgcgggtctgaggcccaccttctaagcagcaaggctgtagagagttatcacgagagtgtcaaagctggaggcctctccagcttgcattggacacatggggtcactgggcctcagaggaaaatgggacttgcccaaggtcacacaggaatttagggcaagagctggccccagaagtcctggccctcagagcaatggaagtataaagacagccctgttcagcatcaccacaagaataacccccagttttgaacacctaactgccaggccctataacacattctcatttgattctcaccaaaaagaaaaaaaaaatcacaatgggcattattatctcttattcttatttcttcataggtgagaaa

SEQ ID NO: 12845 - DNA, 537 bp, Homo sapiens
tggttcgtcaactaaggtacttcaaatcagtttaattcggaacagttgggcagaatcttttcggccgcaacgtgcatgagaatcacctggaaaccttgttcaggtgctgattcagagtctggggtaggtctgggtggggtctgagagtctgcagctactcccaggcctcctctgctgcgggtctgaggcccaccttctaagcagcaaggctgtagagagttatcacgagagtgtcaaagctggaggcctctccagcttgcattggacacatggggtcactgggcctcagaggaaaatgggacttgcccaaggtcacacaggaatttagggcaagagctggccccagaagtcctggccctcagagcaatggaagtataaagacagccctgttcagcatcaccacaagaataacccccagttttgaacacctaactgccaggccctataacacatwctcatttgattctcaccaaaaagaaaaaaaaaatcacaatgggcattattatctcttattcttatttcttcataggtgagaaa

SEQ ID NO: 12846 - DNA, 518 bp, Homo sapiens
ccaccaccacctyctccatcaccaccaccaatatcattaccaccaccacctcctccatcaccaccaccaatatcattaccaccaccaccacttccatcacaccactgttaccaccaccattccataaccaccagacccacaatatgcttttataaacttgaaagccagagaaagaagaaacagtgaagaaaggggctgtttctctggagtattcaggtggttcaggtggcaaagccaggcctcttcaccctcttccccttaaataagaggcttcccatagagcagaacagaatcagatgcctgggaagacagcataaaacatagattaatggcacatggaatgctgggtcctcctgcactccccataccccctaagcttcctttccttgcctgtgaggagagatgcagcatatatcactggcaaaggggcagggaaaggtactagcactggtcgaggccctactgtgtaccaggcaccttctttggtgacgtatatacttaaaaagtcaatggtaccc

SEQ ID NO: 12847 - DNA, 571 bp, Homo sapiens
tggcaaagtttagtagctgttagcaatattttctgggtctttttcttttgcaagaagaataaattgtattgctttatcctacacatttaataaagagaaaacttccaataacgcactgaaatattatcctttccattgggttgtaaatttaggaactcccaacactgagaagtggaactttgttgccaagtttttcctgtatataaatccccatttgtggcccttggrtccattctatttaataagagtaaagaaaatgttataataatcaattgtgtacgttattcaacatcacaaggttccatgtaatgaaagctgtttcttttctactacgtttgtgaactgtgctttcaaagcaaagctattgtgaaaaaaaagtaaattgataaaacaatgcaaacatatctttcgttttctgtttggatgaatgattggcattggcttgatacaaatggttaatggttgtagtttaatgtttctaatataggtttcatatgaaaactgggcttatggagaacctaataattatcaaaatgttgaatactgtggtgagctgaaaggtgaccctact

SEQ ID NO: 12848 - DNA, 647 bp, Homo sapiens
catgcacacatgcacaaatcyggttggtgagtgttcctgaaggctatgtgagcattttctagaaccctatgctctaagtttcactccataaatctcttttattggcagtactgagaaaaccaagggccatgtaataatttcctctcttgctctccttcacttgcataggatgaaaaactaaagattgatgatgatatcctttggaggagccaggagtgccatccatcccactctgtcatctatccctctaaagctttcctccacagtccactgtttctgttctgctccagaggacagcctttctctttttctcccccagacctcctccattgactccttctgaaacttcctctttggggcagccaccctaggttaagaagcacaagaaggatttttcagctgaccaaaccataagactcagaaaatatcctccacggagatccaaatacaagtcatctctagaagtcatcttctctttcttccactcaaagccatcatagttcgacttggaaaggctctagggaaagtgagtctagtctgctgttgatcctcaagtagagtatttgtaactctcttttatccttcctattgtgatttttggccatgttctgttgagattattttgtttccactaaataggaagtttc

SEQ ID NO: 12849 - DNA, 570 bp, Homo sapiens
tgccaaatcatagtgtaatatttttaagaacattttgcatggcatttaaactcaacacatacggctgactcagttgaattaacaacaataagaccagcaatgaccaggttcacacataagcaactaatgactactatgtcagattggctcctaaccatcaattgtaagatkcatgctgattttaaatatgttaaaatgggaagaaatgtgaatcttagagtcatttaaatccagtaacgatctttatatctgtgtcatggtggctatcatcatgaatttggtaatgaaatagacatggatgctgatctagtcatttaatgctgtgtgatgccaagcaaattaacctctctaagccttagatctcttaaaagtgagtaccatagtaatacgtactgcatagaattagtataaggattaaacaacatagtttctacataaactgtccattagatattagatattatgatttttattagaaatattacctttttgaatcttcataaccatctgtgatatggatagggagacaatattatccccattttgcagctgggaagaacaagaatcaga

SEQ ID NO: 12850 - DNA, 592 bp, Homo sapiens
caaacagatattgtacattaatgttcatagtagcattattcaaaataatcaaaaggtagaagcacaccaaaatgcccttcaacaggtgaaaaaaataaacaaaatgtggtatatccatccaatggaatatgactcagccactaaaagtaaggaaattttaatatatgctaccaacatgaatagttcttgaaaatatcatgcttgttgaaataagtcagacacgtggaaaaccatggtatgattccacttktatgagatacccagaatatgcatattcacagagaaagaaaatagaataaaagttgtctgggactaggtggaggggaggagtggaggttgtcgttttaagtacagggctttagtaagggatgataccaatgttttggatatagatcgtggtgacagttacacaatattatgaatgcatttaatggcactgaattgtacatttacaatggttaaactgataaatatttttatgtatactttattacaataaaaaataaaaaattttaaagcccttttcatttattttaatcaaaattagaaagggcctaattttaaaaccataaactaatgaaaggattatgtt

SEQ ID NO: 12851 - DNA, 591 bp, Homo sapiens
atgtatccgtgtatccacccatcgatacatccatccacccacatatgcatcctcatatgcagaggctggggcaccccagggacccacccacccatgtatccatgcacatatctgtccacccacctatgcatgtgcacatccttccacacatcaagccgtgcactcttccctgygtgcatccactcatccatctatttgtccctccacttctgcacccacccatccatgcctccatttaataagtactgcattcagtctagttgaaggtagagctcttgaacagataacactgctagagggcaaatgttagttggcttgtgtgactctctcagtcacagagaagtctccaaggctccagtgcccatctctttctttcctgcagccagcttgccctcagtgccctcttccccgccagggataaatgggctagtgaggaagcagggacgggctggtacaaatgtgcctctgcttgaaggagggcagtgacagtgggtgcccttgttctatgtctgtttctatagtagtgaagactcgatttgaacttgtgaggagcagaggaaaaagggggctcagaacaaggagctggtgctt

SEQ ID NO: 12852 - DNA, 580 bp, Homo sapiens
gggtgggtttaagaggcatttgggaagagggtgaggggtcttggcaactgctgagttgcagacattgagaaatgaggccagtggaagttggccctgagatttgcatttgagctaactgctcttccagattgaatgcaggttccattaatgctccaaggtacgtcccctgcaccaaaccatttatcaatttatattggggaagcaagtttgaggtcrtggtgtccaaaagcaagacaaggaccctgcacatgcccttgcgtgccctagctctagtttacacacaccgtagtttctccctttgcccatactacagatgggaaaaccgaggctgggtggctgctgaaggccacacagcagtgtgagtcagcaccagggacagaatccaggctcctggtcttttcagcctggggcatgtcctccagcacattcattccccctgaccaccgtggaggggcagcgtgagaagtgatgggcttttgcaccgctttctgtaagtcaccacccaaactggaaaggcttcggggagcttggagaaagcccagaggtgtcagatgatccctccatttgatgtatggtccaa

SEQ ID NO: 12853 - DNA, 547 bp, Homo sapiens
ctccctgtggaaattcacttctttattctctgtccagtttaacttctagctcctttaccaagtggtcactgattcttccacttgctttttagtttctgtttcttgaaaagagattctgttgcaggctcatgctttttctgcccatttcatcaaaaccagcctgatctctatccctttctctgcaacctgttccaaatctagctgagctgatgaaggaactcaggctagtgaaatgcgttgtttcttctgggtagtgtggttgcatgtgatctcaatggtgtggctgttaagggctagagrttggcatctgggaacagattagagtgggaaagagggtctgggggtcttctctgcagagttttgatcactccatttggggagacatctgccactctcataagaggtctagccctgagctggccgcggtggctcacacctgtaatctcagcactttgggaggccgaggcgggaggatcacttgaggtcaggagtttgagaccagcctggccaacattgtgaagccctgtctctactaaaaaattagctg

SEQ ID NO: 12854 - DNA, 547 bp, Homo sapiens
ctccctgtggaaattcacttctttattctctgtccagtttaacttctagctcctttaccaagtggtcactgattcttccacttgctttttagtttctgtttcttgaaaagagattctgttgcaggctcatgctttttctgcccatttcatcaaaaccagcctgatctctatccctttctctgcaacctgttccaaatctagctgagctgatgaaggaactcaggctagtgaaatgcgttgtttcttctgggtagtgtggttgcatgtgatctcaatggtgtggctgttaagggctagaggttggcatctgggaacagattagagtgggaaagagggtctgggggtcttctctgcagagttttgatcactccatttggggagacatctgccactctcataagaggtytagccctgagctggccgcggtggctcacacctgtaatctcagcactttgggaggccgaggcgggaggatcacttgaggtcaggagtttgagaccagcctggccaacattgtgaagccctgtctctactaaaaaattagctg

SEQ ID NO: 12855 - DNA, 380 bp, Homo sapiens
cagaggcaagactacctctgatccacaggcattctgaccaaacatcctagggtattcgttaataaaaacaccccaaaacaaaccctcgaaatgcctaccttaatctggggtctaatcattaaccatgtataattacagggcatttaaaaagraatttcataatgtaccaaaagcacaatccataaaagaaatattgacaaatttgatttcattaatattaaaagcttttgctctgtaaaagatccttttaataggataaataagacaagactgctgaatgtctggggaaagaaaagaaaaaaccatttaaaaaaaaaaagataagctatagtctaggaaaaaaaccacgtatcggacaaagaagtactgtctagaataca

SEQ ID NO: 12856 - DNA, 350 bp, Homo sapiens
gaacaggtggaatgggcttgggatggtccaggaaagttccaagcagaggccaggagtgtgggggaaagagaggagagcagggagccagatggggaattcaggcttcccctgcaaggctgggaggaaggcctggctgagaaggggcaggcacaggggtgtgaaccagaatctgttgggctttgtygctctgtcccaacgggggagtgaggccattcctgaggcaggagactccattcctagggccagagcatgctaggcagaccccacatccctaggggcctcatcctgtgtgggaggaaggctgggaccactggaggagactcctttcctggcaccttgtttctgtgttt

SEQ ID NO: 12857 - DNA, 544 bp, Homo sapiens
tgtcacaaaggtgagtgcggacaggggaggctgcggaatgtggccaaggcggacagtactgcagaagtgaggtaagcttgcattttcagacccagaaccgtggcctgcctcagtgccacccacatgggagctgtggttaccagtctgcaggcagctccgggagaggctgacagagtgggcccccatgtggaagaaagaagtaggtgggccagaggcctgaggggatatcagaagtgtgggtgtgtagggctttagggcacctcacaggagccctgccaggagagaccagaaggcctgaagtcaccgttccatggagtaggggtggtttgcaaccaatgacctgaacctcaccctctcatctgtgcttcctggggttcaacgttgatctggctgagaggaaaaggctcagggtaacccacttttctgtggggcctctctcagctctgccccttagaactaagacagcagcccacctcctcctggcagccaccccaactgggccagccttctttcaaacccttctgaagttaaaccccccrggttc

SEQ ID NO: 12858 - DNA, 549 bp, Homo sapiens
catgtaagccctaaggacaaaaattacaaccatgtggatgtttcttctgttctcaattttgagactatgtcccataaactagcaaaaattttaaattagcttctttaaagttttccagttaactccactcagaagaatgttaaagatttaaaagaaaagggcactatgaaaaacccacagcaatggttcatgacaatgatgttcatatttcatrctcagggataaagtgactacaagctttccccctaaaatcaagaataagacaaggatgattgctttcaccactgttattcaacattgtactagaatttctagtgagaacaattaggcaagaaaaataaataaaattcatccaaatcagaaggaagaatctgcacatgacatgatcctatgtatagaaaatccttaggaacccacaaaaatactactagagctaataaattcagcaaagttgaagggtacgagatcaacacacaaaaaccaactatgtttctacgcaccagtaataaacaaaccgaaaggaaaattagtaattccatttacaataac

SEQ ID NO: 12859 - DNA, 897 bp, Homo sapiens
tgatcttctcataaccctggcaatagtcttaccaattgcaacccttttctcaggagagcaggcgacaatggtactttcaagtgaaaacatgggcaataagtaaacttgactttggtagatcattgctttggagctactgactctataagactggmttaactgaaacttatcttttgccttgccgatttcatccctagaaataggaagctgggtttcacggtaagaatgtgaactggcaaaaatgccctggtggctgtgcaagcaaaggctgctagaaagcagaaggctgctggcccggctccagaggaaaaaaacacctctatggctgatagtggcaatgaatgtccaatggagagagaagtaacacagtttaattctctcaattccttctcttccaagtgccaaggtgtgggcagcagactcatgttgtaaaaagtggtttctacccccttctactgtttctcaccaaagaatcacatcggcagcctcaagagaagcaggtacatagagttcgtaatgatggtggtgattatgtaaaattatagtatttccgagaaacacacaaaatgatttctgcacagaatagctcgcaagttcatatacgtcatttatgtccaatatgtaaaacctttcaaatgaagcctttttattagtatctccatgtgaatttagaagtagtggcagaagactccaaaacctaaaaggtcagaaagctgcatgtttagcttttaagaaactccaaaactactttttagagttgttctaaaattttgcacttccaccagcaatgtataagtggcccagtttcacaacatcctcactcctgtttgatgttgccgctattttttattttagccattctgatgggtgtatggtgatattccactatagttttaa

SEQ ID NO: 12860 - DNA, 897 bp, Homo sapiens
tgatcttctcataaccctggcaatagtcttaccaattgcaacccttttctcaggagagcaggcgacaatggtactttcaagtgaaaacatgggcaataagtaaacttgactttggtagatcattgctttggagctactgactctataagactggattaactgaaacttatctttygccttgccgatttcatccctagaaataggaagctgggtttcacggtaagaatgtgaactggcaaaaatgccctggtggctgtgcaagcaaaggctgctagaaagcagaaggctgctggcccggctccagaggaaaaaaacacctctatggctgatagtggcaatgaatgtccaatggagagagaagtaacacagtttaattctctcaattccttctcttccaagtgccaaggtgtgggcagcagactcatgttgtaaaaagtggtttctacccccttctactgtttctcaccaaagaatcacatcggcagcctcaagagaagcaggtacatagagttcgtaatgatggtggtgattatgtaaaattatagtatttccgagaaacacacaaaatgatttctgcacagaatagctcgcaagttcatatacgtcatttatgtccaatatgtaaaacctttcaaatgaagcctttttattagtatctccatgtgaatttagaagtagtggcagaagactccaaaacctaaaaggtcagaaagctgcatgtttagcttttaagaaactccaaaactactttttagagttgttctaaaattttgcacttccaccagcaatgtataagtggcccagtttcacaacatcctcactcctgtttgatgttgccgctattttttattttagccattctgatgggtgtatggtgatattccactatagttttaa

SEQ ID NO: 12861 - DNA, 897 bp, Homo sapiens
tgatcttctcataaccctggcaatagtcttaccaattgcaacccttttctcaggagagcaggcgacaatggtactttcaagtgaaaacatgggcaataagtaaacttgactttggtagatcattgctttggagctactgactctataagactggattaactgaaacttatcttttgccttgccgatttcatccctagaaataggaagctgggtttcacggtaagaatgtgaactggcaaaaatgccctggtggctgtgcaagcaaaggctgctagaaagcagaargctgctggcccggctccagaggaaaaaaacacctctatggctgatagtggcaatgaatgtccaatggagagagaagtaacacagtttaattctctcaattccttctcttccaagtgccaaggtgtgggcagcagactcatgttgtaaaaagtggtttctacccccttctactgtttctcaccaaagaatcacatcggcagcctcaagagaagcaggtacatagagttcgtaatgatggtggtgattatgtaaaattatagtatttccgagaaacacacaaaatgatttctgcacagaatagctcgcaagttcatatacgtcatttatgtccaatatgtaaaacctttcaaatgaagcctttttattagtatctccatgtgaatttagaagtagtggcagaagactccaaaacctaaaaggtcagaaagctgcatgtttagcttttaagaaactccaaaactactttttagagttgttctaaaattttgcacttccaccagcaatgtataagtggcccagtttcacaacatcctcactcctgtttgatgttgccgctattttttattttagccattctgatgggtgtatggtgatattccactatagttttaa

SEQ ID NO: 12862 - DNA, 897 bp, Homo sapiens
tgatcttctcataaccctggcaatagtcttaccaattgcaacccttttctcaggagagcaggcgacaatggtactttcaagtgaaaacatgggcaataagtaaacttgactttggtagatcattgctttggagctactgactctataagactggattaactgaaacttatcttttgccttgccgatttcatccctagaaataggaagctgggtttcacggtaagaatgtgaactggcaaaaatgccctggtggctgtgcaagcaaaggctgctagaaagcagaaggctgctggcccggctccagaggaaaaaaacacctctatggctgatagtggcaatgaatgtccaatggagagagaagtaacacagtttaattctctcaattccttctcttccaagtgccaaggtgtgggcagcagactcatgttgtaaaaagtggtttctacccccttctactgtttctcaccaaagaatcacatcggcagcctcaagagaagcaggtacatagagttcgtaatgatggtggtgattatgtaaaattatagtatttccgagaaacacacaaaatgatttctgcacagaatagctcgcaagttcatatacgtcatttatgtccaatatgtaaaacctttcaaatgaagcctttttattagtatctccatgtgaatttagaagtagtggcagaagactccaaaacctaaarggtcagaaagctgcatgtttagcttttaagaaactccaaaactactttttagagttgttctaaaattttgcacttccaccagcaatgtataagtggcccagtttcacaacatcctcactcctgtttgatgttgccgctattttttattttagccattctgatgggtgtatggtgatattccactatagttttaa

SEQ ID NO: 12863 - DNA, 897 bp, Homo sapiens
tgatcttctcataaccctggcaatagtcttaccaattgcaacccttttctcaggagagcaggcgacaatggtactttcaagtgaaaacatgggcaataagtaaacttgactttggtagatcattgctttggagctactgactctataagactggattaactgaaacttatcttttgccttgccgatttcatccctagaaataggaagctgggtttcacggtaagaatgtgaactggcaaaaatgccctggtggctgtgcaagcaaaggctgctagaaagcagaaggctgctggcccggctccagaggaaaaaaacacctctatggctgatagtggcaatgaatgtccaatggagagagaagtaacacagtttaattctctcaattccttctcttccaagtgccaaggtgtgggcagcagactcatgttgtaaaaagtggtttctacccccttctactgtttctcaccaaagaatcacatcggcagcctcaagagaagcaggtacatagagttcgtaatgatggtggtgattatgtaaaattatagtatttccgagaaacacacaaaatgatttctgcacagaatagctcgcaagttcatatacgtcatttatgtccaatatgtaaaacctttcaaatgaagcctttttattagtatctccatgtgaatttagaagtagtggcagaagactccaaaacctaaaaggtcagaragctgcatgtttagcttttaagaaactccaaaactactttttagagttgttctaaaattttgcacttccaccagcaatgtataagtggcccagtttcacaacatcctcactcctgtttgatgttgccgctattttttattttagccattctgatgggtgtatggtgatattccactatagttttaa

SEQ ID NO: 12864 - DNA, 897 bp, Homo sapiens
tgatcttctcataaccctggcaatagtcttaccaattgcaacccttttctcaggagagcaggcgacaatggtactttcaagtgaaaacatgggcaataagtaaacttgactttggtagatcattgctttggagctactgactctataagactggattaactgaaacttatcttttgccttgccgatttcatccctagaaataggaagctgggtttcacggtaagaatgtgaactggcaaaaatgccctggtggctgtgcaagcaaaggctgctagaaagcagaaggctgctggcccggctccagaggaaaaaaacacctctatggctgatagtggcaatgaatgtccaatggagagagaagtaacacagtttaattctctcaattccttctcttccaagtgccaaggtgtgggcagcagactcatgttgtaaaaagtggtttctacccccttctactgtttctcaccaaagaatcacatcggcagcctcaagagaagcaggtacatagagttcgtaatgatggtggtgattatgtaaaattatagtatttccgagaaacacacaaaatgatttctgcacagaatagctcgcaagttcatatacgtcatttatgtccaatatgtaaaacctttcaaatgaagcctttttattagtatctccatgtgaatttagaagtagtggcagaagactccaaaacctaaaaggtcagaaagctgcatgtttagcttttaagaaactccaaaactactttttagagttgttctaaaattttgcacttccaccagcaatgtrtaagtggcccagtttcacaacatcctcactcctgtttgatgttgccgctattttttattttagccattctgatgggtgtatggtgatattccactatagttttaa

SEQ ID NO: 12865 - DNA, 549 bp, Homo sapiens
tggtatgtatagtagacattcattacatcgtaaatattttctttattagtatttaaataagaactcagcaaacagttgttaagagaagagagaaagggaaaagaatactctttggttagctaaatagccaatgcaggcaatgcattgtatggcttatacatgtttcatttcatcttcatagaaacagcataataggtacattattattctaaatacatagatgaagaaatgaaatacaaattaagtgactttctcaaggtcataggtagtaaatggtggagtcaagattcaaattcaaatgtttcactgtgaatcccgttatttcttttatacctttacaagtctttctgactttttttctatttgtcttcattaattaccttttcaccctgtctaatcaacttataatttttaattttyttaaaaaatttccacaacttttaaaataattcaaagattcatacttgtttcattcccaaatctagttgtttctgtatcatgatcttattttgtgtttggcataactttatctctctgaacaatttacat

SEQ ID NO: 12866 - DNA, 560 bp, Homo sapiens
tggtaatgaggactatgtgaggacttaggcagggtatggcattcccacgcatccccagaggaccagtttttataaacttcacggcaaagaacagaacatgtccaggtagcgttttgccagtgaatagccattttgggcctctctccagtggggatctctggcttctcttctttatcaaccactctgtcttggccaggcctggtcagcaggcagcctagtgtctgtctctcggggctgtgcaaacttacctactatcccctggcacagatccagccttttggccttggcaaaataaaactggggattgctgtgcagctcctgggaaagacaaacagaattgtcattctgacctagaacaaaaaagctcctggagctacagtgaccacgttttcccataccccaaaactgkacttatggggacaaagatacagaatataggtgtaatcagtgctatcccagaagatctgggatacagaattctgtcctttgtatttctcattccttcttatagctcgtgtaagtcagagccctggagaactctgtgtagatattgagaaata

SEQ ID NO: 12867 - DNA, 560 bp, Homo sapiens
tggtaatgaggactatgtgaggacttaggcagggtatggcattcccacgcatccccagaggaccagtttttataaacttcacggcaaagaacagaacatgtccaggtagcgttttgccagtgaatagccattttgggcctctctccagtggggatctctggcttctcttctttatcaaccactctgtcttggccaggcctggtcagcaggcagcctagtgtctgtctctcggggctgtgcaaacttacctactatcccctggcacagatccagccttttggccttggcaaaataaaactggggattgctgtgcagctcctgggaaagacaaacagaattgtcattctgacctagaacaaaaaagctcctggagctacagtgaccacgttttcccataccccaaaactgtayttatggggacaaagatacagaatataggtgtaatcagtgctatcccagaagatctgggatacagaattctgtcctttgtatttctcattccttcttatagctcgtgtaagtcagagccctggagaactctgtgtagatattgagaaata

SEQ ID NO: 12868 - DNA, 547 bp, Homo sapiens
gattattatgcattgtatgcctgtaacaaaatatatactccataaatatagatacctactatgtacccacaaaaaataaaagacccctaaaaatccttattattccaatttcaattagtttaaattgaagtcctaatttcacatatttaaaaggaggataatcatgacaagattgttacaagcaatataaataacacttgttaaccatctttggttcaaaaatcaataaacacttgctgttattaaaattatatattgaaagttatgaattaaagtttaaatagtgtccctctatatctctatttaatgtaaatgaaatttaaattataaaagaaaaactaartgcccgggacttggaagaaatgcagttctctcattttgcatgtctttatgtagaaacataatttttacagctttgatgaagctacatattttggaaacagagctttgatgacctactttatcaaattgccaaatcacttttataaaattgcaaaaagactctcaacttgattagaaaagcactagagattattttaaatataac

SEQ ID NO: 12869 - DNA, 560 bp, Homo sapiens
atagaaagtatataataataaactaacatataacattctattttataaatatattttattaatcattatagatatttgttatatattaatatatttctaccatgcattatacattttattatatatttataatgtttataatatataattatataatgattttataattatgatattttatattaatataaaaatataaataatataaattctacttagaatactgagattaaaaagacagtttaatgttgactgagatataatgtgagccacaaatgkaagccacacatgaaattttttattttctatagccatactaaaagtcagaagaaataagtgaaagtaattttaataatacattttatttaatccaaataaccaagataccacaatttccatgtgcaaccaatataaaagtttattaatgagatactttattttttcatagtagatcttcaagattcagggtattttacttttacagcatgtcatcattcctatgagccacgtttcaaatgctcaacagccaacagtggccaccagttcctgtactgggaggt

SEQ ID NO: 12870 - DNA, 576 bp, Homo sapiens
atttttttgccaggtttttactattataaactctgtggaaaacatgctcatttgttcttgtagtcttctgtggatttattttttagccttaaatctttaatccatgtggaatttattttgtacaggaggtgaagtggggattacagtgatttcttgactttcctcattctaatgattacccacctgaagagattcagtctccaggcacccaagtaaacacattgcatctgttacaaaaatacattgaaaattgtaataagggggagtctctgtggtggaaaataataggtagtgtgttgggaagaggcagcagaaacagcaggcttggccaatataggactgagcaaggagctctgctttcaggttagaatgctgcattctaattagcaatattactcccaaatgtttagctgcagtggtggggggattagagacycctgcttgctcatcataattcagaacctgaacatcacaatgtctgattagatcttctctcttttgaaaggtcagccaacaaaattgtcatgttgtgtcattcaaggtctagaagttactctgctataagcttgatgcatt

SEQ ID NO: 12871 - DNA, 553 bp, Homo sapiens
cactattccttttctctatactctgtaagccctctcttccccctggctacaatacaattatgctaattgcaagtaaacagcacaatttagataattgttaagaattttaaaaattaaaaccatgggatgctgaaggactagtttagtagacaaattattattgctgttatgaataactatgtcacagacactgaactaagtgcattacrtacactaccttaccaccttataaggtaggatctattaaaacatcaactttacagagaggaaattaaatcccagacacgtctatgcctaacccaggttcacaaacgctaagtatgaggacttgcagagaaaaagtaagagatatatgaatctgtcacatgcctgagtggttacagccattgtggggacctacatataaaaggagaatgaaacactcaagcagtcactcttccccatctgtctatgagcttgaggctgggctaatcttaccctactttgtatcctccacagcactcccccaaggcaggatgcactgtgtaaggtaaaatatactggacatggtgag

SEQ ID NO: 12872 - DNA, 545 bp, Homo sapiens
cagggcttccagagaagtacggcatcattactttcccactggaaatataataaggaaacccactgggtaagtgttctttggagtaaattacttttggagcaatctaacctgacttccagccagaatgctccaccaacggcatggaaaataaagtctgattaataaaatcttgacttatggcatggatttgcttcacttgacctatattgaggatacatgtttgcaacmcaattgaaaaataaaaaatatcctgtatttaattatattgcaatctatggttgaatttcatttaagtggcattcataattggcacatttttcaagtactgcttctgccacagttgtatataaaagtatattatcatcatttgcacaactgctgcctaagttagcattaacacacatcccatagatcagagatgggatcactaaaggacagtggctgtcacattttcatgaaatataattaaatatatccaaaaataaactggttcccagattctgctaaagcagcacatggaatgttttcaaaattaataagcattc

SEQ ID NO: 12873 - DNA, 570 bp, Homo sapiens
aataaggcaaagtgagagggcaaaagagcagaaaaggttatttggggacactgaagacaaattgcctttttgtgygtgtgtgggtttttttgtttgtttgtttgttttagcagagtcgctctgtcacccaagctggaatgcagtggcacaatctcagttcactgcagcctccacctccagggttcaagtgattctccagactcagcctccggagtagctgggattacaggcacataccaccacgcctggctaattttttattttttgtagagacgggttttcaccatattggccaggctggtcttgaactcctgacctcaagtgatccacccatctcggcctcccaaagtgctgggattacaggcatgagtcaccatgtctggccaacaaattgcctttttgtggttttaatgttttgttggtttgtttgtagagatgaggtctccctatattgaccaggctgctctcaaacccctgtcttcaagtgattcttctgcttcaacctcccaaagtgttgagattacaggtgttagccaccacacctggccttgtccatttcttaaactatga

SEQ ID NO: 12874 - DNA, 790 bp, Homo sapiens
aaagacaattcactgtacacattttatttacagttttgtacactgtcttaatatgaatgggactgcttttctacttgagccatttttaaccaaagcaaaataacctaagtaatacaaagtgttaaaatacagcataaagatacaaaaacagacatactaattctagttaggaatgtaattatgatgttacattttttataatccacaattatgtttaggaaatcacacaaacatagatcactgatttgaatgaaatgcataaatttgtagcaaagctttgtagttacaaaaaacaaaaaaaattaccaaagaatgcacaaaattaatgtttattccacctttgtgtcatattcctggatccttcaccaatgttacatgaggaaaaaaacaaaagcaaaacaaatgaaaaactgaaatcagaatcactaatattatcaagtagggaaacaaataaattaaaatctagcagccatcagcaagagtacagcaaagacaatgctgtaaaaagaaacaaagaaaattgctagaaaactgtatgcatcataatctttcaaaccagcaaaatatgcttctgcataaaatggaacaacagaattttttttcctgtaaagtatagaaatgccaagttgttttctgactattgtggataggtaaaatctgtatgtaattaatggtaattctactgaactattacagagtgggccaggaacacatttatggattctggrgatgtgtactgtaattctttgattgggatagtggaaactctagccaaaaaaaaaaaaaaaaa

SEQ ID NO: 12875 - DNA, 790 bp, Homo sapiens
aaagacaattcactgtacacattttatttacagttttgtacactgtcttaatatgaatgggactgcttttctacttgagccatttttaaccaaagcaaaataacctaagtaatacaaagtgttaaaatacagcataaagatacaaaaacagacatactaattctagttaggaatgtaattatgatgttacattttttataatccacaattatgtttaggaaatcacacaaacatagatcactgatttgaatgaaatgcataaatttgtagcaaagctttgtagttacaaaaaacaaaaaaaattaccaaagaatgcacaaaattaatgtttattccacctttgtgtcatattcctggatccttcaccaatgttacatgaggaaaaaaacaaaagcaaaacaaatgaaaaactgaaatcagaatcactaatattatcaagtagggaaacaaataaattaaaatctagcagccatcagcaagagtacagcaaagacaatgctgtaaaaagaaacaaagaaaattgctagaaaactgtatgcatcataatctttcaaaccagcaaaatatgcttctgcataaaatggaacaacagaattttttttcctgtaaagtatagaaatgccaagttgttttctgactattgtggataggtaaaatctgtatgtaattaatggtaattctactgaactattacagagtgggccaggaacacatttatggattctggggatgtgtactgtaattctttgattgggatagtgkaaactctagccaaaaaaaaaaaaaaaaa

SEQ ID NO: 12876 - DNA, 562 bp, Homo sapiens
atagttaaatattaaaaaaatcaatttagttcatttatgacttcattcattttcagcacagtcccttttcaaaaacataaagccattcaagaaatgatttacactattattaaataatgtaagtatcagcctaagctttatatgaccagctttcagactctttttttaataaggaagtttaatgtatgcttcttaattccttcctaagtaacttttaaaatagtttcagctaattgtttaataagatatcttaaacgcttctcaaggatactgtattttctgtagtttcattatattcatgtataacttactactaaaaatatttctagttccaaagctactgtatacttatgaggttaaatttttgtctggaattggtgaaaaaaagaatcaatgcattagaggttagaaaggaacttgtaaagttcattacctatacgattctgcttttgatcacattcacatgatgcyagataaaatccacattaattttaaccacctgagaagaggactccacttttttttcttactccctatactgtcttttattatgttcctccta

SEQ ID NO: 12877 - DNA, 516 bp, Homo sapiens
aatctttatagcagatctgatctaatgaagtttaaatgacttccaatgagctaaaaaaaaaaagttttccaatatgagtactaatgaaaatcatctgaattatttggggaaaaagagaaagagaaaaaaatggagaaacagtagcataaagaagaaaggaaggaatgaaagagggaagaagaaagaagggaggaaggaaggagggaaagaaggaagaagggaagaaaggaagggatggaggaagcaaggaaggaaaagaaagagaaatgggtaaagagaaaaggaaggaaggaaacaaggaagggaggaagcaggggaggaagggaagaggaaaaaaggaagattaactccagccccacctccctatcaatttgtgatttgtaggttcggtgcagggcaaaggaagytggctttttaccagactctctgggtgattcctatgatcaggcaagtctgggaaatactaggctaaagagtacagcccaaaatatataaactggctttcaaaatcctcca

SEQ ID NO: 12878 - DNA, 529 bp, Homo sapiens
ctggagtacagtggtgcagacttggctcactacaacctccacttcccaggctctaggaatcctcctacctcagcctcctgagtagctgggactacaggcatgcgcaaccactcccrgccaattttggtattttttgtagagataggatctcactgtgtcacccagggtagtctcgaactcctgggctcaaacaatccacccacctcggcctcccaaagtgctgggattacaggcgtcagccactgcacccagcctatattaatgtaactatacataacattatattaatataataaaatatgtattgaatcctgtgaggcacatgggaagagtgtggctgagaaaagtgaaaccagtgcaacaaaaatataaaaatatatccttagtctccaggagcttagagttataaggcagatccacactatttcctgtatgttttatagcaaggagtaacagataaatcctatgagtttagaagtaacaagaaggattcagatgggcagaattgggagagcattctggactttct

SEQ ID NO: 12879 - DNA, 666 bp, Homo sapiens
acctttgatgcacatgatctcctgaatgccaaggcgtgtggtacataaattgacttttaagcggatggcatcagaaaacaaaacagaatagtaataataataatgattaacaaattaaaaattaagaacacagaaatggagcaaaataagttagaagttgaaaacaaacacacaagacttaaaacacgagattatttttcacgaagtcacacaggactgcctaggtaggaatctgggtgtgaagatcctagcggcggcgtcwgagtggacctggttttgaatacggccggggttcactcttttattgggaagaaacagcttcttcctcaccacccccaaaactcgcctcatctcactgtcccttgtgtaaagttaaagccgttaaaatatgtgattctagatgcttttctccttgagtgaccatgtgcttgtggaaattcagcccacttcttcctgctgaatgctccgggggagtagaagtggggtgcgggaggaaagggggtcctgctctcagagacagacgcagcaaaactgggagggaaaccacccatctctcccaaaaggccctccgctggcagtgttcctgtgtgccacccagctgccatttcttgattgtgcccagtaaagggaattgaactaccatcagtaagtgctgttcaccaaaag

SEQ ID NO: 12880 - DNA, 609 bp, Homo sapiens
tgataataatgcataattaacaaaaaakagctaattctgaaaataacaatgtttctaccataacaaggaactcaaacatctaatgcttttaactcaactattcagtcagaactcaatttgaaatggtagtgaacaggaggcaaccttgataatgaacacagcagtaagtttattattgttactgaaatgttatttttaattatgggaacactacgtacttattgttttaagtatctttaccatatatttattgataataatcacgaaactgtatagaattaagatttcaaaattccaaaacataaagcagcatattttactaaagttctcccccaacccacaccctcaaaatacttcacttccagaaatgcacttactaacacctgctagtataattttggttaatcatcgctactaaaatgttagtaaaagttgaaaataagtatcatctcttccacagtcactagagtattaactctcctctaaatcaatcatgcaactattatacaggttctaatgaccagatgtcttatgcatcctcaatcatctgatagcttaagaaacagtccccagataattaattgattttttttccctttccattctttc

SEQ ID NO: 12881 - DNA, 574 bp, Homo sapiens
tgaaactctggaaagtgaaagcgtgcataagtggggactaccatatgggcatcctacatacctcttaggtggtactcagagaacccagcaatgagtattgaacaccctcagtgagctgagttctggttcatcccaatggaaggtattagagaaggatgaacaaagtccctgtccaatctaagtggtgactctaagacacacatgaaataatgatcaacaacataagtcatcacttggccttggctttaggatatcttagagaatacacaaaataacttgaactcaacccagatttgagaacttctatggtgttaatgctagtaccytgtgtttcccctgcaacactcaatctttaatgtttccacggaaattgcttgctattcctgcctccagccatctccacagatatgtgcaccgtagtcccactccttctcaccagattacttgctcaaattatctctcgagtatagccctgtgaaacccacccaatctctttggctcccatggtacattaacatatattcgtactcattttgtgtccaaatctttgtttctctttccttcccacacagca

SEQ ID NO: 12882 - DNA, 459 bp, Homo sapiens
agacgtgaccccaaagagccccgggaggtcaggcttggggcggcaggaggtgagggccaattaaggagcaaggagctccaggagtcacatccccaaagtcaccctgtggcaactggtgagggcaggttctggggcacccaggtccttggagmtgtgagctcaaggagcccagggaggtcgggtttggggtagcaggaggtaagggcggagtatggagttggaagccccaggagtcacctgctcaaagtcaccctggtgtgccgggcagagcaggggcaggacttatgagggggttgggctggctgacaagattttggtgtggggagcccagaggcactggggtggggggcccagcctggtgtccctcaggagtggcacagactctggcagcagttcggctgtcagagggggcctcgggttgggttggggtgttggtgcgtttacctgttccttggcctc

SEQ ID NO: 12883 - DNA, 588 bp, Homo sapiens
ggagtgcaatggcacaatctcagctcaccacaacctacacctcctgggttcaagcaattctcctgcctcagcttcccgagtagttgggattacaggcatgtgccaccacaccgggctaattttgtatttttagtagagacggggtttcttcgtgttggtcagtctagtcttgaactcctgaccgcaggtgatccgcccacctcagcctcccaaagtgctggcattacaggcgtgagcgagagcacctggccctcatttgtttttcaaagaactcagtggatgtggaagggacagggaaagagattgaatttagagctggctaacaggggcccagagcgatcagataatattgttattgytattactgttagtactaccattgttcgaacctttcttgagtgcttcaccaggcactatgctaacaatcccatttaatcctcacaacctccataggagacggttaccattattacctctattgtgtagatgaaaaacatgcggtattaaaggttaagtgctgcctaagatcacttggagctgggatttcaacacccaggtatatctgattctctaagcccattcttccgc

SEQ ID NO: 12884 - DNA, 588 bp, Homo sapiens
ggagtgcaatggcacaatctcagctcaccacaacctacacctcctgggttcaagcaattctcctgcctcagcttcccgagtagttgggattacaggcatgtgccaccacaccgggctaattttgtatttttagtagagacggggtttcttcgtgttggtcagtctagtcttgaactcctgaccgcaggtgatccgcccacctcagcctcccaaagtgctggcattacaggcgtgagcgagagcacctggccctcatttgtttttcaaagaactcagtggatgtggaagggacagggaaagagattgaatttagagctggctaacaggggcccagagcgatcagataatattgttattgttattactgttagtactaccattgttcgaacctttcttgagtgcttcaccaggcactatgctaacaatcccatttaatcctcacaacctccataggagayggttaccattattacctctattgtgtagatgaaaaacatgcggtattaaaggttaagtgctgcctaagatcacttggagctgggatttcaacacccaggtatatctgattctctaagcccattcttccgc

SEQ ID NO: 12885 - DNA, 632 bp, Homo sapiens
attgtttcttgttcccatcctgaaagtcccattggatatgcctgtctttgcatcttttctgcccccttgggatttacagaaaatgtgatatatttcccacttggggttgtaggacctctgggaggctgtgggaggcctcatccgcttctgtgtcacagtaggttcatttgatgtttctattactttttggccacaccgagccacagggatgtagtgagaatttttaaggttctttcttctctagatacgtttcaataatttcttcttaggggtttgctgcctcatgagaaatgaggcataggcctcctttactctcaaatcccataaacgtacacagtgattctccattctccccagagctcagcgggggttgggtacccataaaaggttctactttccttgccctgcarcatctaaattgatgcctccgttgtccagcctggaacattttgtgtcattaaaagttgaagactggagtgggggtaagaaaaaggaaagttagctcctacttataacatactcttccaaattgatgatagatagacatgatttttttttccattccctctcaagttaggctcctgaaattccaaacccaaggactggctcctgtttactcttcttctgctgtt

SEQ ID NO: 12886 - DNA, 561 bp, Homo sapiens
cacagaatcccaataagagtttgagacccatggcaagcaaagagagacccgaattctctgcagccttcctacttcttccatagactcaccctagggaggagttgactccagacccgggsaccccactggggagggctggactggttaaaattgggatcaaagtgagcatgagaaatgcaaagtctcattaacaaccagcccagacagccagcccaagagggtgagggcagcaggagtaaaggggtggagggtgggtgaagggaggctccagggtgcaaggagttgctgctgatccattatagggttaaagaaagaaaaacacatgttaacattggggccagggcctaaagtctgtgctgcctgttctgaggctgaggctatggcaagcacagaggaggcttgggcttcatcagggcgttctgccaggcacggtcccggagccaaactgatctgtgaagtcactggccaatgatgggtgacactggaattccccctttctcctgtcagaagcaactggcctgtcagagcataggttctcccatttgcttcccaggaggtggg

SEQ ID NO: 12887 - DNA, 561 bp, Homo sapiens
cacagaatcccaataagagtttgagacccatggcaagcaaagagagacccgaattctctgcagccttcctacttcttccatagactcaccctagggaggagttgactccagacccggggaccccactggggagggctggactggttaaaattgggatcaaagtgagcatgagaaatgcaaagtctcattaacaaccagcccagacagccagcccaaragggtgagggcagcaggagtaaaggggtggagggtgggtgaagggaggctccagggtgcaaggagttgctgctgatccattatagggttaaagaaagaaaaacacatgttaacattggggccagggcctaaagtctgtgctgcctgttctgaggctgaggctatggcaagcacagaggaggcttgggcttcatcagggcgttctgccaggcacggtcccggagccaaactgatctgtgaagtcactggccaatgatgggtgacactggaattccccctttctcctgtcagaagcaactggcctgtcagagcataggttctcccatttgcttcccaggaggtggg

SEQ ID NO: 12888 - DNA, 561 bp, Homo sapiens
cacagaatcccaataagagtttgagacccatggcaagcaaagagagacccgaattctctgcagccttcctacttcttccatagactcaccctagggaggagttgactccagacccggggaccccactggggagggctggactggttaaaattgggatcaaagtgagcatgagaaatgcaaagtctcattaacaaccagcccagacagccagcccaagagggtgagggcagcaggagtaaaggggtggagggtgggtgaagggaggctccagggtgcaaggagttgctgctgatccattatagggttaaagaaagaaaaacacatgttaacattggggccagggcctaaagtctgtgctgcctgttctgaggctgaggctatggcaagcacwgaggaggcttgggcttcatcagggcgttctgccaggcacggtcccggagccaaactgatctgtgaagtcactggccaatgatgggtgacactggaattccccctttctcctgtcagaagcaactggcctgtcagagcataggttctcccatttgcttcccaggaggtggg

SEQ ID NO: 12889 - DNA, 531 bp, Homo sapiens
gattctaagagggcaaagagagaaaagcctcttcttgtagactttggtagctattttccatgtgaawctagagtttcttaagaacagaatgcgatgatgcctaaagtccatggaaggaatcttatgttctcatttcccttaatccgtcaatcatttctccacctattcttatgtactaaaatctgagtttaattttcctttatgagcagagctaattaataaacctaattcatttgctgacactcacaagggatacgttctgttaacaagaggctctggtaggaggttgcatacttttttcaaagaagtcaagatttttaagaaacagctgatttaatgaattcttttaacattatttaattataaggacatgtcatcatttatcatagtctttctgcaggaggaaaagcctccagtaggccaattcaaagatttgatgagacatttatatgagataattttgttacattgaatataaaataaagactagtcaaagacctatagatgcttgggcagtaatcagatggcagt

SEQ ID NO: 12890 - DNA, 1313 bp, Homo sapiens
gggaactaataaatgtccatgaaatcttcacaatccatgttcttctgccatggcttcagccggtccctccgttcggggtycctgacttcccgcaacaggtatcccagactgagatttctgaaattgtcattagaaggttgataaggatctagtgacaacaagctagtgcgtggttttgggagtggtcctgagtactcgggcggactgaaacacagtaacagtagcaggagaggagtggaggttgtggttaccagagctgggcctggaaaattgtgtcatggttatgtctcccaatgtcagtctggagttgttaaatgcaaccattgacaagtcgtatcccagaactggagggaaagctgagtttgcaggtcaagacaagtgggcagatgtggggagagaagagacatgtggttttgaggtcgcatgtgctgcaggttggaaggtcctccagaaatgtctctctaaataaggatgagggcagatgaagagggagggtggacaggagcgcttcccctccactgctgggaatcctaagtgtcctagtcaggtaactcgaactctagagttcaaacgaaggcaactgattgattgactgattgattgagagggagtctcgttctctcacccaggctggagtgcagtggcgcgacctcagcttactgccagctccgcctcccgggttcccaccattctcctgcctcagcctcccgagtagctgggactacaggtgcccaccaccatgcccggctaatttttttgttatttttagtagagacagggtttcaccgtgttagccaggatggtctcaacctcctgacctcatgatccgcccgccttggcctcccaaagtgctgggattacaggcataagccactgtgcctggctgacatatttatttttaagaaggtattattattactcaatctgtatccttattgtgagtaaagggataaaactaattttctctctattatggactcttttcaatattttaaccgagatcaataaaaaagaaagcactcttttttcataaaaaatatcacttgggaggatacaaaagaactacttgaattacttttttaaaaaaattgcgctcagagtactttactcatgctgtaattttattgctacttagtttacatataattaattcttttctgtctgtccatcccatcttatttgactttctttttcaccatacagcggtcgacttttagctgttctttcttcggattataatcatcaaggtctttctcattggagcacaaagcagcatgactaggttggagataagaataaaacatgcaaatagg

SEQ ID NO: 12891 - DNA, 1313 bp, Homo sapiens
gggaactaataaatgtccatgaaatcttcacaatccatgttcttctgccatggcttcagccggtccctccgttcggggttcctgacttcccgcaacaggtatcccagactgagatttctgaaattgtcattagaaggttgataaggatctagtgacaacaagctagtgcgtggttttgggagtggtcctgagtactcgggcrgactgaaacacagtaacagtagcaggagaggagtggaggttgtggttaccagagctgggcctggaaaattgtgtcatggttatgtctcccaatgtcagtctggagttgttaaatgcaaccattgacaagtcgtatcccagaactggagggaaagctgagtttgcaggtcaagacaagtgggcagatgtggggagagaagagacatgtggttttgaggtcgcatgtgctgcaggttggaaggtcctccagaaatgtctctctaaataaggatgagggcagatgaagagggagggtggacaggagcgcttcccctccactgctgggaatcctaagtgtcctagtcaggtaactcgaactctagagttcaaacgaaggcaactgattgattgactgattgattgagagggagtctcgttctctcacccaggctggagtgcagtggcgcgacctcagcttactgccagctccgcctcccgggttcccaccattctcctgcctcagcctcccgagtagctgggactacaggtgcccaccaccatgcccggctaatttttttgttatttttagtagagacagggtttcaccgtgttagccaggatggtctcaacctcctgacctcatgatccgcccgccttggcctcccaaagtgctgggattacaggcataagccactgtgcctggctgacatatttatttttaagaaggtattattattactcaatctgtatccttattgtgagtaaagggataaaactaattttctctctattatggactcttttcaatattttaaccgagatcaataaaaaagaaagcactcttttttcataaaaaatatcacttgggaggatacaaaagaactacttgaattacttttttaaaaaaattgcgctcagagtactttactcatgctgtaattttattgctacttagtttacatataattaattcttttctgtctgtccatcccatcttatttgactttctttttcaccatacagcggtcgacttttagctgttctttcttcggattataatcatcaaggtctttctcattggagcacaaagcagcatgactaggttggagataagaataaaacatgcaaatagg

SEQ ID NO: 12892 - DNA, 1313 bp, Homo sapiens
gggaactaataaatgtccatgaaatcttcacaatccatgttcttctgccatggcttcagccggtccctccgttcggggttcctgacttcccgcaacaggtatcccagactgagatttctgaaattgtcattagaaggttgataaggatctagtgacaacaagctagtgcgtggttttgggagtggtcctgagtactcgggcggactgaaacacagtaacagtagcaggagaggagtggaggttgtggttaccagagctgggcctggaaaattgtgtcatggttatgtctcccaatgtyagtctggagttgttaaatgcaaccattgacaagtcgtatcccagaactggagggaaagctgagtttgcaggtcaagacaagtgggcagatgtggggagagaagagacatgtggttttgaggtcgcatgtgctgcaggttggaaggtcctccagaaatgtctctctaaataaggatgagggcagatgaagagggagggtggacaggagcgcttcccctccactgctgggaatcctaagtgtcctagtcaggtaactcgaactctagagttcaaacgaaggcaactgattgattgactgattgattgagagggagtctcgttctctcacccaggctggagtgcagtggcgcgacctcagcttactgccagctccgcctcccgggttcccaccattctcctgcctcagcctcccgagtagctgggactacaggtgcccaccaccatgcccggctaatttttttgttatttttagtagagacagggtttcaccgtgttagccaggatggtctcaacctcctgacctcatgatccgcccgccttggcctcccaaagtgctgggattacaggcataagccactgtgcctggctgacatatttatttttaagaaggtattattattactcaatctgtatccttattgtgagtaaagggataaaactaattttctctctattatggactcttttcaatattttaaccgagatcaataaaaaagaaagcactcttttttcataaaaaatatcacttgggaggatacaaaagaactacttgaattacttttttaaaaaaattgcgctcagagtactttactcatgctgtaattttattgctacttagtttacatataattaattcttttctgtctgtccatcccatcttatttgactttctttttcaccatacagcggtcgacttttagctgttctttcttcggattataatcatcaaggtctttctcattggagcacaaagcagcatgactaggttggagataagaataaaacatgcaaatagg

SEQ ID NO: 12893 - DNA, 584 bp, Homo sapiens
tacttcccattactactgcctgaggaagactgtaaamcattttcaaaccactttagccatttcactaagactaataaacacatgaaaatgcagagctggaagtgttccttgtgaccatcagtacaaatgtctaactttatagaaaaggaaactgaggcccagaaaaataaacacttgttaataagctaaataaatttaatagacccaatactagacttctctttctgagattctagagcatcccactgtcttcaaggagagaaaaggatagttttatattgtgattcactttgtttctcattaaaaaggtatttcctcaaatgttacaacacagtgttctaattcgtacaatgaattacatcaggatttttaagctgctgcctttgaactcttggacatctttggacagtattttaagagttactgaattacagtataagggttatttataaaagctattaactttcacactatttatttcccatgatagccactatggcagactatttcattgctggctgacaataaaccatgtctcctggtacttatgctcttataagtgacaccagacattgttattgagc

SEQ ID NO: 12894 - DNA, 584 bp, Homo sapiens
tacttcccattactactgcctgaggaagactgtaaaccattttcaaaccactttagccatttcactaagactaataaacacatgaaaatgcagagctggaagtgttccttgtgaccatcagtacaaatgtctaactttatagaaaaggaaactgaggcccagaaaaataaacacttgttaataagctaaataaatttaatagacccaatactagacttctctttctgagattctagagcatcccactgtcttcaaggagagaaaaggatagttttatattgtgattcactttgtttctcattaaaaaggtatttcctcaaatgttacaacacagtgttctaattcgtacaatgaattacatcagkatttttaagctgctgcctttgaactcttggacatctttggacagtattttaagagttactgaattacagtataagggttatttataaaagctattaactttcacactatttatttcccatgatagccactatggcagactatttcattgctggctgacaataaaccatgtctcctggtacttatgctcttataagtgacaccagacattgttattgagc

SEQ ID NO: 12895 - DNA, 540 bp, Homo sapiens
gaaaagccagaccttaaccacaaggaacatcccctcctgcccactgctccctctggccctccctcactgccttctcttgcttctgttatgttctgatctttgggtcagtgctgggtgtggggaagcttctgggcagttggtggagaagctttctgagcatgagtttctccaaaaatgctaatggctcttaactgagcccctggtacacaggacactccatgtgtccttcatcctaagtgcttctgcctttctctagagggtctgtgtaaaccaaaaggggtggrccctcagaggagcttcccccttcctttaaagcagcactcttgtttcctgtttataccagcactacaacccccttgggaaatggctgaggaactgtgggaggcggtggttgagagagaacctgagagggtctgccccacctggcctctgttcccggccctcgggattgaaagggaaggaaggaggaggggtgcctgggagctgggtggatatgagtcagaagaggcagggcagcctctccctgctgtgctggtctca

SEQ ID NO: 12896 - DNA, 540 bp, Homo sapiens
gaaaagccagaccttaaccacaaggaacatcccctcctgcccactgctccctctggccctccctcactgccttctcttgcttctgttatgttctgatctttgggtcagtgctgggtgtggggaagcttctgggcagttggtggagaagctttctgagcatgagtttctccaaaaatgctaatggctcttaactgagcccctggtacacaggacactccatgtgtccttcatcctaagtgcttctgcctttctctagagggtctgtgtaaaccaaaaggggtggaccctcagaggagcttcccccttcctttaaagcagcactcttgtttcctgtttataccagcaytacaacccccttgggaaatggctgaggaactgtgggaggcggtggttgagagagaacctgagagggtctgccccacctggcctctgttcccggccctcgggattgaaagggaaggaaggaggaggggtgcctgggagctgggtggatatgagtcagaagaggcagggcagcctctccctgctgtgctggtctca

SEQ ID NO: 12897 - DNA, 1287 bp, Homo sapiens
agaagaggtttagtggctttattccttggcaagttcaatgacagcatcttcagtgaaatgtcactcagtatttcctattgaatttcatagttcacaaattatacaacacaggctctaagacaacacttctccacagtgagttttgagctgaacaagattatgcattgttcaaaacctgaaataggcccatttaattattttgctgtgctgtctgtgagagtcacaggacaaaacactttcagaaatatcattatgtaataccagttgcactttcttagaatgtggataatgagttcaaatgaatctattgagaagcagcacagttgagcaaagttcttaaattctgaaattttagcgaaaggtgcactttgtagcagaggccagttctatgcagccataatttatcttgtcagcatctgcaaagaacatcaggctctgttctgttttggctattttcacaagcaactcttcatgaataattggaaaagaaatggcaggcaaacatagagagaaatctctgccattaacaagctgatatcatcaaaaaggtaacaaatgctgagaagrctacaacttttaaaggtatatgtgttcaagatgactctgagataggcccaaatgctgctgaatggctgactattgggactgacttatgttctaggatgcctaattagttcaacaaaaatagtctaaatggtgtatatgtcgaatagtttatcatgacacagaatgtcatggtgaacccaggcaatgataatgtcaactgacaagacaactcctactttaaaagattgacagtaggggatcctactatccatattgttatggtaacaatccttgcttcactggattcttgatttaaatggtaatgatttttccctctgaaaagaaaacttctaaattgtattactgacaatgttgaaccattttcagccaaatacaagccttactttgtgattgaaacaaactcctagaaacaacagatacaaatagtctcttaatttagggctacttttcaagtgggttggtgataagttattacagtttgaacgtttcactattgtttctaatttactgttcattcttttaaacctatccagttgctcccaaattagctttgtcaacagtttcttctgttcaagttgcaaaccacaagagaggtaggaattcttggattcatacagtgatttcatggtgttatgtgttgtgaaacattgcactgtatgaatctggaatatctgtgaagtgtacccatcagcttattggtgaggcatgttgactaatatc

SEQ ID NO: 12898 - DNA, 525 bp, Homo sapiens
ccgccccccatgcatccatttataggctctccacaagggtcgcattccattcccagagctatgaacatctgcttttttgggacaggaatcttggtgatgtgaaacctccctgatcgcacatccattcataggctctctgcagggggaagcacatcacatgctgttggctcatcctggcagtccagcctggcgttgtctacacaatcctcatgcaattttgtrtttacgataatcaggagcatttcatcttttattccatagcaatagtttcaaggggtcttcctacactgtgactttttgaaactcagaggtataaacatttatatgttatgataagatgttttaaaatgttcatgtttatggcttttaaaaatgatcttattatcagttccacatttagttacttagtaattagaaaagatggcctatatggtactcattttttgaaattgttggtatgttcttagtggtcttttatggaagtaatattcatatatattccctgagagattgaaaagaatttga

SEQ ID NO: 12899 - DNA, 525 bp, Homo sapiens
ccgccccccatgcatccatttataggctctccacaagggtcgcattccattcccagagctatgaacatctgcttttttgggacaggaatcttggtgatgtgaaacctccctgatcgcacatccattcataggctctctgcagggggaagcacatcacatgctgttggctcatcctggcagtccagcctggcgttgtctacacaatcctcatgcaattttgtatttacgataatcaggagcatttcatcttttattccatagcaatagtttcaaggggtcttcctacactgtgactttttgaaactcagaggtataaacatttatatgttatgataagatgttttaaaatgttcatgtttatggcttttaaaaatgatcttattatcagttccacatttagttacttagtaattagaaaagatggcctatatggtactcattttttgaaattgttggtatgttcttagtggtcttttatggargtaatattcatatatattccctgagagattgaaaagaatttga

SEQ ID NO: 12900 - DNA, 599 bp, Homo sapiens
gcaatggactaaataaaaaagaggggaaggtaagtttaaataamgtattcatattcatcgtactaatctactaacttgctgttagagagaatatttagctctgagtcatctgatgtgttacttatctatctaggcagcttctttttgaaaattaccccttcctcccctgcatccttctgtccacatatttatggaagcagacatattcactaaacatctttctggccatagctgatgggtctaggggtagatatatagcccaaaccaggtcattcagattctatccctagggttttttttcccaattcaatgacttttagtatattcccagagttgtacgaccatcctcacaatcaattttaggacatttatatcacccagaaataaaccttataccaattagaaatcagtcttcattctgcctcctcctcatccccagccccccgcaatgtctcccatccccaggcctaggcaaccactatttctcctttctgtctctatacatttgtctattctgggtatttcacgaaaatgtagccatacaatatgtggtcttctgtgactgccttctttcacttagtataatgtttgtaaggtgc

SEQ ID NO: 12901 - DNA, 986 bp, Homo sapiens
aagaattggctagactattgttagtgatctttcaggagtcctgggacacaagagacacaaaacagaaaagaagcatctatatataattctgatttttttttatttgaaaggrgaatgatcagcatggcactgacaggtgggatgcagttctagggatagtttgtgcatgcttaggaaaatggcacgaggcactagcatgggcttaataataagtgatggttgggcatggtggctcatgcctataatcccaccactttggaaggccagtgtgggaggatcacttgagcccagaagtttgagaccagcctggccaacaaagcaagagtctatctcaatgaaaaatacaaaaactagccacatgtggtcatgcacacctgtagtccctgctacccagagggtgctgagacaggaggattgcttgagcccaggaagtcaaggccgcagtgagccgtgagcatgccaccgcactctagcctgggtggcagagtaagatcctgtctctaaaaataaacaaataataattgattatgacagaagaactttctcttctgtatttcttttgacagagttacagatgtctgttacaacagacagtgggcacttggatttcagcaagcaatgtgataatatttctcatgacattctcataaataagaaggagaaagtttgtgagttaatggtaaaaagcagatagattgtaactagttgaataactgtacccatgggtgttaatgtatagattgatgtctattggaatattcagttgaatgactgaaacatttattttagtgctttgtaaagataataaagcatagtgctttttctgtcacttcataccagtgccattaaataaatcttcctatgattacagaaatgttctatatctgtgctgtccggtacagtaataaccggtaacatgtagttatttgagcacttgaaatgtggctagtacaactgaggcatttattttattttatttttaatta

SEQ ID NO: 12902 - DNA, 522 bp, Homo sapiens
atttctggtaataagttcaccttccatatgagtccctcctttcatatgtacttggcatctctatgaacagcagcctacactttatccaaaaaaaaactatcagcatgggatcattaagaacaggagtttctttktttttctttttttttttttttttaatcttcttaactatcttagagaacataaagcctttggagggcagaagttttacaaagaggttggtttgtgtccttttaaaaactggagatactggcaattagaaacttaaaaataatactcagacatatgttgtaaacaataccagctgtcttggtgataaaaaacatgaccaagttgagggtttccaatctgagtaggtactgaggcagttcccaattgctaaagggattattttctaagtttttatttgtaatttcatgttttggaactttttggcacattttcctgacaagctaatgtttaaaaatggtgactaggtatctaggaattttgtactaagaattctattattgacattaattg

SEQ ID NO: 12903 - DNA, 539 bp, Homo sapiens
taaatgtaacagtttaagtgtaactggattattattattttatttttacataaatggtatattactcatactcttctacaactgtacaaagcaaatcttagcatatttgggccagctttccatacaaaawatttagatctaatttgttcctttaaaaagctgtctagtaggccaggcggtggctcatgcttataatcccagcactttgggaggctgagctgggtggattgtttcagcccaggagtttgagaccagcctgggcaacataatgagaccccatctctacaaaacattttaaaaattagccaggtgtggtgacatgcacctgtagttttagctcctggggaggctgagataagaggatagcttgagcctgggaggtggaggctgcagtgagctgtgactgcgcccctgtactccagcctgcctgggcaacagaatgagatcttgtctcaactaaatagataaataaagatctgaatagtatttcactgtctgtgcatatcagcacagtatttattttatttttaccaggtcac

SEQ ID NO: 12904 - DNA, 390 bp, Homo sapiens
ttttgtactcggcatacattcagttgtgaaaacaaggcgtccctcctctagcagctgttctatgaatctgagctcactcaagaaccacagagctagttcccttggtttcatatgaaacttcccagttttagagtcaattcaccatagacaggtttcccagtaaatactttaaaacttacagccagtggaaataagaccctgtgattttaatgaaataaaaatcattgcataaacattgatatgtaagagtcttgattttagtacctaaggatcagtttggggatttttttttttcagaaaggataccaagatctgtaaacktctagtgatgtctcgtctatgtgaccacctctttttgtgggcacaaactcatcttaaagaactgtcttc

SEQ ID NO: 12905 - DNA, 390 bp, Homo sapiens
ttttgtactcggcatacattcagttgtgaaaacaaggcgtccctcctctagcagctgttctatgaatctgagctcactcaagaaccacagagctagttcccttggtttcatatgaaacttcccagttttagagtcaattcaccatagacaggtttcccagtaaatactttaaaacttacagccagtggaaataagaccctgtgattttaatgaaataaaaatcattgcataaacattgatatgtaagagtcttgattttagtacctaaggatcagtttggggatttttttttttcagaaaggataccaagatctgtaaacgtctagtgatgtctcgtytatgtgaccacctctttttgtgggcacaaactcatcttaaagaactgtcttc

SEQ ID NO: 12906 - DNA, 390 bp, Homo sapiens
ttttgtactcggcatacattcagttgtgaaaacaaggcgtccctcctctagcagctgttctatgaatctgagctcactcaagaaccacagagctagttcccttggtttcatatgaaacttcccagttttagagtcaattcaccatagacaggtttcccagtaaatactttaaaacttacagccagtggaaataagaccctgtgattttaatgaaataaaaatcattgcataaacattgatatgtaagagtcttgattttagtacctaaggatcagtttggggatttttttttttcagaaaggataccaagatctgtaaacgtctagtgatgtctcgtctatrtgaccacctctttttgtgggcacaaactcatcttaaagaactgtcttc

SEQ ID NO: 12907 - DNA, 532 bp, Homo sapiens
aaaataaatttattcttggccagaaataatttttatagctaatgattatagttacagaattcgagactcattctctcctttgtttgaaaactgactctaccactttcaaattgtgtagcctgcactagttacttcaactttctgagcctcagagtatcccttatctgaaatctaaatcccttatctgagaggtccttatatggggacagaaagaatctatccccatatagcttttatttaaagtagataaattatcctggtccctccacactggaatgacaggcaggaagctgcatcytgtgatgtccttgggccaggaattttgcagctacttccatggcactatgacttctcttaaactacagggccacccacctctcagagaacacagacacatagacacacgacacacactcatgtacacacataaacacacacacacagagacgccaaaataagacgtcctccatcctcttccatctgcaagatatattcctgtaagttggagaaaggaaaactttttttttccatt

SEQ ID NO: 12908 - DNA, 574 bp, Homo sapiens
cagaactgtgactggcatactcagtattgtttccaggaatggaagcataatcagtcattatattcaaagcactctagactaaaacttggtgcaatctataaacaggaagtgatttggggaaatgtggataaacaagtgtccaaaaatgaataatgagaatgtcaagtcaggagggactaagaaaaaaactactcatcagggatatgactggagaaaaaagacaacatttcagaaaagtgttgggttattcaaaccctttataattcatggggaaaatggtctgcttgaatcagattaatattcactaaagtgtatataaatttctaaggttttgaaactgaacttgaggatgtgcttccagtcaagacktttttcaaatcattgaagctactggtgctgtgacaaatctctggtcactcacaactgggaagaaagttcttgtcagttactggaagacagtcagttcggcagccttgtaacaacagcacaaaatgctcacagtgttgcctcttataaagattattcactggcataaactcaaggtcatctctgagttttatttacctcgaccaaa

SEQ ID NO: 12909 - DNA, 574 bp, Homo sapiens
cagaactgtgactggcatactcagtattgtttccaggaatggaagcataatcagtcattatattcaaagcactctagactaaaacttggtgcaatctataaacaggaagtgatttggggaaatgtggataaacaagtgtccaaaaatgaataatgagaatgtcaagtcaggagggactaagaaaaaaactactcatcagggatatgactggagaaaaaagacaacatttcagaaaagtgttgggttattcaaaccctttataattcatggggaaaatggtctgcttgaatcagattaatattcactaaagtgtatataaatttctaaggttttgaaactgaacttgaggatgtgcttccagtcaagacgtttttcaaatcattgaagctackggtgctgtgacaaatctctggtcactcacaactgggaagaaagttcttgtcagttactggaagacagtcagttcggcagccttgtaacaacagcacaaaatgctcacagtgttgcctcttataaagattattcactggcataaactcaaggtcatctctgagttttatttacctcgaccaaa

SEQ ID NO: 12910 - DNA, 529 bp, Homo sapiens
atgaacaattatgtcttgcactttctctaacaacccaatttggaaggcaccattgataatatttagagatgtgaaacatgatcaaggcctcaagagagctagaatattaatcagactgtttagaaaagcccatgtcctcaactaccacacaatatttccataataagtttggttttaagtcagcaaagtgttacacatactttggtactattcattgtttgtgagattctctgtgcctaagagttcacattttgtttccttagacaccaaaaatttcatgaaygtttattgcaggctcaggttcatgccctgtgtgccgttgggtgtgggtggacagttttcaaactacctcctccacagaaaccaaacaactgatattctgcattgggaaaacatacagtactaaaacataggtttatgatattttatatttatttatttttatttcaggtttttaatgaagactttactttttaagaacagttttaatttcacagaaacattgagggacagtacagagatttcccat

SEQ ID NO: 12911 - DNA, 529 bp, Homo sapiens
atgaacaattatgtcttgcactttctctaacaacccaatttggaaggcaccattgataatatttagagatgtgaaacatgatcaaggcctcaagagagctagaatattaatcagactgtttagaaaagcccatgtcctcaactaccacacaatatttccataataagtttggttttaagtcagcaaagtgttacacatactttggtactattcattgtttgtgagattctctgtgcctaagagttcacattttgtttccttagacaccaaaaatttcatgaatgtttattgcaggctcaggttcatgccctgtgtgccgttgggtgtgggtggacagttttcaaactacctcctccacagaaaccaaacaactgatattctgcattgggaaaacatacagtactaaaacataggtttatgatattttatatttatttatttttwtttcaggtttttaatgaagactttactttttaagaacagttttaatttcacagaaacattgagggacagtacagagatttcccat

SEQ ID NO: 12912 - DNA, 518 bp, Homo sapiens
gcaggcaggcaccacactggcccaccttcgtcacctgtgagaactccagtggtggcttctgagtggggtgtggggagcactgtgacttgcctcacttgagtcaggtgctcacccttgcccttacaccagagaaagacacttccatgccaccacatgggtgatggtggacagaggtgaatggatccccaaagaagggacacccctgaccgttggtgtcttcgtttcccacggctgccataacaaagtatcacaaactggggacttaaacaacaaaaatgtattgtcccccagctctgggctagatgtccaaaattagagtcagcagaattggttcctctgagggccgtgagggagagcctgttccattcctctctcctggcttctgcggcttgctggcaagctttgccatgtcytggcctatggaagtgtcacccccatctctgtctccgcctccgcatggtgttctctctttgagctggcctccgcatctgcattctccctctttatgagggagtcag

SEQ ID NO: 12913 - DNA, 453 bp, Homo sapiens
agagtcttagactcgcatccgaaattgggtgggaagaagattgaggcctgcctaggaaccagtggaagaagggcaggagacgagattctgtttcctgaggcctaacatacccaacattgtaacaaaaaactgtaacaaaggatgtgggagttgtgattcaggaacctggacaaaaaccactatatcataacaccatactatttattaatatttttagcatgtcaagggacatcatagaacctaccaaatgtatatgtatgcataatgaagcatttaattatatctcttttaagattgttttctttcacactgccttatgactttaaccatatatatgttctctgagtgtatctgatatggtccctacttatttggtattctttcatatcaactagccaatattgaagatgtgatcaacattcagcaaayactttaaatatttatttagtaaat

SEQ ID NO: 12914 - DNA, 524 bp, Homo sapiens
tttgatggctcatgcctgttatctcagcactcccagagaccaaggaggagggattgcttgagcccaggagttcaagatcagcctgggcaacatagtgagaccttgtctctattaaaaaaaaaaattagctgggcatggtggtgcacrcctgtagtcccacctactcgggagaccgaggtgggaggatagcttgagcctgggaggtcaaggctgcagtgagtgagccatgatcataccactgcactccagcctgggtgatagaatgagaccctgtttcaaaaagaaaaagaactgttgtttataggagtttagttgtgtgagctttagatcatacagacttgctttggttttggctctatctctgatagattattttatgtctcttaaacctttgtttcttcacctagaaaatggagatttaaaagtctacatatactagagattaactgagataatatcctaactagataccttatataaagatagtgatagtaataaaataggagttataagagtaagaatcg

SEQ ID NO: 12915 - DNA, 507 bp, Homo sapiens
ctgagatggaattcaagagagaagtgtctcctcctcgtgtagcagcttgagaagaggcttgggagtgcagcttctcaaaggagaccgatgcttgctcaggatgtcgacagctgtggcttccttgtttttgctagccatatttttaaatcagggttgaactgacaaaaataatttaaagacgtttacttcccttgaactttgaacctgtgaaatgctttaccttgtttacartttggcaaagttgcagtttgttcttgtttttagtttagttttgttttggtgttttgatacctgtactgtgttcttcacagaccctttgtagcgtggtcaggtctgctgtaacatttcccaccaactctcttgctgtccacatcaacagctaaatcatttattcatatggatctctaccatccccatgccttgcccaggtccagttccatttctctcattcacaagatgctttgaaggttctgattttcaactgatcaaactaatgcaaaaaaaaaa

SEQ ID NO: 12916 - DNA, 1023 bp, Homo sapiens
tgatttgctaattggtcagcactaatcatgtaaacaaaatcatgtagttgaagctgaactacatatgcacagcaaattttgcaaagagatcagcaacttgaaagtgtggatgagttaagcaacctgcattctaaagtggcttagcactatgggtctttctagtgccatttttaatgtgtgtaagtacctatttttaaaattaatttactgtttactacgaagaggaaaggaaaaatcaccttactgcttgccatttttcagcaaaggaagtgttctaattgctcaattcagtaaaaaggctaatagggaaggagaacaaataaatatcctcagaggttaaatcaaaaaaacacctgtttcatttgtgaacctttaatgtgtaggcacagaagcaattttggcagccatgctattaatctgtaagaggccataaacttgtcatggtgaggacactgcaaattcaacttgaatatactttgcttttcacattaatgacatataaggacacttaagcctctcatcatcactttagcaccttgagaagaccaatgttcttgttctcctctcaaaggaccattaccacttcaatgtgtgacttgtcaatcctttgtgatactaacccctaaaattaaactctcttgaagttgaagatgacracaatttcattccacctggaaaatttagaagtattcaaacccttcactgttgattaaaatcagattcaagctccattttcctcaggaaaatggccaggctatttgataaaacattaaagagagaatgctaactcacagactagatctagcagtgttgtggttgtgtgtttgttagctaagttaaactctagtgtcctctgattttactttatgctcaaatctcttaacctagaaagttaatatatgcctcagcatgttgtgaaaatccacaggtgagtttaaaagaccttaaatggcttcaacaatgctctccacattttaaagtatgcattcttaaatccattgcacttttcacaaagattaggaa

SEQ ID NO: 12917 - DNA, 505 bp, Homo sapiens
atattaacattctaggaaaaataccctcttcagttacaggtgccctcctcccacttccaatatgacctacacatgtgtgatcatcacagatactacttggaaatagaatcttttcttttatagtagttaagcctagaatgctgcattatttctcacataatttacaagggtaactcttacagtttagttgctgttgatgtgacctacacatacacaactgttttaaatttaccaataaatccttgtggcaacytgggcaagttacttttctgttttggatgtaaatttccttttctgaatggtattccctaggttgtcttccagggtttttatagttttgggttttacattaaagtctttaatccatcttgagttaatttttgtatatggtgtaaggaagggatctactttcaatcttctgcatatggctagcaagttatctcagcaccatttattgaatagggaatcctttccccattgtttgtttttttcaggtttgttgaca

SEQ ID NO: 12918 - DNA, 541 bp, Homo sapiens
aaaatttggctatggaagacattttactcctaactgctaaaggcagaaacctcctgttcccagaagagcctagattcttatttacttccatgaggtgatgttgttggcttagaaatgctatgtgcttgccagagaaatggtagcaagtaaacttactgtaggggaaaacgggaaaactctattcccagactgtaaaaatccttgcacatttcacacagagaaacagtaagaggctgcggatagagaaggaagaagagttatgggacaggacagttgaggttctctgccaaaacccaggatgggctgtcagaggctgtgtctggtccagaggcctttgaatyacaccagggtgtgccctggccagaaattctcagttgcctctgaacttttcccagcctcgtgcaatggcaaggttccccatgaaaagaaactagttcaaacatggccaacattcccaatacccatgggtaatgggggttctccacgttctccccagcaagcctcacatccatgacttaagtacagcagccaacgctaagca

SEQ ID NO: 12919 - DNA, 541 bp, Homo sapiens
aaaatttggctatggaagacattttactcctaactgctaaaggcagaaacctcctgttcccagaagagcctagattcttatttacttccatgaggtgatgttgttggcttagaaatgctatgtgcttgccagagaaatggtagcaagtaaacttactgtaggggaaaacgggaaaactctattcccagactgtaaaaatccttgcacatttcacacagagaaacagtaagaggctgcggatagagaaggaagaagagttatgggacaggacagttgaggttctctgccaaaacccaggatgggctgtcagaggctgtgtctggtccagaggcctttgaatcacaccagggtgtgccctggccagaaattctcagttgcctctgaacttttcccagcctcgtgcaatggcaagkttccccatgaaaagaaactagttcaaacatggccaacattcccaatacccatgggtaatgggggttctccacgttctccccagcaagcctcacatccatgacttaagtacagcagccaacgctaagca

SEQ ID NO: 12920 - DNA, 598 bp, Homo sapiens
gaaaacactgagaccacggacaacccttagccttcctatcaaaaatccttaacccagtaacccacggatggaccaaatgcattcaatctgtagcagcaactgctttgctaacagaagaaagtagaaaaataacttttagaggaaatctcattgtgagcacacctcaccagttcagagctatcctaagtcaaaaaaagcaaaaaggtagcttactaactcaaaaatsttaaagtatagggctcttctgttagaaaaaggtgatttaacactaaccactgataattcccttaacccagcagatttcataacaggggatttaaatcttaattattatgcaaaggtccgaccagacctaggaggaactcccttcaggacagggcaatagatggttcctcccgagtgattgagggaaaaaaacacaattggtattcagtaattgagggaaactctcgtaaaagcagagttaggaaaattgcttaataattggtctgctcaaacgtgcagaccaattttgcactcagccaagccttaaagtacttaaaaaacctgcaagcccatctttttctcctcgctctccttctcacaggaaaaaggcaca

SEQ ID NO: 12921 - DNA, 598 bp, Homo sapiens
gaaaacactgagaccacggacaacccttagccttcctatcaaaaatccttaacccagtaacccacggatggaccaaatgcattcaatctgtagcagcaactgctttgctaacagaagaaagtagaaaaataacttttagaggaaatctcattgtgagcacacctcaccagttcagagctatcctaagtcaaaaaaagcaaaaaggtagcttactaactcaaaaatcttaaagtatagggctcttctgttagaaaaaggtgatttaacactaaccactgataattcccttaacccagcagatttcataacaggggatttaaatcttaattaytatgcaaaggtccgaccagacctaggaggaactcccttcaggacagggcaatagatggttcctcccgagtgattgagggaaaaaaacacaattggtattcagtaattgagggaaactctcgtaaaagcagagttaggaaaattgcttaataattggtctgctcaaacgtgcagaccaattttgcactcagccaagccttaaagtacttaaaaaacctgcaagcccatctttttctcctcgctctccttctcacaggaaaaaggcaca

SEQ ID NO: 12922 - DNA, 299 bp, Homo sapiens
aaaacccagaaggaatggtcctgccaatcatgacaagtcttctccaggggacacctgggagatcagaggccrgaagtgcccatggaggtgttgggtggaacccagttcccaaatggggtcctgggctgctggggccaagaggccagagtccttcatcaagactgggttttttatgaaaaccaggactgaactaggagttcagacaggaaaagagatgtactcagagtcagttccaagccagtcccctgtccctgggaggagagggagcctctgggaggagtgcccctggagggtatgcc

SEQ ID NO: 12923 - DNA, 725 bp, Homo sapiens
tgatcagtcttggcagactcataaaatgaaatacatgatactccctcaaattccataggaattcaaagaatatatgagagatggggataataaggaaaaattttagaggtagtttttatataggacttaacagatatgcaggatttaggtaggcagagaggatagggaaaggaattgggtccatactggtagcagagttactatatgactccagaaattcaaacctgactggtgaggtacagttacagtgatgatcacaccatgcactgagattaagcaggatccctggaggttttgtttaaagacagagaaatgagaacactatatctaarggcagatatgcctgctcacttaggactcaaatctattttatataaataatggagagggtttacttctatttgatgaataatatacttgaggatgttactgaaattgtgcttaaaatagaactacccatctcaaatataacatgccccaaatgattttcccttgcattgcgttctttctacacaggtacatacaaacttatacttctgcatgtatatactacctgaaatttgcttttagctgtgtaagtacatagttcaaatcaacttccaacctagacttgattattaagggagtcatttaattttctcttttctcagtatccacctttccacagtaccgaagagtgctatacatagtctgtgcttaatacatttcacaataattttcttaaa

SEQ ID NO: 12924 - DNA, 554 bp, Homo sapiens
tttaatggcacagagtccaggaaggaagtcatgagcaggcctgttcccatctagctggctgatttctccagggagctaactggggggctgctgcctctyctggccttaccctcgctctgcccccaggagctcttggcttaatggtccctgttattttaattggttgcaatacttccctgtccctctctgactggcttagctaattgtgttctaaatctgcctcttctggtggagttggtggaatgaaggcagtttagtgaaagattcttcagcttcagagagtggtgggaacaggggagagggctgggtggcagtcttggagaagccagaggggaggggaagatggtgccggacaggtaaacagggtcgggcaggggctgctttgcctggcatggacagagcctcctgagatgggagagctgtcctgaccctgaccacccacagaaagaactccaggcttccagggctcctcctgaccctcccaaagctctagaggagagatcgtttggttctgtagttgaattttcaggcccaagaatctgtgagctttgggg

SEQ ID NO: 12925 - DNA, 552 bp, Homo sapiens
cagaccgtttctgcaaggagcttttggccaaaagtgattctgtgttttgtctctgttcagacagtagtctaagactggtggggagactttttttttttttttggaaaaatgcactgaaagaaacaaaaaccaaagcagcttcataggaagacaaagaaaaaccctgttgctgacagacacctgcatgaaagacaggaagcatctgacagagtcagaccaggcacccctgcaaggaagcagctactcaacggggtatgcttaaaagtgtgtttcattaaggtgtttacaaactgtgaccaaccactggtgggagctgtcctgcagctcagaagcctcccttgmtgctgagtgggtgctcaggaagatcaaatcaaactgatttgttatttttatagagtgctgtatgtatgtgtgtatgacagacagagaaagagagatcttccttgggcaccattctcttgcctgcagccagagagaaccatagaactcagctttctagagtagtgcctggttgaagagggagaattctaagtttagagcaagagtttgcaa

SEQ ID NO: 12926 - DNA, 552 bp, Homo sapiens
cagaccgtttctgcaaggagcttttggccaaaagtgattctgtgttttgtctctgttcagacagtagtctaagactggtggggagactttttttttttttttggaaaaatgcactgaaagaaacaaaaaccaaagcagcttcataggaagacaaagaaaaaccctgttgctgacagacacctgcatgaaagacaggaagcatctgacagagtcagaccaggcacccctgcaaggaagcagctactcaacggggtatgcttaaaagtgtgtttcattaaggtgtttacaaactgtgaccaaccactggtgggagctgtcctgcagctcagaagcctcccttgatgctgagtgggtgctcaggaagatcaaatcaaactgatttgttatttttatagagtgctgtatgtrtgtgtgtatgacagacagagaaagagagatcttccttgggcaccattctcttgcctgcagccagagagaaccatagaactcagctttctagagtagtgcctggttgaagagggagaattctaagtttagagcaagagtttgcaa

SEQ ID NO: 12927 - DNA, 492 bp, Homo sapiens
tggctttgaggcccttccccctcatccacggccccaacctcttgctggtcataggcagggcctcccaggattcggattctcttctcacactgcttctttgccacagtcagttggttgatgtacctcttcatgttcctrgccctcattgccgcagtttctttacctttgtgcctcttcagttggggaaagctgctaattgtagtcgcttggattatttccactacaatttgataccttgcccaaaagtcagttgttgaaaacgaccagcacacatcttctaccactcttctctaccgttccttcaacagaccttagttgcttcaagaactccacatcagagttgctgttaatgagcttgatgaagtcctcataagaggggccataggtgtaggctctcttgtgatgttcattcatctgctctctgtactccagctgggcaagcagcatttggttaatgtaatctggattactcagtaactccactaccggctt

SEQ ID NO: 12928 - DNA, 490 bp, Homo sapiens
ggtatagctgtgttctgctcagcaggtacatttattactaatgggtaaaatagtctccttttttagctacataatgcttctgaagccttccgttttctggttttgatagacattccggttacactgagaggggaaggtgaatgccattgatcacaccacraagctgtggcaggagcactcttctttttttttttaatcattcactttacttcataaaacagtgactgcgtttatcttaatgggctgctttgcatcgtattctgggttaaacacttgaatctgaaaatacacataatgagaggggattccaatattttgatttcatattacaaaataaatatttcagcagaaaggatgccattgatcactttggtggtcctagtgtaaaacagaaatactgtgtaattctagcatcagttaaatttaaatttttaatgtcagttaaatttaaatttttaatgccaatgaattgttttgttcttttttcccc

SEQ ID NO: 12929 - DNA, 620 bp, Homo sapiens
tgtttgggttgtatattagcgtatgctgtgtgtctgtgaatgtgtgttgcatgtgtgcattgaacatatatacgttatgtttaggggtgtgtgtatatatatgtaaatgtagtgtgtgtgaggagagacatttctgccttttttcctgtacatgctcaggaagtgaaagagaaaatatggcattatctgtggagaatacagcctcaaattaaatagattaaaaacaacctttcctaggctgtcagagaaaatgttgaagggttttcaaaaagagaaggaaatctctcaggcaaccrtatctatatttgcattgcttgtttcagaataaagacaaaaaatacaaatccacagcacacgcttttgacacagagtcatattttgaaaagtgctggttggtagcacctccgtgatgtgcctgcttgtgacattttaagatcacaaattgctgctaagaaacactctcacttttcatatttacacttaaaaaatcttttcttcttaatggttaattaggtcactaaagaagctcttaagaagaagatgaaatgttgacattttgcaattatttgctactgtgaataatacataaacatactacttacggagaaagtagctttcaa

SEQ ID NO: 12930 - DNA, 620 bp, Homo sapiens
tgtttgggttgtatattagcgtatgctgtgtgtctgtgaatgtgtgttgcatgtgtgcattgaacatatatacgttatgtttaggggtgtgtgtatatatatgtaaatgtagtgtgtgtgaggagagacatttctgccttttttcctgtacatgctcaggaagtgaaagagaaaatatggcattatctgtggagaatacagcctcaaattaaatagattaaaaacaacctttcctaggctgtcagagaaaatgttgaagggttttcaaaaagagaaggaaatctctcaggcaaccgtatctatatttgcattgcttgtttcagaataaagacaaaaaatacaaatccacagcacacgcttttgacacagagtcatattttgaaaagtgctggttggtagcacctccgtgatgtgcctgcttgtgacattttaagatcacaaattgctgctaagaaacactctcacttttcatatttacacttaaaaaatcttttcttcttaatggttaattaggtcactaaagaagctcttaagaagaagatgaaatgttgacattttgcaattatttgctactgtgaataatacataaacatactacttayggagaaagtagctttcaa

SEQ ID NO: 12931 - DNA, 598 bp, Homo sapiens
cctttagcttgtctttttaatttgaggaaaatctaaacaatttaaagtaaaacgtgataaagacagtttttcgggagagagaagggtagatcgctatgtttattccacttagtatctatatcaaatatttgtatcaaaagcagactctcactttaaaattattcttctagtggcaagattcttttccctagattgagagtacagagctcacatagtaataactgctgttaaaatagacacttagaactatagagctaaagcttaggttccaaactaagcgaagctgccattttctgaaataatgtctttcttatttaaaaggascagttcctttttgccttttttccccttcctcacttccttcctattgctccatgtatgttgtacatgtggttatctgttcttttttttttatgcttctacccttatgttggcaaaagaaatgcaccaatgggaggtgaaggtttaaaatataacagttgagttcattatcccagttttatcactttctacaagtataagcaagttacttatctggacctctgtttcctcttacgttaaatggggattaaagcccccttgcagacttgttatgaga

SEQ ID NO: 12932 - DNA, 598 bp, Homo sapiens
cctttagcttgtctttttaatttgaggaaaatctaaacaatttaaagtaaaacgtgataaagacagtttttcgggagagagaagggtagatcgctatgtttattccacttagtatctatatcaaatatttgtatcaaaagcagactctcactttaaaattattcttctagtggcaagattcttttccctagattgagagtacagagctcacatagtaataactgctgttaaaatagacacttagaactatagagctaaagcttaggttccaaactaagcgaagctgccattttctgaaataatgtctttcttatttaaaaggaccagttcctttttgccttttttccccttcctsacttccttcctattgctccatgtatgttgtacatgtggttatctgttcttttttttttatgcttctacccttatgttggcaaaagaaatgcaccaatgggaggtgaaggtttaaaatataacagttgagttcattatcccagttttatcactttctacaagtataagcaagttacttatctggacctctgtttcctcttacgttaaatggggattaaagcccccttgcagacttgttatgaga

SEQ ID NO: 12933 - DNA, 576 bp, Homo sapiens
caaaccatatcagtaactgaatgtcaaygtcacttgcagcaattgattgacaacgtgatgggcaatgcagcttgattctactttcaatgagacctcaatcattttgtaataattaacacttacactagacagaggatactggctggaggagggtctggagatcactgaataagtcataattatcagtagttaacacttggggctgtttactatatgtctggcattgtgtgagcactctctcttacatgattctcacttaacagatgaagaaacattacctctctttctctcaaacttgctagtaccacactcaaatccaaagcccacagtcaacattcaaacccaaagcttacactcaacactcctgcactgcctggacctttctggaagggtttctgttgtgctgtagaagacggtttacaaagcattgctttagagagcagggaatttgaagtttgggtgggtctttgctgtttaagtttccaaaaattcctgaaagatgaagcaggcaatctgaattttaacttgacttagccattaatcattaagatcatcttaggaaacccaccagtacat

SEQ ID NO: 12934 - DNA, 572 bp, Homo sapiens
tgagaaaaaacactcagcctttctggattaagatactctcatggccgattcctttgtgcacatccttagttaccatggggatcacgatgtagagtgttctaagttcttggcattgctgcctggtgagtgcgtccttacctttggggtaaagttatgtgcctgaatgaagacagaaacaacaggatttcctacaaggagtgtggatgacgcatctctctatgtagccagagctcttcaagtgcagtctgtcaggacaagaagaggattctttgttcatttcatgaagttactgattacttcctttcctggcttcgtgttaggtggcattgtaaccattacaatgcagtatttgaggccatgccctcaggaacttatagtaagggtgagaagatgtatgtaaaactctatctgtaggcttaccactgcacaaacttctttctctaacttstcttaacttcatgataaggtaatattggaaataggccttaagggataagaatttggacatacagaaattggggtaaggatgtagcggatggaaaggcaggaggagaggttaggtgaggcaagaa

SEQ ID NO: 12935 - DNA, 535 bp, Homo sapiens
caattgaattcaaaatctcatgtgggatcatcagatgaacagagtctggattaaacggctgtgccctagctgaaagagaggctggaaaagtgaattcctgatatcaattttgtgataagggactaataacgtggggagtctcctgtcataggtgtggatgttcagatgaggtaaacatccaaaaaagaaatacagagaaggcagagctgttaaattatttcccgaagcagctctgagtaaaaattagacactggtttgagtgtgggttatggaaaaaggaagaatgggagaaatgataaaggaattagcatcattamaatgatgcaggtgagccacactctgtgggggcagcaggtggcagaatttaccatcttgagctcaatatgggcatcagtggtgggacatcagtgatcttaagggtatatgaacatatttaaaaatattttaatagttattttaatggataacagcaaaataattagcacatcaaacttgtgaattcacagtgttattgcttaggagaaggttaaggtta

SEQ ID NO: 12936 - DNA, 649 bp, Homo sapiens
cctctcttctccagccttttgacttggagcccaacamcctcactgtgccttctggctgcttgtgactgatacctgcagactccattctgtcctccactctcctgctgtgctctcaattctcaatatcttaaatcttttcgcagctacagggctgaaaaacaagtttacggtaagagtggcaaatagagtgtgatgttaacaacaaatattgcacattagttgtggtttaatgaagcgtggtgttggagaactgtgtttaggatgaacaggaatgagtctcatgatcccttataagtgactagtagactggtgggagagggacaagactaagagggtgtgatcactttcagatgagaacagctgactctgccttatttttctacaatctccagaagatatccatattttaaaaaatgtttctggctgggtatgttgactgaggcctgtaatcccagcattctgggaggctgaggtgggaggatcccttgagcccaagagttcaagacaaacctgggcaacatagggatgtggactgctgttgtgaagctttggttcttgtcttcttagtttacaagaatttaaacaagagacatgcagcaaagaagatgcagcatggaacaatttattgcaaaggaaaaaaactcttttg

SEQ ID NO: 12937 - DNA, 649 bp, Homo sapiens
cctctcttctccagccttttgacttggagcccaacaacctcactgtgccttctggctgcttgtgactgatacctgcagactccattctgtcctccactctcctgctgtgctctcaattctcaatatcttaaatcttttcgcagctacagggctgaaaaacaagtttacggtaagagtggcaaatagagtgtgatgttaacaacaaatattgcacattagttgtggtttaatgaagcgtggtgttggagaactgtgtttaggatgaacaggaatgagtctcatgatcccttataagtgactagtagactggtgggagagggacaagactaagagggtgtgatcactttcagatgagaacagctgactctgccttatttttctrcaatctccagaagatatccatattttaaaaaatgtttctggctgggtatgttgactgaggcctgtaatcccagcattctgggaggctgaggtgggaggatcccttgagcccaagagttcaagacaaacctgggcaacatagggatgtggactgctgttgtgaagctttggttcttgtcttcttagtttacaagaatttaaacaagagacatgcagcaaagaagatgcagcatggaacaatttattgcaaaggaaaaaaactcttttg

SEQ ID NO: 12938 - DNA, 644 bp, Homo sapiens
agttggactaaaagttaaagctaaaagtatggtaataattggcactattaaaaggagcaagtcagactatagccattgcttccaagttcccctggaagttctaaaagatttaattttatctttataaattagtcagatccaaggaagtataaaattaagtctttatataaatttatctgggtaattatatttttaatattttcttggaaggaactggactgattaatgtaaaaacaactttttttaataataataaaaaagactcaaacatgtttctccttttctggctgtgagaagaactaaggccctttggttttgtaggactatggggccagagagtccagccattgttggacctctggtgaggtcctctgccatttattgaaaggccactcttgttttttgatacattttatactggattcccaaagctctgcttcccataaccgactctgctaatcccaataaagagggtgtcactaaacccaagcaaacaaggggtcctacttggaggtggatcatgtgttgttggtacatggggaagagagatgtgttagcccatgtgaaagttaaataaaggaaatgtaagcaatggagcattgtccctgccacagtagtgggagttgtagacggcaaagmttgac

SEQ ID NO: 12939 - DNA, 365 bp, Homo sapiens
atcttcctgtttttttagagacrgggtcttgccacattgcccaggctggatacaaactcctagccccaaacgatcctcctgcctcaagcacctgagtaactgggactacaggcacacacacaccactgcacctggctcaattctaataatttatacaactctagagctgatttctcagcaatttacagtttcatacttctgctctctagtactattttacttttgtcctatcaaatgcaacctaactgaaatcaaatttagtattttagtacttattagccccatacatagaggtaatcctttagccttgttcaaaagtgatcagaaaaaaaggcactctttttctgtgtgtatagggagacaga

SEQ ID NO: 12940 - DNA, 659 bp, Homo sapiens
gtaatcagcattgcttaaatattgttagmtctaatgtgatcttctgctcttaaaactcaagtacatctaagggcattgagaatggaaagtctgagttctggtactagacaagagcagccctttaggccaggcgcaatggctcacacctgtaatcccagcactttgggaggccaaggtgggtgggtcacttgaggccaggagtttgagactagcctgggcaacatagtgagtacccttctctacaaaaaacaaaaaaattagctgagcatagtggtgtgcacctgtggtcccagctacttgggaggctaaggagggaggttcactggagcccaggaggtagaggctgcagtgagctgtgatcttaccactgcattctagcctgtgtgacagagtgagaccctgtctcaaaaaagaaaaaaaaaaagtagccctttagttaggattctagctcataacgctgcatactaccagtttctaagagaaatactagcttgctggattctattttccacttgttgttcagcctcattgagcaatgaaacagaataacaagattccaatataattttcagccaaatccaaaggcaaggcagaaatattcatttaagtatatagtccatagtactctgtggtccctgcaaagggcttcatgatcaatt

SEQ ID NO: 12941 - DNA, 659 bp, Homo sapiens
gtaatcagcattgcttaaatattgttagatctaatgtgatcttctgctcttaaaactcaagtacatctaagggcattgagaatggaaagtctgagttctggtactagacaagagcagccctttaggccaggcgcaatggctcacacctgtaatcccagcactttgggaggccaaggtgggtgggtcacttgaggccaggagtttgagactagcctgggcaacatagtgagtacccttctctacaaaaaacaaaaaaattagctgagcatagtggygtgcacctgtggtcccagctacttgggaggctaaggagggaggttcactggagcccaggaggtagaggctgcagtgagctgtgatcttaccactgcattctagcctgtgtgacagagtgagaccctgtctcaaaaaagaaaaaaaaaaagtagccctttagttaggattctagctcataacgctgcatactaccagtttctaagagaaatactagcttgctggattctattttccacttgttgttcagcctcattgagcaatgaaacagaataacaagattccaatataattttcagccaaatccaaaggcaaggcagaaatattcatttaagtatatagtccatagtactctgtggtccctgcaaagggcttcatgatcaatt

SEQ ID NO: 12942 - DNA, 553 bp, Homo sapiens
atattttatcaaggagaacaaaacagtaaattttgtatttccatggatttcagagtaaaagtcaatgttatttcaccaaggccctctgacttaagggagttattgtgaaactgttcaactaggtctcaatgtggccacatcattatgcaagactcaaaggcaaaatatttaacagagaaaagaggagcagattgggagccctctgagaggaagggaggggtggtattcatttctgygtccttagcacctagcagggagcctgctcacctaaagattcaaaacgcaggccgcgcaggcgcagtggctgatgcctgtaatcccagcactttgggtaggccaaggaggggtcacttgagctcgggagcttgcgactagcctgacaacacggcaaaaccctgtctctacaaaatatattttaagaaaattatctgggcatggtggcatgtgcctgtagtcccagctgctcaagaggctgaggtaagaggattgcctgagcccaggaggtcgaggctacagtgagctgtgatggagtcactgtattctagcctgggtg

SEQ ID NO: 12943 - DNA, 520 bp, Homo sapiens
agtattacctgaaattgattttgttatgctcctcagtgtcagaataattttctttggytttattgctcatctttatttctttttgtttcatgtaccatttttttactatatgaatttttctagaggatttcaaaaatatatttaaagacgcaaaaaataaaagatgcccttcatatatatccacatcaggagactgcaaatttctcacctgttttactgaaaagtccccaaagcatctttccaaagtgtgattaaaatggagcatttccaactcaatctccccttagcaagaccccaaaatgccctgagccaggacactgtcacctgatggaagagaaatttgataaaggaaagttagaatgaaaagaaacagtgatcttaatagatggccactaaaatgtcttaatttttcaaactgtgcaaaaatatatgatcatgtgaaccttttgccagggtctctcccagggccttaaaaggtctcacaagcttaatcattgagttaggcactgaactgtggcct

SEQ ID NO: 12944 - DNA, 520 bp, Homo sapiens
agtattacctgaaattgattttgttatgctcctcagtgtcagaataattttctttggctttattgctcatctttatttctttttgtttcatgtaccatttttttactatatgaatttttctagaggatttcaaaaatatatttaaagacgcaaaaaataaaagatgcccttcatatatatccacatcaggagactgcaaatttctcacctgttttactgaaaagtccccaaagcatctttccaaagtgtgattaaaatggagcatttccaactcaatctccccttagcaagaccccaaaatgccctgagccaggacactgtcacctgatggaagagaaatttgataaaggaaagttagaatgaaaagaaacagtgatcttaatagatggccactaaaatgtcttaatttttcaaactgtgcaaaaatatatgatcatgtgaaccttttgccagggtctctcccagggccttaaaaggtcycacaagcttaatcattgagttaggcactgaactgtggcct

SEQ ID NO: 12945 - DNA, 1003 bp, Homo sapiens
tacaaactgaaggtagcaactacagaggtttgtcatctggtggaagagaatgccaggttacaagggttgccaggtttcgtgaataccgctggggatagccttcctgtcctgccygccaggaacattattacccctggccccactttctcagtacaacagctgagaggagaagcaagatgacctaaataaatttcactgtaagcccctaacaaatccattttaaaagattagaaaattttaaacctctttaggaaagaagaatattatggccgagatgcagaatgaaaataaatattaaatgtgttgaatgcaaaatttgagaattaactgaatatatatgcatatgcatctatttagacataactgaagtttttaacttatttagccaatagtttgaaaaatagactgttctaagtaaccaggctcttctctgttaatgcactggaaaggtacactactactttcattcaaaggacccacaatggactattgccagacgtgactccagggactactgtaagatgctgaaaacagcttagagcctatagtttcattctagaggttaagacaaacaaaatttaaaatttccccaaactagccacaatcagcaaaactgctcatagaagttttcctctagtttttcttgttcttcctctttctaaaactaaggtctctgaagggcattcgcaatatcagcatccagaaatataccgtgtagtctgattaaaatatcttttatgaacacttatcatttatcagcagcgtaagcctgcttttgaaaatatgataatgaaaaactgtatcttgcggagagtctgtttttacaaaggaaattataaaactatcaatcaaattcaacatgcctaggtataaaatatttatggaataacgtgcaatgaaaccaagaaaacataactttaggggaaaaaacttgaatgaaaacactgagaaatatactatcttaaaatatatatatgaaaacaaacagatcaaaacaggaatc

SEQ ID NO: 12946 - DNA, 1003 bp, Homo sapiens
tacaaactgaaggtagcaactacagaggtttgtcatctggtggaagagaatgccaggttacaagggttgccaggtttcgtgaataccgctggggatagccttcctgtcctgcctgccaggaacattattacccctggccccactttctcagtacaacagctgagaggagaagcaagatgacctaaataaatttcactgtaagcccctaacaaatccattttaaaagattagaaaattttaaacctctttaggaaagaagaatattatggccgagatgcagaatgaaaataaatattaaatgtgttgaatgcaaaatttgagaattaactgaatatatatgcatatgcatctatttagacataactgaagtttttaacttatttagccaatagtttgaaaaatagactgttctaagtaaccaggctcttctctgttaatgcactggaaaggtacactactactttcattcaaaggacccacaatggactattgccagacgtgactccagggactactgtaagatgctgaaaacagcttagagcctatagtttcattctagaggttaagacaaacaaaatttaaaatttccccaaactagccacaatcagcaaaactgctcatagaagttttcctctagtttttcttgttcttcctctttctaaaactaaggtctctgaagggcattcgcaatatcagcatccagaaatataccgtgtagtctgattaaaatatcttttatgaacacttatcatttatcagcagygtaagcctgcttttgaaaatatgataatgaaaaactgtatcttgcggagagtctgtttttacaaaggaaattataaaactatcaatcaaattcaacatgcctaggtataaaatatttatggaataacgtgcaatgaaaccaagaaaacataactttaggggaaaaaacttgaatgaaaacactgagaaatatactatcttaaaatatatatatgaaaacaaacagatcaaaacaggaatc

SEQ ID NO: 12947 - DNA, 576 bp, Homo sapiens
ttccattttaaaaaattatgttttcaggatatagtatgtccagaaaatatatacatatatttttaaaaaatcaaatcaaacctttaatgctataggatcaagattgaaatcccaaacatctccaattgagtcatccagagcgtcctcaattcttctcagttgagaggtatactcctcaagaaatttcccataattcttaagttggacttcggcatgaatttctaagtttaaattttaaaacagtatgtgataagtgcaagtaatgaattgcaggacatttacttcaaataacctcaaaagtcacgcaaagcactgttaattattactctggaatgtctggacttcctgaaaataaagttycaaagttaaacaacaattcagctttcaatcttctctatacacgaaataattttaaaagcagtagatgttaccatatataaagttactaccttaaaaccctaacatattatgaaaaagccactagcccatctacccccataatagagggctttgaaccaatctgaaaagtgccttaaacaattcaatgtcctgattctatcttttagtcatgaacaa

SEQ ID NO: 12948 - DNA, 518 bp, Homo sapiens
tgtggttaaaaaatgcttaactttgggctgggtgcggtggctcatgcctgtaatcccaacactttgggaggcagaggcaggcggatcatgaggtcaggagttcgagaccagcctggccaatatagtgaaaccctgcctctattaaaaatacaaaaattagctgggcatggtggcaggcgcctgaatttccagctactcgggaggctgaggcaggagaattgcttgaacccaggaggcagaggttgcagtgagccgagatcatgccactacactccagcctgggtgacagaacgagayttcgtcccccccaaaaaaacaaaaagcttaactttgaagagatttggtcttctcagatgcctcctataaaaagaaacaaatgtgagaaaaggtagaaaaggccttttttgtagggagcaattttttctaaaaaggcttttcagccaagaccctctctcttacaattctgacaccatatcaacttttaagactacttttttcttagaatgcttcttttttgc

SEQ ID NO: 12949 - DNA, 543 bp, Homo sapiens
tgctggggaggatctaatcattatgcaagtatcayggaatcatcaagtatcagttgtgatcacagacagtatccaatccaaaagagcaaagattactttttccttcagctatttatattacctgcttactgccttacaaacaaccataaattactgagatccaatgagcttaccgtactgatccaacgagcttattgcaagctaacttagagaatcaaagagaaatgaataaatctttagagtgggtcctgttatcaatcttctctttctaaagattaggttcctgaaggctagagaacctaactaactaacccaagctgacaagggtaattaagaacagatcagagataacaacccaggtccctcaactacaactcagcattttcttcctactatatcatgctgcctattagttagtctacatttcaaatatctacttgacaaacatttattgagcttctactatgcactggacagtggtaggtactgcaaaagaaattacaaataagacatatgacctgtatgcaaggagcctgccaacta

SEQ ID NO: 12950 - DNA, 543 bp, Homo sapiens
tgctggggaggatctaatcattatgcaagtatcatggaatcatcaagtatcagttgtgatcacagayagtatccaatccaaaagagcaaagattactttttccttcagctatttatattacctgcttactgccttacaaacaaccataaattactgagatccaatgagcttaccgtactgatccaacgagcttattgcaagctaacttagagaatcaaagagaaatgaataaatctttagagtgggtcctgttatcaatcttctctttctaaagattaggttcctgaaggctagagaacctaactaactaacccaagctgacaagggtaattaagaacagatcagagataacaacccaggtccctcaactacaactcagcattttcttcctactatatcatgctgcctattagttagtctacatttcaaatatctacttgacaaacatttattgagcttctactatgcactggacagtggtaggtactgcaaaagaaattacaaataagacatatgacctgtatgcaaggagcctgccaacta

SEQ ID NO: 12951 - DNA, 543 bp, Homo sapiens
aacatcctattctgcaataaataaaatatacatattaaattcaagaagatcaacctgtcttatttcagggaaaaaaatgctgttatttttatcggtattgcrgcaaatctatagattttctttagtagaattaacattactatgttgagctttcttaatcaaaaacagtaaaacagcttttcatttgttcaaatggttttatttgttctaatcttgtcttaaaggtaaaaatttaaaggcaacaaaaaagaggcatagaaaaatgatgtttcagggatagtttatttgaacaaacatcttgctgcccttatagtgagaactataggaatatctatatcctggcttactaatttgctgttataaacttgccaaataactaactagaatgatgatgaataaaattgtttccacttcttgctctctattcagaaaagaagaaagggttttgggaaggtccttccctgtgccttatttatgcctgcccttagatgtttttaagtcttgttccaaaagtcccctttgaataaattcctgtagcccaca

SEQ ID NO: 12952 - DNA, 533 bp, Homo sapiens
ggctcacggttytgcaggctgtacaggaagcatggcaccagcatctgcatctggtgagagcctcagctgcttcctctcataggggaagggagaggcgagcagaatcacaggggtgaggaggggggtgccaggctctttttaacaaccagctctcacaggaactaatagagccagaactctcgcacatcccctacacccccagggcaatcatctatccatgtgggatccacccccacgacccagacacctcccatgaggccccacctctaacgctggggatcggtcttcagcagaggtctggaggggacaaacatccacactatagcacatgtcaaaattttcccagtgtgtattattacacaggactgcagagtgaaggaataaaatgatatctaaagaaatacttccagacagatgtcttagtgctagtacctgtctggcacactttgggaaagcaagtacccctactagtaagcataagtgtcataacatatgactaaaaccaaaatcagagctcattctgtggcattagg

SEQ ID NO: 12953 - DNA, 533 bp, Homo sapiens
ggctcacggttctgcaggctgtacaggaagcrtggcaccagcatctgcatctggtgagagcctcagctgcttcctctcataggggaagggagaggcgagcagaatcacaggggtgaggaggggggtgccaggctctttttaacaaccagctctcacaggaactaatagagccagaactctcgcacatcccctacacccccagggcaatcatctatccatgtgggatccacccccacgacccagacacctcccatgaggccccacctctaacgctggggatcggtcttcagcagaggtctggaggggacaaacatccacactatagcacatgtcaaaattttcccagtgtgtattattacacaggactgcagagtgaaggaataaaatgatatctaaagaaatacttccagacagatgtcttagtgctagtacctgtctggcacactttgggaaagcaagtacccctactagtaagcataagtgtcataacatatgactaaaaccaaaatcagagctcattctgtggcattagg

SEQ ID NO: 12954 - DNA, 533 bp, Homo sapiens
ggctcacggttctgcaggctgtacaggaagcatggcaccagcatctgcatctggtgagagcctcagctgcttcctctcataggggaagggagaggsgagcagaatcacaggggtgaggaggggggtgccaggctctttttaacaaccagctctcacaggaactaatagagccagaactctcgcacatcccctacacccccagggcaatcatctatccatgtgggatccacccccacgacccagacacctcccatgaggccccacctctaacgctggggatcggtcttcagcagaggtctggaggggacaaacatccacactatagcacatgtcaaaattttcccagtgtgtattattacacaggactgcagagtgaaggaataaaatgatatctaaagaaatacttccagacagatgtcttagtgctagtacctgtctggcacactttgggaaagcaagtacccctactagtaagcataagtgtcataacatatgactaaaaccaaaatcagagctcattctgtggcattagg

SEQ ID NO: 12955 - DNA, 525 bp, Homo sapiens
tttttaatacggggtttcaccatgttggccaggctggtctcgaactcctgacctcaagtgatccacccaccttggcctcccaaagtgctgggatcacaggtgtaagccacccgcacctggcctagtttttatatttttaataaagacagggtttcaccatgttggccaggttggtcttgaactcttgacctcaaatgatctgcctgcctcagccttctaaagtgttgggattacaggcgtgagccaccgcrcccggccctgggctgtaacttaactgtcgcctcctcagggattccttcctgatcaccaactgagggagtgccaactgcctgactgagccactttccatctcacccctgcctcattttctttccagcacttacactcctgaaaagtacctggtcgactcacattgctggtttcttgtcatctcccctgccatgccttgtcctgctgtcggctatattctcagtgcctggcactgcatacgagggcctctctggggaattttctgatgaatctgag

SEQ ID NO: 12956 - DNA, 578 bp, Homo sapiens
aaccccattgtgctgatattaagagatggggccttttgggaagggattaagtcctgtgggtggcgcctcttggattagtgctttatgaaagggctaccaggaactagcttagaacctttttgctctttcattcttctgccatgtgagaaygcagtgttcatatcctttttctcttttcatcgctcccaccatgtgatgatactcacatggcaccaaccaggaggaacaggccttgaccaaacatgcaatctgctggagccttgatcttggactgcccagcctccagaaatgtaaaaaaatacatttctattcttcataaattactcaaagatattttgttacagcagcataaatggactaaggtatttccattgtttacctgcatttattaccagagctctttttttaggtttaattaactcttgcccaatatttatcagaaacactgtatctcagatatgaagacacagcctctacattccaaaagagcagaaatgcatacgcagacttcatcaaatggtgagggtaacaaagcaaatttttacagggcaaatgggaaatatgcccaagatcaaagt

SEQ ID NO: 12957 - DNA, 578 bp, Homo sapiens
aaccccattgtgctgatattaagagatggggccttttgggaagggattaagtcctgtgggtggcgcctcttggattagtgctttatgaaagggctaccaggaactagcttagaacctttttgctctttcattcttctgccatgtgagaacgcagtgttcatatcctttttctcttttcatcgctcccaccatgtgatgatactcacatggcaccaaccaggaggaacaggccttgaccaaacatgcaatctgctggagccttgatcttggactgcccagcctccagaaatgtaaaaaaatacatttctattcttcataaattactcaaagatattttgttacagcagcataaatggactaaggyatttccattgtttacctgcatttattaccagagctctttttttaggtttaattaactcttgcccaatatttatcagaaacactgtatctcagatatgaagacacagcctctacattccaaaagagcagaaatgcatacgcagacttcatcaaatggtgagggtaacaaagcaaatttttacagggcaaatgggaaatatgcccaagatcaaagt

SEQ ID NO: 12958 - DNA, 539 bp, Homo sapiens
catgttacattacattgttgtcattgatgttgtttcctgcattgtaactccatttgttatctgcaaattttcaataaccttctcctaatagtttgcttatagctgttttcctctgggaaattaagggtctggtttgcatgcatactttgggcaaacacaaagggaggggaacagcagcagcatgaggaaagctggtttccgcataacaaagacracatccagagaagtgaagttgtggtcaggagcaaggccgaggggatcagacaaccaagatggattttgaaacttagggaactggaaaaaactgggctgcctgtcataaaatcaatgggaaattacactattaattttctattaaaggatagtgtgattccttaagactagaaatgctaaagaaggtattcgtttaatatcctcagaatattctgtgcacaaggactggaatatagtagacattgaatgaaatatgagaatgattgagtgaacacagaaatgaatgctgttaattccactcttttgttgctccccctaactcctgc

SEQ ID NO: 12959 - DNA, 539 bp, Homo sapiens
catgttacattacattgttgtcattgatgttgtttcctgcattgtaactccatttgttatctgcaaattttcaataaccttctcctaatagtttgcttatagctgttttcctctgggaaattaagggtctggtttgcatgcatactttgggcaaacacaaagggaggggaacagcagcagcatgaggaaagctggtttccgcataacaaagacaacatccagagaagtgaagttgtggtcaggagcaaggccgaggggatcagacaaccaagatggaytttgaaacttagggaactggaaaaaactgggctgcctgtcataaaatcaatgggaaattacactattaattttctattaaaggatagtgtgattccttaagactagaaatgctaaagaaggtattcgtttaatatcctcagaatattctgtgcacaaggactggaatatagtagacattgaatgaaatatgagaatgattgagtgaacacagaaatgaatgctgttaattccactcttttgttgctccccctaactcctgc

SEQ ID NO: 12960 - DNA, 549 bp, Homo sapiens
taagaactaaaaagataataactattcacaatgaaaaaggccaaagcaatgaaagtatttctcaaccttatataaaagatattcctttttatttttgtggctataaagttagtgcattaggctatgattcctaccattttggattcttagcccatgaaaatatttaaaatatagtatatggccaagagttatttgaatgtaaaggtgtacactgtaatatatgtatgttgctagtttaaatttctaattatattgcccagagagaaaagccttctaatccctaaaatacaacttattcctaaaaaggtctatgttctaggcactatcctacataattaaatcttaattatctgtrccactaaagtaattaataaaagaaagtgaaaatacacaatctgcctgtattccaggctagtacagcagccaagtgtcctaattatctaaaagtgcagaaaattaatatattgttagtcttcaataaatagaaagcaataatacttaggaaagaaatgagaaaataatttaaaactgttgtacattaagttacca

SEQ ID NO: 12961 - DNA, 532 bp, Homo sapiens
tttattgttaatgagtggcaaaaattctattattaaaaacaaaacaaaattcaagggagtagtagttttgggaccctcgaagtatgctttaattccaaaaggtgaatgaagatttaaaagattattggtgaagacagtatgcatataaaatttcactgtggtcatctgatcctatcatcgtacatcttaactactacatattaatagtagtctatatttcggttattcaagacataactcacgagaactctcccctcctaaccccttcttttaatgtagattaatctcacatttcttcttctaaatgatttwagcttaacgtacattattctacttaataactataaaggctataaaacgaaagctacaatgaaatgctattaatgcagaccaaaaacatgaaaataaatagaacacttactggctctgttagtgttgtatctttctccaggaactgtacaacacaatatgctagctaaaaggtaagggacagtttataaatattagtgagataacatttaataatgtagga

SEQ ID NO: 12962 - DNA, 582 bp, Homo sapiens
ttgcgctttcttttctgctgagaattataaggatcttgcaaaaagatattttaaattgaacaaaccaataaacagcagctccaatcatgctttcctccagaaagtgcaaaccttaaccaagtaggtgtgttacttattcaaaactcattgtttataaagaattggtagagtttaaacttgttgggtgtcttgggttaaagttctaaatgtcattcaatgttttaatgtatttttaattaaaataatgataataattctgaatttctcagaatatggagtaaaacattaacagttctaacaacgcttaagcatgtragagattacctaaagctgtatttaaaacagctaagtagtttttataaaattgatgagttactacatattacttatcttttttcctttttacagaaaggatttgggttatatttgttattttcaaaaggaacagatttattatttccaagccaaattatcagttatttcatgggtaaggtgatatttattaaataattttaaaaccccatgagtaatataagaattatattagttatagtaatataagaattgttctctctagagcct

SEQ ID NO: 12963 - DNA, 368 bp, Homo sapiens
tgatgtaatacaagcatatactttatagrcaaggaaactgaagcccagagggatgatgtgatttgcccaaggtggcatagccagttagtgcaaaagttaagattctagaattttgctaggtcatgagatcaagtttgcaagtctagaattttcagattctattcattcctttcttttcaagttctaggcattttcctatctctaccctataatttcttagtggtttctctaaaaccacataggcaaattcctttagcatttcaggatacagttccttcaggcctgagatgcagagctactctcatagaggtcagggtgggtggacacaacagttagacatggattttttttttttttttttttttttt

SEQ ID NO: 12964 - DNA, 517 bp, Homo sapiens
ccactgctgactagtttttgtgctttttgtagagacagggttttgccatgttgccccggctggtcttgaactactgggctcaagcaatctgcctgccttggcctcccaaagtgctgggattaycactatgagccaatgagcctggctgaagccagtttctttgtgtttgatttccagatctgcagtttgttagttatgggaacttaggagaatctcattactctgttaagtcttagttacttcatctgtaaaagaataatagaatgaataaggtcttagggattaaataagagaatgcatagtaacattgaatagacactagctattattattactactatgataaagatcatttgttcattgtacccatgacatgtttcatgcttactctagtcacagacttgggcatatacaaaaattaaacaataaaacaaaacaaaacaaaaaattgccatgactgaggttgttggcagttgcatctcaagcagtttatagtattagaaaaggaacagacatc

SEQ ID NO: 12965 - DNA, 517 bp, Homo sapiens
ccactgctgactagtttttgtgctttttgtagagacagggttttgccatgttgccccggctggtcttgaactactgggctcaagcaatctgcctgccttggcctcccaaagtgctgggattatcactatgagccaatgagcctggctgaagccagtttctttgtgtttgatttccagatctgcagtttgttagttatgggaacttaggagaatctcattactctgttaagtcttagttacttcatctgtaaaagaataatagaatgaataaggtcttagggattaaataagagaatgcatagtaacattgaatagacactagctattattattactactatgataaagatcatttgttcattgtacccatgacatgtttcatgcttactctagtcacagacttgggcatatacaaaaattaaacaataaaacaaaacaaaacaaaaaattgccatgactgaggttgytggcagttgcatctcaagcagtttatagtattagaaaaggaacagacatc

SEQ ID NO: 12966 - DNA, 517 bp, Homo sapiens
ccactgctgactagtttttgtgctttttgtagagacagggttttgccatgttgccccggctggtcttgaactactgggctcaagcaatctgcctgccttggcctcccaaagtgctgggattatcactatgagccaatgagcctggctgaagccagtttctttgtgtttgatttccagatctgcagtttgttagttatgggaacttaggagaatctcattactctgttaagtcttagttacttcatctgtaaaagaataatagaatgaataaggtcttagggattaaataagagaatgcatagtaacattgaatagacactagctattattattactactatgataaagatcatttgttcattgtacccatgacatgtttcatgcttactctagtcacagacttgggcatatacaaaaattaaacaataaaacaaaacaaaacaaaaaattgccatgactgaggttgttggcagttgcatctcaagcagtttatrgtattagaaaaggaacagacatc

SEQ ID NO: 12967 - DNA, 578 bp, Homo sapiens
aaagaacttcttatttcttaggtaaaatagtctgaaaaataacagacagttgcaagaaaaaataatagcaatatggtttgtgtttacagtacatgtaaaagtaaaacaaatgatatcagtggtacaaagcatggacggaagcgattgggaatatactattttgagatccccgtgctacatgtatgatatttgaagggagaacctgattaattaaagaagtatattgtaaattctaggacataaatgataaatcagtaaagaaaataaaatggaaccatacaaagctcaattaatccaaaataagacaaagaaagtaataaagatcaaagggaatgaayagtgagagaacagctaatgcgatggctcccagctgctcccggcatcagcctctgagtcaacccaactgaggtcccaaaccttatgagacagagatggaccacactctttatactctttatactctatactcttggaactcaaagttccaaggaaagaattgtgaggttcaataataagaaattgtcatctatagacattctgtttggagatagtttattatatagtaataagtaattcga

SEQ ID NO: 12968 - DNA, 576 bp, Homo sapiens
taaatctttgtacacatctctaattagttcttttggataaatttctagaagtgaaatgactagatccaacgatataaatttttcaagatttggatatacattgccaagttgcccttcaggtagatgctgggttacattcccaccagcagactaaaagctgattgttcattctcttcctcattaatattggatattaaattattctgccaatttggtggagaaaatgttttaatttatatttctttgattacaagtaaagttgaaatatgtatttttatatgtttcttgggatttttatattttttcttttataaattacttgcttacgtcttttgccaatttttctatttaggtgtacgtctttctggttagcacttcgtttatgttaacgatatgatatccattactcatataagttttaaacatttattttcagtttatttgttttktaattttgccactgtttatttaatgtataaatttaaactgtcataaagtcaaatatttttcagtgttcagttctttttcatttgtgcttaggaaagcctatcttactccaataccaaatttaaaaat

SEQ ID NO: 12969 - DNA, 576 bp, Homo sapiens
taaatctttgtacacatctctaattagttcttttggataaatttctagaagtgaaatgactagatccaacgatataaatttttcaagatttggatatacattgccaagttgcccttcaggtagatgctgggttacattcccaccagcagactaaaagctgattgttcattctcttcctcattaatattggatattaaattattctgccaatttggtggagaaaatgttttaatttatatttctttgattacaagtaaagttgaaatatgtatttttatatgtttcttgggatttttatattttttcttttataaattacttgcttacgtcttttgccaatttttctatttaggtgtacgtctttctggttagcacttcgtttatgttaacgatatgatatccattactcatataagttttaaacatttattttcagtttatttgttttgtaatttygccactgtttatttaatgtataaatttaaactgtcataaagtcaaatatttttcagtgttcagttctttttcatttgtgcttaggaaagcctatcttactccaataccaaatttaaaaat

SEQ ID NO: 12970 - DNA, 576 bp, Homo sapiens
taaatctttgtacacatctctaattagttcttttggataaatttctagaagtgaaatgactagatccaacgatataaatttttcaagatttggatatacattgccaagttgcccttcaggtagatgctgggttacattcccaccagcagactaaaagctgattgttcattctcttcctcattaatattggatattaaattattctgccaatttggtggagaaaatgttttaatttatatttctttgattacaagtaaagttgaaatatgtatttttatatgtttcttgggatttttatattttttcttttataaattacttgcttacgtcttttgccaatttttctatttaggtgtacgtctttctggttagcacttcgtttatgttaacgatatgatatccattactcatataagttttaaacatttattttcagtttatttgttttgtaattttgccactgtttatttaatgtataaatttaaactgtcataaagtcaaatatttttcagtgttcagttctttttcatttgtgcttaggaaagcctatcttactccaatacyaaatttaaaaat

SEQ ID NO: 12971 - DNA, 617 bp, Homo sapiens
tggagagacgaggtttcgctatgtgcccaggcttgtttggaaggcctgagctcaagccgtccgtcccgctcaacctcccgagtcgctgggaccccaggcgcaagccaccatgccgggccaattayttttttgggttgtatttcctgttgaagtgaggttttgctatgctttcacctcacataccttttctgtcccaagaccccatccagggtaccaccttacaactcgtcacggttccccttggctgcgacggtttctcacacttgccttgtttttgatgaccctgacactttgaatactgatcagatatattgtgggatgtcctctcctgaagttcgtgtgatgtattccttgtgatctgactggaattatatgtttttgtcaggaagattgcagcgggaaagcgccattcccatcccatcctgtctagagtacacaccatcaagccggcttatcactgctgctattagtcctggtcaccgggctggggcagtgttgattaggtttctccaccataaagtgattttcccacctctttctctactgtgctttctggaagtcgctacctgtagcctatacgtaaagaaaagggaagttttgctttatctccttgcagg

SEQ ID NO: 12972 - DNA, 501 bp, Homo sapiens
aacaaaatatgtttgaaaagctgtccttgtaaaacatgaggtttaattggatagctaagtcccaattctttcaaattcaaaataattagagtttttcatacaaaaataataacaaactgcctaaattttattagcttgcctgtagcttgaaaactacytaatcatacaaacaaatagaaaaatgataaacaagtaagtagatagataaactaaattacataaaatagcagtcagtaacagaaacacctcagattctaatattcagtttacattaaatcaccctaattaaacatgagaagtatatatatatatatatatatgagttatatatggggtgtatatatatatatgtatacacacacatatgtatatataagtgtatatacctatactgacatattatatatgttcaacacaagggtcttccctatacatagagactattatataagtccttttatgtcaattgcttttttcctatacatactatacttatgtatt

SEQ ID NO: 12973 - DNA, 649 bp, Homo sapiens
cgccttggtgtctccaggaagaaatggttttctgcctgatgtggactgcagagctggccaagcagcccgccatccacgaacactttcacatcctcccaactctcttcccggatttagcttgtgccacctctgggggttcccagttccacataagtttacttcctgctgtgtaaatagcacttactttcatttgtgctacagtttcttttggctgccttcaggggctccccttctctcttgttgtgatttcagggacttggagatgaaatccrcatgttaccctatggcagccttaagggagagggggattcacaattgggatgtccccccatcactttttcctttctgtcctgggatccaggtagatatttcatctcacttcagaaagacaatcccttaaagaaggaacaacaggccatccatctggttttcccaaggccgggaccgtgttgtctccagcccccttgcaataatgcctggctatctggctgtttgttttggccaaaccagcatacaggctcaaaacctttaagggaacatttctaacagcgccttagatttactgggttatgtcagagcactggcaactccccatttgtggatatgactttattttcccctaaatgtgtgtccttgcatatccagggta

SEQ ID NO: 12974 - DNA, 649 bp, Homo sapiens
cgccttggtgtctccaggaagaaatggttttctgcctgatgtggactgcagagctggccaagcagcccgccatccacgaacactttcacatcctcccaactctcttcccggatttagcttgtgccacctctgggggttcccagttccacataagtttacttcctgctgtgtaaatagcacttactttcatttgtgctacagtttcttttggctgccttcaggggctccccttctctcttgttgtgatttcagggacttggagatgaaatccacatgttaccctatggcagccttaagggagagggggattcacaattgggrtgtccccccatcactttttcctttctgtcctgggatccaggtagatatttcatctcacttcagaaagacaatcccttaaagaaggaacaacaggccatccatctggttttcccaaggccgggaccgtgttgtctccagcccccttgcaataatgcctggctatctggctgtttgttttggccaaaccagcatacaggctcaaaacctttaagggaacatttctaacagcgccttagatttactgggttatgtcagagcactggcaactccccatttgtggatatgactttattttcccctaaatgtgtgtccttgcatatccagggta

SEQ ID NO: 12975 - DNA, 649 bp, Homo sapiens
cgccttggtgtctccaggaagaaatggttttctgcctgatgtggactgcagagctggccaagcagcccgccatccacgaacactttcacatcctcccaactctcttcccggatttagcttgtgccacctctgggggttcccagttccacataagtttacttcctgctgtgtaaatagcacttactttcatttgtgctacagtttcttttggctgccttcaggggctccccttctctcttgttgtgatttcagggacttggagatgaaatccacatgttaccctatggcagccttaagggagagggggattcacaattgggatgtccccccatcactttttcctttctgtcctgggatccaggtagatatttcatctcacttcagaaagacaatcccttaaagaaggaacaacaggccatccatctggttttcccaaggccgggaccgtgttgtctccagcccccttgcaataatgcctggctatctggctgtttgttttggccaaaccagcatacaggctcaaaacctttaagggaacatttctaacagcgccttagatttactgggttatgtcagagcactggcaactccccatttgtggatatgactttattttccyctaaatgtgtgtccttgcatatccagggta

SEQ ID NO: 12976 - DNA, 698 bp, Homo sapiens
ttctccactttaaacagtatctgatttccagtagaagtcagactgcctatcccctgtcatgactatagcatgcctccctgacagccttatattccatactgggaaagtagcacccaaattcttccaactggctggagaagctgtaataggaatacgtcataacttggacctgctcagctgcaaggcatgctggaatcttggcagctggtcagtgaggagcaagaaaagttttctagcatgggttacctggataaagggatgaggacatgacccaggaagtaaaaaggaaaggggggcattgatgaatagcatccccactctactgctatttgtactgagaaatgcccctcttctgctggagaaagacacagcatatgtccatgggatgctgagggaatatttgtgaacaacttgttgacaacaagccaagagttaacaccamgaggattgagaaaagcctatgtagtggttaaatgtgtaggctctgggtttaaatcccaggtctactacttattagctgtgtgaccttgggcaaatcattttatttctcaaggtttcagtttcctcttgaggaaagtggagataaaaataatatgtgggccgggcacagtagctcatgcttgtaattccagcactttgggaggccaagggaggtagatcacttgagcccaggagtctgagacaagcctgggtagaaa

SEQ ID NO: 12977 - DNA, 675 bp, Homo sapiens
tacatctctgatagccattgggttgtttctattttcattatttggtgtttatcatataaaagcctatgatgctgtgtagccatggcataaaatatttcaggattttttttactctatctatatccacaatttttttttttaatttgccaattagaatgatatgtgggttagtttgtcttaggrggtaaagatgtgttttaattaaaatgatcacaattgtttccatgcaaacataggaataactttaaattacatagatagcagttttattgaaatattttcagaaactagcaaaaataaaataaaacagatggcaagaaattatcagtaataaagtcaattagaaaaaatctttatgattaataatttaattgcttgatatgttaagcctttaacttgccaaccatttcaaaataattcatgatatttacatataattaccttaaagctttacactactgaacttccattaagaatcacatgtaaaacagcatctctaatccaacatcaccaaagaatgaaagaattatctatttgatgtgtggatttgccaggtaactaaacctacaggccaactttcagagaccctttaatagaaacaattctaatactaattaaatagtttataagttcagcttgtccaaatttcaagtcctttaaaaatcatatgaaatg

SEQ ID NO: 12978 - DNA, 628 bp, Homo sapiens
aaaagcctgtaatattactggaaatactccaaaatgtctaacaaggcagtgtttttttaactgcctccaaagatagttagcattacaaccttggttttagttggtttcaaatgttgtgtcaatgcaagggaaattccctgaggcattacttgaatagttaaataaaaaataccctgaattaattaacctacataaatgtgccctgatttggctactaatctttctcaaaaatattatctaagattttcttttaaaaaaaagatgtttatcttcaaaatgaacaatagaaaatagactctaaaatagagaacagaactatcaataatcacaactaatttctgatactatttataatagatgcacaaattgtcgcagcaaaaatacaatttgcaaaacctatggagasagttgggttatgtggaagagtgggaggtaagggatcttgattctcaagatcaaaatgaaagtgaggccagctaggaagagacactgtcatagccacaggatccagttgcttcacatggccccatttcctagaagttgagcagttgccatgagggccatcagcagacgaagagagcagaggaattcctgtccaactcatctttttaaaaggatttttttgcgg

SEQ ID NO: 12979 - DNA, 532 bp, Homo sapiens
tgtctgagttcttcccagggaccccatcagggctagagtgaattaacatccttagaggcaggcaggttggaagtgaaatgttcattctttggcatctcattgatttggttcctattaagaagaaaatttcataattgaaatctagaagaagaaatatttttctgaaagtatgtccttctccatagcacttctctagtccagtgtccttagactacagttggattatatgaattaaggcctccaaacagataatcactgtaccttctccttcatggacagacaagacatataatgatgcttctcataccrtttcactcaatggaacaccattttatcacttatattctcgtgaaaattttccagagtgactcattatgacaaatccatggaccccaatcaatgggaagtggctgctttcaggtaaggggaggcataaagtctcagggtccatttctcatctcctctggacattgggctggggagataagaggtgcctgccatctatttgctaccactatgcactcattcactc

SEQ ID NO: 12980 - DNA, 517 bp, Homo sapiens
caagaataaatttttcttatctgttgtataaaaatctgaattaatccatatggactcctgaaggaatttcagctcaatttcaagtctcatggattgagactatttttacttactttgtcatagaccagtctgtgttgtaaattctaatttatataatatttactttttgcaatttcatgaagtgttgcaaaataagtatcagaacaagaacgtactttstttgatgcttatattgcataatacaacgagccttatctccataagtgtttgttgaataaataaaataatgaaacagagtaagtcacaaaactgaagtaaaagtgtaggttttgtcacaagctaaaattgaatgggactgaagtagcaaaatgttgagctgtaagtacttgctggataagcagaattgacttcttagttaattattttgtgctaaacgtctgtgatcttcttcccagctactggctcttctttctgtttttgttttgataatttattttcttttttgtaaatgctattg

SEQ ID NO: 12981 - DNA, 636 bp, Homo sapiens
tataacagtgtttatagagaaatccataacwgtaaacacttatttttttttaaacaagacatctcaaatcaagtctcacctttcatcttaagaaactagaagatgaccatagtaaatcaaagtaagcagaaggaaggaaataatagattagaaaggaaagaaaaaacataaagacttgaaaaacagtagagaaaacaacaaaactagaagttggttctttgaaaggattagcaaaattgacaaacctggaatcagattgaaagaaaagataccactactgtttactgaaaaagcaatccttactgaatgcttttgtaaagcgattggttatcccaatagaatatacatcactttacacctattttttgtgtgaacattctgttatgtaagcattcgaacattgtttttctccaaaaagtgctttccacgaattgtttcatcctcgtgacattcttagaatgcagaagctgttgtatttagtaaactgtaatcattaagaacttgtatttgattcaggcagatctgagttgtggatccagttcaatatccttttttagattttgagaaagtcacttatcccatttttacagatgaagcagcaggctgagagtcataagcacaagtaaatacttaccc

SEQ ID NO: 12982 - DNA, 636 bp, Homo sapiens
tataacagtgtttatagagaaatccataactgtaaacacttatttttttttaaacaagacatctcaaatcaagtctcacctttcatcttaagaaactagaagatgaccmtagtaaatcaaagtaagcagaaggaaggaaataatagattagaaaggaaagaaaaaacataaagacttgaaaaacagtagagaaaacaacaaaactagaagttggttctttgaaaggattagcaaaattgacaaacctggaatcagattgaaagaaaagataccactactgtttactgaaaaagcaatccttactgaatgcttttgtaaagcgattggttatcccaatagaatatacatcactttacacctattttttgtgtgaacattctgttatgtaagcattcgaacattgtttttctccaaaaagtgctttccacgaattgtttcatcctcgtgacattcttagaatgcagaagctgttgtatttagtaaactgtaatcattaagaacttgtatttgattcaggcagatctgagttgtggatccagttcaatatccttttttagattttgagaaagtcacttatcccatttttacagatgaagcagcaggctgagagtcataagcacaagtaaatacttaccc

SEQ ID NO: 12983 - DNA, 636 bp, Homo sapiens
tataacagtgtttatagagaaatccataactgtaaacacttatttttttttaaacaagacatctcaaatcaagtctcacctttcatcttaagaaactagaagatgaccatagtaaatcaaagtaagcagaaggaaggaaataatagattagaaaggaaagaaaaaacataaagacttgaaaaacagtagagaaaacaacaaaactagaagttggttctttgaaaggattagcaaaattgacaaacctggaatcagattgaaagaaaagataccactamtgtttactgaaaaagcaatccttactgaatgcttttgtaaagcgattggttatcccaatagaatatacatcactttacacctattttttgtgtgaacattctgttatgtaagcattcgaacattgtttttctccaaaaagtgctttccacgaattgtttcatcctcgtgacattcttagaatgcagaagctgttgtatttagtaaactgtaatcattaagaacttgtatttgattcaggcagatctgagttgtggatccagttcaatatccttttttagattttgagaaagtcacttatcccatttttacagatgaagcagcaggctgagagtcataagcacaagtaaatacttaccc

SEQ ID NO: 12984 - DNA, 636 bp, Homo sapiens
tataacagtgtttatagagaaatccataactgtaaacacttatttttttttaaacaagacatctcaaatcaagtctcacctttcatcttaagaaactagaagatgaccatagtaaatcaaagtaagcagaaggaaggaaataatagattagaaaggaaagaaaaaacataaagacttgaaaaacagtagagaaaacaacaaaactagaagttggttctttgaaaggattagcaaaattgacaaacctggaatcagattgaaagaaaagataccactactgtttactgaaaaagcaatccttactgaatgcttttgtaaagcgattggttatcccaatagaatatacatcactttacacctattttttgtgtgaacattctgttatgtaagcattcgarcattgtttttctccaaaaagtgctttccacgaattgtttcatcctcgtgacattcttagaatgcagaagctgttgtatttagtaaactgtaatcattaagaacttgtatttgattcaggcagatctgagttgtggatccagttcaatatccttttttagattttgagaaagtcacttatcccatttttacagatgaagcagcaggctgagagtcataagcacaagtaaatacttaccc

SEQ ID NO: 12985 - DNA, 600 bp, Homo sapiens
tcccagaaaagaaataatttatctgagcaaaatcttatagttgttaggaagcagtagagacaaaacttaaaccttgattttctagtctaatctaacaccctttccactatagtagagtctgtctctgtcttgtaccctactttgtggttacttctaactgccttcagatgtgggtcccttagcaaaaaaagtagaatctctgctgtttcacaaaagcagaacaattagaagatactcgagttgacaagagtcttagagaatatctggtgctatccttttgctttaagatgagaaaatcaaggcccagaaaggatgacttgttgagatgagagccagcatcagaatctagacctcatttttggtctttctgcttctctctgacatttcatcagaaatgttttgcctccaaactcctgacattgtatgtatttacttgacctacatttgctcatcacttgttatgggacattactcactggggaaatgaagatttataatacaggaactctgtattytctaggaaagatagatgcataaataattatacttgctaaattggaggtttacacagatgaaacggattggcaaagaagccacaat

SEQ ID NO: 12986 - DNA, 1303 bp, Homo sapiens
acacacacacacacacacacacgcacaacactgattggtcctagaaaaagaaacaaaataattttttaattattattaccaatatgtaccatctacttgagaggctttccttcaatctaatgaatcaaaattgtaaaatattttaaagtgaaaggggtataaagaaaattatgtttaaaataagtatgataaagtttttgtttacttcaaattctgggacacttgttatatgctaggtcttggggaagcataaaagaattaaatttaaaaatctggccataaatagrttacagtctcaggcagaaacaaaaacataaaacactatattaccaagctttgcaaagtactgggacagagatttatacaggaggccaagtcacagagtctgagattagaccagcaggactttctccattcaggctagaaggcaaagattgggaaaagggttttcaagatagaacagcataaatgatacaagaaaaaagcaatgcaatgtggattgttttgagaaataggagatgttgaatactgccagcaaataaaatggagagaaaggggaatattctcatggatgggcaagagagatacagacaacagcccaaaaggaacggcagaagattaatatagaacaaaagtagaaggtatatgaacaagagactcatagtaaagcctggtctttatctataagcagtagaaagacagggatgggagggttttagattaaaagcaatgggttcatcagggtggaagattgacccttctaaaagtaatgcagcaggctgggcgtggtggctcacacctgtaatcccagcactttgggaggccgagacaggcagatcacctgagctcaggagtttgagaccagcctgactaacatggagaaaccctatatttactaaaaatacaaaattagctgggaatggtggcgcatgtctgtaattccagctactcgggaggctaaggcaggagaatcgcttgaacccaggagacggaggttgcagtgagctaagatcgcgccattgcactccagcctgggcaacaagattgaaattccatctcaaaaaaaaaaaaaaaggagtagtgtagcagctggactactagtagaacaaatatgactctagggcagtgagatccatgaggaggctaatattaatatttcaagctaaattcattcacattgcttcaatagatacttaacacataatacaaaaggtgccattttcattttgtataatatacctgcatataaaatattatttataaatatgataaccaatgtcaggatggactacagagccaaaaa

SEQ ID NO: 12987 - DNA, 1303 bp, Homo sapiens
acacacacacacacacacacacgcacaacactgattggtcctagaaaaagaaacaaaataattttttaattattattaccaatatgtaccatctacttgagaggctttccttcaatctaatgaatcaaaattgtaaaatattttaaagtgaaaggggtataaagaaaattatgtttaaaataagtatgataaagtttttgtttacttcaaattctgggacacttgttatatgctaggtcttggggaagcataaaagaattaaatttaaaaatctggccataaatagattacagtctcaggcagaaacaaaaacataaaacactatattaccaagctttgcaaagtactgggacagagatttayacaggaggccaagtcacagagtctgagattagaccagcaggactttctccattcaggctagaaggcaaagattgggaaaagggttttcaagatagaacagcataaatgatacaagaaaaaagcaatgcaatgtggattgttttgagaaataggagatgttgaatactgccagcaaataaaatggagagaaaggggaatattctcatggatgggcaagagagatacagacaacagcccaaaaggaacggcagaagattaatatagaacaaaagtagaaggtatatgaacaagagactcatagtaaagcctggtctttatctataagcagtagaaagacagggatgggagggttttagattaaaagcaatgggttcatcagggtggaagattgacccttctaaaagtaatgcagcaggctgggcgtggtggctcacacctgtaatcccagcactttgggaggccgagacaggcagatcacctgagctcaggagtttgagaccagcctgactaacatggagaaaccctatatttactaaaaatacaaaattagctgggaatggtggcgcatgtctgtaattccagctactcgggaggctaaggcaggagaatcgcttgaacccaggagacggaggttgcagtgagctaagatcgcgccattgcactccagcctgggcaacaagattgaaattccatctcaaaaaaaaaaaaaaaggagtagtgtagcagctggactactagtagaacaaatatgactctagggcagtgagatccatgaggaggctaatattaatatttcaagctaaattcattcacattgcttcaatagatacttaacacataatacaaaaggtgccattttcattttgtataatatacctgcatataaaatattatttataaatatgataaccaatgtcaggatggactacagagccaaaaa

SEQ ID NO: 12988 - DNA, 512 bp, Homo sapiens
ctttcaggcctcagtgattaattatttctgtgcctgacatcaccataacaggccacccagaaattctgaatacagaaagatgcagcctatttaataatggtagtgagttttaagtggcayattgaaggggattttagaatcttttcttttcttgctaactttaaaatgatagcagttgaaaaaatgttatataactaactaggctcctttctgcctcagaaacaagttttattgagatgtctgacataacaggctgatcatttgcctatggttcctagagttatagaggcagaagaagcccacagtgctctctccacaatcacccactgacccatgtgtcttgcaccaaatttcaactgataatttctttttctgtcatgtgtctgtattatgaaaatgtttgtccttcttcatttagattataagcagaaatcagggcagattgcattgatgattctaattctctactgcaatttgagtccttttactgctcactcttaccctttccccac

SEQ ID NO: 12989 - DNA, 552 bp, Homo sapiens
agagaaataaattagtggcataaacataagaaaagaaaatgtaaaaccattttacttctattacacataccatggaaatatatctgaaaaatgctaaagaataaataataaaattcaacttttatgatgatgattaatgatacttcaaacaataaaataatttgtaaatgtagcaagatataaaatttgcatacagaaatcagtagtttcacatacacaaattataaccagtagaggktataatgattgagaaatgccattcacaatgaagaacataaaaatagttataaatctggctgggtgcagtagcccacacctgtaatcccagcactttgggaggccaaggctggtggattgcttaagtccaggcatttgagactaacctgggtgacataggaaaattctgtctctactacacattacaaaaattagcagtcatgctagtgtgcacctgtagtcctagctacttgggaggctaaggtgggaggatcacttgaactccagaggcggaggttgcagtgagccacgatcatgccactgcactctagcctg

SEQ ID NO: 12990 - DNA, 521 bp, Homo sapiens
aaagaatttcatcaataccttcaaattaaataaaccagcatctggttgaaaaaaaaaaatcacttacctggaaggagaaacmaaagaaacatcctcaaattctaaagcttcattcaaaattcaaggtaaggaaaccaaatttccacaatatgatcccttaaaatcaccaagaatgttcaaaactacatttgataacaacagctcacacaactacttggctctcctagattcctaagaccctaaccagctaatagacgtctgtggacatattcaattctgcaaagctgcaaaatatctgtgagaagatggtttttgaataggactttttactatagctatatactatttagttcagtaaactgggtagaaagcattgaagcaaactcgtaaccattgaacaacaaactttagtttgccaaaactgcttagggactggattaagggaaggctctcctgttatttttatctctttgcctttggtgctctcagctttctgtagctaaagtagctttcaaaaatct

SEQ ID NO: 12991 - DNA, 521 bp, Homo sapiens
aaagaatttcatcaataccttcaaattaaataaaccagcatctggttgaaaaaaaaaaatcacttacctggaaggagaaaccaaagaaacatcctcaaattctaaagcttcattcaaaattcaaggtaaggaaaccaaatttccacaatatgatcccttaaaatcaccaagaatgttcaaaactacatttgataacaacagctcacacaactacttggctctcctagattcctaagaccctaaccagctaatagacgtctgtggacatattcaattctgcaaagctgcaaaatatctgtgagaagmtggtttttgaataggactttttactatagctatatactatttagttcagtaaactgggtagaaagcattgaagcaaactcgtaaccattgaacaacaaactttagtttgccaaaactgcttagggactggattaagggaaggctctcctgttatttttatctctttgcctttggtgctctcagctttctgtagctaaagtagctttcaaaaatct

SEQ ID NO: 12992 - DNA, 484 bp, Homo sapiens
aaagaaagaaagaaagaaagaaagaaagaaagaragaaagagagaagaagaagaaggaaggaaggaaggaaggggaagggaaggaaggaaggaagagggaaattagttagaaaaaatatcttgttcccgactgcttcagaaatttaacaaaaaggaaatggtaaagtaagaaaagggaaagcaggaaaaagaaaacgtggaaaatcagaaggtgaagaaaaaagagccaggtatataagaagagtggcaccaatgaagagaacttgaggggagtaaaaatcccctgtatacagagaaataaataagaagagagaaatccaaagagaaggagagggaggcatgaaatgaaataagaaacagaggagagaaggggcctcaggaagcttggaatggctttagttggcttgtgaatttcagaggaaactaatatctattatttttcccctttgaaattctaatctgataattaaccattattaacaat

SEQ ID NO: 12993 - DNA, 484 bp, Homo sapiens
aaagaaagaaagaaagaaagaaagaaagaaagaaagaaagagagaagaagaagaaggaaggaaggaaggaaggggaagggaaggaaggaaggaagagggaaattagttagaaaaaatatcttgttcccgactgcttcagaaatttaacaaaaaggaaatggtaaagtaagaaaagggaaagcaggaaaaagaaaacgtggaaaatcagaaggtgaagaaaaaagagccaggtatataagaagagtggcaccaatgaagagaacttgaggggagtaaaaatcccctgtatacagagaaataaataagaagagagaaatccaaagagaaggagagggaggcatgaaatgaaataagaaacagaggagagaaggggcctcaggaagcttggaatggctttagttggcttgtgaatttcagaggaaactaatatctattatttttcccctttgaaattctaatctgataattaaccmttattaacaat

SEQ ID NO: 12994 - DNA, 541 bp, Homo sapiens
gacagccctcatatgtgaactgggatgttattaatgagctgtggtgtgggccaggctcctgaagaacaagaaggcccacaatttaggtaygtctctggtagaaggagacagatgatgaagctcttatcaaattcatgtgtatatgtctcttgcccttccgatggagaagtcatgttggggtcttgcttttggcttgaacatattgaagcttagttaaatttacagctggagcacaagaagcttttatgataagcacggggcttttcctccagggcaccgtcacgtcatgtgacagtctctttgctcatcttcacgggtacgtgtctggggaggacgtggctgggcagcatatcacagacctgatcccttctgtgcagctccctccttctggccagcacatcccaaaggtagggctcctgacctcccgcactgtgtgatggggtggagttcttagctctgaatccataactggagacgcagaccaagggtttctgaaggcaagggtggccttaggggtgggacatgctcagttttgagcttc

SEQ ID NO: 12995 - DNA, 541 bp, Homo sapiens
gacagccctcatatgtgaactgggatgttattaatgagctgtggtgtgggccaggctcctgaagaacaagaaggcccacaatttaggtacgtctctggtagaaggagacagatgatgaagctcttatcaaattcatgtgtatatgtctcttgcccttccgatggagaagtcatgttggggtcttgcttttggcttgaacatattgaagcttagttaaatttacagctggagcacaagaagcttttatgataagcacggggcttttcctccagggcaccrtcacgtcatgtgacagtctctttgctcatcttcacgggtacgtgtctggggaggacgtggctgggcagcatatcacagacctgatcccttctgtgcagctccctccttctggccagcacatcccaaaggtagggctcctgacctcccgcactgtgtgatggggtggagttcttagctctgaatccataactggagacgcagaccaagggtttctgaaggcaagggtggccttaggggtgggacatgctcagttttgagcttc

SEQ ID NO: 12996 - DNA, 1119 bp, Homo sapiens
cagccagagagygtctcaaaggcatgtgtgcggcacagcggcctgcaggttgtaagtgcccactaaatggtggctgttgaggtaattaaccagcaaaactgagatcctgacattctcacttttcagtaagtatttgtcttgatctgtttcgtgtctaattacatattgaacttcggccattattttattggaatgggagagtgatgatccaaataggaaggcaccctagcagagggacagggggaagaaacggtaactcgtgttgggttttaaggagagggtggcggttccatcctgtactgctcccagctcccccagaagaactggagaaataccagcaaagggctgtgtagacaactcacatttgctcttggattgtttgctggggacaactcgatttctaatgacagcttccgtgaatcaacatttcttccttaaagctacacactctcgggttgttgggtttccgaagtttagtttctcaggctcctacttgtaagtttcagatattatggttctgcaaaaaagggtcacctctctccctcttcctgtgttggaaggtgacgtcctccctttagtttgtggccaacacttgtttctgaaactttttacagcaaacagagtatctgtatgaggttatgttgagggtcgcttgttaaaagctgctgcctgacagctgttaattctggggctagtgagacacataattatggtgtttatactctaaaatttttgccaaaagaatctctaccccttttgtaaatatatagacataaatgttattctatgtaaatacagatgcacaattttataaagtatatgatcgcacatcaatgtatgtaggaatcatgctggttctcagggcattgcctgtcagctccagattcatcaggacctgctcagcagcggggtcggggagctgggcctgggaacagccctggcttggttcaggccgctccagggcagcatggccagtccagggcacagaagcatctgcaggaagagcagctttcttcaagtcgctctttagccctttgtggttaatctctcagtactagttaataaatcttaatgaaactttccatgttcaagttcatgtgtgatttctgtctcctgatt

SEQ ID NO: 12997 - DNA, 944 bp, Homo sapiens
catccagtgtccacctcatctcaaggccagatcctccttccctaccctgaccctgtcaacttctgagcctacaaagttccttgtcccaggctgggagaggaggcaggagtgggagaggtgaggagagagagttagttcatttgtttgtttgttctaggggctcttttagaaaggcaagaaagcttgcttcccaaaaaaactttttcttttgtcatattgccctttctgaaacgatgggctgggaagggcaacatactgattcatttcagcctgaaccgcatgcctccttacacacacacacacacacacacacacaccagggacggaatcaccttccccgagtctgtggctgaatgggtgaggtgaagatgaagtaaaacccagatagccaaccgaaagatagtgaggttgggagacgagcacaagcccacttcacttatgtgaacctgggtcttctcaaactccagctcatcttcaggggccctgactgaacatcacctcctctgggaagcccttccaatacctcccagatagaaaactctatcctttgtgcacccacacaccacctgtactcacccatccatccacccgcccacctactttgttcctgggtgttaggggctgagtactccattgtgaaccagagatttctaccctgatggtgttttcagtctgcacaggagagaaaagttaaatgatcacaccaattgatgccttgcttctctactaagcacaatkaagagaaatgagggagagcgggctggggaatatcagcatgtgtctgggactcaacctggtggggacgggaagagggggtgaaggaagcctttcctgagaaagtgggggaagggcgctctgctgtggctttccctgcatcttggccttcctaccctctgcctcggcttcctccattgctggaaaagcctccacaagcgcggtggagg

SEQ ID NO: 12998 - DNA, 529 bp, Homo sapiens
agctctggagcagtgtggtcctaccaataaatcaagtgttggaggagtctagactaggggctttttagacagttctgctaaaccttcaaatgttttgttatcctcccctccccacccctactttgtactagtatgtaggggaaccaatccaagagataacagacagatgacaggttcccccaagaacacagactccccacagtctcaccaataccyaggcatgccaggttcttcctgagttaaatgcctaggaggcctgaaagaataaattcatcctggagaagtcttgtgggtcgtagctttagaaattcagggaacatatctctggggccacccaatggagaacacagcctgtatcagaaccttagcagagactttgggccttttggggtctcaaatttatcatctctgaaacaagtacaacgaaattaacattgccacatgtgggcactataaagcctttttcagataaaaaaaaaggtcagtgatagtgctaataataacagtgattatgtcatttaataaaacg

SEQ ID NO: 12999 - DNA, 529 bp, Homo sapiens
agctctggagcagtgtggtcctaccaataaatcaagtgttggaggagtctagactaggggctttttagacagttctgctaaaccttcaaatgttttgttatcctcccctccccacccctactttgtactagtatgtaggggaaccaatccaagagataacagacagatgacaggttcccccaagaacacagactccccacagtctcaccaatacccaggcatgccaggttcttcctgagttaaatgcctaggaggcctgaaagaataaattcatcctggagaagtcttgtgggtcgtagctttagaaattcagggaacatatctctggggccacccaatggagaacacagcctgtatcagaaccttagcagagactttgggccttttgrggtctcaaatttatcatctctgaaacaagtacaacgaaattaacattgccacatgtgggcactataaagcctttttcagataaaaaaaaaggtcagtgatagtgctaataataacagtgattatgtcatttaataaaacg

SEQ ID NO: 13000 - DNA, 529 bp, Homo sapiens
agctctggagcagtgtggtcctaccaataaatcaagtgttggaggagtctagactaggggctttttagacagttctgctaaaccttcaaatgttttgttatcctcccctccccacccctactttgtactagtatgtaggggaaccaatccaagagataacagacagatgacaggttcccccaagaacacagactccccacagtctcaccaatacccaggcatgccaggttcttcctgagttaaatgcctaggaggcctgaaagaataaattcatcctggagaagtcttgtgggtcgtagctttagaaattcagggaacatatctctggggccacccaatggagaacacagcctgtatcagaaccttagcagagactttgggccttttggggtctcaaatttatcatctctgaaacaagtacaacgaaattaacattgccacatgtgggcactataaagcctttttcarataaaaaaaaaggtcagtgatagtgctaataataacagtgattatgtcatttaataaaacg

SEQ ID NO: 13001 - DNA, 1199 bp, Homo sapiens
aatgggtcacagttggaaaaatcctataatcacagatcatggctgacatctcagatccttcctaactcacagatcagattagttcataaacacttattaaaaatttgagggccggatgaaatggctcacgcctgtagtctcaacagtttgagaggccaaggcaggtggatgacttgaggtcagaagttcgagaccagtctggccaacgtgctgaaaccccatctctactaaaaatacaaaaattagcckggtgtggtgcctgcacctgtagtcccagctacttaggagcctgaggcaggagaatcccttgaacccgggaggcggatgttgcagtgagctgagattataccactgcactccagcctgggtgacacagtgagactctgtctcaaaaataaataaataaataaataaattttgagagccccaaacaggtcagacgctgtgctagatgctaagaataaaacaatgaatgcaatgaatgagactgggtctctgcctttaatggctttacattgtcatcatctataattttaatagagagacactaaggcagagatacgcagtggctgctctgggtacacagtggataggggattgaaagaataaaaattaaccataattgataacatttattaagctttaattgtgtgctaatctctttgaatacttaattcacctaatccttacaaccctatgaagtaaatgttatactcatttttaagaaaaggaaattgagcttcagaaagattaaataattttcccagagtgacacacacagccgagaaagaaatatagccttgaactgtttcattccaaaatctatgcttttactttattttagtagagttttgtaggtgactcagtttatgacttgtttctgaagctagctacttgctcaatttacccacaaaggacaaggtgcttggtattttagttctcaaagttagatatgctctactcccagctacacatcatctgcccctctacagctcaatggaaaggttccccctacccgctggggccgttacctgactgttgccaaactcactggttaaatcatttggacagagcatggttggctctggaatagcaaattttctatgaatatactggcattacaaaaagctgatttggtcaccagctttcagatttatttccgtgaacagggcgagagttgtcaaaagaataagctcatg

SEQ ID NO: 13002 - DNA, 510 bp, Homo sapiens
acagccttcaagcaagacaaggtgtccatttaccacagctatattgtacttaacagatctccattgatagcttatttgaatttgtttttctctatataaatgtttagcctagaggaatcagggacatttatttttctctgaatttatggtgagttagtagagagtcctgtttacaaagacatagttacaaccagagatatatggccactgaggttaaagtggttaaatgatttgctggcattcacacaactagtatgtgttgtatgaaggcctagttaattccartacctttacttattatggtgctggtgctttgcatgtaacacttcatattaggaaaatgcttgttttcagaattctattattgaaacatctttggaagttgaatttcctgtttaatattcagcactgctagcaactaattatctgaattttaagaaggaaattctgccttggcaactccagtctacttttaaatgggcctatacttggatttcggcttggggaatt

SEQ ID NO: 13003 - DNA, 1057 bp, Homo sapiens
ttttttttttttttttttttgagacggagtctcgctctgtcgcccaggccggactgcggactgcagtggcgcaatctcggctcactgcaagctccgcttcccgggttcacgccattctcctgcctcagcctcccgagtagctgggactacaggcgcccgccaccgcgcccggctaattttttgtatttttagtagagacggggtttcaccttgttagccagratggtctcgatatcctgacctcatgatccacccgcctcggcctcccaaagtgctgggattacaggcgtgagccaccgcgcccggccatcttagcccctttcttgctgacattattttaaatcattttgggggcttctaagctatagtgtttgaggagggaggtgcaaatgaagaaacaatttcacccttggcttcccttcatattcccacctgagggtgagcgcttggggaggaaggcttgaggagggggaaaggtaaacaggaagttggaagatgtcctaggaggcagtttagggctcctcagggtggggggaagatggagcggggtggttgggaaggggaaaacaaaatgaaagccccctgaacacaccgttcattttcctataattgggtctttgttatgtttccttgtgtatttacacccatcctttaagacctagattcagtgttatctgttttctgtaaatgtcctagacccctccgccaaccaccctgtcccagcccactccccaccaggacaaaattaattgctatcttatttatgttctgaaatctctgttaaatctaatttttctaataattatctctctgaatcatgtgcctgcttccctcaatagattctgagtactttaaccacagggtatatatactttttcacctttgtatttccagtacctggcatataagcaacttctcaataaatgtttacaaaatggaattataaaaaccctaaaaatagcaatgaaggcccaggttttcgctctaggtattgctatagcagattgttttttctccttctgaatttttgttcataataataaaatatatatatata

SEQ ID NO: 13004 - DNA, 1057 bp, Homo sapiens
ttttttttttttttttttttgagacggagtctcgctctgtcgcccaggccggactgcggactgcagtggcgcaatctcggctcactgcaagctccgcttcccgggttcacgccattctcctgcctcagcctcccgagtagctgggactacaggcgcccgccaccgcgcccggctaattttttgtatttttagtagagacggggtttcaccttgttagccagaatggtctcgatmtcctgacctcatgatccacccgcctcggcctcccaaagtgctgggattacaggcgtgagccaccgcgcccggccatcttagcccctttcttgctgacattattttaaatcattttgggggcttctaagctatagtgtttgaggagggaggtgcaaatgaagaaacaatttcacccttggcttcccttcatattcccacctgagggtgagcgcttggggaggaaggcttgaggagggggaaaggtaaacaggaagttggaagatgtcctaggaggcagtttagggctcctcagggtggggggaagatggagcggggtggttgggaaggggaaaacaaaatgaaagccccctgaacacaccgttcattttcctataattgggtctttgttatgtttccttgtgtatttacacccatcctttaagacctagattcagtgttatctgttttctgtaaatgtcctagacccctccgccaaccaccctgtcccagcccactccccaccaggacaaaattaattgctatcttatttatgttctgaaatctctgttaaatctaatttttctaataattatctctctgaatcatgtgcctgcttccctcaatagattctgagtactttaaccacagggtatatatactttttcacctttgtatttccagtacctggcatataagcaacttctcaataaatgtttacaaaatggaattataaaaaccctaaaaatagcaatgaaggcccaggttttcgctctaggtattgctatagcagattgttttttctccttctgaatttttgttcataataataaaatatatatatata

SEQ ID NO: 13005 - DNA, 523 bp, Homo sapiens
ggctgcctaagacggggtttattaatcaacctgatgcaatagctctgtcattagtgctcttgttatcaggcaagaaaaggctgtgtacaggatgggtatcagtatgcttctgagtgttaggggaaaaaatggaatggtattgttaatattttagcatttaagagactctggaacttcaggaattatgttaaaatttcagaaacagagttttagaagggtgacttgtttgttgattgtacaatccaaaagaaaaaagcaggactttgtggaattcatagtcagttttctgaagcaggtatcagtagttggcttctgagacaagggcagaaacaccatgttggcataaaagagttgatgagtggaacaccaagttggttggctcyggttgacattttccttggtagaatgtggtgtgtgaaaattatacatatttttcagaacaggccaaatacgtatgttttatgtcaaaacataggtcatatgtttctgttttatctgagggttatcacaaaactttaccttt

SEQ ID NO: 13006 - DNA, 523 bp, Homo sapiens
ggctgcctaagacggggtttattaatcaacctgatgcaatagctctgtcattagtgctcttgttatcaggcaagaaaaggctgtgtacaggatgggtatcagtatgcttctgagtgttaggggaaaaaatggaatggtattgttaatattttagcatttaagagactctggaacttcaggaattatgttaaaatttcagaaacagagttttagaagggtgacttgtttgttgattgtacaatccaaaagaaaaaagcaggactttgtggaattcatagtcagttttctgaagcaggtatcagtagttggcttctgagacaagggcagaaacaccatgttggcataaaagagttgatgagtggaacaccaagttggttggctccggttgacattttccttggtagaatrtggtgtgtgaaaattatacatatttttcagaacaggccaaatacgtatgttttatgtcaaaacataggtcatatgtttctgttttatctgagggttatcacaaaactttaccttt

SEQ ID NO: 13007 - DNA, 523 bp, Homo sapiens
ggctgcctaagacggggtttattaatcaacctgatgcaatagctctgtcattagtgctcttgttatcaggcaagaaaaggctgtgtacaggatgggtatcagtatgcttctgagtgttaggggaaaaaatggaatggtattgttaatattttagcatttaagagactctggaacttcaggaattatgttaaaatttcagaaacagagttttagaagggtgacttgtttgttgattgtacaatccaaaagaaaaaagcaggactttgtggaattcatagtcagttttctgaagcaggtatcagtagttggcttctgagacaagggcagaaacaccatgttggcataaaagagttgatgagtggaacaccaagttggttggctccggttgacattttccttggtagaatgtggtgtgtgaaaattayacatatttttcagaacaggccaaatacgtatgttttatgtcaaaacataggtcatatgtttctgttttatctgagggttatcacaaaactttaccttt

SEQ ID NO: 13008 - DNA, 523 bp, Homo sapiens
ggctgcctaagacggggtttattaatcaacctgatgcaatagctctgtcattagtgctcttgttatcaggcaagaaaaggctgtgtacaggatgggtatcagtatgcttctgagtgttaggggaaaaaatggaatggtattgttaatattttagcatttaagagactctggaacttcaggaattatgttaaaatttcagaaacagagttttagaagggtgacttgtttgttgattgtacaatccaaaagaaaaaagcaggactttgtggaattcatagtcagttttctgaagcaggtatcagtagttggcttctgagacaagggcagaaacaccatgttggcataaaagagttgatgagtggaacaccaagttggttggctccggttgacattttccttggtagaatgtggtgtgtgaaaattatacatatttttcagaacaggccaaatacgtatgttttatgtcaaaacataggtcatrtgtttctgttttatctgagggttatcacaaaactttaccttt

SEQ ID NO: 13009 - DNA, 597 bp, Homo sapiens
agcgtttctatgagaaaaygtgtttcaagcatagaatttcgggatggccaaagatcttaaaagccctctagagctaactcctagctgatgtgggaaaacttttaacagtatccctgaaaggtgattcttgagttttggtcaagcaccttttgtgacaggaagtttattttgtctcatgatgtatgtactcagtaaaaatttgatgtataaacatatggatagagtgtggcaatatctttattacatctaactctactagagaattcatccttatatctaattgataactgcctccctgtaattcctactttcattccctttaaaatagttttaaaaattataagctgttttacaaacaacaggaatatacaaagaataattaaacacttgtccatgtgttgaatatctaaatgttagaaaacattatttttagtttattttcctcaggtgaaaaaacaaaagttaccattacagatacagttgcaaccttcttagtatcctgcccagatcccagtcttctgactgtcttcctatacttaactattaagtagtttccccaaaatgacccaatgagaaaaaaggagagccgggatttga

SEQ ID NO: 13010 - DNA, 597 bp, Homo sapiens
agcgtttctatgagaaaacgtgtttcaagcatagaatttcgggatggccaaagatcttaaaagccctctagagctaactcctagctgatgtgggaaaacttttaacagtatccctgaaaggygattcttgagttttggtcaagcaccttttgtgacaggaagtttattttgtctcatgatgtatgtactcagtaaaaatttgatgtataaacatatggatagagtgtggcaatatctttattacatctaactctactagagaattcatccttatatctaattgataactgcctccctgtaattcctactttcattccctttaaaatagttttaaaaattataagctgttttacaaacaacaggaatatacaaagaataattaaacacttgtccatgtgttgaatatctaaatgttagaaaacattatttttagtttattttcctcaggtgaaaaaacaaaagttaccattacagatacagttgcaaccttcttagtatcctgcccagatcccagtcttctgactgtcttcctatacttaactattaagtagtttccccaaaatgacccaatgagaaaaaaggagagccgggatttga

SEQ ID NO: 13011 - DNA, 597 bp, Homo sapiens
agcgtttctatgagaaaacgtgtttcaagcatagaatttcgggatggccaaagatcttaaaagccctctagagctaactcctagctgatgtgggaaaacttttaacagtatccctgaaaggtgattcttgagttttggtcaagcaccttttgtgacaggaagtttattttgtctcatgatgtatgtactcagtaaaaatttgatgtataaacatatggatagagtgtggcaatatctttattacatctaactctactagagaattcatccttatatctaattgataacygcctccctgtaattcctactttcattccctttaaaatagttttaaaaattataagctgttttacaaacaacaggaatatacaaagaataattaaacacttgtccatgtgttgaatatctaaatgttagaaaacattatttttagtttattttcctcaggtgaaaaaacaaaagttaccattacagatacagttgcaaccttcttagtatcctgcccagatcccagtcttctgactgtcttcctatacttaactattaagtagtttccccaaaatgacccaatgagaaaaaaggagagccgggatttga

SEQ ID NO: 13012 - DNA, 557 bp, Homo sapiens
atgatttccataactcacttaacttgcacatttataatgtggactttaaataataattatcaggatggctactctgaagccaggagcttaggaagtgtcacagatggtatatatttgtattcctgcctcatgtccctttccctgaagtggcgtgtggagtatgagggattacggtgtatttgtaggtggtgtccctgaaaggctatcaggggacttctggttctgcttcagttctgttttgtgaagacggtcaagtgatttaaggtctcttgcttcagccatcccacttagaaagcagttgctttatagtcctttgggtatayacccagtaatgggatggctggctcaaatggtatttctagttctagatccctgaggaatcgccacactgacttccacaatggttgaactagtttacagtcccaccaacagtgtaaaagtgttcctatttctccacatcctctccagaacctgttgtttcctgactttttaatgattgccattctaaccggtgtgagatggtatctcattgtggttttgatttacatttctctgat

SEQ ID NO: 13013 - DNA, 557 bp, Homo sapiens
atgatttccataactcacttaacttgcacatttataatgtggactttaaataataattatcaggatggctactctgaagccaggagcttaggaagtgtcacagatggtatatatttgtattcctgcctcatgtccctttccctgaagtggcgtgtggagtatgagggattacggtgtatttgtaggtggtgtccctgaaaggctatcaggggacttctggttctgcttcagttctgttttgtgaagacggtcaagtgatttaaggtctcttgcttcagccatcccacttagaaagcagttgctttatagtcctttgggtatacacccagtaatgggatggctggctcaaatggtatttctagttctagatcccygaggaatcgccacactgacttccacaatggttgaactagtttacagtcccaccaacagtgtaaaagtgttcctatttctccacatcctctccagaacctgttgtttcctgactttttaatgattgccattctaaccggtgtgagatggtatctcattgtggttttgatttacatttctctgat

SEQ ID NO: 13014 - DNA, 557 bp, Homo sapiens
atgatttccataactcacttaacttgcacatttataatgtggactttaaataataattatcaggatggctactctgaagccaggagcttaggaagtgtcacagatggtatatatttgtattcctgcctcatgtccctttccctgaagtggcgtgtggagtatgagggattacggtgtatttgtaggtggtgtccctgaaaggctatcaggggacttctggttctgcttcagttctgttttgtgaagacggtcaagtgatttaaggtctcttgcttcagccatcccacttagaaagcagttgctttatagtcctttgggtatacacccagtaatgggatggctggctcaaatggtatttctagttctagatccctgaggaatcgccacactgacttccacaatggttgaactagtttacagtcccaccaacagtgtaaaagtgttcctatttctccacatcctctccagaacctgttgtttcctgacttwttaatgattgccattctaaccggtgtgagatggtatctcattgtggttttgatttacatttctctgat

SEQ ID NO: 13015 - DNA, 557 bp, Homo sapiens
atgatttccataactcacttaacttgcacatttataatgtggactttaaataataattatcaggatggctactctgaagccaggagcttaggaagtgtcacagatggtatatatttgtattcctgcctcatgtccctttccctgaagtggcgtgtggagtatgagggattacggtgtatttgtaggtggtgtccctgaaaggctatcaggggacttctggttctgcttcagttctgttttgtgaagacggtcaagtgatttaaggtctcttgcttcagccatcccacttagaaagcagttgctttatagtcctttgggtatacacccagtaatgggatggctggctcaaatggtatttctagttctagatccctgaggaatcgccacactgacttccacaatggttgaactagtttacagtcccaccaacagtgtaaaagtgttcctatttctccacatcctctccagaacctgttgtttcctgactttttaatgattgccattcyaaccggtgtgagatggtatctcattgtggttttgatttacatttctctgat

SEQ ID NO: 13016 - DNA, 529 bp, Homo sapiens
ttttcaaagttattaaaatcagtctccgacctgcttcctctttcttagcgctattgttcagaagcaattattttgattgaacaattttggctcttcattttttattagaattagctttttaactctaaatartatagatgtttcttcatttatcaaatttagtcatatatgtttacttctcactttgaaagatagagctatggttcctcgcatcactcttaatttaccctcatcctttcctcccaaagctgattattgtgtaatattactccttctactgtttaaaaattgaacaatatataactttttcaatgccttttcccatcaacttgacataatatctctagagttctctgatgtaaaaggaagatattgatgtctctttccttctctccacgaaccacatctaaatttctgtcatatgaaaacccattcttttaattgggttattttttactgttgaattttagaattttagaaatcatttgtatattttagataaaaatcctttaccgatatgtatattgca

SEQ ID NO: 13017 - DNA, 529 bp, Homo sapiens
ttttcaaagttattaaaatcagtctccgacctgcttcctctttcttagcgctattgttcagaagcaattattttgattgaacaattttggctcttcattttttattagaattagctttttaactctaaatagtatagatgtttcttcatttatcaaatttagtcatatatgtttacttctcactttgaaagatagagctatggttcctcgcatcactcttaatttaccctcatcctttcctcccaaagctgattattgtgtaatattactccttctactstttaaaaattgaacaatatataactttttcaatgccttttcccatcaacttgacataatatctctagagttctctgatgtaaaaggaagatattgatgtctctttccttctctccacgaaccacatctaaatttctgtcatatgaaaacccattcttttaattgggttattttttactgttgaattttagaattttagaaatcatttgtatattttagataaaaatcctttaccgatatgtatattgca

SEQ ID NO: 13018 - DNA, 529 bp, Homo sapiens
ttttcaaagttattaaaatcagtctccgacctgcttcctctttcttagcgctattgttcagaagcaattattttgattgaacaattttggctcttcattttttattagaattagctttttaactctaaatagtatagatgtttcttcatttatcaaatttagtcatatatgtttacttctcactttgaaagatagagctatggttcctcgcatcactcttaatttaccctcatcctttcctcccaaagctgattattgtgtaatattactccttctactgtttaaaaattgaacaatatataactttttcaatgccttttcccatcaacttgacataatatctctagagttctctgatgtaaaaggaagatattgatgtctctttccttctctccackaaccacatctaaatttctgtcatatgaaaacccattcttttaattgggttattttttactgttgaattttagaattttagaaatcatttgtatattttagataaaaatcctttaccgatatgtatattgca

SEQ ID NO: 13019 - DNA, 443 bp, Homo sapiens
ggctcagaggggcaactggggtgattataaactcttcaattccagtggcttttctacagacctaggaacccccttcatatagagatttactgagctagctctggatctgttcatttcatgggctctgaccatgaatttagatttcagcaacamtgagaatggcctcaataacagaatgatgacaggttttattaatgggcagatacaaagcaatgaagaacctaattatacagaaaatatacaatccttttagattgaagaagagaaaaattcagtaagttaattatgaactcaaagattaagaaagtaatttaaagaattaaaacatatcatttagaaattgtgctggttcagaaaatataggagatattagattttttacacaaactaaattctctaaagtattaatactttaccattacagtacttttaaaacagaagga

SEQ ID NO: 13020 - DNA, 578 bp, Homo sapiens
ttcagggaatgaaagccctcacatttgaagccagagctcaccaagtatccagtgaaagggaaatgatgtcaaggatgggtcacagtcagtgggtgactgcagaactctttccgaaattccacaaggccaactccttgagcccaaccaccatcagaagagacatcagaagagacatctgcaggaccatttcctgaatgccgccgctgggaaaggggtgggaargctgcggtgggtgccgcggggtcatggaaaactctgtggcgaggccccgccgggagctccctccacaccatgaggcttgacgtcagggcaggaatactgccaccacagtttgaggggggacagatgcaaggagatcccctagagggtctgctttgcctaagaggaaggcgtgagtgctcactctcctttgctctatgagacatacaactgaactcttaaaaggatgtatatgtgttcactagaagtatgtgaatgaaatttaacagtgtggattgttgcacttagcagctacatttatcattactattatttcttgcatttaaatatttaacattaaagcagcaaagattaaacca

SEQ ID NO: 13021 - DNA, 578 bp, Homo sapiens
ttcagggaatgaaagccctcacatttgaagccagagctcaccaagtatccagtgaaagggaaatgatgtcaaggatgggtcacagtcagtgggtgactgcagaactctttccgaaattccacaaggccaactccttgagcccaaccaccatcagaagagacatcagaagagacatctgcaggaccatttcctgaatgccgccgctgggaaaggggtgggaaagctgcggtgggtgccgcggggtcatggaaaactctgtggcgaggccccgccgggagctccctccacaccatgaggcttgacgtcagggcaggaatactgccaccacagtttgaggggggacagatgcaaggagatcccctagagggtctgctttscctaagaggaaggcgtgagtgctcactctcctttgctctatgagacatacaactgaactcttaaaaggatgtatatgtgttcactagaagtatgtgaatgaaatttaacagtgtggattgttgcacttagcagctacatttatcattactattatttcttgcatttaaatatttaacattaaagcagcaaagattaaacca

SEQ ID NO: 13022 - DNA, 525 bp, Homo sapiens
tgagaaaggaacgacttgttgaaatggaaagaaaatgagcccctattttaaaatacacgaatattgccacagtataaaggaaaatactcgttccttagcatttcttaattttctttgcatatttaaaatcagttttcagataagacatgaaactaattctaaagaaaactgaytgcacttgaggattaaggggaaagttttcagaaaagctcgttggctggtgctggatggctatgttgccgtcacaggtgttgagggggccctggctctgtctatggcatcgtgctgtgagctggaggtggcaagggcaggacatttgcctgctcctcaggcgcttcccctgtggatggacaagcagaggagatacatgggagggaaacaaatgcttctactttccagcttcccgattgaggcacatgcaaaggtgttgttattctgtcatttaagaaaccacaaggcaccatttgttcacaaatgtgctttccagaacattgaggggctgtttccattttccaactagcaggt

SEQ ID NO: 13023 - DNA, 525 bp, Homo sapiens
tgagaaaggaacgacttgttgaaatggaaagaaaatgagcccctattttaaaatacacgaatattgccacagtataaaggaaaatactcgttccttagcatttcttaattttctttgcatatttaaaatcagttttcagataagacatgaaactaattctaaagaaaactgattgcacttgaggattaaggggaaagttttcagaaaakctcgttggctggtgctggatggctatgttgccgtcacaggtgttgagggggccctggctctgtctatggcatcgtgctgtgagctggaggtggcaagggcaggacatttgcctgctcctcaggcgcttcccctgtggatggacaagcagaggagatacatgggagggaaacaaatgcttctactttccagcttcccgattgaggcacatgcaaaggtgttgttattctgtcatttaagaaaccacaaggcaccatttgttcacaaatgtgctttccagaacattgaggggctgtttccattttccaactagcaggt

SEQ ID NO: 13024 - DNA, 525 bp, Homo sapiens
tgagaaaggaacgacttgttgaaatggaaagaaaatgagcccctattttaaaatacacgaatattgccacagtataaaggaaaatactcgttccttagcatttcttaattttctttgcatatttaaaatcagttttcagataagacatgaaactaattctaaagaaaactgattgcacttgaggattaaggggaaagttttcagaaaagctygttggctggtgctggatggctatgttgccgtcacaggtgttgagggggccctggctctgtctatggcatcgtgctgtgagctggaggtggcaagggcaggacatttgcctgctcctcaggcgcttcccctgtggatggacaagcagaggagatacatgggagggaaacaaatgcttctactttccagcttcccgattgaggcacatgcaaaggtgttgttattctgtcatttaagaaaccacaaggcaccatttgttcacaaatgtgctttccagaacattgaggggctgtttccattttccaactagcaggt

SEQ ID NO: 13025 - DNA, 525 bp, Homo sapiens
tgagaaaggaacgacttgttgaaatggaaagaaaatgagcccctattttaaaatacacgaatattgccacagtataaaggaaaatactcgttccttagcatttcttaattttctttgcatatttaaaatcagttttcagataagacatgaaactaattctaaagaaaactgattgcacttgaggattaaggggaaagttttcagaaaagctcgttggctggtgctggatggctatgttgccgtcacaggtgttgagggggccctggctctgtctatggcatcgtgctgtgagctggaggtggcaagggcrggacatttgcctgctcctcaggcgcttcccctgtggatggacaagcagaggagatacatgggagggaaacaaatgcttctactttccagcttcccgattgaggcacatgcaaaggtgttgttattctgtcatttaagaaaccacaaggcaccatttgttcacaaatgtgctttccagaacattgaggggctgtttccattttccaactagcaggt

SEQ ID NO: 13026 - DNA, 1343 bp, Homo sapiens
tgttttcattatgaaattaaaatatacaaggacagagtgctttaaatattccaccatatagatagatggactggctcttctcctgttattccttgttattcctagtatctgtgtagaatatatttgcatctccagtaattattaaagaataataattaccttcttgtatgattatctttcttgcatatcttcttttttttttttttgagacagagtcttactctgtcgcccaggctggtgtgcagtggcgtcatctcagctcactgcaagctccacctcccgggttcactggttcacgccattctcctccctcagcctcccaagtagctgggactacaggcacccgccaccatgccaggctaatttttttgtatttttagtagagacggggtttcaccctgttagccaggaaggtctcgatctcctgaccttgtgatccgcccgcctcagcctcccaaagtgctgggattacaggcgtgagccactgcgcccggcatcttctttcttttattgctgtttttaacagaatattaaaaaatttttcctataaattatattaaccattgttttaaacgttaaaggtgttatgcttcttagatactaaattctttactcaagcacatgaaagcaaatatttttgtgtagactctttgaaactttggataagttcattcatttgaactaataatggtgagttattaataataacagtaatttattaagtacttaatatgtgagacgcactgtgccagatttgacttagtgagaatttcaaatctagtctatttaaaaagaaattcaattttcttacttataaggtgtgaaatatataccataaaatcaaaacgcattaaaaagtgttccttagtgtacaatactagggggatttaaaaaataaatataagctttgtttaggtagtgcattaagcatatttgagattactaattttttgagatcaattgaatgcctttgtttatacatgttttgaatattcctgagagacaatagtgtctagtttagcctttcccaaaatatgatcatcagaccatctttaggatgtcaacagatgtttcctccgggatggaaacgggaagaggttccaaggacacaggcgtttggggaaaactgagttcaggttaaatggacatttgttgttttgccctgggatgtctcagagcctgtaataagatagtgtatcatctggaccttccgtgggtgctgcgtcatatacagttccccacacttatttgaacgcccccctktttttttctttttcttttttgagatggagtctcactctgtcactcaggctggagtacagtggcacgatctcggctcactg

SEQ ID NO: 13027 - DNA, 494 bp, Homo sapiens
ccggatagaacaaaaaggcagaagagaggccaattctctctcttctggagctgggcacccatcttctcctgcccttggacatcagaactctgggttctctggccttcagattcagggacttgtaccactagccccttgggctctccagccgctggccttggacccagttacacttcatgagtcctgagttcccatgcttgcaggcggcagatcatggaactcctcagcctctataatcctatgagccacttcccataataaatctaagcagcatccagccttgcgcaagtccacagtgagtgtctggaaacagatrgcaacgactacttcaggtggttttgctctactgtgttttaaactcttgagggcaggaaatatttatatctcattcctagcacaatcctttatatgtacttaatgccaaataatttcttgggtaaatagagtaacaaatagcgaggtgtttttcactgaactggttataatttcgctca

SEQ ID NO: 13028 - DNA, 573 bp, Homo sapiens
tgcattatctaaagcaagcatatactttttaaaaaatccttaaaatgcgtggatagaaagtcattttataatacccaattatttcccttcctcttccaatgcttgtagaaacaagttcatgattcaggaaagcaaatactctaataagcttccgtcatagctaagtcagaaattcaaatacaaatcaaatacccaggacagctgaagttaaaatagcatgaagcttctaaatgtggggggaaaatataattaccaacaacaaaaactgatgttaacacaaaatatacctagaataagcagtcatcaaaattcttactgtcaaaggcctgtttcagtggctgacatggaatccatatctttaaatcaaaattttaatggatttttccaatctgaaatattaggatcacggatcttcacaatggactgaagcacacacagagatgctgccagctctcrggggcttcctctacgcacggaatgagtacgggtaccgggtttggtactgagcactgagtgtactgggtatggcagcctccatgtgctgggtgcatccaagggaaacaagcaatgctt

SEQ ID NO: 13029 - DNA, 757 bp, Homo sapiens
gagccaggagaattgcttgaacccgggaggtggaggttgcagtgagccaagattgtaccacttcactccagcctggcgacagagtggaactccgtctcaaaaaataaaataaaataaaataaagcaaaaatataaaatgttaaaaaaaaacaaaaaaagggaaaaaggaagctgattgccttggtgagtcaacactgggtattttctgaccactatttgaaacaaaaaaggaaaccactgatattctatgcaaagatctgttcctggaaggcactctgcggagacaccaggagaacttttatcaatccttcattgatttgaagtaaaagtgctaaagcaatggttgtgggtggcaacccattagcagatcacaaaatcactgtagtgggtaactaaacaagaggaaacacaagayggcatcctgtgtaactggggttaagcattactctctgaaactcatggcatcagtttcctcttaggctcttccaacagagtataatcatgttcatttcagtttacaatccttgcagtcccatcgatttgtgagattatacccaggtcatccacagtggaggtctgaaaatgttcttagttgtactctaatttcactaactgccaaaaggttttccagaataatctcagttgcttcattcctttaaagatgaagcccgaagaacgcatggcgattactttagaggaacaattagcagcagaggcagggctgtgctgatcccatctggcatcgctgggagctaac

SEQ ID NO: 13030 - DNA, 1177 bp, Homo sapiens
ggaatctcacttgattaaacaaaaaaaagcccaggcactggtgacctaatttgactagcaattctcaacccattgaaggaattttagagatgagcaagttgagacccagataagaaaactcagtaatcaaaggggcacacctctccctgtcctccttagtcccctgccagactcctctcgagcccaggggtcctgataacacttgtcagctccacctcccagggcctgatgcagccccaaccctggaaagggactggtgagtgctgctgaatccagccctgctcaacccctygctggcttgagatggagaaggggaggcagcagccctggagcagaaaggccccttctgatgctttgggtctcttctggcacaaccccacctgtcttatcagaggctcggctcacccttatctgggcagggtggtttcttccaagtctgtgtcctccacacggggctgctgaggttgcagagcagccagggctgtgcagcacagatgcgggatagggtgctacaggtgtctggaaatacaggtgtctggaaattccaggctgtaggaagacttgcagggaaggtctggggctcctatggagagggaaagggggcccagtagctctgggtctccaggactccaggattgtatgccactgagtttgactcagtgctcctcctgctgtgggcaatcagctaaatgggcaaatggagcgagcagacgtctcatacaattggtagaagcccgtgcaaagatgttccagttgattaatcacccaaaatcagaacagctaagacaataactacgtgccattttatacctactaaattatggagtaggaacgctcaaattatactattttatgttggtagtgatggggaaagtggcacattggcataattgtttggtgtaatacagccaaatgccatctctagaaggcagtgtatagtgacatttaaagggccaggggccagagagtggtccattctctgccctgtgacctcactgctgggagcccagctttaggaaacaaattctgcatggagacatccactgcgccatctccattatcctaatccttatcaccatagtaacccattactaggcacctgtacgtctaagcactctgcagttatgctgtctcccctctgccagcttgccctgctgggtgaggtgttgttatctca

SEQ ID NO: 13031 - DNA, 1177 bp, Homo sapiens
ggaatctcacttgattaaacaaaaaaaagcccaggcactggtgacctaatttgactagcaattctcaacccattgaaggaattttagagatgagcaagttgagacccagataagaaaactcagtaatcaaaggggcacacctctccctgtcctccttagtcccctgccagactcctctcgagcccaggggtcctgataacacttgtcagctccacctcccagggcctgatgcagccccaaccctggaaagggactggtgagtgctgctgaatccagccctgctcaaccccttgctggcttgagatggagaaggggaggcagcagccctggagcagaaaggccccttctgatgctttgggtctcttctggcacaacmccacctgtcttatcagaggctcggctcacccttatctgggcagggtggtttcttccaagtctgtgtcctccacacggggctgctgaggttgcagagcagccagggctgtgcagcacagatgcgggatagggtgctacaggtgtctggaaatacaggtgtctggaaattccaggctgtaggaagacttgcagggaaggtctggggctcctatggagagggaaagggggcccagtagctctgggtctccaggactccaggattgtatgccactgagtttgactcagtgctcctcctgctgtgggcaatcagctaaatgggcaaatggagcgagcagacgtctcatacaattggtagaagcccgtgcaaagatgttccagttgattaatcacccaaaatcagaacagctaagacaataactacgtgccattttatacctactaaattatggagtaggaacgctcaaattatactattttatgttggtagtgatggggaaagtggcacattggcataattgtttggtgtaatacagccaaatgccatctctagaaggcagtgtatagtgacatttaaagggccaggggccagagagtggtccattctctgccctgtgacctcactgctgggagcccagctttaggaaacaaattctgcatggagacatccactgcgccatctccattatcctaatccttatcaccatagtaacccattactaggcacctgtacgtctaagcactctgcagttatgctgtctcccctctgccagcttgccctgctgggtgaggtgttgttatctca

SEQ ID NO: 13032 - DNA, 531 bp, Homo sapiens
tttttaaatgattagtttttatgcctcctttcatcctcatctgtcctcacagtttcggttctgatggggaccaagcagtctcatcttcaatagtagatgcaaaaatgtcagccatatgggggtgagtacttggtgttcatgacacgtatgtatcaaatgacaggatatcaggattagactcatctacaaaaagaagctgtattttttttctttccgtctgctgaagtcaattttatttccacatataattacaggttgggtttttaactttgtatataaataattgaaacatactatattttcttctktataaaccaagtgataagccttcttaagtaccactgagattcagcttccaaaaaaaggttgccatgtcatttttctgatttatcaaagctactttgaagtaatttcataaagcctattaaaattaaagtaacctctaaagtaaaacatgcaatttttttttctctagcaaaaactttctctctggaaacaaagggtagtcaccagtgctcgtaattttcttct

SEQ ID NO: 13033 - DNA, 531 bp, Homo sapiens
tttttaaatgattagtttttatgcctcctttcatcctcatctgtcctcacagtttcggttctgatggggaccaagcagtctcatcttcaatagtagatgcaaaaatgtcagccatatgggggtgagtacttggtgttcatgacacgtatgtatcaaatgacaggatatcaggattagactcatctacaaaaagaagctgtattttttttctttccgtctgctgaagtcaattttatttccacatataattacaggttgggtttttaactttgtatataaataattgaaacatactatattttcttctgtataaaccaagtgataagccttcttaagtaccactgagattcagcttccaaaaaaaggttgccatgycatttttctgatttatcaaagctactttgaagtaatttcataaagcctattaaaattaaagtaacctctaaagtaaaacatgcaatttttttttctctagcaaaaactttctctctggaaacaaagggtagtcaccagtgctcgtaattttcttct

SEQ ID NO: 13034 - DNA, 531 bp, Homo sapiens
tttttaaatgattagtttttatgcctcctttcatcctcatctgtcctcacagtttcggttctgatggggaccaagcagtctcatcttcaatagtagatgcaaaaatgtcagccatatgggggtgagtacttggtgttcatgacacgtatgtatcaaatgacaggatatcaggattagactcatctacaaaaagaagctgtattttttttctttccgtctgctgaagtcaattttatttccacatataattacaggttgggtttttaactttgtatataaataattgaaacatactatattttcttctgtataaaccaagtgataagccttcttaagtaccactgagattcagcttccaaaaaaaggttgccatgtcatttttctgatttatcaaagctactttgaagtaatttcataaagcctattaaaattaaagtaacctctaaagtaaaacatgcaatttttttttctctagcaaaaamtttctctctggaaacaaagggtagtcaccagtgctcgtaattttcttct

SEQ ID NO: 13035 - DNA, 518 bp, Homo sapiens
aatttgaatttcatataatttttacatgatacaacatattattttttaatcactttttaaatgtaaaaaacattcttaactggcaggtcctagtgtagtttgccaacactggacttagaaggagagaataagtagaagcttcagtagtaaaatttatggtaagtgccaaataagggcctcacactaaaataaataaataaatagaataaaaattttwaaaaaagaataacagtattaatcccctcccccaccccaggaaactcatttttactgcaaaaagaacaaattgggagttccagagtcactgtgattactccaaagaatagttttgccaattaatggattggattatttatcattattcaggtttttaggactctgcaaataacagaatctgagactacttctcagattggtaaaccagttttgaaatttatatgatcaaatcatataaaataagaatcattccttttaacaggtctaatctcatacttgtaatgtactaacttattattcca

SEQ ID NO: 13036 - DNA, 518 bp, Homo sapiens
aatttgaatttcatataatttttacatgatacaacatattattttttaatcactttttaaatgtaaaaaacattcttaactggcaggtcctagtgtagtttgccaacactggacttagaaggagagaataagtagaagcttcagtagtaaaatttatggtaagtgccaaataagggcctcacactaaaataaataaataaatagaataaaaattttaaaaaaagaataacagtattaatcccctcccccaccccaggaaactcatttttactgcaaaaagaacaaattgggagttccagagtcactgtgattactccaaagaatagttttgccaattaatggattggattatttatcattattcaggtttttaggactctgcaaataacagaatctgagactacttctcagattggtaaaccagttttgaaatttatatgatcaaatcatataaaataagaatcattccttttaacaggtctaatctcatacttstaatgtactaacttattattcca

SEQ ID NO: 13037 - DNA, 689 bp, Homo sapiens
atttgtgttcaaatcctggctctgtcgtgtaatrgttgtgtgactgtgggcagtcacttaacctctgtgcctctgttttcttatctggaaagtagaaataataagaatattttctttaaatggattgatgtatatgtgtgcgcgtatgggtttgtgcctgtgcatgtatgcatttgtgcaggtgcttgtgtgtattcatgtatgtgtgtgtagattgctcaatatatgtatgttcttatgtgtatgtgtatgtgtgagtgcctacattcacatgatacatgtgtcacatatacacacatgcatccatgtgtatgtgtgcatgtgtgtgcatgtgtgtgtgtgtgtgtgtatatgttgcccagaagttaaccactggagagcaggggaccacaggaagacactttccaagaggctgctagtaggaccagtcttatgaggccaaagaccaaaatagctagtgcctctcctccctgttgctcctgtccttaatgttttattttggctgcttatttttattctgctaatttaaaaagaagcctatctcttccatttctactgtcacttttctcatcagctcttgcctcagtcaatgcaaaagcttatttgacttgtctccttgcctccaaatgtggtcacccctaactttacagtctcaagtgtaatgttttaaaagtttagagctctttgca

SEQ ID NO: 13038 - DNA, 689 bp, Homo sapiens
atttgtgttcaaatcctggctctgtcgtgtaatggttgtgtgactgtgggcagtcacttaacctctgtgcctctgttttcttatctggaaagtagaaataataagaatattttctttaaatggattgatgtatatgtgtgcgcgtatgggtttgtgcctgtgcatgtatgcatttgtgcaggtgcttgtgtgtattcatgtatgtgtgtgtagattgctcaatatatgtatgttcttatgtgtatgtgtatgtgtgagtgcctacattcacatgatacatgtgtcacatatacacacatgcatccatgtgtatgtgtgcatgtgtgtgcatgtgtgtgtgtgtgtgtgtrtatgttgcccagaagttaaccactggagagcaggggaccacaggaagacactttccaagaggctgctagtaggaccagtcttatgaggccaaagaccaaaatagctagtgcctctcctccctgttgctcctgtccttaatgttttattttggctgcttatttttattctgctaatttaaaaagaagcctatctcttccatttctactgtcacttttctcatcagctcttgcctcagtcaatgcaaaagcttatttgacttgtctccttgcctccaaatgtggtcacccctaactttacagtctcaagtgtaatgttttaaaagtttagagctctttgca

SEQ ID NO: 13039 - DNA, 473 bp, Homo sapiens
gtattagtcagcttgggctgcaacagaataccacagattttgtggcttaaagaatggaaatttattttctcacagttcgagaggctagaagtccaaggtcaaggtgccagcaaggttgctttctggagaggcctctcttcctatcgtgcaaatggctgctgacttgctgcgttctcacacgaccttccctctacgtttgcagagagagagggatgtttgttgtctcttccttatcttaagaggacaccaatcccattgggttagaatctcactttatttaaccttaattaactccctacaatctctatcttcaaatacagtcacaatagggagggagtaagacttcaacatttacattttgggaagtaacaatttggtctataataactaatttttgtctcagtcaattaagcagaagaaaacggcccattgytatgtttagggactctcacacgcaaggatgaccctgatca

SEQ ID NO: 13040 - DNA, 529 bp, Homo sapiens
aaaagagcaatgttaaatcatgcaatgaataagaagggacttaaggaacattagctagtcaatacatataaaataattataggctgattgatgtctgacttgacacttgactataagtgtgtctctccttagaacattaagtagaaaataaaagcagctattcagaatttttacattttataaatggagcatagctggaaaaactgaaatktatgttttttggttatttagaaaatactctcacttcatttgagcctcaaaaaatctcaagtagcaaagtttctcctgctttatgttcttcttgtggatattcttctttttaagtttctatctttttgctcaccaagtgacaaccctgttctttttcactccttaaaatttatcaccttgtttttccaaacaatcatgaaatttaaagtccatttggagccacacacactgtggctgatttccagcattgtgactttaagaaagttattcgagccaaggttttcacattaaatttagataataatagctactacttcat

SEQ ID NO: 13041 - DNA, 529 bp, Homo sapiens
aaaagagcaatgttaaatcatgcaatgaataagaagggacttaaggaacattagctagtcaatacatataaaataattataggctgattgatgtctgacttgacacttgactataagtgtgtctctccttagaacattaagtagaaaataaaagcagctattcagaatttttacattttataaatggagcatagctggaaaaactgaaatttatgttttttggttatttagaaaatactctcacttcatttgagcctcaaaaaatctcaagtagcaaagtttctcctgctttatgttcttcttgtggatattcttctttttaagtttctatctttttgctcaccaagtgacaaccctgttctttttcactccttaaaatttatcaccttgtttttccaaacaatcatgaaatttaaagtccatttggagccacayacactgtggctgatttccagcattgtgactttaagaaagttattcgagccaaggttttcacattaaatttagataataatagctactacttcat

SEQ ID NO: 13042 - DNA, 546 bp, Homo sapiens
gggtcacattcctcacctcatccttttcttggtgtggtgacactcttgtggccagaattacttggctgatttggggagctctattcttgcctatctctcaggtgatgctggggactttatcctccctgtccacgacttcctccatcactacttcactgtctggtgcagaggcctgctcagtaaatcgccactggcagaactaccctgtccatcagacatggcctctgccccagtagacaggcagggagggaactcacatctacactgcatgctgcaccktctctttgatgccactcctggccccaggatgtgcagctgtcgccactttacagagaaggaaacaggctccaagaaattcagcaacatcctcagcccccccaccccagctagaaagtggccagcttggatctaaaggggatctgggtgttgtttctagcaccctgccccgcctttctgcacggatccctgcagagtcaggcaggggagacccagaggacccctggtggtaatctgagtgcaagaagcagagggaaagggagcactggc

SEQ ID NO: 13043 - DNA, 518 bp, Homo sapiens
cgtacactgctctattgtttgattaaacccctgatgcggttgcttaggagtggaaactattttagtgacttaaaccagggcctggaggtgtttgagggaaatgttctgtaattcgaaagcatcaaataagatgctttcaaattaacacaaaaatccaaatatccatatcttgaaagaagagaccccttcctcccctctgacttctccttcctcccagccagattatccaagacgtgctgttattcagagtcccatcagccacatgtgacagaaaaacaactaaagaacatggcttacatgacacagaggcatatttctctgtcatattaaagaagacagagggcagcagtccagagctgatatgagggcttcaaacatacagggacctggcctctgcctttcttgctgctccaacatccttaataggctgcctygcagttcaaggtggctgcttagactccagccattgtatctgcgttccaatagaggaagagcgaaaggttcaagaaaacattccc

SEQ ID NO: 13044 - DNA, 1787 bp, Homo sapiens
tctattttaacattgaaacgggaggatgcgccacatggctgggaaatgatagtgaatgcagctgcacccagaagccagtcccctacccctggggggctgcacccagcctgtgagggacctgactccaccagggtggctggacaggtctgacagtcccaggagtctctgaggggtgtagcccgcggctggggactttggctcagaaaggattttatccccactttggccgtgggtgaaggagagtaggcacaggttccccaggcccgtgggaacacacatggtacaagaaattcacacagaaactgggattatagaggccacgtttcagaacccccaggttctcgcaaggaagaggctgaattccgttcccatttcacgttcagtccctggccctgaccacatcttgacaaaccgtttggttctggagaagccacttcacccccagggagatggtgctgtcctttgcttcatccctgggatctgaagggtgtgagggtggggtgggggttgtgttggggtgcgtggcggggagccgccatggaatgaagccgtgtgactctcctgaggaccacaaactgggtggctcagaacagcagagaacggattgtctcagttcaggagtccagaagtccaatatcacggtggcagcagggccgtgctccctccacagttgctaggggagggtccttcctgcctcgtccacctcctggtggctccaggcattcatcggctgtggccctatttccccatctctgcctctgtcctcccatggccttctgctctgtgtctgcgtcttctcttctgactctcagaagaacacgtatcattggatttaagacccccctgggaaatccagggtgatctcctcatcccaagatccttaactcaatcacacctacaaggagctgttttccaaatcaggtcacactcgtgggtttcgggggctagggtacagtcacatcttttggggaccagcactcaccccgcccacacagttacatcctcacaactagagaggggcacactgtaactatttgctgaatgagtgagctctgaaacgagcggttggccaccaggaggccatgcatggcctgaatgtgaacacaggtgtgtgtggtttcagaacccagccaggggccttgactggctcctctgccactgggcttggctgggttcttgttcccgagcctcagacctgggtcaggcttggatctagtttgcccatccttgtctactctagtggctgtggaggaaggcgatggcctggatcaggaaaacatggcaagtggcaggatctgaggtcacatcataaggagtgtgtacccaaggcaagggaggtgaatggagcttgtggaggtgagcagctaggatggtgatgggtgtagggtttggagagcatgaccacgcagccacctgcctgaagggtggacacgctgaagagagagctacaagaacctcaagttgggccagtgcatggtgctctggggaggtggaccttggggccagtgagcactgggagaaggagtactcggcctcccacttccctccctctgcacattttttttttttttttgagacagagtctcaccctgtcacccaggctggaatgcaatggcacgatctcagctcactgcaacctccacctcctaggttcaagcaattcttctgcctcagcctcccaagtagctgggattacaggygcccgccaccacgcccagctatttcttgtatctttaatacagatggggtttcaccatgttggccaggctggcctcgaactcctgacc

SEQ ID NO: 13045 - DNA, 575 bp, Homo sapiens
cctgacctcaggtgatctgcccacctcggcctcccaaagtgctgggattacagktgtgagccaccacccctggcctcatcaagaacattcttaagccaaattggtgtggttttgttttgttttgttttgttttaaaggggctgtaagtacacggtagtagagactatgattattcgtactgtttgaagccacagccttgattcttgctatagcccaccatttacatatcatttaatttattttgccattttatcaattttaccattttacccaccattgtttttaactgtgcaaatgttagcacagttaaaaagacaaagaatatcatggtatactatgaaaatagctttgacctcacaggccccatgcagaaaggtcctctggcctagctgcaagaacactgatactcaaactggggtctggggatccctgggggagaatcattgttctccgggctaagccagagtgcccggtaaacataattgctccagaaaatggcataaagggctgtcttgttcttatcagtgcatctcctctgataggaggctactttgattgctcattgagaatctcta

SEQ ID NO: 13046 - DNA, 575 bp, Homo sapiens
cctgacctcaggtgatctgcccacctcggcctcccaaagtgctgggattacagttgtgagccaccacccctggcctcatcaagaacattcttaagccaaattggtgtggttttkttttgttttgttttgttttaaaggggctgtaagtacacggtagtagagactatgattattcgtactgtttgaagccacagccttgattcttgctatagcccaccatttacatatcatttaatttattttgccattttatcaattttaccattttacccaccattgtttttaactgtgcaaatgttagcacagttaaaaagacaaagaatatcatggtatactatgaaaatagctttgacctcacaggccccatgcagaaaggtcctctggcctagctgcaagaacactgatactcaaactggggtctggggatccctgggggagaatcattgttctccgggctaagccagagtgcccggtaaacataattgctccagaaaatggcataaagggctgtcttgttcttatcagtgcatctcctctgataggaggctactttgattgctcattgagaatctcta

SEQ ID NO: 13047 - DNA, 575 bp, Homo sapiens
cctgacctcaggtgatctgcccacctcggcctcccaaagtgctgggattacagttgtgagccaccacccctggcctcatcaagaacattcttaagccaaattggtgtggttttgttttgttttgttttgttttaaaggggctgtaagtacacggtagtagagactatgattattcgtactgtttgaagccacagccttgattcttgctatagcccaccatttacatatcatttaatttattttgccattttatcaattttaccattttacccaccattgtttttaactgtgcaaatgttagcacagttaaaaagacaaagaatatcatggtatactatgaaaatagctttgacctcacaggccccwtgcagaaaggtcctctggcctagctgcaagaacactgatactcaaactggggtctggggatccctgggggagaatcattgttctccgggctaagccagagtgcccggtaaacataattgctccagaaaatggcataaagggctgtcttgttcttatcagtgcatctcctctgataggaggctactttgattgctcattgagaatctcta

SEQ ID NO: 13048 - DNA, 562 bp, Homo sapiens
aatttactgtattagtctgttttcatactgctgataaagacatagcttacactgagcaatttacaaagaaaagaggtttaatggagaactcacaattccatatgggtggggaaacctcacaatcatggcagaaggcaaggaggagctagttacatcttatgtggatggcagcaggcaaagagagagcttgtgtaaggaaactcctattttttwaaaaccatcagatctcatgaaacttattcactatcacaagaacatcacggaaaagacccacccaataattcaattacctcccaccaggtccctctcacaacacatggaaattacaagatgagatttgggtggggacatagctaaaccacatcagtgtgtctaacctgttaatcccctggcctgaggttcttgtttgatctctgcataactcaaactgctcatttaagaattagtctttttctgaggtggacatctgaggttttcatcaaattctcaaagaagcccaggaccccaaaaaggttaagaatcattggtataaccaatcaatgccagtcaaatgagaaaaaaa

SEQ ID NO: 13049 - DNA, 562 bp, Homo sapiens
aatttactgtattagtctgttttcatactgctgataaagacatagcttacactgagcaatttacaaagaaaagaggtttaatggagaactcacaattccatatgggtggggaaacctcacaatcatggcagaaggcaaggaggagctagttacatcttatgtggatggcagcaggcaaagagagagcttgtgtaaggaaactcctattttttaaaaaccatcagatytcatgaaacttattcactatcacaagaacatcacggaaaagacccacccaataattcaattacctcccaccaggtccctctcacaacacatggaaattacaagatgagatttgggtggggacatagctaaaccacatcagtgtgtctaacctgttaatcccctggcctgaggttcttgtttgatctctgcataactcaaactgctcatttaagaattagtctttttctgaggtggacatctgaggttttcatcaaattctcaaagaagcccaggaccccaaaaaggttaagaatcattggtataaccaatcaatgccagtcaaatgagaaaaaaa

SEQ ID NO: 13050 - DNA, 562 bp, Homo sapiens
aatttactgtattagtctgttttcatactgctgataaagacatagcttacactgagcaatttacaaagaaaagaggtttaatggagaactcacaattccatatgggtggggaaacctcacaatcatggcagaaggcaaggaggagctagttacatcttatgtggatggcagcaggcaaagagagagcttgtgtaaggaaactcctattttttaaaaaccatcagatctcatgaaacttattcactatcacaagaacatcacggaaaagacccacccaataattcaattacctcccaccaggtccctctcacaacacatggaaattacaagatgagatttgggtggggacatagctaaaccacatcagtgtgtctaacctgttaatcccctggcctgaggttcttgtttgatctctgcataactcaaactgctcatttragaattagtctttttctgaggtggacatctgaggttttcatcaaattctcaaagaagcccaggaccccaaaaaggttaagaatcattggtataaccaatcaatgccagtcaaatgagaaaaaaa

SEQ ID NO: 13051 - DNA, 543 bp, Homo sapiens
tcaaagaggaaacttctatcattcagcamttaattttcctcttatttggtctctgcattagaggatggtccccgtgcacagagctgacttttactctggctgagtcactaacagttgggagatgggaagccacttggccaagcaccaaaagttttcagtttcctgtgataactcagacttcggaaggatgcagagtttgccctaatgtcttatgagaacaagcggcacatctccagcagggccagtgatactgggggagcagtcgtcacttcaatattccagcatactctcactgccagttttgttcagagctccagaagtgcaggggatgtgtgaacatgtcgaattaatgaaaaacaaagttaaacatttcagaacctgcaaaagggttcagttccagaaatgagcaaaggtttgggaagagtcttattttttaagtgaggtttattcatcctccgtagacacaaaaataagtctttcaaagaacatgaatatttgaggcacttggcaacatgcagtctttggcaacctctcccttattta

SEQ ID NO: 13052 - DNA, 765 bp, Homo sapiens
tgaaagactaagaacctcagtctgggaagtgggtgggtggggtggacagtgatttactcttgagccccagacgcttcacctgactttttcacaactccccaccctttttacttttcatccagagatctcaaagctctaaacaagccttgatcctccctgaccccctgagtcatcctctgtttccattttcccagataggrgaggttgggcagtggaataccatgttttgggatgggtgcttggtgggtgggtaggggagattgcaggggcaaccatagggatccaggggccccttttcaatcatggggtggggcgaggggcaggcatcaaggtggttctaggtagttgggtttcagcttgtccttttgaggttgttttatgactgaagagactcggataaagagtccgagctggagaaattgaagaacaaacaaagccgtaaaagacgccgataaaatttctcccagcacagaatagtctttggagcctccctcaagaatcttagagtaatctgggaaggctaattaagtctcacagcccacactgggcactggggcaggacgagggaaaggggaagagagcactgagagagatttcccttctccctctcttctctcaagggcgcacaggtgttcaaacattcaatatggagactgaattaagacttggtggggggatgggtgagaatggggaacaaatgatgggaaatatcaatttttttaaagactccttttaataaggaagtgcttgagaatatgccgaacg

SEQ ID NO: 13053 - DNA, 1278 bp, Homo sapiens
gcctcatcctggaataaagaaccactccctcagtaagtcatttacatgactaaatgaggctgttcatgaaatgatatttttttgtttagtgtatggcaaattttcttaaaaacaaaagcaaaacaaagcatcaaattagcatattaaaaatttagaaacagtctaaatattcattagtggaaataaagtgtgaaattgtaatgcaatgaaattcgatgccaatatttctcaaacattagtgtgcatctaaatcatacagggaccttgttaaaatgtagattttgatgctgttggtctagggtcagttctgagatcctgcatttctagccgactcccagggcccctgatgctgctgagccacaggcaccacctccagtagaaaagtattatccaacagttaacatggaccagagctacatttgccaagatgaatacatctcaaaaatataatggtgtggtaaagaaacaaattgcagaatgatatgtagattataatactattcacataacatttaaatgattcaaaaaatgttgcatattgtttcctgaaactagaatgaaataaaagcatagtgaaataaagtacagtgaaatgaaagtatgaaaacaagcacaagaatgagaaacatgaagtttataatagtggctaactttgggtacgggagagaggaaagtaactggagagattacataatgctttaaatgatctgttatgtttatttcttaaacttggtggtgagtacaaaggtgttcagaatattattttctatatttttgtatgtcaacattaagacttaaaggggtatatttgtgtgtgtgtgagttaatgcagtaatccagtagagattctgtatgaaaatttgggccttttcttcccccttatcacttgtttcttagttgaacaattgcagcttaatttactctatggagatgtggaagatggttaaaatacaatcaacagtgttttatttgtaaaaaagaataaaaaatttatttaatcagaaatatggcattttctaaagtaattttagcagttttttgttttttccatgataggtaattctacacatacttaattgctaacatttaaaatttkccaaagaataaatgttgacattccggtaaaagaagagctcataacacatctggaagtgtgctattttaaaaaagctcatactgtatcattagtcacaggtaactttgatgtacttaaaatgaaactatttctgtttaaaattagttttaattttttttctaaaggaaattaaagaaggacta

SEQ ID NO: 13054 - DNA, 1278 bp, Homo sapiens
gcctcatcctggaataaagaaccactccctcagtaagtcatttacatgactaaatgaggctgttcatgaaatgatatttttttgtttagtgtatggcaaattttcttaaaaacaaaagcaaaacaaagcatcaaattagcatattaaaaatttagaaacagtctaaatattcattagtggaaataaagtgtgaaattgtaatgcaatgaaattcgatgccaatatttctcaaacattagtgtgcatctaaatcatacagggaccttgttaaaatgtagattttgatgctgttggtctagggtcagttctgagatcctgcatttctagccgactcccagggcccctgatgctgctgagccacaggcaccacctccagtagaaaagtattatccaacagttaacatggaccagagctacatttgccaagatgaatacatctcaaaaatataatggtgtggtaaagaaacaaattgcagaatgatatgtagattataatactattcacataacatttaaatgattcaaaaaatgttgcatattgtttcctgaaactagaatgaaataaaagcatagtgaaataaagtacagtgaaatgaaagtatgaaaacaagcacaagaatgagaaacatgaagtttataatagtggctaactttgggtacgggagagaggaaagtaactggagagattacataatgctttaaatgatctgttatgtttatttcttaaacttggtggtgagtacaaaggtgttcagaatattattttctatatttttgtatgtcaacattaagacttaaaggggtatatttgtgtgtgtgtgagttaatgcagtaatccagtagagattctgtatgaaaatttgggccttttcttcccccttatcacttgtttcttagttgaacaattgcagcttaatttactctatggagatgtggaagatggttaaaatacaatcaacagtgttttatttgtaaaaaagaataaaaaatttatttaatcagaaatatggcattttctaaagtaattttagcagttttttgttttttccatgataggtaattctacacatacttaattgctaacatttaaaattttccaaagaataaatgttgasattccggtaaaagaagagctcataacacatctggaagtgtgctattttaaaaaagctcatactgtatcattagtcacaggtaactttgatgtacttaaaatgaaactatttctgtttaaaattagttttaattttttttctaaaggaaattaaagaaggacta

SEQ ID NO: 13055 - DNA, 544 bp, Homo sapiens
tgaaatgtacactctcttacctaaaggctggtaataatagctccaacttgctggcatgtattgtatgactgctgtttacactttatgtatgagtgtattcattgagctttcaccctgaaaggtgggtaatgttatctagattttataggaaaaaagctgaagctcaatatggggaaaactctcaagtcaagtcacatgtttagaaagtggcaaaacttgtgatggaaccaaatctctcttactccttagcctgtggtttttccattggctgagatgccacatggttttcacaaaactaattatatacactggatacaacttaaggtccatgcaagaaaggaaaagaggagagtgaagttttgttgcacctttctttattactgtataacttcaaatattctaaagttgaaggcagcaatctttaatttctagtacataggatttaactgaagaatattagcaaggttttattacatatcatgccaagtagagtaatgtgtacacaaatataatgartgcatattacaaattgttgttaaaagaa

SEQ ID NO: 13056 - DNA, 533 bp, Homo sapiens
gtataaaaagttggcttgcttaatataacagaaactagccacatcacttttcaggagggacacacaattccagctatatttctcagtgtagggacagtgaaattgcagaaactctaaggcaagatcatctctgggttaatacctttaagtattgctattccacaaaagatttgaattgaattgcatgggtaactaaatatcctctaaaaatatcttatttctaatattttgtttataaatatgacagctgacttggaatacatatgtatttaaatttttaatttgcttaacaaagacttcacrttatagaacacagagtaatttatcttttttcccaaaaatgcatgtcctcttatttcaaggatgctgctattgattactttagcatcaataagtgagtgtgacctcaaagatcaacaaggggccaacagatcattttgcgttgtgcacacataaagattttacaataagaattaaaacaaaggcaaatgtttcagtgaggatgcattaactttcagtatatccaaataaaa

SEQ ID NO: 13057 - DNA, 533 bp, Homo sapiens
gtataaaaagttggcttgcttaatataacagaaactagccacatcacttttcaggagggacacacaattccagctatatttctcagtgtagggacagtgaaattgcagaaactctaaggcaagatcatctctgggttaatacctttaagtattgctattccacaaaagatttgaattgaattgcatgggtaactaaatatcctctaaaaatatcttatttctaatattttgtttataaatatgacagctgacttggaatacatatgtatttaaatttttaatttgcttaacaaagacttcacattatagaacayagagtaatttatcttttttcccaaaaatgcatgtcctcttatttcaaggatgctgctattgattactttagcatcaataagtgagtgtgacctcaaagatcaacaaggggccaacagatcattttgcgttgtgcacacataaagattttacaataagaattaaaacaaaggcaaatgtttcagtgaggatgcattaactttcagtatatccaaataaaa

SEQ ID NO: 13058 - DNA, 1377 bp, Homo sapiens
aattaagcaatcaagtagttattaagtacctattttatgacagagaaaacctgtaaaagtacagaatactttttttaatctcatgataggtgttaatactctaaagatggtaaatatatatatccttaaacaaggttttgttaagataaacctttctcattctttcargtttccttttatagaactttcttcagccaggtcatgttcctggttacttcttcacttccttatttctatttgtcaaagtctctcttaaaacgttcaactcattacacattaatttgtggagaatgccactaagcaagaaaaattaattcctctctgtctagtctgttgttttattgcttctaacaaaatatctgaaactgggtcacttatgcagaaaataaatttatttcttacagtcatggaggctcagaaatccgaggtcaaggggccacatttagtgagaacattcttagtggggggactatgcagaatcccaaggctgcacaggacatcacatgctgagcatgtcagcttatgtctcttttattattattacaaagccactagtcccatccccatgataatccattaattcattaacccattaattgattaatctcgtagtcccttatgagtcaattacctcttaaaggccctgcatctcaatactgccacattgggaattaagtttcaacatgagttttggaggggacaaacatttcaatcaaaacactcttcaaatactcttttgtttatttgttttgtgactttttatgtttgagagaagattttattaatgaatcagattttgaacattttaaaagctctcaagttagtctacctaagttaaatctaatgtctgtcacttactagtcctttgaccttggagaggttactttattgcttgagcaattatgtagagaatggaactcagtgaagagaagaaggaggcaaataaactagttataatattatggcaagagtccaaggagataagacgggtgacttaatgaatgtaatgctttactaagcagatactaatggccacattttctgctaagtgcaaatgatatcacattagataagtcatgatccttgcatgcatgtaattcacagtctatggtagaagaaagatacataaaaactacctataagccaagctgttagttgtcataatatgggtccaagtaaagtcctagagaacacaaaattgatttcattattctatgtgtgtcctgaccaacacagtccaatgaggatattattttccattatctaggcaattaacttctattatgcatcctaagattgtattacctttgttaaccacacctcactgatggcttaaattaagcaaggggaaagtagttggttgatttgtgcccttta

SEQ ID NO: 13059 - DNA, 519 bp, Homo sapiens
tattagataatgttatgccaatgttaatatttttgtttatgatttgattgtatagaacatataatcaagtggagtggtattctgttcttgggaaatacatgttgaagcatcaagggaagatgctccatagtgtttttgacttattttaaataattcagcaaaaaggcacacacatatggatgacgtatatgtgtgtattggttgtgtgcatttatttacagagattgagaaagagaatgaacaaaatgttaacatttactgagtctagayaggatgtacacagttgtcaattatattgttctttcaaattttctgtaggtttaaaattgtttttaaatagttgaaaatatttcaatgttaggaaacacatctatgagtaatttgctttatcatcccaccatgaaaagaacataacatagcactgttgctatctttaagcgtcctcagtctaagtcatcttacatgctggaaatgctcttcttttcagaaacagaaaaggaattgtaagcaatcaatcat

SEQ ID NO: 13060 - DNA, 572 bp, Homo sapiens
cacccacagattctgctgaatctataccctccctctgccgcagagtgcccagtaatcagtgatgcccctccagcccacaggcagcccagtcacctttcattccaccagagaagcctctccagttggcaaagaccatcagaggcagcccttcccggttgaagtccttgatggcctgataygtcttaaacgcagaatctgggaaccaaacctggccagcctgctggattatctattaggaaaagtcaaagaagacacaattaacaacacagctccagggggaaatctctccaaggtgaacaagattttacttatttaaaactgaaaactaaaaatcagatcaacaaaaactattgttcatcaagatcatcatgtttggagtaaaaaagaagaaaggatcctcgatctttgaccttgtcaaatactattctttttaagtcctgattataataactctgtagtcaaaagggaagaatgcagtcctaagaacccttgttctaggtttctcaaaagctacttaaaatggctccattgtgctactctttaaagcaagtcaattgtacatagtctcccag

SEQ ID NO: 13061 - DNA, 474 bp, Homo sapiens
tgcaagaattttttttttttttttgacagagtctcgctctgtcgcccaggctggagtgcagcagtgcaatctcagctcactgcaacctctgcctctcaggttcaagcgattctcctgcctcaggctcccgaatagctgggattacaggcatgcaccaccatacccagctaatttttgtatttttagtagagacagsgtttcaccatgttggccaggctggtctcaaactcctgaccttgtgatccgcctgcttcggcctctcagagtgctgggattacggacatgagccaccacgcccggcctgtttgcaagaaattcttaagtgcctattaagggtctagatcctgtgctatgtacaggggatacatcagagaaccagacagacatggtccctggagcttgcaaggctttgctcagagaagtcaggttttccggtcatgcctgtcaaggggaaagttgctagattgtgagatg

SEQ ID NO: 13062 - DNA, 533 bp, Homo sapiens
ttcttggcctctcaagacctctrcttcctaatctgtaaactgggaatcataaactccctcacttggttgttgcaagggttgaatgagcacctggcatagacctggtctattgcaagtgcccacaggagcactttgtagaagcaggaactagagatcccagggtgtgttgaaatcaaaatgacctttgagggagaccacaccatattccgggtacaaggcagggcgatttcacaactgcacttgggtggctgatggctggcttctgatttaagcacagcaagcccagaccttggatgtgagcgtgttaacctttacttcaaaatccctaaggccctgttgattgtggcccagcccttcctgtctgtggctttggttctgcaatggtgccccaggcattggctgcccccacagagagagagcggaggtgtctggggagggacttggtctggggcccacagaaaggctggacaccagagtcatgtctcccccatccaggcagagcagaggaaatagggcagggtggctgccggcgc

SEQ ID NO: 13063 - DNA, 578 bp, Homo sapiens
gctcctgggaccctggtcagcccaggggtcctttgtcccagttcctgtaacttaggttcccataacccctctcaggccaggccacagagggcctctgaagacatggtttcctcttccaacgccacctctgcccaactcgcctgctcttggtggcatttcaccatggggtcaggggtcctctgctccttggttgatgtcccaaacctcactggtgaggccccatgcactttcrggatggttgacactcagagacttcgtgtccacgtgctggcagagggggactccaaaccaacactccaggaccagggcgagggtttctgtgtgatactccagaggctctaggacatctcccctggtccaggtcagctactgggcttgttcctgtgccatcctcactgcagagggtcagaagactggacaggtctggggcatagggatttggcaggcggtgcagaggcgggggggcagtgctggttccaacagacctgaggccccgagggtgatgcttctgctgggcagccgggttacttttgccacggagagaagtgtgcaggtggccctcatagttggtaaatacc

SEQ ID NO: 13064 - DNA, 513 bp, Homo sapiens
ctggggtctgtagtctagcaggaaggaacaaaaaaactggcctacccttgtctaaactagaagtccccttaactgtaattttaatttttcacttatcttcttatttctatgcacatgctaaaaaatgaaagacatacaaatacaacagagatgctaatttttaatttattggcattacttgtctctcagatcttatgaaagcactagatattccttcattaataaattaattgtaggccgggcacggtggctcacacctgtaatctcagcattttgggaggccaaggcaggtggatcacctgaggtcaggagtacaagaccagcctgaccaatatggagaaaccccgtctctactgaaaatacaaaattagccaggcatggtggcacatgcctataatcccagctaytcgggaggctgattcaacaggaaaatcacttgaacccgggagatggaggttgcggtgagttgagatcgcaccattgcactgggcatgaaagcgaaattccgtctca

SEQ ID NO: 13065 - DNA, 522 bp, Homo sapiens
cctaaacctaaaataaaagttaaaaaataagataaaataaaatgaaaatattacctaccaggcagatatacggtgaatatttaacaagataataatgtatactacttagtaccttgaaggccagtttatatttgaaatatagttaacttttctccaccatcagctggcatgcctaaattgtgttatttcaaatgctggttttcctgggtactaatagtgctgtatataaaatgattccatggtcaaatacaaaaaaaaaaatgaggcctcattcctttatcctttctaacatctttggctaggcacaaaaggatttccttggtccaggatttgatatctcacaaatggaaagatatgatttctcattttgtgagtgaggaggaagactgagatactgataattctctgcttttaaattactttattaaaaacaagatctgtgactgatgacacrtcataaattatctaagagccaacactcctcacctaataaatattatttttttctaagataatttacat

SEQ ID NO: 13066 - DNA, 608 bp, Homo sapiens
gcttaagtgatcctcccacctcacctttctttgtagttgggactacaggcacatgccaccaggtaaaaaatgtattttgatatataaatgatcatgaattactacaaaaaaagacagaatgagataatcagatactggaatgtgtagttttagtaaccatgaatatgacagctactaatgggatttcatttaggtgtatttatcaacaatttgagtaccatgaacagtgctgctgtcagtgatatgcacttacaaaatgcagcacaaaacttggaaaagttcaaattaaacacagtgtttcttcaatggagagaatagttagttacattttagtaaaataaagtcattagtagccttgtaaatactattgtytacatgttaaaatggcatctggttctaaattcagatcatatacacaaatgttcaccttgtcagttcttagcagaatattcagaagttgtggatgatgcagaaaataatattgatggaaatggcttgtcatatacatttcagtagaactagtggcccttcatattgcaaaggtgaaatgtacatatttgtgcagaacaaatgtgcatgagccaagttaatggctgaggttcaatgaa

SEQ ID NO: 13067 - DNA, 553 bp, Homo sapiens
ctgacctcaggtgatccgcccgcctcaacttcccaaagtgctgggattataggcgtgagccaccacacccgctgggctgctgtaactttttgttttggaaaatttctaacatccaaaagtaaaaagaatgatgaacccctacgaagccatctccagctgcaagagctattattggctcatagctaatcttctttcacctaacctataacttctatctcccaaactagatttttaattaaaaaaaattttttttagagacaggatcttgctctgtcacccaggctggagtgcagtggtgcaatcatagctcactgcagccttaaactcctgggctcaagcgatcctcctggctcagcctcccaagtagctggaactacaggcatgcaccaccacacccagctaaccaaactggattattttgaagcaaatcccagacatccatagatggtggcctcttaactaagcttcttaagtagcacaggctctggatgtgagcagtggccttgttcctgatccyaacaccgtgcctggctctaagaggtgccctgtaagc

SEQ ID NO: 13068 - DNA, 1345 bp, Homo sapiens
tcaagaacagtaaatatcacccagggactttacattctcttctgggataagggttgctcaattgtacgcagaataattgtattatgttaggccaaagtatggctttgttattgcgtatatttggagattaaatatggtttaaggaaatgcatatggatgccaagttttcatgtggtggactcagatagtgaattttatgtgtcaacttaactgggccaagatgcccagatatttggtcaaatattattctggctatttctctgagggtgttttgtggatgagattaacatttaaaaaggtggattctgagtaaaggggactgtcctccataacgtggttggttctcatccaatcagctgaagatcttaataaaataaagactgatatcctcaagcaagaagggattctgttagaagactacctttggacttgaacttccacgtcggtttttaccttggtctccagcccaccctgcagattgtggacttgttttccgctataactgtgagccagattttttttctatatatacacatcctattggttctatttctctagagaactctaatacgtctactaactcaggatattcttagtggaatctccaaaacaaaatttttacatgttttttagggcattctgattcagttttggaaccttttccagggggaaaattaactataatcctccccttacttatgaccacttcatcctgaaaaacctcagatatttcactccagagttaaacattagctttattttatttatttctgcaaataatatacttttaccttaatggtatttgagaaaattatcctggaataacttattcagagtttcatctactcataatttcttgatgtgcttcactaacatcaactgaatggcaatttcaatgagaagcttttttggaaaaacactcagaaattaattttgaaaactaaaatttagagataaattttgaaggttagacatagaacctattcatggagcaacaggtaatgaggattgcttaaataagtgtagaatacaaaytcagtgctgcctacatgaagtgtcaaaaaatgtatttcattcatgaggtaacacttatgaatagaaaattgaaatagaaaagcattagcttccccaattaaaaacagaattaaagtgaataaaacaagtgagaacaattttcagctattactccctctttaatcttctgaaatacttgcttactaacagtgaagataatgggtaaggagcattatagttctaagtgagaaggaaaacattgtaatcaatgctgaaatagatttatcttaaagtaggggcataattgggcccccacgtcaactttgcatac

SEQ ID NO: 13069 - DNA, 515 bp, Homo sapiens
atggacccagacactggcagttgggcgtgcacagcatagctgggccctgtcctgtgtatttccagtctggtgtagaaggtggaacatgccattatgggtgtgatctgtgtggcagttgtgaggtggacgatctgccacatgcctttccctctgaattctgaatcaattgagaaattaatattagaggccaatggagtcaaaggctcagacttactgctggtaaagctagactagagaatgtggttttcacccaaggccacaccagtgttcctatgcctcctacatctcattaaacttgccactaggtaataggcaaagcagctgcatagatacacrcctcccttcctcgggatgggcaggggatggttactgcaagaagcagccagaaacctagaagggaggccacatacttgcaggcaggcaggtcccaaaagagcgagccaaggtcaggccaggctcctctcatcacacgtgcctgaatccccatctctccaaacagataagtgagttagggt

SEQ ID NO: 13070 - DNA, 515 bp, Homo sapiens
atggacccagacactggcagttgggcgtgcacagcatagctgggccctgtcctgtgtatttccagtctggtgtagaaggtggaacatgccattatgggtgtgatctgtgtggcagttgtgaggtggacgatctgccacatgcctttccctctgaattctgaatcaattgagaaattaatattagaggccaatggagtcaaaggctcagacttactgctggtaaagctagactagagaatgtggttttcacccaaggccacaccagtgttcctatgcctcctacatctcattaaacttgccactaggtaataggcaaagcagctgcatagatacacgcctcccttcctcgggatgggcaggggatggttactgcaagaagcrgccagaaacctagaagggaggccacatacttgcaggcaggcaggtcccaaaagagcgagccaaggtcaggccaggctcctctcatcacacgtgcctgaatccccatctctccaaacagataagtgagttagggt

SEQ ID NO: 13071 - DNA, 2808 bp, Homo sapiens
ggtttccttgaaacatctcagcagggaagttcagtaggcaaatggatgtgggtcttgcctggagatatgaaagtgattgaagtcatgggtgtaaatgagctcacccagagggggaacataggtgggaagaaatgagggtaaaggaagggcttgactaatggtctaggagaaggttgaggccatgaggagactgggaaagtcaacagagccatgggagaatcaggtttctgctacctgtgttcattcacatgctgcattcacttgactttagaggtagatcagaaatacattgaattttgaatcagtgattaaagtttcaaaatttaaaagtgatttgcatatattttctgtcatctttccttttgggcaagtttgctgggaaattttataaattaaagttctatttttcagtcatatctttatctccatctctcttcatgcatcagtatctgcgtatacaccttctgtttattatattgcattttaggtctggaaatataaaagtttatatatatatttatatatatatgaagcaaatagtgaagatggggtattgcacgtagactattaaggaaggacgtgtgactttcatgcaataacatgagagcttgccattttgataggacatctgtatcagtgcggtgaaagagagagacattgagcaaaagctgaagcaagtgattaatgaatgggacaataaaacattcaccttcggcagctttaaaacccgtggagagctcctcttgagaggagacagtacctcggaaatcatcgccaacatggaggacagcttgatgttgctgggatccctactgagcaacaggtgggaaaaccatctatcttttcccttagatttgagaaccgtaatagcaaacatttaaaattaatgaaaaatccattacaataatagccttcatatagtttactcaatgttgaaaatacttgttttaattacattgattaattaatttttatatccaaaacatatttttactcaggtacccacttatatatacatcatcaagagattatatttcaattattcttgttttcattttggcctcaggcacatgttagagcatgtgtaactctggttttatttcattatcctctatttgtggggtatgtctgagaccatccactggacaaaataatgcaacgtataattagccactcggctcttgggaacatttcagcttgctgctgacaagcctgactgcacagctcatagctctacaggctgtagaatccaggaggaacattattttgaatttcagaataatcattttactcgaaaaaccttttttaccaatatctgtggactagaaactcttagttgtttacatactctattttttatatttgtacaaatttatggggtacatttgaacttgttttttttttttttttttttttttgagatggaatcttgctttgtcacccaggctggagtgcaatggcgtgatctcagctcactgaaacctcagcctccctggctcaagtgattctgccgcagcttcctgagtactgggattacaggcaacagccaccacgcctggctaatttttgtatttttagtagagacagggtttcaccatgttggccaggctggtctcaaactcctggtctcaggtgatctgcccgccttggcctcccaaaatgctggcattacaggcatgagccactgtgcctgtccacatgtgaactttcattacatgtatataatgcatagtggccacccctcacattttggacatacaaaccacacagtcatgaatttacatttccttgtttcattgcttccatttgctctttctgaaataatgtttttgttccccagaatcttctcaaatatatggtaattgtgcagaaagtggataccattgagatatgaatttgttgttctattctagctttaaaatatcacccaattctccatatatatgtgtatcaatacttttaatgttggaaatactgtgtacttcatactatttcaaaaaaatttctcttatttcagtttacttgttacactaaagtaatattgggatataaagttagaccattagtaatcttgagtttggacttctcaggatttagtgagttttaatgaacttggttactattcataccaaaccagaataaaggatagacaggcaataatataccctagggagatagaaaagacactcatgtaaattaagtaaaaattatctggttggggtggggaaacttttcttttcaatggcatctaatctacagatagagttattgggaggagtattttttcaatatatatttattgaamctttactatgtgtgtgatgtactcttctaggcgctgtgggtagaacaacaaataagggaaagatctctgtttctatggacctatatttctagtgaagagcatacaaatattcagaaagatgcatggaatattaaaacaatttggttaacaattaagaatatggaaattaaacttttatgcaataatacgacttcaagtccatattatgtagggctagagagaaccatgaagggataagaaagagaagaagagacacaaaggtaggctgtataatcatttaggattaagtttgtctgtaaataacagaaacaccacatacaaaatggctaatataacactgatgtttatattgctcacgcataaaagaattcctaatgtaggtggttcaggttggaatgggggctttaccacatcatcagggacccaagcttggtctggctcactcatctgtctttcccaggtgtgaccttattccccatactacccattacatccaatgccac

SEQ ID NO: 13072 - DNA, 1301 bp, Homo sapiens
tatcgatgttcatactcaacgtgtgtgtgtttgtggtgagcgtgagtgcgtgcgtgtaccagtgtatggatgtttatactcgccgtgtgtgtgtggcgagcacaagtgtgtgcaggacggtgtaaggcagtgctgcatcagccctcatctgtttccattcatttcactcatcatttcacaaatatcaagggaatggatgaaagaatgaataaacaaagaaaaggccccataagcgaagttaaaagacaagacagagacttgggagaagttattgtgcaatgtgttcaacaagggattaataaccgtcttacataaagagctgctcccaatctacaactccaaaacaccaggcagcaggaaactgggaaaacgatatagaagagtaaacctaaatggccaagcaacttctctggcaattcgcacacattacccttgtcgttgaggaaaatggttattcaacttgttttaaaagacaggaatggagtcaggccaacacccattttaaagctgcatttgttccttagcgtggttctctggytcctgctctgcaccctgattttctcttctacacctttttttcctgctagaaaaccctctcagacaacaccctctgcttccggaccacacgtccctgtgatttctgcttctctttcatgggggagagcttccctctgcccgctctaggcagaggtataaggtgtcccttgggatctgaacaggacatcaggaaatgcctagcctgaggcacctacttactggccaagtgaaggaggcggttatggtctgacacatgtggcttgggttttggcacggggtcccactcttccaagagggtggctggggccttcggctttgacaactggaggatccgcgagctggggactgccatttgggctgccctggatacctgggacacctggaaagagaaatagagagaagggttacgtgaaacagtccatgatgcctcgtgggccctggagctgaaggaccccaggagcaacactgaaagacacaagacagactgggaagaagttggtttgtaatgtattcatgaaaggattagtaactatcacgcataaagagctcctccaaaccaataaccaaaaaaaccccaaaagggctgagcaaagggtacaggagacaaaccctaaatggtcaataaccctgtcttttgaccaatgtaatatcaacaattgttggcaaatgtaaattaaaacaacaaaatatcactccacgctcacaaatttggcaacaatgaaaaagtctgacatgatcaagccctggtgagaggctctcatgca

SEQ ID NO: 13073 - DNA, 563 bp, Homo sapiens
ccagtcccgttggctccctgacatccgtggcagccaaaagattcggtgctagaaggcactttccccaggagcggaggaaccggttggccctcaagaatcagagaggaagtgcaggtgggatgcaacaccgcctttcctagaaggccaatgtcaggagcggtgggcttgcctcygcctcttcctggaccgagcgtgcagccatcacttgggccatggagaccgagagagcttccctgtcccacacaggtatggaagcccagagctccaggatcaccacagctgcccaatcatccagaaagaggtgtggagagggaaacaatcatgacgcggaccgccacgaggtttctccctgatggacggggaagtcttgtttgtggaagacactgagccacactaagaagccgccaggcttctcagagacggggcagacacagcaagagggaggtcagagcagaggccagagcccaggcaggatacgggggggccatgccaccaccaccggcatccggggaggagtgtcaaacgggtgactcggccaggaaggccagcctttgagagacaga

SEQ ID NO: 13074 - DNA, 551 bp, Homo sapiens
tttccccaggagcggaggaaccggttggccctcaagaatcagagaggaagtgcaggtgggatgcaacaccgcctttcctagaaggccaatgtcaggagcggtgggcttgcctccgcctcttcctggaccgagcgtgcagccatcacttgggccatggagaccgagagagcttccctgtcccacacaggtatggaagcccagagctccaggatcaccacagctgcccaatcatccagaaagaggtgtggagagggaaacaatcatgacgcggaccgccacgaggtttctccctgatggacggggaagtcttgtttgtggaagacactgagccacactaagaagccgccaggcttctcagagacggggcagacacagcaagagggaggtcagagcagaggccagagcccaggcaggatacgggggggccatgccaccaccaccggcatccggggaggagtgtcaaacgggtgactcggccaggaaggccagcctttgagagacagacatgcttgcccyatccccttgccggcttccttctccgtccctgcgtc

SEQ ID NO: 13075 - DNA, 624 bp, Homo sapiens
gctttcttttttgaccctgccctatcttaaccctgcagttgttctgtggtctctggcctcaagtcctgtggttccacacccacatcccatgttacataggatggcccatgcccagtgtttgaaatagtccctggtttcctacctggcctatcctggactctgagtatatctcacactagatgatyatgattatgatgagcttcttccatttttttctccttaaaaacaaaggtaaaaagtagagtgtgctaaactaatctttaggatcaagttgcagtctgtttttcggaaagttcagtgttgaaatttgaaacctatctcaggaaaaaaaaagaaaaagaaaaagctgttctgaaagtcatgttgaactttgaatttttgaccactgttattttttataattaatatgagtatttatcacagtgctgtcagcaggtccatatgagacccctttaataatttattaccagtgtggggatgctaaagaagcccttcctgcatggaacaaggagaaacactttttggaaaatcaggtaagccttttttcttatgacccaaggaagtttttaaagttcacaagagacgaagaactaatgtgtttccattatttaaacaatgtcatgg

SEQ ID NO: 13076 - DNA, 518 bp, Homo sapiens
gaacataattcagtctttttttgatattaatggtcaatattttggatacaaattgacctacaggccaggcatggtggctcacgcctgtaatcccagcactttgggagaccaaggcaggtgtatcacttgaggttagaagtttgagactagcctggccaacatggtgaaaccccgtctctactgggaaaaaaaaaaaaaattagctgggcatgctrgcacacatctgtaatcccagctactcaggaagctgagggatgagaactgcttgaacccggaaggcagaggtcacagtgagctgagatcatgccactgcactccagcctgggcagctgagtgagactctgaaaaaacaaacaaacaacaacaacaacaaaaaacaaattgacctatagtacaggagatatttttaggggctatctgcttctgtacttccatctgttatttttttaagggacatcgtctcccctccaggtttccagaagtgcagaatatggttccaaagagaagggcagacccca

SEQ ID NO: 13077 - DNA, 518 bp, Homo sapiens
gaacataattcagtctttttttgatattaatggtcaatattttggatacaaattgacctacaggccaggcatggtggctcacgcctgtaatcccagcactttgggagaccaaggcaggtgtatcacttgaggttagaagtttgagactagcctggccaacatggtgaaaccccgtctctactgggaaaaaaaaaaaaaattagctgggcatgctggcacacatctgtaatcccagctactcaggaagctgagggatgagaactgcttgaacccggaaggcagaggtcacagtgagctgagatcatgccactgcactccagcctgggcagctgagtsagactctgaaaaaacaaacaaacaacaacaacaacaaaaaacaaattgacctatagtacaggagatatttttaggggctatctgcttctgtacttccatctgttatttttttaagggacatcgtctcccctccaggtttccagaagtgcagaatatggttccaaagagaagggcagacccca

SEQ ID NO: 13078 - DNA, 555 bp, Homo sapiens
tatctaatctagtttcaccaactgttagtttggataaataaactgacaacagtatctttgtttctatgttttagctgaaaaamaaatcatgaggtattcaccatcagaaataaaatctacatctgtctttgggagatgatgaataaggttacgtaaaacaatggatgcatctatttttctagaaaaagttaattatattgagcaaagccaattagtaatcacaagctgctatgtggcatctctgggactgtggtattgcattcctacaaaacacttatttcattgttcaattttatctgttttgtgtcccggcttcctagtcaaaatgtgttgaaggcaggcaggagcctttcttctttctattatcttgcgatgctgagcactgtgccttgcacagagcaagtgctcattaacctttcattatccgttttgaagtctctaccaagtgaccatcaagagaagcacctgaaggcttggtgataagcctcagtcacacgacaaggtgtgtaagaaatccctaaaaccactccccaaaccttttattcataaacgcaa

SEQ ID NO: 13079 - DNA, 555 bp, Homo sapiens
tatctaatctagtttcaccaactgttagtttggataaataaactgacaacagtatctttgtttctatgttttagctgaaaaacaaatcatgaggtattcaccatcagaaataaaatctacatctgtctttgggagatgatgaataaggttacgtaaaacaatggatgcatctatttttctagaaaargttaattatattgagcaaagccaattagtaatcacaagctgctatgtggcatctctgggactgtggtattgcattcctacaaaacacttatttcattgttcaattttatctgttttgtgtcccggcttcctagtcaaaatgtgttgaaggcaggcaggagcctttcttctttctattatcttgcgatgctgagcactgtgccttgcacagagcaagtgctcattaacctttcattatccgttttgaagtctctaccaagtgaccatcaagagaagcacctgaaggcttggtgataagcctcagtcacacgacaaggtgtgtaagaaatccctaaaaccactccccaaaccttttattcataaacgcaa

SEQ ID NO: 13080 - DNA, 539 bp, Homo sapiens
ctgggtttccatgccccaataaggagacggctctccaggaaacacaacatctgcttgtcttatctcctccaggatgctctgtgctgagcccatcctgtcacagtggcagaggctgcagaactgaactagaacagccaagagcactgtgggaggcattctarggtgggagggtgcctttggaacaatatgagcaaaggatcagtttcacctgatagatggttcttttgtaggacagaaagtcttaatactaaataaatgttacttgatgtgttcactatctaagctctctggcatttcccacaactctgcagggcaatgaataagtagctttgagttttcccttcatcattcctgtgctgccatctgccttgggtggaggcaggaggaggcttgttctgttctgacccaccttctggcttcatcctgcaaaggcctgagagagcctctgagctttccacccctcacccatagagtcatcagaagttctgatgagaaagtgagattcactctaaagaaaacccccaaagatctgggtacag

SEQ ID NO: 13081 - DNA, 538 bp, Homo sapiens
gtctttgtatctgttctcccttcacccccattattagtcctctagtagktggttaccctggcaaattttataggtcttttcgaagaaccaagttttggcctttttgagctgctgtattacgtttgtttccttaaaaaaaaaaaaaaaaaaaaaaaaaaaaaagaggcagacagacaaggtctctttctgtttcccaggctggagtgcagtggtttaataataactcactgcagccttgaattcctgggctcaagtgatcctcctgccttaacctcctaaatagctgggtctacaggtgtgcaccaccacacccagctacttaaattttttttttggtagagatactgtcttgctatgttgcccaggctggtctcaaatttctgacctcaagcatctcttcccactttggtctcccaaagctgtttcctattttattaattttcgttctttatttcctttacttttgtgtgatttactttgtttttctaatattcttgttgagatggctattaagcttattgagttcttattttctagt

SEQ ID NO: 13082 - DNA, 538 bp, Homo sapiens
gtctttgtatctgttctcccttcacccccattattagtcctctagtagttggttaccctggcaaattttataggtcttttcgaagaaccaagttttggcctttttgagctgctrtattacgtttgtttccttaaaaaaaaaaaaaaaaaaaaaaaaaaaaaagaggcagacagacaaggtctctttctgtttcccaggctggagtgcagtggtttaataataactcactgcagccttgaattcctgggctcaagtgatcctcctgccttaacctcctaaatagctgggtctacaggtgtgcaccaccacacccagctacttaaattttttttttggtagagatactgtcttgctatgttgcccaggctggtctcaaatttctgacctcaagcatctcttcccactttggtctcccaaagctgtttcctattttattaattttcgttctttatttcctttacttttgtgtgatttactttgtttttctaatattcttgttgagatggctattaagcttattgagttcttattttctagt

SEQ ID NO: 13083 - DNA, 538 bp, Homo sapiens
gtctttgtatctgttctcccttcacccccattattagtcctctagtagttggttaccctggcaaattttataggtcttttcgaagaaccaagttttggcctttttgagctgctgtattacgtttgtttccttaaaaaaaaaaaaaaaaaaaaaaaaaaaaaagaggcagacagacaaggtctctttctgtttcccaggctggagtgcagtggtttaataataactcactgcagccttgaattcctgggctcaagtgatcctcctgccttaacctcctaaatagctgggtctacaggtgtgcaccaccacacccagctacttaaattttttttttggtagagatastgtcttgctatgttgcccaggctggtctcaaatttctgacctcaagcatctcttcccactttggtctcccaaagctgtttcctattttattaattttcgttctttatttcctttacttttgtgtgatttactttgtttttctaatattcttgttgagatggctattaagcttattgagttcttattttctagt

SEQ ID NO: 13084 - DNA, 508 bp, Homo sapiens
gaagtctattacatagcttttctatgccttattttaagttaggagatatgttttctrtaaaatcatattgggaattgttttggtgctatacttataaaaagccctggttcatttgctagaacatcatgcttccttattttttctacttcagtagtttatagtttatcttggtatattatcactacttcaactaaggttatttttatctttgtttagtgtatacagatctgacctgatacttattctaacactagctttttaaaataacactagtttttacttatgtctatcaaaacttctgcttttttatttacctatacttcatatacagaatggcttctagttttacttctcttaaattgtcttattaatttcaaatagaggcaagcattggccttctttattatgtctttgagtgtagctatgcctgggaatttacatgttaaaatacaatttcattatgttattttcatttctttctcttttctattatagtgagagttatttt

SEQ ID NO: 13085 - DNA, 519 bp, Homo sapiens
agtacagaaacagaaccttactcyataaaggcacaggtagtaataatcacagtcgtaactgctcgctacgtaccagatactttgcccttagggttgttgcaaagactgtaagagacgatctgtactaagtgttgtctctatggctgttttatatatgaaacatctaacacttagagaagctaaatagcttgccaaaggcacacaatgagaaatcagagggacacaaacggcaagtattctgactccacagccataataataatcactgaacaatacggcttatgttttaaggatacaatggtttcaatctttacattaaagccagtgatataggaaaagatgaggaacttttattaaaaatgaagaagcctttattatgtaatcgaagtcatgttctacgaacagtacttttgaatgttttactgaaaatgaacttttttttcttcaaataaaacatggtggtaaaatacgattaatatgacatgacattacaaaagaagcttttgtcatgtagctcag

SEQ ID NO: 13086 - DNA, 492 bp, Homo sapiens
atatcacctaggtcttgaagagataccataaacccatgcacaatgtaagtcaagtaattgtgaaattttaacgcaagtacaagaattctatctcactggcatcaagacttggtggagtggggttcagaagaatttattgcaggagatctgcttctttctagagaacatttcttattcatgtttgaattctcaggatctagcccagtgtgctgattgaataaatgttgaaatccataacccccaaaagaagtgactgggaggctgggcacggtggcttatgcctgtaatcccagcactttgggaggccgaggcgggtggatcacctgaggtctggagttcgagaccagcctggccaacatagtgaaacctcgtctctactaaaaatacaaaaattagctgggtgaggtggcaggtgyctgtaatcccagctacttgggaggctgaggcaggagaatgcctgagcctgggaggcggaggttgcaataacccaag

SEQ ID NO: 13087 - DNA, 628 bp, Homo sapiens
gaccagctatggccctcagtcacccgagacccagaataaggcatggaattccaccatgaaccatgtgtgtttaaatgagaagggaagtcactgaatccagatctttctttctcagctaatgatcagaagtaagttttgtgtgaagcttcaacaactgtaaatagtaaagcatcattgctctgacctcaacctgctctgaactcttcttctaattagatgtctctggtttattcctgtggccaaagcaagatctctctccagattttctagggtattctccaccttcagcctcctggcaagtgtcccaccaaaagaaaattgaaaagtattatgtaatgttatctttgttgaatgtcctctttgaggggctgctgccattgataggcagtagcagtacaaggagaagctcatggtgctgttcgtacctttccaagtgtccctacctaacttatctagacrgccattgctatggatagcaatttattgtgctattatagatagcattttattatgctataaaatatctgtaaaagggggaaaataataaaatttctagctatgaatgagcgtccctagcatctttagggatgctcattcatagcttaacaatttgtatgtgatgggaaaa

SEQ ID NO: 13088 - DNA, 628 bp, Homo sapiens
gaccagctatggccctcagtcacccgagacccagaataaggcatggaattccaccatgaaccatgtgtgtttaaatgagaagggaagtcactgaatccagatctttctttctcagctaatgatcagaagtaagttttgtgtgaagcttcaacaactgtaaatagtaaagcatcattgctctgacctcaacctgctctgaactcttcttctaattagatgtctctggtttattcctgtggccaaagcaagatctctctccagattttctagggtattctccaccttcagcctcctggcaagtgtcccaccaaaagaaaattgaaaagtattatgtaatgttatctttgttgaatgtcctctttgaggggctgctgccattgataggcagtagcagtacaaggagaagctcatggtgctgttcgtacctttccaagtgtccctacctaacttatctagacggccattgctatggatagcaatttattgtgctattatagatagcattttattatgctataaaatrtctgtaaaagggggaaaataataaaatttctagctatgaatgagcgtccctagcatctttagggatgctcattcatagcttaacaatttgtatgtgatgggaaaa

SEQ ID NO: 13089 - DNA, 529 bp, Homo sapiens
tgactatgccaggactgaaatatgagatgtatttgtgaggttaaaattctttcagaaaacttgctaaaggaaaggaagtattataactgtctattgttataatatactggcattatgatttgaaagtcaaacctctctagcataggcagctaaatgatatttgtcaaatactgataattcactgaaaaaatacatttttatggttgtagaaatgactgaggtgctcagccccttacattagatactagccagcctcggactgttgcatttaaattttggaacttagggwtggcattctgagattttatgactgccttggaatcttaaatactctctctttgaaaaagctggtttcaaattacctcttcgaattgtggctacagtgttagtttttttttcttctaaaattttttttatgttgtttaggcattcaaatgatgagtcaggatatacttttcaaaagttaaaaatataaacaactgccattgaaatagagaatgtgtatatgtcaaaaactattttatctgta

SEQ ID NO: 13090 - DNA, 529 bp, Homo sapiens
tgactatgccaggactgaaatatgagatgtatttgtgaggttaaaattctttcagaaaacttgctaaaggaaaggaagtattataactgtctattgttataatatactggcattatgatttgaaagtcaaacctctctagcataggcagctaaatgatatttgtcaaatactgataattcactgaaaaaatacatttttatggttgtagaaatgactgaggtgctcagccccttacattagatactagccagcctcggactgttgcatttaaattttggaacttagggttggcattctgagattttatgactgccttggaatcttaaatactctctctttgaaaaagctkgtttcaaattacctcttcgaattgtggctacagtgttagtttttttttcttctaaaattttttttatgttgtttaggcattcaaatgatgagtcaggatatacttttcaaaagttaaaaatataaacaactgccattgaaatagagaatgtgtatatgtcaaaaactattttatctgta

SEQ ID NO: 13091 - DNA, 1055 bp, Homo sapiens
ttatcatttctttgtggtaaggatattcaaaagcttctcttctattttataatacaccatatcttgcttaatgtcttacttctgaagataatagtggttacttagggatgtgtgtgactgcttacccttcattaaattatgtttctagatattctttagcatatataaatgctttaagttatttgtaaggttaataaaaacataatgagaagctcctagaatcagtgttaacaatgaagaaccagatttgaaaaactagcagaaattctggaagtcttgtctactgagaacacacgtgactggacactgaacgttgctcagtaatcactgccaggataaagtctccattgaccatcatgcaattttgtatctttctctgtctctccatactaagcgcacacacacacacacacacacacacacacacacacacacacacggaaatctgaaatctgacatgcttattgcactgttacaagcagtctgggaaacataaatatcttttcagcttcagcagtggcaactgggccctgccaatatcccccaggccatcaggcaaccctgcttgatatataggcttattgaaacttcaaatagttaaggaatttgtctagtgaatgacagaattcaggcaccacatttcctcacttgtacctctgtgtttcctggcaagaggatcatttggtaaacctaggggtagaagccaaagaagaaaaaaggcttgcttggtttttctttgtctttcacggaaaaacatcttttcattagagcaaaagacctgtttctttaaggagcaacttctactcctacattcacatcttaaaccaacccccgacacatacacatacaggtgcatgcacacatttatttattggttttgtttggtgggttgatagtttttatcttttctctgccactatagagacatagcctttgggatactattatgtgaaaacatcagtttyttatttataatgttactttatatgtacacatttgaaatttcagcaatcatggaaaacagaatcctttgtattctgtattatgcagtgtaa

SEQ ID NO: 13092 - DNA, 724 bp, Homo sapiens
tgatcttaataaattataatatttgattttttatttttaaaaatattactttttttagagacagggtcttgctctgttgttgctcaggctggagtgcaatgacatgatcatagctcactgcagcctttgccttctggtctcaagtgatcctcccaccttggtctcatgagtagctggaactacaggtatgcacccccatgcctggctaatttttgaaattgttgtaggaacggagtctcactattgcccaggctggtctcgaactcctggtctcaagtggtcctcccaccttggcttccaaaaacgctgagatttcaggtgtgagccactgtgcctggcctcacaatatggactcttgagccccataactgaaccgcagaataagaatccctgtgtttatttggaggttcttttccagcaagcttttccagggctccctatgcagccagcttcayatgtttaggaatcattgcactacaatataggctagacatactgatgcaggatttttgctccttagttcagctaaatctgggtttttgtctcatgaccaggaaaaattaggcatgtagacacattgaagggtgaggagggtacaatttatttattttacttattttgtattttaagttccgggatacatgtaccgaatgtgcaggtttgttacataggtgtacatgcgccatggtggtttgctgcacctatcaacccatcatctaggttt

SEQ ID NO: 13093 - DNA, 654 bp, Homo sapiens
gtattgatcacttactatgtataggtaacacacaagattcggtccctgcctttttagagctcccattctagcaggaaagatatatataaaaccattcattatttacttttcattacaataaaacagaggaccatgctatgagagtaagtaggtaactggacccaagcaaagggctgaggaaaggcgtttttggtgaawtgaactcaaaaacatgagtaagaattaactagctggggtggaaacagggtgcaccaccaacagacagtggaaactactgagcgaaggtggggaggcaggaaggagcacggattgcgactgtctttcacagcaggataaggtgagtgagttggaggcacctaaggaggcaaagagctggatgcaggcaggagtcccatactctctgtcttaggctatgagtaaggagtgcagggtaagtgcatgtgagctctgctgcaaactcaggggctgcccactctactttagggaccaagaaggttgggtccagggcagtgaggcctggatttgtatgttaaatctctggatattaaatgttgcctgaatttaaaacaaaaacaaactctgagtaaataaaatacatacagtcttcaaacctgcaggtagtgaggttgcaaccacaggattagaggatctaca

SEQ ID NO: 13094 - DNA, 542 bp, Homo sapiens
taatcatgttaatacaagtcctttttaccatgtatggtaacacattcacaagtatgggggattgggatatagatgtatttgggggccattattcaacatgccacagatgtcactgtaaggctctttggattatagattagggtagtgaattaaaagaaggccctctggacacgcaccacccactctgcactgaccagcccacctggatagcagaggacacccccagcccccaccaagcattgaagacatagtttatttcctcatatcctttctccttgggtgtagttggggtggggaaggagggaagactggggtcatctccattccttgggctctgtgccgagtccatggtgcrccactgtgctgcgagctgtggggcctgctgcagtgggagtgtgtggaacaccttgaccaaaggggagctttgtcttgtgtgttttgaaaaaggcttaatgaagagaatgttgttcattcttagtagtatagtttgcaattcttaatgacaaatagtaagtttcagtagaaaacaaaacaaaacaaaa

SEQ ID NO: 13095 - DNA, 537 bp, Homo sapiens
caccatgcccagcacatttttgtatttttagcagagacggggtttcaccatgttggccaggctggtctcgaactcctgacctcaggtgatytgcccacctcagcctcttaaagtgctgggattacaggcgtgagccaccgtacccggcctgttcactttattccaagaacctagaaaaacaccaggcacacagcaggtggccgtaatgtgccagcaggaggtagtctgaggaaagttgactatagctgctcccaaatcatttttgcggcaaagctgacagacaggtggccgatgagtctcaggggtgtcttagcatattttgtgatgctgtaacagagtactgcaggctgagtcatttatgaaaaaataacagttcatttgtctcgtggttctggaggttgggaactccaccactggagggccatgtctggtggggccttacatgggggaaagggagagaaggaatggggccacattcaattttataaccaacccactctcatgataatgagcccgctcctgcgatgaggacaaatc

SEQ ID NO: 13096 - DNA, 546 bp, Homo sapiens
tggcaattattgactgtgtctaacaaaatcttagggaaaagaataagctcagggggggaaaaaagcatgcaaggaaacctgaaaagaaaagggagagtaatttggtacctcaaaaatttgtgtttctatttgttgacttcaaagggtagaaattttgattaggaaagagttgagaacagcaaacacgcaaaaggccattaaaattccacccaatagaaaggtcacatgggggctttaggcctgataatttcaattgaccatcattcagctgagtgaaagagatgtggggaaaagtgttgaagttgcagataccaagatgaaagcacttttgtcagacccagacaaaacagggctgggaaggagaggctgaaggagaggaggctcatgcttacatgtcaaagatargaactctttccaatgactttctaaaaacccttcatgcacctcctgctttgataaatttatcactagacattctttagtgccacagtgattcagataagacattctcagatgatcacttgtctagtaatggcatctccacca

SEQ ID NO: 13097 - DNA, 418 bp, Homo sapiens
  misc_feature (1)...(418): n = A,T,C or G
agtttttcagtttttccttgtttttcatggcctgatacatttgaggggtagtagtgagatattttatagagcattcccaatacagatctgtcaartgggttttcatgcttggactggagttacagatttttgtaaataacacgacagaggtgtggtacatttgccaacatcccaccaggaatacatggtatctacatgtattcctaaatggagctgttaaaccttatctcttggttaaaatagtgtctactgaaaatttattcacaaagttactatgattcttgtccaattgtttttcatttactatgtatttacttnnnnnnnnnnnnnnnnnnnnnnnnnnnnnnnnnnnnnnnnnnnnnnnnnnnnnnnnnnnnnnnnnnnnnnnnnnnnnnnnnnnnnnnnnnnnnnnnnnnna

SEQ ID NO: 13098 - DNA, 568 bp, Homo sapiens
tcataatatgaacatattttttcaaactactttcctattttatcagttctcttatttgaaaaatatttttaaaacacaaatgacatgtttaaatccttatttaaagaactgcttggccaggtgcggtggctcacacctggaatcccagcactttgggaggccgaggcagggagattacgaggtcaggagatcaagaccatccaggctaacatgatgaaacccgtctctactaaaaatacaaaaaattagccaggggtggtggcatgtgcctatagtcccagctatttgggaggctgaggcaggggaatcgcttgaacccaggaggcagaggttacagtgagccgaaatcgtgccactgcactccagcctgggcaacagagcaagactctgtctcaaaaaacaaacaaacaaamaaaaaaaaaacaaaaaaaaaactgcttatagaggtggagcaagatggcaaaaatagaaggccccactgatcatctcttcaccactcataaaaacccacaaatttaacaacaatctacaaagaagaaacacctccatgagaaacaaaaatcaggtg

SEQ ID NO: 13099 - DNA, 591 bp, Homo sapiens
atataaaagcatggaaggttggagacagggagagagatgaagccgggctgtgtgggcagggcaaagcaaagaccttgaggagrgaggataagtgtggtggtgagagaagttaagtggcagaattaaaggttacaagcatttataaatacaagttaagatttccccatactaagaaacaagaagtgtactgcagggtgttttgccccatatcttgggcatcactgtgtgatttgggaatgttgttaacttaagcttttctctccatgagaaggaaaagcagccttctctgacctggcaaagttgtggacttcaggtaaagcagagaccaggtgagaatggctttgcacggagtagaattggttaaattttcctgacacactctggcatcttggcagctaaatgtcaggttccaggtcagagcagaagtgtgtttacttaaaaacaagaccagcagggtgaggcctggctgctccagctgcttatgatgttgagcatctgtgatgtgaaggtcacaatagcttaaaaattagtgagaaaagacgttcctgttgttgtgtatcatcaagaatataaaaggaaaacaactcttct

SEQ ID NO: 13100 - DNA, 564 bp, Homo sapiens
caaaagcaggttatgagccagaaatgggccgtaggatgttgagcctaaattccacagtaagggttgggcacagagtggggtgctaaataaatggtgactgtggataggaggaagaaaagaggtaaacagcattgcccaaggagagacttcagaggccctaatttgccagagaatctacccagtaggggagaaacaaacaaacctaaaagtttggatggccacttatctacaactgtaggtagtctttcatcaggcgagggtcctcagaactcccagttcctttgaccaagaaaggcttgagcaaggctgttgtaaggcatcacgacagcacacaggaaggggmttgcaactggctaaggaaaataataacttctcacttcaaggcagaaaaggataagaccaatatcccccccagaggagtggctataccccacaattctagaggaagtgtcaatgccaaagagcccagagcatccgggaagtgaccaataccaatgctgaaataccagagtgcccaagatcctgtgaacaagggtatccacatcaaatgttgacaaccccagg

SEQ ID NO: 13101 - DNA, 514 bp, Homo sapiens
cctccccaggagaatgcaagctccctgatggtaggttcattaactgatgtatcaagtgcctagaacagcactattcactgaatttgctgaatggatgatacagttgtaggaactcagcaggcactcaaaactgtgtgtgtaaactcacaaaaacacatatttatagttcaagatgatctaagtttaaactttaacgtggtttttaaaaattaatactattgcctacatttcatttttgccagcaaacaatacaaacaacttatttttattaattcagactctgcctgttctaaaaaggttttaaggaggtatacaaggatatataacatataagagaataaaytagaaatagtgaaaaaagacaaaggccaaatgtgaatgaagtcaatataaaaaacacacaaattttagatagctatacctttgctacaaaggacacaaatgttcttcattttctagcatgcaatgcaatcagcttcacaacttgcagctcccgttagatagaaacaaacaa

SEQ ID NO: 13102 - DNA, 514 bp, Homo sapiens
cctccccaggagaatgcaagctccctgatggtaggttcattaactgatgtatcaagtgcctagaacagcactattcactgaatttgctgaatggatgatacagttgtaggaactcagcaggcactcaaaactgtgtgtgtaaactcacaaaaacacatatttatagttcaagatgatctaagtttaaactttaacgtggtttttaaaaattaatactattgcctacatttcatttttgccagcaaacaatacaaacaacttatttttattaattcagactctgcctgttctaaaaaggttttaaggaggtatacaaggatatataacatataagagaataaattagaaatagtgaaaaaagacaaaggccaaatgtgaatgaagtcaatataaaaaacacacaaattttagatagctatacctttgctacaaaggacacaaatgttcttcattttctagcatgcaatgcaatcagcttcacaacttgcagctcccrttagatagaaacaaacaa

SEQ ID NO: 13103 - DNA, 1643 bp, Homo sapiens
ggcaagtgcctgtagtcccagctacttgggaggcagaggtgggatgatcacttgagcctaggagggagaggctgcagtgagccaagccatgctcaagctgctgtactgcagcctgggtgaaagagctaggccctgcacgtcccctacccccaccccaacaaaaaaaaagagaagaaaagaaaatctgaacagatctctcataagaatttttaagattcacataaagagaaagatggctttaatggtgaattctaccatacatttaaataattaatacccattatttacaaattcttcccaagaaatagatgaggagggaacatatacaaacttattttgtaaagccagtattacccaccctacataaaaaaccagacaatgacattataagaaaactacaggccaatatttctgatgaatagacacacaaatccaaaaacataccaggctaatgaaatccagcaacatataacataaagaaggtctatacaccacaaccaagtgggatttatcccaggaagaaaattgcctatttgcaaatcaacctttctcctttgtgcttcttatgtataaggatcataatttatcttaagatcctcagccacttgccaataacaaaggtatgtcattctctttatgaatggctcatctgcctcgaccccattctttacttccttaaactgctttaatttttcatcatgtcamttttatctggcattacatgttcatttattccctgacatatccctggtgctttacggacaacttgacattttgataggtcttaaatatttgtttaatgatagcaactacataaatcccaaattctataccaattcctaagttgcaaaacattacttacctaagttcttcaggttttgtagcacatgctaacagaagaaaaaagataacacctcattagtttcatcttacatgataaactgctgcactattcaaagcaaaactttaactaattgctttacaagccatgtttcacaaccataaatttatttctttgagaaagggtctttcatgattttgtagagataggggtgggtctcactactgttgcccaggctggtctcaaactcctaagagttgagcttttgggctcaagcaatcctcccaccttggcctcccaaagtgctgggattaaaggtgtgagccaccacatttggccccaaccataaatctaaaaaccttcaattcaccaaagtgttttgggattcacaccatagaggcaacaatggcaattattttcatttttcaaataaagcaatacaatgcatatatatctcctccttttaaacagaaccaatctgtaagcctccagagtgagctgactgattatgaattatcatcagtggaaaccaagaggaaacttagggttttaaaatcatcacaattcatttatagctgtatatttaatttacagccacaccaaaacttatgagtataaatcatttttataaaaaagttattactggcaaacatcagatcattacagttgtttttggacaactggtgatgactctgacagggggaatacttaaaattaaatttgcctttttaatgccattcattgttaatgccaatccaggttaaaaccaaacccagggttgatttgatcggtcaggggaaat

SEQ ID NO: 13104 - DNA, 594 bp, Homo sapiens
ctccgcgcctggccagggaatttattatataataaaatatctttcataattattgggacaatcagagtctttattttattttattttatttttgagatggagtctcgctctgtcacccaggctggagtacagtggtgcgatctyagctcactgcaacctctgcctccagggttcaagtgattctcctgcctcagcctcccaagtagctgggactacaggtgtgcaccactatgcccagctaatttttatatttttagtagagacagggtttcaccatgttggccaggctgatctcaaactcttgacctcaagtgatccgcccaccttggcctcccaaagtactgggattataggtgtgagccatcccatccagcctgaatcagagtcttaacctgagactaacggataggcttccaaagattcacaagatccctgatgttttatgcaaaattttatatgtgtgatgtacatattttgggggagactgtccacagcttcccttacatttttatttatttattactttttttaaaaaaatttttcaagacgaagttgcagtctgtcacccaggctggagtgcaggggtgtgaactt

SEQ ID NO: 13105 - DNA, 594 bp, Homo sapiens
ctccgcgcctggccagggaatttattatataataaaatatctttcataattattgggacaatcagagtctttattttattttattttatttttgagatggagtctcgctctgtcacccaggctggagtacagtggtgcgatctcagctcactgcaacctctgcctccagggttcaagtgattctcctgcctcagcctcccaagtagctgggactacaggtgtgcaccactatgcccagctaatttttatatttttagtagagacagggtttcaccatgttggccaggctgatctcaaactcttgacctcaagtgatccgcccaccttggcctcccaaagtactgggattataggtgtgagccatcccatccagcctgaatcagagtcttaacctgagactaayggataggcttccaaagattcacaagatccctgatgttttatgcaaaattttatatgtgtgatgtacatattttgggggagactgtccacagcttcccttacatttttatttatttattactttttttaaaaaaatttttcaagacgaagttgcagtctgtcacccaggctggagtgcaggggtgtgaactt

SEQ ID NO: 13106 - DNA, 559 bp, Homo sapiens
ctcaataatgttgatagctttgtgtacagattttgcayttgacagaatatgaagccatttatggtgaaaactttcaggatagtagcattagaaggatactacttcaacgtggtagaggaaagtctaaaaaaacgcctacagctaatattacatttgacagtgaaagaatgaacactttacctctaaactgtagaacaaagtaaggatgtccactctcgccacttctattcaaaattgtaatgaaggtcctagtgaataaaataaggaaagaaacaggaaaaaagggcatatggattcaaaagcaagatgctaaagatgttaaagactctatgaaatggaaattagaactaataagtgatttcagcaagttttcagggcacaagattaataaacacgtcaattatatttctacatactagacacaaaccatttaaacttgatattttaaaataccagttacaaaaccatcaaaaaaattaaatacttgaaataaatttaacaaatatgtgcaggcaaattttctcggtaattatttgcctccaataagctgcacccattt

SEQ ID NO: 13107 - DNA, 520 bp, Homo sapiens
aatgattttgygtaccttctccagccactgtccacctcaaggaaagtgcatggattgatacagaagaggactcaaagttggagttctaggattgagttgtcaacattgtgatcagttttcctccccataccatggagagaggacatgccttgctcctgtctcttaagtccagtgactagggcttacctgagaccacacacagagcttgatatctgtccctggagcttgtggaacacaggagactgcccactggtgagcagctggctgaagaggcctattgtagaggacatttccatttggaagtcactccctcttgcctatatcatggcaagggagtgtgtggcagattgagtttcctggaagatgactctgagggggaagattagcatgaggaaggtttattagagtgctcttgggatagcacccagaggaggaaaggagaagaagcaggatcagagagaagtggacccccactgcccggatctgaagctgggatggcccttcagagttgtcccaaggc

SEQ ID NO: 13108 - DNA, 1054 bp, Homo sapiens
atattctccaaagggtgatagagctttgaaaagttacagaagtgaaaaccagagatcctctgacatctgctgggagatggaagcctgatggtgacataaacaacgagccactcaagtgcttccctttaggggcgctaagagtcccagcagtgtagccataatggctgggtgcaaaccctggcagctttctacaaactagctgcctgatcatggcctctcatctgtaagatggagacacaagaccacacagggctgtactgaggaattacataatccctgggaatggtaactggtgcatgagtactatgtaatgttgtgtatatatatggacagagagtaaaatggacatacggaaagccaactacttggaaaaatctggatgctatcaagacaaatgagaaccagccccgaacatatttcccagcagtgttctgtgtgctgggaacatagtagcaaacaacaagcaagctcctgccctcatggagcttacaatccagcaggactagacagaggcagagaaagccccaggttctagcacctcagattgtgcctgcaaaatcacctgggcgggcaggcaggtgcaagctgcagaagacacacaagccacattttaacccagtctgtacgggtcataatttctaatacatcttttcgataatggtgacttaatacaacttaattaaaactccaatgttttaggcgttatcccagagaatgccaccattaatgggagactcgaacctcagtgtttaaaacgggttggcaaactatggcccatgggccaaatctggcctgyagtctgttttttatggcttgtgagctaagaatgatttttacatttttgaagtggtcgaaaaaaagacacaaataagaagaggcaacagagatagtctgtggcccataaagcctcaaacatttactacctggccctttacagaaaaagtctgctgagcctgagctagaaaaagagtaagtaaatcgcttagtgatttccaggaatgtcatttcatcatttattgcacactgattacaagaagtgttagatctgaaacca

SEQ ID NO: 13109 - DNA, 563 bp, Homo sapiens
ctttctgcygaaaattcatgacaagccaataaaattctgcactggaaaacaaacaaaaagcaaacataaaagggctaaccaaactcattttaaaaacatacattcatatttgcatgataatgcataagagccaaaccagtttaattcaaattgcataacaatttcaataaacatgatgtttcatgtatataaaataaaatacatattaattgccattagatgccattactagcttaccccattatgtattaagttcatataacaagtgtaaaacttttagagaaatccacactttgactttcatcttggttctgtaaataacaagactgctatataaacagttgttttgaataaacattagaaatacacaactttccgtactgacattttttctagaatttttggcatagtaagtcattattttatatcatagcacaataaaatagtttctaaataaggcctgaggttaattttcccacctttgcatagaaattacattctatacttggtcatgccgttctctgttgtggaaggtgaactatgctgtaaaactaacagggtct

SEQ ID NO: 13110 - DNA, 563 bp, Homo sapiens
ctttctgctgaaaattcatgacaagccaataaaattctgcactggaaaacaaacaaaaagcaaacataaaagggctaaccaaactcattttaaaaacatacattcatatttgcatgataatgcataagagccaaaccagtttaattcaaattgcataacaatttcaataaacatgatgtttcatgtatataaaataaaatacatattaattgccattagatgccattactagcttaccccattatgtattaagttcatataacaagtgtaaaacttttagagaaatccacactttgactttcatcttggttctgtaaataacaagactgctatataaacagttgttttgaataaacattakaaatacacaactttccgtactgacattttttctagaatttttggcatagtaagtcattattttatatcatagcacaataaaatagtttctaaataaggcctgaggttaattttcccacctttgcatagaaattacattctatacttggtcatgccgttctctgttgtggaaggtgaactatgctgtaaaactaacagggtct

SEQ ID NO: 13111 - DNA, 525 bp, Homo sapiens
attcctttaagactgtgcccatgcactctttggaaagattctgctttccaagcaatgcagtttgaagacctgtgatctagtaatcttctttacacattttgtttattggacagaatgtgttgctcagtataatgtgaatatctagtccaaccaggtctatttcttataaatttattagccagggtttggcttctctatatgtctctctggtgacatgcatgtctggtccattctaggtatttctgagtaaacaatactaggatcagattataaaacttgcttatatcactaaaatattattttgtgtcttcttggtggtcattctgtccctcctggacagcctcatgcctgactggacactgaaaaagaggtgaagagatgaggcgatagaacaaaagaacagaaagataatgaagctgagactaagtaagtgaaaggtgaataaaattctctggtgttgacttgcagaaaggaatgtgyaatgtgtgtttctattcattagatgaattattttattcattcagt

SEQ ID NO: 13112 - DNA, 798 bp, Homo sapiens
taactgcaccggaagcctccacttcctacagcccaagtcatcccctccttcatccttmccccccgccctgcacagctcccctccttattcagctttcccccaccacttttacctacagactcagggatgggccccttcatcttggattgatgcttcatcagcctgggtggggcagcggtaggtgaagtctcaacatcttacgaggtctggactctgatcttactgagtttcaggatgctggcaggtaaagcagctgggatctgagcagtcaccaaggcttctgggaacgccgttctgtggggcccactcaatctcaaagaaggcgacaaggaaagcatggccatcactgaagggtgtggtgattccatacgacaaatgaatagacactgcttcctgacctcggggagttcctcctacctggggaaacagaaacacacagcaagtgagggattctaactgtattgtgttccttcactacatccatccaggtgtccccatcgtggtgccacctccatagggtttgagttaaatgtacaggaagtgcatgttgctgtccactgtctaaattaggagtgatactcccaggacacccacatcctccagatgattaaccatctggtatcctggcgggggctgtgtttgcttcatgacttgtgtgggccctggcaccaggaaggatggtagctgctctcgttgtgtctggacaacaatcagtacacgtggagaaggggcacatgtccctggttatgtggacagtcttcatttgtgcctgggattttaacgtctctgcatgctatc

SEQ ID NO: 13113 - DNA, 592 bp, Homo sapiens
atgcctacttttaaaaagggtgagcataggaatggtcatatgggtcagtactgagttgcatccctcttgcattaagtcaaggcccaagggaaatgtacaaatcctcacaatgctgaatcctgtgaagctatggatcaaggctatgttccacattcattagagccctcaacgtgcattatttcctatctgttcagtctgaagccttcaaaaaataaatattttgatggaaagtagactagtagggtgaccaacttattcctatttttctaagactttccccattttagcacagaaactcctgtttcctggcaaccccctcagttccaggcaaaccaggacagttgggtwactctatgtgtaatgcagtaaatcatctaagctgtttgtattttattcaaacaaaattttacttccaattccaacataaaccagttgcatttgaagctgctgtgctctaaataaggagagatgccaaagcctttcccaattaacccaatgctgtcatcatcatccctaactcttgtccaagggttctatgaggacatgtgattacatcatagccttcctgcctgtctctcttattggctaggtt

SEQ ID NO: 13114 - DNA, 472 bp, Homo sapiens
tcagtcaccctagctggtgtctcaattagtcatatgccccccagtccactgtctttgggcccagttcagcactaggactcaccaaagaattgcagtctttgtgacctagrctacctttcaagtttacttagaaacctacagcactgtagcctttggtggtgaggtttgcaggaactcaagttctgacagctggtatcggggattccgctatggctagtactggtttaaatgctgcttaggtgggcaggtgtcagctgagtttggtctggttttcctttctgctctaacaggacagcacggaattcaatgcatcacaagtgatttgagttttctggagtttcaacagcacctggagctgctctctgcaccaccagcacctggagatgctctctacaccactagcacctggagatgctctctaccccactagcacctggagatgctctctaccccactagcacctggagatgct

SEQ ID NO: 13115 - DNA, 491 bp, Homo sapiens
tcctgcaggtgtcacaatttcaaatacttataaggaaacttataggcaaactaaatgaatgaagcaggtaagatagaggacttacatcaagtagaacttgctatctctgttatctctctctacttctgagttatttttaactcggaacttttgctttggtgttctgcaatttatctacatatggcaggatatatatttagctttatttattctgctcaggatccattgtgaatctgaagagtcgtatattttttgaaactccagaaaactcaaatttagtatcattttaaacattgcttctctccaatcatattatctatttctggaacccctattatatatacatgagacttatttattgtacttaaaattttttagcctggtttttatattttacatcttttctctgtgtaatgatttttcatcaatttaytcagtgctaccttttatttccctaattctctcttcagctttatctcatctgcagttta

SEQ ID NO: 13116 - DNA, 3919 bp, Homo sapiens
  misc_feature (1)...(3919): n = A,T,C or G
tgcattccatattctccagactgggaaggatcatggtggggaagatgcccaacaaaaagaggtgaaaatatttcctgtatctacatatttgcccatcttaggaggagtggctgagccctgagttgaataagacttgagaaccacacataagccttgtgtttttcttccattcattcgacctaaagggagagagttagtataattgatttgtcaggatagccaatattttctcaagggaacatatagtaactagagaacatgtttttcagtagctgttaggagaatcccatcacaagaaaacacacagatttgttagagagatgtcagtagtaaagtccaaagaagcttcctgttggcctccaagttttattggtaaaaagctaatttgaataatatgaagggaggggaagagcttaggagctgagagaggcaaatttccataaagaagagcccaatctaacaggctttggggaaaagacaaacttctaagacagtattattgaattgttggctaagtgacatataaagtaaaactcctccagctctgttataaaatcaatgttaaatcttacatttccaattaatgccttcatggcagttgttctgttttttttttgtttgtgggaggaactcagaacaagttgtctgccaggtaattgagttaccccatgtgatggttaactttatgtgtcaacttgacttctctaaggggtgtccagatagctgttaaaacatttttctgggtgtgtctgtaagggtgtttctggaagagatgagcatttgaatcagtcaactgagtaaagaaaattgcccttaccaatgcagcaggcatcatccaatcccttgacagaccaactagaacaaattagtggaggaagaaagaattcactctgtgcgtgngcgggagngncacgtcncncccggcccacncnaaaaattaataccccnnnncngcgtttcaaatgtcgactgagactcaccctcttgggtctctggtctccacactccaaggcttagactggaactacaccaccagctttcctgggcctccagcttgcagatggcaggttataggacatctcagattccataaacacatgagccaatttttcacaataaatacatatatatawatatatatatatatatatatatatatatatatatctcctattagttctgtttctctaaagaggcaaggctaatataccccatgagaaatataatgcttcagaaatacagccatcaatccctgtttcatcatttgtttatagggtgccttatagctttaaaatattctcataaaaatattatattctgagtttctcacaataaaataatgtagatgagtaaatagagtggtatcatcctttcttttttgcagatgaggaaatgggctttgcagagaataagtaacttggccaagtgataagtaactagaactctgattcttgtcagtaagttttttggtttcaagggaccaaaaccactcatacttggtaaataatgggtctcagtggtgtgctagtaaatgtctaagaattggaaaaaaaggtcagagtttgtaacatttgctagatctccatggtgtaaatacttctcacctatggctaatttcagcctactaattttgatgtcaccgaatgaagagctgggaagagatgcatgtgaccagcaagagcaggtaagaactggctccaacacaccacttcctgagagccatccaaggccaagaaacgaattatagctaggacttcttttaaagcatttgatgagcaatcttccacccttttccgatttgctttggacacattcatttatcttaactatgtctttggtaagtttactttgctaaagttcgactttcagagtccaaggaaaagtaaaatagtatgcagtctctttctgtggtatctttcccctcatggagtctgtgaaggggcaagtttttgcagctaatggagaacagaggtagaaaacatcaatgctctcctgtataactcagtggtgtcccatgagggacaaccatctggtaaaatacaatttatgaacatgtaacaacaaaaactaaaactctcagtaggcaatttttctttcataatttctggaacttctatcacagatatggggacatttctctagaaaaaattctgtggcaaatctcttgagaatggatcatttctctattagaatgatgttatgaaggagaacaaagaaagaaagaaatagaattaactaccttggaaacttccactgacacagattgtaagaattaatattttgtatctaattaatattttatatcacattttggggcaaatagcagattatcaataaatatttttgaattgataatttttcaaatactagtacataaaatatgtattttatttataatagaattttaacgtggtcaattaaaatattttaaaattccacatataacttgaaataaatgatcttgcctttctaacatctaccttcccacatcttgttcctcaaatcaacaatgaaccaggttaagggctagctgttgcacagacaaggattcatagaacccagcactttaagagattacagactagcttaaatcttcaaattaaaagtaaaaacaagattatgaaatactattttcaaaaataaatgtaaataaacccaaagccattttgaaaatcatcttcaggccaggtgtggtggctcacgcctgtaatcccagcacttcgggaggctgaggcgggcagatcacgaggtcaggagattgagaccatcctggctaacacagtgaaaccccgtctctactaaaaattaaaaaaaaaaaaaaaattagccgggcgtggtggtgggcgcctgtagtcccagctactcaggaggctgaggcaggagaatggcatgaacctgggaggtggagcttgcactcctgcctgggtgacacagcgagacgtcatctcaaaaaaaaaaaaaaaagaaaatcatcttcattttctgtgtttaggaggaaatatctggtggtaatatactttttattgactttccttccttccttgggagaataaaaggagtgattcttagaaaatgcttagcacaggtgcccggaatgccatgcatatgtatatcgcttattcagcaccattatcaactggtaaccattttcagaaaacagagttcagtgttgctgtggcctttctgagagaatgtgtataatacacctcagaactgtgccattaagaggtgagtcccaagccaccccttcccttatttgctgagaattgtattaatactactggcattnnnnnnnnnnnnnnnnnnnnnnnnnnnnnnnnnnnnnnnnnnnnnnnnnnnnnnnnnnnnnnnnnnnnnnnnnnnnnnnnnnnnnnnnnnnnnnnnnnnntacctactggacagaatgagctagattttgtgatctcacccaatgcttcaaccatttattctgcaccctataattcaagaaaggaagtttaattcctacttggaaatgaaatatagaggagaaatttcaaagcaagccacattatctattgatcataatgggaattacacaaaaccttggtaggttttttaaagaaggtatttttttttctacggaggcaattgtgcactgacaattgaagttaataattttgttttaattttaacaaatgtgaggttggctgagtacctcttattctgagtttggacaaagagaagtataataacctctcacatgtatgctttacagactacttttacataggtattcccatttgatcctcacagcaacgctatgagaaggcaattattattttttccattttagagttaataaaagggaagcacaggttgtgaactctatgaggacagggtcaggtcagtcttattcgcccctctaattccagcacctaatatagcaactggcgtatga

SEQ ID NO: 13117 - DNA, 1432 bp, Homo sapiens
gaaggcattttattactttggtcttggtgcctattttagtggagacattagctcttccttcagggagaggctaatggagaagcacagaagggcaggacctattctgtttcacttaaagtgatttttcaagaggaaagagatgagccactgagcagaacgtgaaggtgctactgaatactgtctcgcttactactacatcaaagataattatctgatagttaaatttttcttggaagaaaccacatttgaaaaatacattcactctcatagtcgtccatctgccctggatattttgaggattamatattgaagaaataaaatctaaaggcaaactcactgagtgtcacatattttcatcagttctcaatactagcagggacttctgtgactgtaatattacctatgcactttgacatatggaatgccaatccttttgataatgaaagaacgcagctgagaaggaaagatattaaatattgtaaaccaaaaactctcattgccgcctgcagaaggcatctgctgaaagctcaaacctacttccccaactccaggttaagtatacacattagagtgataaaaacagaattcaaattgctcttgcagtttctcacaaaactgttgttgttatggtattattgtcattgttattgtttttaattgcataaggccaagctcctttattttttattaatttttaaataaaaatcgtatgtatttaaggtgtacagcactctcaagctaattaacatattcataaccttatatagttgccaggttttgtgtgtgtatgtgtggttagagcactgaaatctactctcaaagttttcagtatataatacagaattattgactgtagtcattgcagcattattcgcaacagccaagttgtagaaacaaccttaagtgtctctcatattttattcaaaccaagaatagtttattttcttgacctttaaaaaatatatatacatatgtaaatatattatttattcatattgtcaactaccccaaaacttgtataatttttaaaaatatgcaatcctggatatgaaagccaaataaaaaataaccacaggttagaaataacagataaaataacaataaaacaaataataaaatttccaattccagatttctaacagtggcaatcccttaataatttaagatacttataactttaactctctatttgtaattggactcctgtgttgtgagcattacaataaattaagtctcagtggtacataatttattacttatgcagttgtaaattaaatggaaaataaattaacttcaacatgaatttctaagtgtattttgtagtacctagttcaagaaaaaggaattgctattaaaactttgaaatcatccattaagtcagatttaaatcagtcatgttgagaagagatgacaatatcatagcacttaaaac

SEQ ID NO: 13118 - DNA, 1432 bp, Homo sapiens
gaaggcattttattactttggtcttggtgcctattttagtggagacattagctcttccttcagggagaggctaatggagaagcacagaagggcaggacctattctgtttcacttaaagtgatttttcaagaggaaagagatgagccactgagcagaacgtgaaggtgctactgaatactgtctcgcttactactacatcaaagataattatctgatagttaaatttttcttggaagaaaccacatttgaaaaatacattcactctcatagtcgtccatctgccctggatattttgaggattaaatattgaagaaataaaatctaaaggcaaactcactgagtgtcacatrttttcatcagttctcaatactagcagggacttctgtgactgtaatattacctatgcactttgacatatggaatgccaatccttttgataatgaaagaacgcagctgagaaggaaagatattaaatattgtaaaccaaaaactctcattgccgcctgcagaaggcatctgctgaaagctcaaacctacttccccaactccaggttaagtatacacattagagtgataaaaacagaattcaaattgctcttgcagtttctcacaaaactgttgttgttatggtattattgtcattgttattgtttttaattgcataaggccaagctcctttattttttattaatttttaaataaaaatcgtatgtatttaaggtgtacagcactctcaagctaattaacatattcataaccttatatagttgccaggttttgtgtgtgtatgtgtggttagagcactgaaatctactctcaaagttttcagtatataatacagaattattgactgtagtcattgcagcattattcgcaacagccaagttgtagaaacaaccttaagtgtctctcatattttattcaaaccaagaatagtttattttcttgacctttaaaaaatatatatacatatgtaaatatattatttattcatattgtcaactaccccaaaacttgtataatttttaaaaatatgcaatcctggatatgaaagccaaataaaaaataaccacaggttagaaataacagataaaataacaataaaacaaataataaaatttccaattccagatttctaacagtggcaatcccttaataatttaagatacttataactttaactctctatttgtaattggactcctgtgttgtgagcattacaataaattaagtctcagtggtacataatttattacttatgcagttgtaaattaaatggaaaataaattaacttcaacatgaatttctaagtgtattttgtagtacctagttcaagaaaaaggaattgctattaaaactttgaaatcatccattaagtcagatttaaatcagtcatgttgagaagagatgacaatatcatagcacttaaaac

SEQ ID NO: 13119 - DNA, 520 bp, Homo sapiens
cagtatacactggcgaccccgtcagctggcagggaccttgtcggctagctattgcaatgctgactggtccccggcaagaagcccacttgtcgcaggtgattctccctttcaggaggatgaccatgccattcctctgtctggtccccacgggtcgtgaaggtgtcacttgccattctgtgtacttaactagcatccagccccttccctgcagagcccaacaagaggtttcttgatctggcttataggtcctgccttgcgtcctgccgagagcatcaagtcccagctttgcactctgccatagctcttgagacgacagtaaggccaccacatttggtctccaccaggccctggtgatggtttcccaggctgagccaaggcacctctttattccaggctgcattctgaggcagggcctgccacagacaatcaatgacctttaaaaccgggcagcggaatcagccacctggacaagcaaaygagcactggggctggacttactgtctttctgcaatcaacaggg

SEQ ID NO: 13120 - DNA, 519 bp, Homo sapiens
aatgtgctctctgtctgcctttgtcctcttatgtagctaagataaagaggaaatctcctgtatttcttaaatatagacatggtgtctattatttcagaacatcttcctatctggaaagatttgtgcaaaattcccaagagctcccaactacctctatgtataacccacgagatgtcttaattgaatctaaattctaagtagcatttaatttaatttcaattttttttaggaaagacatgttaggctttgccctgtttctgtttacataatttttaaaccaatattatgtaaatgattatataattgagtatatacctaatgtttccaattaaagatacatttccaatatttagcaacacatcctcccactgaattaatcacaaagtttcccacgtctaaattcattgtcatgatttggtgtagcacttgatctgacttgmgagggtgtaggtaatatgtgataaattacttagcaaattagaaattaggaccttagacctgctgaattaggctagggca

SEQ ID NO: 13121 - DNA, 371 bp, Homo sapiens
gatcttggtgagtctagttgtgctgtatctggtgttcttacatctggatgcaacttagacaccccagagacaatggcgtagcatagcacatgtcgcttctttcagccagtgctaggatgtgggaacaaaggcacagtccatctctctcaccctgaagaagggcagagagagcttcaaaaagggatatgggcacagccaacctctcaaccatcacaattttttttttgactattagttatgattcaaactatgaagcagaaatggcttgggagttttgagaggaaatgactcaacaaatayaaaatattggagaagagatcagactccaggatcttctacattcaggctagagatatgcaactatcaacagt

SEQ ID NO: 13122 - DNA, 512 bp, Homo sapiens
acttaatagctaaggtcggttacacaagatgccccatgcctatgtgattgaccctcaattataaccctgtgcttggaccttcttgtactgttttatgcacctattaccttctctmatttaatctatatcctttcactgtgataaatcatatctatgtgtataaaagctttactgagttctgtgagtctttctagaaaatcatccaacctgagggtggtgacggagatcactgacacataggctttaacctcttaattacaagttggagcaccacatttaatattcccaataagaacacaattaatagggtgtgtagttttcccaatgcaaagtcgaattgttgttctaaaaaggacaggattgtcgataaaagaaaaattcacatatatatatttctttatatagaatattaaaccctttccacttatgtaattggcaattattttcttttgtttcctgagttgctttttcactctgtaatctttgaggcacagaagttttatattttgaca

SEQ ID NO: 13123 - DNA, 533 bp, Homo sapiens
taatagctaacagttaacaagtgcttcctatacgctagaccctacaaagtatctaccgttccaagtgctttgtgtatattgactcatttaatcctccaaaaactctatgcgattatccccattttacagatgagaaacaggcacggggagttgtactaagattgcagaaccaagcagtctgcctccagagtccaggcccttaaaaccaatcacccggagcagaagcagttgtatcttcattatcatcaacacttattagatacttatgacaggcatgtgacctgcttcacatgcacttaatcctcacaagaaccccmtaaggaaggaggattgtcatttcccattttacagacgagaacacttaggctgacatagaataacttgcccaaagtcacatacctcctacgtgccagggcagggacaatgggcctgtcagactctttaccactgtgagagctgtgctggtaaggaaaggattctgatcctggcagagcagcagatcctaactaaagtcactagcatatcagcaggga

SEQ ID NO: 13124 - DNA, 548 bp, Homo sapiens
tgttccccaggctgatatcgaactcctgaactcaggcaatccacccgccttggcctcccaaagtactaggattacaggcgtgagccgctgcacccagccctgctctcttaatgttaggtattgctatttgacttgcmttggccaacagaagtgtgtaaaagtgaggtgtcctttctgggggttggcatttagttggtaatgattgagcccactggaaaatcatggacacatgtgttggtgtgaaggtgcctctcctgagagatacaatctgagagcttgtttgaaggttgcacagttgttttcagcctctttaattgattgccagtttctcctcaaacacttgttcttaattgtcagacttgactctcctggaaaattgaggaagatattgtaaaaatcttgctgcttcacagaaatgtccaggatgaaactccactgcctttatcttgtgccattcatcctatttctggaatccagtccccagtgtatttcaagtggctcctttcatgcagtgttctcatctatgtgtgcctaatctcttggaaatt

SEQ ID NO: 13125 - DNA, 548 bp, Homo sapiens
tgttccccaggctgatatcgaactcctgaactcaggcaatccacccgccttggcctcccaaagtactaggattacaggcgtgagccgctgcacccagccctgctctcttaatgttaggtattgctatttgacttgccttggccaacagaagtgtgtaaaagtgaggtgtcctttctgggggttggcatttagttggtaatgattgakcccactggaaaatcatggacacatgtgttggtgtgaaggtgcctctcctgagagatacaatctgagagcttgtttgaaggttgcacagttgttttcagcctctttaattgattgccagtttctcctcaaacacttgttcttaattgtcagacttgactctcctggaaaattgaggaagatattgtaaaaatcttgctgcttcacagaaatgtccaggatgaaactccactgcctttatcttgtgccattcatcctatttctggaatccagtccccagtgtatttcaagtggctcctttcatgcagtgttctcatctatgtgtgcctaatctcttggaaatt

SEQ ID NO: 13126 - DNA, 548 bp, Homo sapiens
tgttccccaggctgatatcgaactcctgaactcaggcaatccacccgccttggcctcccaaagtactaggattacaggcgtgagccgctgcacccagccctgctctcttaatgttaggtattgctatttgacttgccttggccaacagaagtgtgtaaaagtgaggtgtcctttctgggggttggcatttagttggtaatgattgagcccactggaaaatcatggacacatgtgttggtgtgaaggtgcctctcctgagagatacaatctgagagcttgtttgaaggttgcacagttgttttcagcctctttaattgattgccagtttctcctcaaacacttgttcttaattgtcagacttgactctcctggaaaaytgaggaagatattgtaaaaatcttgctgcttcacagaaatgtccaggatgaaactccactgcctttatcttgtgccattcatcctatttctggaatccagtccccagtgtatttcaagtggctcctttcatgcagtgttctcatctatgtgtgcctaatctcttggaaatt

SEQ ID NO: 13127 - DNA, 624 bp, Homo sapiens
gatatacctaatgctaaatgacaagttaatgggtgcagcacaacagcatggcacatgtatacatatgtaactaacctgcacattgtcacatgtaccctaaaacttaaagtataataataatttaaaaaataaaaaaaaacacactttaaataaacccccccaaaaaawtttttttaaaggctaaattagagattcatataaaaacacctgacacttttcctgggcatggttctaagctcttcacatatgttaacttatggacttttacaataataattcaaggtaaggagtagtatttttttcaattttccaaagaaggaaactgagctacagagaattttaataaattgccaaagattatacattttgtaagttttgaagccatccatgtggggcaatctggttccaggatatatatgtttaactgttcaactttgaaaatttgtaaaaacaaaaagtattatttaaatcaagatattaccattaggattaatattaatcagatcattatttctcacattcagctttctatgttaacaaagttaatctgaacaaaataggatcatttagcatgagcaagtcctatggttttaggctcttgggtaagtgttattcttagatttc

SEQ ID NO: 13128 - DNA, 624 bp, Homo sapiens
gatatacctaatgctaaatgacaagttaatgggtgcagcacaacagcatggcacatgtatacatatgtaactaacctgcacattgtcacatgtaccctaaaacttaaagtataataataatttaaaaaataaaaaaaaacacactttaaataaacccccccaaaaaattttttttaaaggctaaattagagattcatataaaaacacctgacacttttcctgggcatggttctaagctcttcacatatgttaacttatggacttttacaataataattcaaggtaaggagtagtatttttttcaattttccaaagaaggaaactgagctacagagaattttaataaattgccaaagattatacattttgtaagttttgaagccatccatgtggggcaatctggttccaggatatatatgtttaactgttcaactttgaaaatttgtaaaaacaaaaagtattwtttaaatcaagatattaccattaggattaatattaatcagatcattatttctcacattcagctttctatgttaacaaagttaatctgaacaaaataggatcatttagcatgagcaagtcctatggttttaggctcttgggtaagtgttattcttagatttc

SEQ ID NO: 13129 - DNA, 673 bp, Homo sapiens
caatatcaccccttaccacaagacctcccttcagcttaatctctcccactctaggttcccacactgcccctaatcccgcttgaagcagccctgagaaacatcgtccactctctctccataccacccccccaaaaattttcgccgccccaacacttcaacactattttgttttatttttcttrttaatataagaaggcaggaatgtcaggcctctgagcccaagccaagccatcgcatcccctgtgacttgcatgtatatgcccagatggcctgacgtaactgaagaatcacaaaagaagtgaatatgccctgccccaccttaactgatgacattccaccacacaagaagtgtaaatggccagtccttgccttaactgatgacattaccttgtgaaagtccttttcctggctcatccaggctcaaaaagcacccccactgagcaccttgcgacccccactcctgccggccagagaacaaaccccctttgactgtaattttcctttacctacccaaatcctataaaacggccccacccttatctcccttcgctgactctctttttggactcagcctgcctgcacccaggtgaaataaacagccatgttgctcacaaaaaaaaaaaaaaaaagaaatgcacttgtacacatgtgtgcacgtgcatgcacgcacaca

SEQ ID NO: 13130 - DNA, 538 bp, Homo sapiens
cttaacawctctgaacctcatcttgtaaaattggggactctgtctctaaagaaaaaaagataaaaaatattttaggctttttatcgtatatttattcatctcttcatctttttatacatccatttatcaatgcataatattcaaatccttttttgtgaagagatttaggctatactatgtttattttaggtcagttttacttttcctttacatggtagcagataattattaggaatgaattataactgatctgtaatgttctgaaaacatttggatttcgggtttaaataaagctttttgtcttccctatccctagttccaaaagatgagtcgtggatattcagaaaacaacaatttcctgaacaataataaccaaatggtattggacatgatcctttatccattaattggaatccctcagactatcaactgggaaactatagcaaggctcgtgcctggattaacaccaaaagaggtaaataacagtccccccagaatatctcctgaaaatgttcagaaaaggtcatcaatttaaaga

SEQ ID NO: 13131 - DNA, 528 bp, Homo sapiens
catctttacatgaaagcccacaagccatagagtacagcttgataaatctcaagactgccaaagaaatttcaagactggtccgccacaatctgtggcagttcagctccctaaagcataccccaggccctaaatcggcaccagcagtaaacagagtgtaaacgctgtgcagctccaagaagcatactttccatgcccactcagatgtggccatggggcacaagggacagggaggaacctcagagaaggcagaggcatggccacaaaggatgatagactaggttgtttctcccagatgggagaacctggggctgycagatgggctaccaggcagcttaccccactgccagtggacaggcaagctggttggttctctcttttaagatggtctggaggaagagggtaaaagcccttgtctcatgggccaggtgtggcgactggtccctgtaatcccagcactttgggaggcctcagccagaggattgctggagttcaaagccagactgggcaacctagtgagaccctgtccct

SEQ ID NO: 13132 - DNA, 528 bp, Homo sapiens
catctttacatgaaagcccacaagccatagagtacagcttgataaatctcaagactgccaaagaaatttcaagactggtccgccacaatctgtggcagttcagctccctaaagcataccccaggccctaaatcggcaccagcagtaaacagagtgtaaacgctgtgcagctccaagaagcatactttccatgcccactcagatgtggccatggggcacaagggacagggaggaacctcagagaaggcagaggcatggccacaaaggatgatagactaggttgtttctcccagatgggagaacctggggctgccagatgggctaccaggcagcttaccccactgccagtggacaggcaagctggttggttctctcttttaagatggtctggaggaagagggtaaaagcccttgtctcatgggccaggtgtggygactggtccctgtaatcccagcactttgggaggcctcagccagaggattgctggagttcaaagccagactgggcaacctagtgagaccctgtccct

SEQ ID NO: 13133 - DNA, 648 bp, Homo sapiens
cccccacaagaaagcttccaggtttcatattcaggactagactgtgactgaacctatccctgctaattggcaattctgaagcagttattattccagatattgctgattaaatggggagcccagaatgttcatcattctccagtcaaaactatagtaggccaggcatggtggctcatgcctgtaatcccaggactttgagatccatctgaggcgggtgtatcacctgaggtcaggagttcgagaccagcctggccaaccccatctttactaaaatacaaaaattagttgggcatggtggtgcatgcctgtagtcccagctactccagaggctgaggcaggagtattgctcgaacccgggaggtggaggttgcagttagccaagatcgtgccactgcactccagcctgggtgacagagtgagactccatcacaaacaaacaaacaaaaaaactatagtggcataatatcctgacatgttcttgacaaatctattgacttaatgtttccttcatttaatcayagacttttgggctggacaatcccttagagaccattagtccatatccttcatttgccagacgaggaaattcatgcttagagagagaacatgactcttccaagatcatacagatcacacagtggtaagggc

SEQ ID NO: 13134 - DNA, 2138 bp, Homo sapiens
cgtgttcagcaaagcatttaaagtggatccccctttctcattgatttgtggcttccttttaaagatttcacagtcccagagctttgttgtcaatgtattaaataaaacctagctcctccgtcagtgcctagggatttgtcaattaccttgcagtcatttggtctttgctaattgcaaaataaagagaccgctgcctttattggcctcccaaaaggctttcctctcctctacatactacattcaaggttgtatactctctatttcactttttaaagttgaagaaattcaattttttataactcagaaacatgtttaagctttttgtcctccttaaaggcacccttctccttgtcaggaatctccaccacacagctaattagtctcttgggcagattggtcaggttgcccaaggagtaatagcatagaccttgtttctttcctagtcattctggaaattaaactttattctatcttgtataagttctagtaacttttttatctatctcattttttattttctgttctttctgttactagctggtgacggacatggagacggaaaaattcaagaagtatgaacggtgctagtaattccctccagaggcaaatatttaaaaattcctccaagaaatacaactctggaaaagttgtaagagcagatctaactttagagaaattttaggccattcaggtggacatccagatggctaaaaacctattattggaacctgttactttcaaatggcaaaaactgcagtaactgttgcatcaatctaatgcatgctgaaccaagctttgcactttccataatgattttctaacaacaaaaaaaatgccataacaacaaaataatacatttaccagtaattacaatgatggtgattatgatgacgatgattaagataytggtaataatatttgagtacttgcttaattctcaaaatatatcacgtactatttgcctcttattttaccaatgttatcttcattaaacctcacaaccaacacaagagttggcaatgctatctccattttcttagggagaaaataaataaataagaaatggcggattagagacaattcgtaattgacacaaaatctcaaatctatccctcatggtctgtgtcttcttcagaatatatctgttctgctgggacttctgacaactttcatgtaacttcaaatcagaaacaatttttgagatcacatggccccactcacttattttaggaagatgaaattgaaacccacagagttaagtaacttgttcatcgtcactcaacaggtgagtctcaaagcagacctcaaaatttaatcctcagacacacaatacaatcttccttccatgatatgtaaaatggttccaaaaacaggattcataatttgataattttgtataagtgtacagggtaaaacggatagaatatttaaaatctctaagagcccaatatatacatataacgaagtacatcatgctgcctattttgttcacagacaaaagtgatgtatttcatattgatcaattttgaaacagtcttttcttcccctggcatccatggcaactaatagtactgtgaatagtgaaaaaatcattctcaggatacctccttttggtttctttcctattaaagtgataagcgtattgattcgtgtccttactctgtaagcatgctattgaataagttatataaataaaaagttttataaattcagcaacacttgtggcatatcatatgactattaaaaatattgtagaataactgttgcttttaccataataacccctgagaaataattggcttgcattatgagacttgcgatttctcacaaaaggaaaatatcctgaagcaatttcacaccatcttcacatatgttctgccaaaagttataaaaagctgaacctcacaacctagagctgtagcaatgtaattagatttcttttctacaaatgaaaatgctgattggattggaaggtgtttcgtgaccagtacgttttgtttagtgtgccatctaaatgtcatggttccaggttggagaagttgaattacaattaattgcagtttcagggaatgactgagacaagaacagtgtggagttacaattgaaatataatgaggcctacttgagtcatgggatca

SEQ ID NO: 13135 - DNA, 1901 bp, Homo sapiens
ttattgaactacttttctgcctttgaattcatgttcaagagaaatatggatgcacaatgtttatgcttgtgaattctggtcaagatattgctgtaactatatgtggaattcctctccaccttggttctaaatacctagcatgatagttgcagtacttttacaccatatagctatctcagtgaacaaatgttgaactgaaacccacagcaataaatgaagcctgaatgataattccatgaagtttctagatcaaattctgggggaggcaaacgggggactggctctatcaaagtaaaaattaataaattcccctgttagtcacagctgaaacacccacaaaagtagatccaaaaaagtcacagtcattgcctagtgttgctacctaggaaagctggagggaatagagatgtccacacamctgggaccaaggtaagccatatagattcaggaactataactctggcatctctacaagatgtgaactctgtaactccaatataaatataagatcccaatttgcaggctggaaacaactagacacacatgggtgaacatgggaaatacaaagtaaatatatgcccatgcatacacaaacacctattcaagatgaattggcatatcaaggtctaaagcacagagaaaaaaactagtaacttaagaatactatttaaaaaactcagggagaaataattaacttacgaaggtatgcagataatgtagtattttttaaaaatgattataaagtgaatctacctaaaatactcagagaaataaaataagaagatcgtaaatcaccaacaggaaactatggaacaaaacataggtatatataaatcaggaatgagttgacatgcaaaagcaccaattagaaattctgaaaattaaacatgttatcataaacaagccatagatgtaatatattttagaggggccatagaacagagaaaattattggactcttagataatgtaacttagatcaattttgttgatttagagaaatatgatatcaaaagctcatgtttttaaacaaaacctctgttgagaaattattaaataatgttaatcatgagagattctgtgtcctactaatgaaaattgtgtcaatctgcataattttgcttagagtcctataaagtgttcttttcaggttacctgaacaaagacttatttcagaggtaaaataaaattaagcgaggttacttctttgaaaattatggagaaaagacaactcttaataattgtataagatcaagtaaaattttgcttaatattagtaaaaattcacaggaaaaataaaaaaatgactataaagctgcactaattcttaagtgcgaacttaatacaaatattctcttgcctagaaatatgaaaaatgtcataagcatttatgaccacagtaggatgttgggaggaaaatacctctggtaataatctttaggagcaaatgcacactgttagtaatgattgatgaaaagtttcctcacaatctgctgagaaaaaaatgttaaaatgaaattaagtgtagttatagaaaacaaaattacataattgacataacagagttattggcctgagagtcatacctattgcaatctatttcttagaggctcactcctgcagatgcttggctggaacttgtcaatgtttctatacatacaggaaatgataaacagcacatatcaagcctggcaaatacctatgctgagaaagaaatgctggtcctcatcaagggagaaggagccagagctaaaggacagggtgttgtcaagtgattttgagtatttatgcagagctagatttttttagatagctttctcagaatgtcttatttcaaagtcagtaaaattttaattaacctaatttcccctgttctgatttcatgttcccccagcaactatc

SEQ ID NO: 13136 - DNA, 1901 bp, Homo sapiens
ttattgaactacttttctgcctttgaattcatgttcaagagaaatatggatgcacaatgtttatgcttgtgaattctggtcaagatattgctgtaactatatgtggaattcctctccaccttggttctaaatacctagcatgatagttgcagtacttttacaccatatagctatctcagtgaacaaatgttgaactgaaacccacagcaataaatgaagcctgaatgataattccatgaagtttctagatcaaattctgggggaggcaaacgggggactggctctatcaaagtaaaaattaataaattcccctgttagtcacagctgaaacacccacaaaagtagatccaaaaaagtcacagtcattgcctagtgttgctacctaggaaagctggagggaatagagatgtccacacaactgggaccaaggtaagccatatagattcaggaactataactctggcatctctacaagatgtgaactctgtractccaatataaatataagatcccaatttgcaggctggaaacaactagacacacatgggtgaacatgggaaatacaaagtaaatatatgcccatgcatacacaaacacctattcaagatgaattggcatatcaaggtctaaagcacagagaaaaaaactagtaacttaagaatactatttaaaaaactcagggagaaataattaacttacgaaggtatgcagataatgtagtattttttaaaaatgattataaagtgaatctacctaaaatactcagagaaataaaataagaagatcgtaaatcaccaacaggaaactatggaacaaaacataggtatatataaatcaggaatgagttgacatgcaaaagcaccaattagaaattctgaaaattaaacatgttatcataaacaagccatagatgtaatatattttagaggggccatagaacagagaaaattattggactcttagataatgtaacttagatcaattttgttgatttagagaaatatgatatcaaaagctcatgtttttaaacaaaacctctgttgagaaattattaaataatgttaatcatgagagattctgtgtcctactaatgaaaattgtgtcaatctgcataattttgcttagagtcctataaagtgttcttttcaggttacctgaacaaagacttatttcagaggtaaaataaaattaagcgaggttacttctttgaaaattatggagaaaagacaactcttaataattgtataagatcaagtaaaattttgcttaatattagtaaaaattcacaggaaaaataaaaaaatgactataaagctgcactaattcttaagtgcgaacttaatacaaatattctcttgcctagaaatatgaaaaatgtcataagcatttatgaccacagtaggatgttgggaggaaaatacctctggtaataatctttaggagcaaatgcacactgttagtaatgattgatgaaaagtttcctcacaatctgctgagaaaaaaatgttaaaatgaaattaagtgtagttatagaaaacaaaattacataattgacataacagagttattggcctgagagtcatacctattgcaatctatttcttagaggctcactcctgcagatgcttggctggaacttgtcaatgtttctatacatacaggaaatgataaacagcacatatcaagcctggcaaatacctatgctgagaaagaaatgctggtcctcatcaagggagaaggagccagagctaaaggacagggtgttgtcaagtgattttgagtatttatgcagagctagatttttttagatagctttctcagaatgtcttatttcaaagtcagtaaaattttaattaacctaatttcccctgttctgatttcatgttcccccagcaactatc

SEQ ID NO: 13137 - DNA, 1901 bp, Homo sapiens
ttattgaactacttttctgcctttgaattcatgttcaagagaaatatggatgcacaatgtttatgcttgtgaattctggtcaagatattgctgtaactatatgtggaattcctctccaccttggttctaaatacctagcatgatagttgcagtacttttacaccatatagctatctcagtgaacaaatgttgaactgaaacccacagcaataaatgaagcctgaatgataattccatgaagtttctagatcaaattctgggggaggcaaacgggggactggctctatcaaagtaaaaattaataaattcccctgttagtcacagctgaaacacccacaaaagtagatccaaaaaagtcacagtcattgcctagtgttgctacctaggaaagctggagggaatagagatgtccacacaactgggaccaaggtaagccatatagattcaggaactataactctggcatctctacaagatgtgaactctgtaactccaatataaatataagatcccaatttgcaggctggaaacaactagacacacatgggtgaacatgggaaatacaaagtaaatatatgcccatgcatacacaaacacctattcaagatgaattggcatatcaaggtctaaagcacagagaaaaaaactagtaacttaagaatactatttaaaaaactcagggagaaataattaacttacgaaggtatgcagataatgtagtattttttaaaaatgattataaagtgaatctacctaaaatactcagagaaataaaataagaagatcgtaaatcaccaacaggaaactatggaacaaaacataggtatatataaatcaggaatgagttgacatgcaaaagcaccaattagaaattctgaaaattaaacatgttatcataaacaagccatagatgtaatatattttagaggggccatagaacagagaaaattattggactcttagataatgtaacttagatcaattttgttgatttagagaaatatgatatcaaaagctcatgtttttaaacaaaacctctgttgagaaattattaaataatgttaatcatgagagattctgtgtcctactaatgaaaattgtgtcaatctgcataattttgcttagagtcctataaagtgttcttttcaggttacctgaacaaagacttatttcagaggtaaaataaaattaagcgaggttacttctttgaaaattatggagaaaagacaactcttaataattgtataagatcaagtaaaattttgcttaatattagtaaaaattcacaggaaaaataaaaaaatgactataaagctgcactaattcttaagtgcgaacttaatacaaatattctcttgcctagaaatatgaaaaatgtcataagcatttatgaccacagtaggatgttgggaggaaaatacctctggtaataatctttaggagcaaatgcacactgttagtaatgattgatgaaaagtttcctcacaatctgctgagaaaaaaatgttaaaatgaaattaagtgtagttatagaaaacaaaattayataattgacataacagagttattggcctgagagtcatacctattgcaatctatttcttagaggctcactcctgcagatgcttggctggaacttgtcaatgtttctatacatacaggaaatgataaacagcacatatcaagcctggcaaatacctatgctgagaaagaaatgctggtcctcatcaagggagaaggagccagagctaaaggacagggtgttgtcaagtgattttgagtatttatgcagagctagatttttttagatagctttctcagaatgtcttatttcaaagtcagtaaaattttaattaacctaatttcccctgttctgatttcatgttcccccagcaactatc

SEQ ID NO: 13138 - DNA, 1901 bp, Homo sapiens
ttattgaactacttttctgcctttgaattcatgttcaagagaaatatggatgcacaatgtttatgcttgtgaattctggtcaagatattgctgtaactatatgtggaattcctctccaccttggttctaaatacctagcatgatagttgcagtacttttacaccatatagctatctcagtgaacaaatgttgaactgaaacccacagcaataaatgaagcctgaatgataattccatgaagtttctagatcaaattctgggggaggcaaacgggggactggctctatcaaagtaaaaattaataaattcccctgttagtcacagctgaaacacccacaaaagtagatccaaaaaagtcacagtcattgcctagtgttgctacctaggaaagctggagggaatagagatgtccacacaactgggaccaaggtaagccatatagattcaggaactataactctggcatctctacaagatgtgaactctgtaactccaatataaatataagatcccaatttgcaggctggaaacaactagacacacatgggtgaacatgggaaatacaaagtaaatatatgcccatgcatacacaaacacctattcaagatgaattggcatatcaaggtctaaagcacagagaaaaaaactagtaacttaagaatactatttaaaaaactcagggagaaataattaacttacgaaggtatgcagataatgtagtattttttaaaaatgattataaagtgaatctacctaaaatactcagagaaataaaataagaagatcgtaaatcaccaacaggaaactatggaacaaaacataggtatatataaatcaggaatgagttgacatgcaaaagcaccaattagaaattctgaaaattaaacatgttatcataaacaagccatagatgtaatatattttagaggggccatagaacagagaaaattattggactcttagataatgtaacttagatcaattttgttgatttagagaaatatgatatcaaaagctcatgtttttaaacaaaacctctgttgagaaattattaaataatgttaatcatgagagattctgtgtcctactaatgaaaattgtgtcaatctgcataattttgcttagagtcctataaagtgttcttttcaggttacctgaacaaagacttatttcagaggtaaaataaaattaagcgaggttacttctttgaaaattatggagaaaagacaactcttaataattgtataagatcaagtaaaattttgcttaatattagtaaaaattcacaggaaaaataaaaaaatgactataaagctgcactaattcttaagtgcgaacttaatacaaatattctcttgcctagaaatatgaaaaatgtcataagcatttatgaccacagtaggatgttgggaggaaaatacctctggtaataatctttaggagcaaatgcacactgttagtaatgattgatgaaaagtttcctcacaatctgctgagaaaaaaatgttaaaatgaaattaagtgtagttatagaaaacaaaattacataattgacataacrgagttattggcctgagagtcatacctattgcaatctatttcttagaggctcactcctgcagatgcttggctggaacttgtcaatgtttctatacatacaggaaatgataaacagcacatatcaagcctggcaaatacctatgctgagaaagaaatgctggtcctcatcaagggagaaggagccagagctaaaggacagggtgttgtcaagtgattttgagtatttatgcagagctagatttttttagatagctttctcagaatgtcttatttcaaagtcagtaaaattttaattaacctaatttcccctgttctgatttcatgttcccccagcaactatc

SEQ ID NO: 13139 - DNA, 1901 bp, Homo sapiens
ttattgaactacttttctgcctttgaattcatgttcaagagaaatatggatgcacaatgtttatgcttgtgaattctggtcaagatattgctgtaactatatgtggaattcctctccaccttggttctaaatacctagcatgatagttgcagtacttttacaccatatagctatctcagtgaacaaatgttgaactgaaacccacagcaataaatgaagcctgaatgataattccatgaagtttctagatcaaattctgggggaggcaaacgggggactggctctatcaaagtaaaaattaataaattcccctgttagtcacagctgaaacacccacaaaagtagatccaaaaaagtcacagtcattgcctagtgttgctacctaggaaagctggagggaatagagatgtccacacaactgggaccaaggtaagccatatagattcaggaactataactctggcatctctacaagatgtgaactctgtaactccaatataaatataagatcccaatttgcaggctggaaacaactagacacacatgggtgaacatgggaaatacaaagtaaatatatgcccatgcatacacaaacacctattcaagatgaattggcatatcaaggtctaaagcacagagaaaaaaactagtaacttaagaatactatttaaaaaactcagggagaaataattaacttacgaaggtatgcagataatgtagtattttttaaaaatgattataaagtgaatctacctaaaatactcagagaaataaaataagaagatcgtaaatcaccaacaggaaactatggaacaaaacataggtatatataaatcaggaatgagttgacatgcaaaagcaccaattagaaattctgaaaattaaacatgttatcataaacaagccatagatgtaatatattttagaggggccatagaacagagaaaattattggactcttagataatgtaacttagatcaattttgttgatttagagaaatatgatatcaaaagctcatgtttttaaacaaaacctctgttgagaaattattaaataatgttaatcatgagagattctgtgtcctactaatgaaaattgtgtcaatctgcataattttgcttagagtcctataaagtgttcttttcaggttacctgaacaaagacttatttcagaggtaaaataaaattaagcgaggttacttctttgaaaattatggagaaaagacaactcttaataattgtataagatcaagtaaaattttgcttaatattagtaaaaattcacaggaaaaataaaaaaatgactataaagctgcactaattcttaagtgcgaacttaatacaaatattctcttgcctagaaatatgaaaaatgtcataagcatttatgaccacagtaggatgttgggaggaaaatacctctggtaataatctttaggagcaaatgcacactgttagtaatgattgatgaaaagtttcctcacaatctgctgagaaaaaaatgttaaaatgaaattaagtgtagttatagaaaacaaaattacataattgacataacagagttattggcctgagagtcatacctattgcaatctatttcttagaggctcactcctgcagatgcttggctggaacttgtcaatgtttctatacatacaggaaatgataaacagcacatatcaagcctggcaaatacctatgctgagraagaaatgctggtcctcatcaagggagaaggagccagagctaaaggacagggtgttgtcaagtgattttgagtatttatgcagagctagatttttttagatagctttctcagaatgtcttatttcaaagtcagtaaaattttaattaacctaatttcccctgttctgatttcatgttcccccagcaactatc

SEQ ID NO: 13140 - DNA, 1225 bp, Homo sapiens
taaccttccaaccttccaaaaaatgaagcatcwggtccagatagtttcattggtgaattctaccaaatatttaagtaggaaatgataccaattttccaggatctgtttcagaaaatacacacagaggacaaacttcctatcacattctatgaggtcagcattaccctaccagcaaaaacaaattaagatattatagaagagtgaatgtaaactacagaccaatctctctcatgaacacagatgcaaacaatcctcaacaaaatattagcaaattgagttcaacaatgtgtagaaagaattatacaccatcatcaagtaggatttatttcagctaggcaaggttgattcaaaatatgaaaatcaatttatgttatatgccatatcaacagggtaaaaaagaatcatatgattatattaattgatatctttgatgagcagaaacatctttaatttctaaacatttaactttggatgatgtaacaaaaactattttattgttttgggacctaaagtaaatacatacttgcatatttaactcttataattattattgtttacaggttaaaaaaaacagtattcaaaactgacttagcctgattttagctgaattcacattgagtaattcttggttctactacttacgcttttcactaggcatttcaaataaacactgtaacatgttctaactgtaaaatacacagtacttgaaaacaaatttatataaatgaaactatttcataaaatgtcacaattacataagttatatgtgctcatttaggacaattaaaaactatgcaaatgaaagtactaattatcatccctataggtatatcaataaagtgaaaaccgagtatctaaatttgcctttgtacaccctcataataactgtaggggttgattggagccaggtactcactggccagcttcaaaaacaaattgcaaagagatttcccaacatctactctggtggcaagagttggctacaaatcgttcctatcatatgacaacaattttaggaaagatgaaatctatactaggatagacaaaggattttaaagcataggctataattcccaaaccaactcccctaacaggttttatagtaaatggcaacaaatactttgaacattggaacataacaatgaattgcaaacaaaaagaaaagtgaaagaggaagaaaagaaatggaggggaggagaaaggaggaattctagtatcaggtgaa

SEQ ID NO: 13141 - DNA, 282 bp, Homo sapiens
gagaaaatgctcaacctcggtgataaataaatacacatatagtgataatattgtacaggttttcacctgcagtgcagacatttytaaagacaccgggaaattctgataattttaagtgtccaaaggaaataagagctcaacaatttttggtaagcttgtaaagtgatatgaccattatggatgactgtttgctaaatatgtgcatagcttttgaccaaatgattctatttctagtaacttgccctaaagatacaatctaaaatgtgtgcggtaccttatgta

SEQ ID NO: 13142 - DNA, 640 bp, Homo sapiens
aataacaattctaaggcrttatagaaaattttgtatttcttgcacacttgagttggtggaatgaaattcatacccaccacactgttctttgtctattccttgtatgtgttccactctagttgatgtgacttggtgagtcttttggactggattaaatatggcacaacaagtctttgtcaagcttaccatttgcctgttcctctattaggtaccaggaacaggtgtgtgaatgagaagtggttggtagtaggcagcctcaaaggccctcatgagctgcacctcctggtattcttgaccttgtgaatgctctccatttgaatatgggctggctctagtgatggagcaaacagaatatggcaaacagaatatggcaaaagtgatgggatgtcacctccaatatcagattacaattagactgtggctttccttttgctcattctatctctggctggttcggagggaagccagctgccatactgcaagctgcctgaagaatagatccagagaaaacgaactgatatctccagaactgaagacctagttcctactaatagccctgctggggagcttggtttcttcaagtgttgaaccttgagatgactgtagtcctgtttgacactttgcagccttgggagagact

SEQ ID NO: 13143 - DNA, 2422 bp, Homo sapiens
tggatacttgatgtcatcatgcacattgttatccatgtaaaacaggaaatattaggtcttgcatcactgaccaatctactatatatttttttctctacatactttttattctgaacagaagctaaatttagggtattgtttaatgattattttctgattattgggagtggtccatattcagcagaataaaaatgtcatacttgtwtaaaaattagaatacaccaatggaaatctggaattcaccttagcataacagacagagaagagtggcttcatattatggcccatgaatgtaatagcttgatcagattttgtgttccctcccgaaagaggaaggaatgctcctgacatttgacttgcgatagtgatattttgataaaatattttattattggaattgcatatttgggaaataagaacgtgtacactgagcaataaagagatgtaatatcatgaaaacttagtcctattttctgggaacggtgctgtccacatagggaagtgtttcttcagcatcactcttcatactgcatgcctttcaggcctttattatctgaagactgaaagactgaatgagaaatgcatctgatctaatgctgagacagtcgaatttgggaatttgaaatgcgatttaccagagagcaacttgggcttagcacatggtaagtaggaactaaaatacacgcattaaggaaggtaaggatgtttacccaaggaatccaaagacagaaaaaactatccaaataagggaaaactttaagcaaattgccatcaaaattttagtgagaaatgtagcttttgtatctatctatctgtctatatggagataaatacttacgtatgagcctctaactatctatcatctatctatgtatctatgtatctatgtatctatgtatctatgtatctatgtatctatgtatctatgtatctatctatctatctatctatctatctatctatctatctatctatctatctatgtatctaatctatcttcttggtagctctgtgtgttaggctattcttgtgatgctataaagaaatacctgagattgagtaatttataaagaaaagaggtttagttggattgttgttctgcaggctttacaggaagcacagtgctggaatctactcggatgcctaaggaaacttacaatcatggtggaaggcaaagagggattaggcatatcacatggagagaccaggagaaaatggtgtgggagaagtgtcacacactttaaacaaccagatgtcatgactaactcactcactgtctcaaggacagcacaaaggagatggtgctaaaccattcataattcacccccgtgagacaatcactttctaacaggacccatctccaacactggacattacattttaacgtgggatttggaggggacatccaaactagatcactctgtaattcctgggcctggtctatttaatatctctggttctattattattcatgactcccagtataacagtaagtgatttttttttctaaagctgccttatattattttctcattttccaaatgagcaattcacaacgaattttctctggtttcctcaattgtgatataggtataataataactagtatatactttttttttacaacacagaagataacatgtaaaaacacctcacaatttataacagtttgtgtttataatgcaatttattttagtttatgtaacaactgattaaacatttaaaaatcatatagtaagttttgagttatacatcttaccatgacatatatatttactaacatatatttactaacatataaataaatattggattaatttgagaggaccagtaagtgtggcataataaaaacctaaccataaatatgactatgattacaacttattttagaaaatgaaaaaaggaaaactaaaaggtaggaaatactctggttaggagaccagtatctggcatatgatcttctttttaattatttttttttaagttaaaatttggtgacattgagcatgtaggtcatttactttttttaaggttccattttttttatctgtagaatatgggtaagagttgaatctacctcataggacacaagtttaagtgagaatatatataaaaagcctttaaccagtttcttagtgaagtcctcaataactgcattcagaatagaaatatgtgacattcccgttacacttgatatcatcatgatgcatcctagctttgagaccatctgccacaagatcatgacacacagcaacatagattaggtagtgtctttttgccaagtaagcagttctataatcatttactcagcaactagcatgagtcagacccagccattatgaagcactggtatttcatatataagtcaaattgttgatccccacctggctcagttggttaagaaagacagttaaataacaaa

SEQ ID NO: 13144 - DNA, 602 bp, Homo sapiens
atttttcatctccaatttaaagcagatggcctgctcatgtgaattatcacgattatgagaagcagtttcccacaactctcatattcctcagaatgatcctcccattaaatgtgacttaggttactttctcccacttaaagttacttaaattcatgattatcctccttattggtctcggaggagcagaaattctttgactctagagcaygaaggcctctatatttgccttaaccctttatttatatcaaattttcttcctacttctagtgactcttttactggcatcattaacttctcctggattgagtattatctataatttataagaagaaatgttcaagtaagattacttttagctgacaattaaaatgaccatttgtttcttggcatttctctagcaagaataagaacagcccactttattaagtagttactatatgtcaggtcctattccaaattctttataggcattgtttcatttaatcctcataaataactgtgtgaggtagatactattattatccccatttcatagatgaggaagcttggaaagataaaataacttgcccaagatttcactattaataagtgtccttctctgt

SEQ ID NO: 13145 - DNA, 509 bp, Homo sapiens
tgcctgttcaaacactggcagctatcattattagtgaagtttttctaaacatgcattaagcaggcagcacttgaagtcgtggctaacaaagtctcacattctctgttggtcctgggggtaaaatttgaatgagactctcatgcctctgcctgcaaggagcttgttattcaatggatgagactggcaatgaaacaattaaaatatagcacaggaagttctatggaaggatggtggtggtgggggacatcacagatcacaaaaggaacaygtaggagggatatctaatccagtctaagatctgccaccatccctccccaggctggactgaggctctgaaagctgactgggagcagggagggataaggagcaaaggcagtgctgggagcctcctgtttgtagagaagtaaccattcctgcaattccctccacatcctcagcaaggacaagcctgctgctcccatgatgtcactttgccctttaaaaattgtgtacgggctgggcacggtggc

SEQ ID NO: 13146 - DNA, 527 bp, Homo sapiens
atgggcatggtggtgcatgcctgtaatcccagctactagggaggctgaggcagaagaatcgcttgaacctgggaggtggatgttgcagtgagccaagatcacactgctgcactccagcctgggcaacagagccagactctgtctctaaataaataaataaataaaataaaataaaataaaatataaataaataaaatcatagattactagtcatagcaaaactattctagcaatattaatatcaggtgaaactgaatttaagaaaattgatggttaaactggaggggtgtttccacctaagttaggaataagacatgactgagcatgatcagtgcaacaattcaacatttcaccagaggagttatctatgtgataagaaagggaaaaaatatagacaatggaaayggataaaattgtgtttatttgaaaattacacaattgtctactaagaaaattcagaaaaatctgaacaaattattagagctaggaagagaattcagcagacctcctgaatgcaatgatcaact

SEQ ID NO: 13147 - DNA, 460 bp, Homo sapiens
ctctcycttcactccctcctggtcagttgcctgtcctcttcttctggatgattccatctccttcttttttttaattttacttcctcattttcctggaggatatcctcaagtcacctttttttttttttaagccttgtcacccgtgctggagtacaatggtgtgatctcagctcactgcagtgctatggtgcaatctaagctcacttcaacctccacctcctgggtttaagtgattctcctgcctcggcctcccaagtagctgggattacaggcacacgccaccaagcccagctaatttttgtatttttagtagagacggggttttgccatgttggccaggctggtctcgaactcctgatctcaggtgatccacctgcctcagcctcccaaagtgctgggattacaggtgtgagccaccacacccagactcaagtcactttttaagagtagccaaatgaaa

SEQ ID NO: 13148 - DNA, 460 bp, Homo sapiens
ctctctcttcactccctcctggtcagttgcctgtcctcttcttctggatgattccatctccttcttttttttaattttacttcctcattttcctggaggatatcctcaagtcacctttttttttttttaagccttgtcacccgtgctggagtacaatggtgtgatctcagctcactgcagtgctatggtgcaatctaagctcacttcaacctccacctcctgggtttaagtgattctcctgcctcggcctcccaagtagctgggattacaggcacacgccaccaagcccagctaatttttgtatttttagtagagacggggttttgccatgttggccaggctggtctcgaactcctgatctcaggtgatccacctgcctcagcctcccaaagtgctgggattacaggtgtgagccaccacrcccagactcaagtcactttttaagagtagccaaatgaaa

SEQ ID NO: 13149 - DNA, 566 bp, Homo sapiens
tgccttcataggcagttttggaaaatgattcacacatttgctaatatttggattcaagggtgtctaagacatttatgccctgagaattcagatactgacattctcaccatagagaataacagcaggaagactgaactrgcaaaactctcactgtttcctggtcctcatcagccttcctgtaccttggctcagaagtcagtttgtagccccaggctacgtctgagagccagtccctggtctgagactttgaagagccttgtgtgggctggagagaggatgcacggagtggagaacacccagaattgtgagattaagagaaggagtgaatctcctgtttcttatattgtcttttataaatatactagataattcaatttcttacgtccaaccttttatttcttccacagacatgggcaaaaaggctctcgtgtttcccaaagacagcaagaatttctttgtgaccagataagcacaatagaaatcaagagtggtgttcactagtcagttgaagtccaccctgactctgcctgtgggtgcaacctctttttgtgatgcctagacccaag

SEQ ID NO: 13150 - DNA, 1755 bp, Homo sapiens
ttgatgtctgtaactttgctgcttctgccaagtaggccacagatattttggtcctggttgggagtcctaaggatctagagcaagcttgtccaacccatgtcctgtgggtcacatgcagcccagaacagctttgaatgcaacccaaaacaaattcacaaactttcttagaacgttatgaatttttttttgtgatttttctttttttagcccatcatctatcattagtgttaatgtattttatgtgtggcccaagacaattcttattcttccaatgcggcccagggaagccaacggattggacacccctgatctagaggtacattttgtagccatcttctcagggcttctgttcctttcccagagggctggcagaaagtgagccaggtccctgatgcccaccagacctgccagcctgaggtgtgctcttcattcccccaggaagcctccatgtgtctgcctcccttaactcccagcataatctctgcaagagctcacggttttggagaacaaatattaaacaggggattatctccaacatatttggttgcttgtgttacaaacttcgcctgagacaaggaagctcaatgttacttgcttagaataagacatattccaatatattcaggaatagcattaacaaataactacttcaatgagtattctgacttgtttatacaataaacaatgataacccctaactatgtgacagagtctgaaccaggcactgagaacataatagtgaacatgacagatcctggtcaccctcttcaaggattttgtcatagcggatgatatgcacaagccaatagtcaatgtcaacacagttgataagtggggtaatcacctaatatagagttgggaggggcagaaatcattcctagaggatgtttcatgtaagttgagaatggaagaagagcaggagttagctggccaaatgaggatgaatgagaatgaatagcatgtgcaaacacatggggtaatgagatcacatggacacaggaaggggaatatcacactctggggactgtggtggggtgaggggaggggggagggatagcactgggagatatacctaatgctagatgaygagttagtgggtgcagcgcaccagcatggcacatgtatacatatgtaactaacctgcacaatgtgcacatgtaccctaaaacttaaagtataataaaaaaaaaaagaaaaaaaaaagagagatactgccatgttttaagcattgaaaaatcaaaaagaattgagaagtcaacactggggtgttgagagaaatgaagctagaggatcaaacatggctccagttgttaaggagcttataatgcgtcctgaggttcttaagagttaagagggttggctcacttaacactcattccaatcccattttttccttgccttgcttttctttagtgactagaaggttaaaatactcaactttctctatacttccttggagataggagtggctgtgtgaaccagtgtggccaattgataccgagtggaagtttgcagtttctgctgatttatttccttactcttctttctcaaatggcagcaatggctagaagtcatcgctagggagggtagaacagagacagaacaattttgcttcccggatgtcactgcagagctactgtaccagtaccgagctccctccttgcagactgtttatggagtgaggtgaaaaaaacccacatttggttaagccccctggagtggatttcatgcagatgattgaaaatcctaatatag

SEQ ID NO: 13151 - DNA, 569 bp, Homo sapiens
  misc_feature (1)...(569): n = A,T,C or G
tgaacattttataacaatgaaacaataaaacaataaaaatgcatatttcataaggttactataaggatcaaataggacattatatttgaagactcttgtgaagtgccaagtactataaaattgaagttttaagtgaaataacgtacgcaactaccatttcacatgatatctgctctgcagtaaacccttaataagtggtaattgtcttcygctttatgtcacattgctttgctgctttggaattcctgtttccttcagaaatgagtttctgaaaagtgatattcatctggtatctaccctcagagtcatctccttgtttccttctctcctctgtcatttcccagagctagttgcttccctcagtaaggctttttattgcaggtggttggtattttcatgtctgttatctcatctagtcactgtcttcattgcagaataaataggagttgggaaattaggaggtcagannnnnnnnnnnnnnnnnnnnnnnnnnnnnnnnnnnnnnnnnnnnnnnnnnnnnnnnnnnnnnnnnnnnnnnnnnnnnnnnnnnnnnnnnnnnnnnnnnnnat

SEQ ID NO: 13152 - DNA, 351 bp, Homo sapiens
ttcccaaatataccaaaggctcaatccacaatttacggcaaataactctatgggcagtgactttgatgtatactataatgtgctagattatttttgttgaacatttatatattaaacccacttcagatgggtttagttagtttttggtaagktaataattggtttttaacatcaataagaagattagcaaatacattcattatagtatgtccaaactataacatatagctggctttcattttagagaatgatattttattttcttaaactaattttattcatctgaataattttggagcacttattatggtgaactgtgtggtggatacgaagaagaataagcaaagtttc

SEQ ID NO: 13153 - DNA, 1928 bp, Homo sapiens
gaggcttatttggctcgtggttctgcaggctgtgcacaaagcataggcccagcacctgcttctttctggtgaggcctcaggaagtttccaatcatggcagaaggcaaaggggagccagagtattacgtggagagactgaaagcaagagagggaggaggtgccaggctcttcttaaacaaccagatctcctgtgaactcagagtgagtgctcactcatcatcatgaggacagcactaagatattcataagggttatgcccccgcaaccctaacacctcccactaggcccacctccaccgctggaggtcacattccaacatgagatttggaggggacaaacatccaaaccatatcaggctctttcctaatcatttttcttttgcatcttaaaagtgaaraggaaagaagtcaggctaagccacagttaaatggtccatgggggaacagttaaagcaagcatcaaaatattaaagacataaagagctttcactaataccaggtcatcagtaggtcaggccaccggctttccacccttcataaaaaagggagggggcgatttcctgtccagttctgaagggagcatgcatggagaatgctggaaaaccaggcctcttaagctcagaaacagtctgtggccccagcaagccccagggcccgggaccccaaatgcagaagaaatgcctagtagccacagggcccagaggggtgtgcagtactgggagacagagatggcactaattcccaggacagtggcggccaccagggcatgcccaggagctcaggggtcttggtggtacccgggaagctccttccctcacccagcaagcagctgaggctgcggagaccaggtacctgctcaagaacattcatctgacaaatactcattattgagtgcctacggtatgctgagctgttccaagtgctctagatggggctggctgtgatcaaaacagaaagccctgccctgaaggactgggtagacctcagaaatacctcttataagtgtgagagtttgctttatgcttttctgtgtataaatgggcttgcattgctttgaaaattaggaaaaaggttattaaagaatgttattagaaattgtttttgaataaatatccacgaggaaatagaaacatgataaggaaataccagctaattacacatccgcaagtgcagtggactctgtactctgatgaggcctcaggaggtgtggtcagagaatcaacaccagatggtcctagaagaactgattgtgaactgttattgtcaaagaaatcatcataggagaactgtaactgttggtcaatctgctgatgttttattcatgcacttcattattcagtcaagaaactttttttgtattagattctgagaacatagagatgggcaaattaccatcctgccctctaggaccccacatttctgttgcagggcagaaatgttaatggttacaaacagcagaatgttgtaggtggcatggtagagttggggactgggtgtggaagggaccacaggagagagatgaccattttatcttggtccacaacacagagtctgttacacagtaggctcttactccgttactgaacaaatagtgttcgggcaaagcttcatggatgtgagaacctggtaattacacatctttgatgaaagtgtgagagtttgctttatgcatctatgatgaaagatgacatctttggttcttgcatctgttccaactggctttgctcttttcttggcaacatcaataacttttagatgttgtgtgaccacagctggtcttcttttcatcacatcaccatgtgtccttgcattcctcacaatagttctttatttcattctgctctccctccattgctacctgctctttcttcataatttttcactcctacttcataaaagccatgtcttcttatgtcctaacgaagacgc

SEQ ID NO: 13154 - DNA, 1928 bp, Homo sapiens
gaggcttatttggctcgtggttctgcaggctgtgcacaaagcataggcccagcacctgcttctttctggtgaggcctcaggaagtttccaatcatggcagaaggcaaaggggagccagagtattacgtggagagactgaaagcaagagagggaggaggtgccaggctcttcttaaacaaccagatctcctgtgaactcagagtgagtgctcactcatcatcatgaggacagcactaagatattcataagggttatgcccccgcaaccctaacacctcccactaggcccacctccaccgctggaggtcacattccaacatgagatttggaggggacaaacatccaaaccatatcaggctctttcctaatcatttttcttttgcatcttaaaagtgaagaggaaagaagtcaggctaagccacagttaaatggtccatgggggaacagttaaagcaagcatcaaaatattaaagacataaagagctttcactaataccaggtcatcagtaggtcaggccaccggctttccacccttcataaaaaagggagggggcgatttcctgtccagttctgaagggagcatgcatggagaatgctggaaaaccaggcctcttaagctcagaaacagtctgtggccccagcaagccccagggcccgggaccccaaatgcagaagaaatgcctagtagccacagggcccagaggggtgtgcagtactgggagacagagatggcactaattcccaggacagtggcggccaccagggcatgcccaggagctcaggggtcttggtggtacccgggaagctccttccctcacccagcaagcagctgaggctgcggagaccaggtacctgctcaagaacattcatctgacaaatactcattattgagtgcctacggtatgctgagctgttccaagtgctctagatggggctggctgtgatcaaaacagaaagccctgccctgaaggactgggtagacctcagaaatacctcttataagtgtgagagtttgctttatgcttttctgtgtataaatgggcttgcattgctttgaaaattaggaaaaaggttattaaagaatgttattagaaattgtttttgaataaatatccacgaggaaatagaaacatgataaggaaataccagctaattacacatccgcaagtgcagtggactctgtactctgatgaggcctcaggaggtgtggtcagagaatcaacaccagatggtcctagaagaactgattgtgaactgttattgtcaaagaaatcatcataggagaactgtaactgttggtcaatctgctgatgttttattcatgcacttcattattcagtcaagaaactttttttgtattagattctgagaacatagagatgggcaaattaccatcctgccctctaggaccccacatttctgttgcagggcagaaatgttaatggttacaaacagcagaatgttgtaggtggcatggtagagttggggactgggtgtggaagggaccacaggagagagatgaccattttatcttggtccacaacacagagtctgttacacagtaggctcttactccgttactgaacaaatagtgttcgggcaaagcttcatggatgtgagaacctggtaattacacatctttgatgaaagtgtgagagtttgctttatgcatctatgatgaaagatgacatctttggttcttgcatctgttccaactggctttgctcttttcttggcaacatcaataacttttagatgttgtgtgaccacagctggtcttcttttcatcacatcaccatgtgtcyttgcattcctcacaatagttctttatttcattctgctctccctccattgctacctgctctttcttcataatttttcactcctacttcataaaagccatgtcttcttatgtcctaacgaagacgc

SEQ ID NO: 13155 - DNA, 535 bp, Homo sapiens
ggcttcacaaacattcagatgacaactgttctgagaggtgcatatggaattgccctgactatgaacatcatgtggtgggaagaggtgggacattggttcttttgggtcaagttctcctactaactagctatggaaccttaagcaagtcgtaactgttcttcgtaagtctctaaaatgagaatgagaatatctctaaaataaaatgagaatattttcaaggtctgtttcaagtgtcacatttagagccaaatgtactttgattcactctgtcactttttccagggaggtayatttgcttatttattcaattatatatttgtgaattgccacaagacatccatgccagttaagtctcacagctttgtcagttgaattaagtataattattgtctctctgtcaggatatcacttgcctgttatggtttgaacctagtgcattgtgtgatggttactttttaaaatagttgcagatcttggactttcatcattgtcataattcatctgccaaaacatccccaggcctcacttgctgtca

SEQ ID NO: 13156 - DNA, 563 bp, Homo sapiens
tgcctactctgctttcctattcagcctaacctgttgaaaggatagtctgcaccagggtttgtcaacctcagcactactgacactttgcaccagaygattctttgctgtgggggctgtcctgggcactgtaggatgtttagcagcatttctggcctctacccagaggagatgcatccctttccatttagaagaagaccaaaagactctagatgccagtagtgacagttgtgatcattccccaatgatgacagatgttaagatgttatagtccccccgacccagttgctatagttgttggcaacttccagttatgacaaccaaccaaaaatgtctccagatcttgccaaatgtcccctgtaggacaaaatctcccaccattgagaaccattggtctacactgtctattctacttcattatccccagccattcatcaattcacttgtaattcagtttccatgtcttctccaatctcctggaactgctttagcaaacattccctccaccccatattattagatcacttgtgttcatgtcactgacccctgctgccctagtggagctg

SEQ ID NO: 13157 - DNA, 563 bp, Homo sapiens
tgcctactctgctttcctattcagcctaacctgttgaaaggatagtctgcaccagggtttgtcaacctcagcactactgacactttgcaccagacgattctttgctgtgggggctgtcctgggcactgtaggatgtttagcagcatttctggcctctacccagaggagatgcatccctttccatttagaagaagaccaaaagactctagatgccagtagtgacagttgtgatcattccccaatgatgacagatgttaagatgttatagtccccccgacccagttgctatagttgttggcaacttccagttatgacaaccaaccaaaaatgtctccagatcttgccaaatgtcccctgtaggacaaaatctcccaccattgagaaccattggtctacactgtctattctacttcattatccccagccattcatcaattcacttgtaattcagtttcsatgtcttctccaatctcctggaactgctttagcaaacattccctccaccccatattattagatcacttgtgttcatgtcactgacccctgctgccctagtggagctg

SEQ ID NO: 13158 - DNA, 532 bp, Homo sapiens
gaaaaatcccagccttactgctctgaggggtcaggagagtagggagcccacctcacttgttatataacattaatacatgtgattatataacatcagcagcacagtgtagcagttaggtacccaggccttggagccagactgccaccgcataggttgtggctttgtcccttcctagcagtgtgatcttgggtttctgaatatctctatgcctctggccgggcatggtggctcatgcctctaatcccagcactttgggaggctgaggcgggcagatcacgaggtcaggaattcaagaccagcctgtccaacatagtgaaaccccatctctattaaacatacaaaaactagccgggcgtggtggtgcacacctgtaatcccagctactcgggaggctgaggcaggagaatcacttgaacccaggaggcggaggttgcagtgagccgagatcacgccaccgccctccagcctgggcaaaaaagtgagactccgtcttggaaaacaaacaaacaaaayacacacacacacacacaca

SEQ ID NO: 13159 - DNA, 506 bp, Homo sapiens
caatgccatcattgacaagtaggcagagagataaatgctctaaaatcgtctaggccccttgggccagatgttcccagccttatcaagaagagaagctggctgggcgcagtggctcatgcctgtaatcccagcactttgggaggcctaggaaggcggatcacctgaggtcggagttcgagaccagcctgatcaacgtggtgaaaccccatctctactaaaaaatacaaaactagccaggcatggtggcacacgcctgtaatcccagctactcgggaggctgaggcaggagaatggcttgaacctcccaggaggcggaggttgcggtgagccgagatcacttgcagtgagccgagatcaygccattgcactccagcctgggcaacaagagtgagactccgtctaaaaatatatatataaataaaggccaggcgcggtggctcacacctgtaatcccagcactttgggaggccaaggcaggcagatcacgaggtcaggagatcgagacc

SEQ ID NO: 13160 - DNA, 513 bp, Homo sapiens
acaaagaaggccgctagtgagtttttactgagtgaatctacattgttccatggccttggtctggatatagattctaaagcttcttacactgacamaaatggagtttctagctctccaggtaattttcggtgaaagaaaattatagaagaaggcataaaccttggctcacaaaataaatacgcactcagacccatgtacttcatgaaacatacaagcccagagctagaccatgccatctgttttatgaggaaaaaaaataaattcacatgatttacttactttagctctgccagaaatcatcagcatctacttgcacaactaaagacaagaagacaaggcagatggaggctaaacaccgaatactgcctaattttgatgtatatttttgggtcaaacctcttataatttactatttccaagagggaaaataagcttatataatggcactgaatcattggcttccagttatgggaagcaaaggaaattaacctcaaggggaaaaaaatgctacaa

SEQ ID NO: 13161 - DNA, 1363 bp, Homo sapiens
tgatcaagttggctttctttccaaattttcaaatgtcttaacactggaaaatcaatcagtgtaattcattatattaacagagtacaggagaaaaaaaaatacaatcatcttaatagaaggaggaaaagcatttggcaacatttaacatctattcatgataaaaaaaaaaacctctcaacaaattaagaataagaggcaacttcctcaatatgacaaaagagcatcatatttaatggttaaatattgaaccattaatattttcctccttagactgaaagtcttgggcaggacttccaggtccaggaaatctttaaaggtagctacccaattggctggtccctttactcttccctcgtcccctgtctcttttttcctagaatgtagatggcaggagctgcagctaccgtcttgtaaccgggaagtaactaactttgaagaaaaaataagcttctataattttaggttacttttactgaggcctcggttacccatggctgaatgcaatgcttgattgatacgaagaaacaactttggttgagtccttattatgcgctgggctgtcatttcttttgttatttaaattctcaagggcctttgtagtgggcattgtgcaccccaatttacagatgagttaacagtaaaaagaaaagctcacctactctgggcagccttcctaaagaaaattaaccaatgcttctaagatcctgtctagcagatcttatctagcaactgacacatcatattttaggtatagaagcatacagtttggtcatattcgagtaggctatttgaggtctggaatgacatcttattcaccatgtcattgctagtgcttgaacagaatatgttttaaaaatacaattcagggaatagactgtcatgtactgtgttattcagaatcgtcattatcaagaagaccaactgcatactagagtcaggagcacgtggcaattggtaaagagtttcaccacctagacatcaaggattgaaaagttcttgcattacgcaggctctttccagggcgactgcttgctagagcctacccgtatgttctttggatccttggggcctatcctgtgttttatgacccatgatcctatttcctaggtgcaaaatagtgtgtttgaaatacagctgataaaccactctacccaacagacaagaaaaatatccctgactgggcagaccagtaatctgatacttctttagtaaaagaagagaaaggaaaaataatggacacacgattttgcagtggttgacagcagcaacagcaaggtattcccattgccacacatygtgttccaaaggaagacctttccatggcaacgttgctgtggtcccactctctgtgagtgtggtttgt

SEQ ID NO: 13162 - DNA, 514 bp, Homo sapiens
tagattaggtggttctttagaagagtatatgttttgaataaaaatttctttttcttttttctgagacgggatctaactctgtcatcaaagctggagtgcagtggcaccatctcggctcactgcaatctcaacatctcgggctcaggtgatcctcctgtgcctccgaagtagctgggactacaggcatgtgccaccatgcctggctaattttttacttttttgtaaagatggggtctcacatgttgccaggctggtatcaaactcctgggcttaagcagtcgtcatgcctcagcctccctaagtgctagkattacagacgtgagccactgtgcacacccaaaaattgctatataacagaaacactaggttattctgagtatggaacataggttatataaaaagccttagtttctgttaaactttggctcttttaaacgataacaagccttttctttttactttctatcaaaataaaacaaacttgaaaattatcatttcaggatattgcagaaac

SEQ ID NO: 13163 - DNA, 517 bp, Homo sapiens
tacttgtcagactttgtgcccaccctcatttcctttggggatgaagattgtgggggtggcggagagtacaaagttactgcagagaaggtactcttaagcgcttcactggggtaggggcaggactggtggtggctaggcttgcacagatggggcctccggagaagggaaacaggctcagctagcttcacagagggcaggaccccattttatatcacactataaatcataaatcacgccagcttgaaaagtggctatyggccaggaatctgacataattaaatgtgcagaaatcacttacaaaatgaactcaaaggcccccaagcatccccagagttgacaagatttgtggttggaagcagtttcattttcttttattttttacataagcctccatttccacattgcccttgccttccccaaggaaccgaatttgaaaagttcctgattggcctttggtgctctgatttttgagagggaaggaaaacacctattaaaaatgtttgttccgggcagatgg

SEQ ID NO: 13164 - DNA, 569 bp, Homo sapiens
agaaagtatctgactttctattctgtattgtaggagtcaacaaactgtaactaccaagataatagataactttggcattgcaggccttttggtctctgttacaactaatctctgacattatggtgcaaaagcagccatggataacatataaatgaacaaatgtgactgtattccaataaaatttcatttagggatgctgaattttgaatttcatatgattttcataaaatactcttcttcttttgatctctcttcaaccatttaaaaatatgaaaaccattcttaggtcacagctatacaaaagttagcagcctactggatttgggccatggtgtgccagccctgaccccatgtgtgagaggagtgtaggaatggctttgggaggtccatccacagtactgccgcatacagcctctgtgccttgaatgtgggataytggaaagtgatgacaagctcaatctatcagacccactttaattttcctgagagccacaagaaaagcctgcttctaaattatattctttatcatgagcaaattaaagtttaccaaatacctttaacactgaaaa

SEQ ID NO: 13165 - DNA, 569 bp, Homo sapiens
aagtgactgtctgagagccaagagggtgcatggatacctcaatgtcctcatttctctgtcttttggctggagcccattccttgaagttttatatttctgacaccgtcattcgggtttgtggtgtttttccatgggctggctaattaatyagccttcttgtgcccattgttctcatttgtaaaacagggacaataatggctgtcttgctaggtttttccggggatttgactgaataacatctagtagaccctcgataaataatagctttatttccaatataggcacaagttagcttcagggcagctatattggaactgaactcacaatagcaggttgttttccactgctaataggctggtagctttcaacctcatttccctgagatgggcttttttgaattatttagtaaaggtatgattataatctgtgttctgttgcttctggcttcatccctaaaatgcaattgagaaagatttcttactctctaatccggtttggggttagtttaagaagcaggggcaggaatgctgggtttaagtcgtattaatttcctgggcttttttgagtat

SEQ ID NO: 13166 - DNA, 549 bp, Homo sapiens
aagaagaagtacatgacaagagaaatggtctactagagaagttgagaaaatgagagactattatagtttttcaaatgagggtattaagtaacgctaccacgagcacttcaggttgccatcttttctaaactactttgggtggcatytctctctaataatgtaagtgagaaccatcctgaacaactaccatgtgtcttcaataacaccaaataaaatattaaccaaatgaaaattatcaaatcaatatttatatttccctttctattttatttcctatctgcatgtagtatttgagttgtacatttcaagacaatgtcttggctccacttatgctttgctctccaagttgaacattcactgaattactggtattttcatgtacattcttgtaaaaactcttcattattattagcaactgaagaatgaacaatttatatttatgggagtttagtctagtgggccattcaaagactgtgtggggacctgagaaaataaatttttcactatgagggactcattagaaaatagcacttgctcttccagctaaat

SEQ ID NO: 13167 - DNA, 515 bp, Homo sapiens
gagcctcctcgcccctgcctgcacccggcgacagaagatggacagacagtatgaccttcagaaaacctctgtaacccgaggagtctcacctgggcttgctcaagccatcagcaaaatggagatctgaaaataatcatgctccattcagagtgtttctcttctctctcagtaatacattctcccgacatccagcagagcaggggggtggccggcccagggcactgactgacatctctgagcagagcttttcagtggacggagcgcagayggcattgcgtctgcagaggcccgcgggcagggtgattgctgggctcccgcaagaacaggcggtccttggaggcttttgactcacactttgtaaattggtttcatgcatgggctaacagtgggggcctggctagataataggattttccaacacagctctttccccctcatctgcagccacccaaatctccgtgcagagtgcctggaggggacgtgatgtgcttggcagggagcgccacgtcaggctc

SEQ ID NO: 13168 - DNA, 1284 bp, Homo sapiens
tttaaaatcacagtgtattttcatcaaaagggctaaaccaagagtatgagatccccagctctgagggagagagtataaatgtttatgaaagtgtgtgtgtgtctctaagttgccctgtctttgtctgctatataagtgtagctcaacaggctaaataggtatttctgaatttgtttctaaatagaatacacttaatatctctttatttgcacaatattttgggtaatctcattattgcctggactatcatgaataaactggaaccaattagatgatgtaaaaggaggaagatccttggaaggccttgatcagagcatttttataaaaatgcttacatttggcagccttgctgacccatccagtgatttgcattataatagttacactataagtatgcattcttctctgtcactatgatgtagaagatttaataccacagtgagcgtgacatatctgaaactgtaagagacgctgttgaaaacagagtcatttctgaaggttttataaatgccttatggtccatttatttaaatattgtcaatatacagccagaagctcatttggtaaaattttacagtgttgcctccttctttcccatcatttttcatctttaagttgtggctgctctttgtgaggtacgggagtatagcttgctgcaaacccagtatttccatgttctcaacaacccggccctgcacagtggaagccccacaaacatctccccacctggaggtgaggaggggagcagcagggctcaccatctgaggcccgcacacctgcatccatgaaaagcctcctcccgctcctcagcttctctgattggctgaaagtgacatcacagaagcccagagccagcgttttgggcaagcccaggtgctacacagtgtcgagtcgtgatacgcacctcgttcgtctttcagagtctgcctggtaaaaagttcaaagttaagaacagataaatagaatgcacccaaaatgagcagctattaatcccyccaatctaaaaaggccacctgcaggacagcagagggctgcccctgggcactcatcagagtgtggtgctgacttgaagagggtgtcattttactgatggttatttgcccaagtgaaaatcagaggtatcagtggtccctttaggggtatctagttatagggatatttactctctcaccttatttatacagagttttgccacaatggttctaatatttttagttggaacgtgttggagaacaagaacatttggtggtgtattagtccattttcacactgctgataaggaca

SEQ ID NO: 13169 - DNA, 1284 bp, Homo sapiens
tttaaaatcacagtgtattttcatcaaaagggctaaaccaagagtatgagatccccagctctgagggagagagtataaatgtttatgaaagtgtgtgtgtgtctctaagttgccctgtctttgtctgctatataagtgtagctcaacaggctaaataggtatttctgaatttgtttctaaatagaatacacttaatatctctttatttgcacaatattttgggtaatctcattattgcctggactatcatgaataaactggaaccaattagatgatgtaaaaggaggaagatccttggaaggccttgatcagagcatttttataaaaatgcttacatttggcagccttgctgacccatccagtgatttgcattataatagttacactataagtatgcattcttctctgtcactatgatgtagaagatttaataccacagtgagcgtgacatatctgaaactgtaagagacgctgttgaaaacagagtcatttctgaaggttttataaatgccttatggtccatttatttaaatattgtcaatatacagccagaagctcatttggtaaaattttacagtgttgcctccttctttcccatcatttttcatctttaagttgtggctgctctttgtgaggtacgggagtatagcttgctgcaaacccagtatttccatgttctcaacaacccggccctgcacagtggaagccccacaaacatctccccacctggaggtgaggaggggagcagcagggctcaccatctgaggcccgcacacctgcatccatgaaaagcctcctcccgctcctcagcttctctgattggctgaaagtgacatcacagaagcccagagccagcgttttgggcaagcccaggtgctacacagtgtcgagtcgtgatacgcacctcgttcgtctttcagagtctgcctggtaaaaagttcaaagttaagaacagataaatagaatgcacccaaaatgagcagctattaatccctmcaatctaaaaaggccacctgcaggacagcagagggctgcccctgggcactcatcagagtgtggtgctgacttgaagagggtgtcattttactgatggttatttgcccaagtgaaaatcagaggtatcagtggtccctttaggggtatctagttatagggatatttactctctcaccttatttatacagagttttgccacaatggttctaatatttttagttggaacgtgttggagaacaagaacatttggtggtgtattagtccattttcacactgctgataaggaca

SEQ ID NO: 13170 - DNA, 1284 bp, Homo sapiens
tttaaaatcacagtgtattttcatcaaaagggctaaaccaagagtatgagatccccagctctgagggagagagtataaatgtttatgaaagtgtgtgtgtgtctctaagttgccctgtctttgtctgctatataagtgtagctcaacaggctaaataggtatttctgaatttgtttctaaatagaatacacttaatatctctttatttgcacaatattttgggtaatctcattattgcctggactatcatgaataaactggaaccaattagatgatgtaaaaggaggaagatccttggaaggccttgatcagagcatttttataaaaatgcttacatttggcagccttgctgacccatccagtgatttgcattataatagttacactataagtatgcattcttctctgtcactatgatgtagaagatttaataccacagtgagcgtgacatatctgaaactgtaagagacgctgttgaaaacagagtcatttctgaaggttttataaatgccttatggtccatttatttaaatattgtcaatatacagccagaagctcatttggtaaaattttacagtgttgcctccttctttcccatcatttttcatctttaagttgtggctgctctttgtgaggtacgggagtatagcttgctgcaaacccagtatttccatgttctcaacaacccggccctgcacagtggaagccccacaaacatctccccacctggaggtgaggaggggagcagcagggctcaccatctgaggcccgcacacctgcatccatgaaaagcctcctcccgctcctcagcttctctgattggctgaaagtgacatcacagaagcccagagccagcgttttgggcaagcccaggtgctacacagtgtcgagtcgtgatacgcacctcgttcgtctttcagagtctgcctggtaaaaagttcaaagttaagaacagataaatagaatgcacccaaaatgagcagctattaatccctccaatctaaaaaggccacctgcaggacagcagagggctgcccctgggcactcatcagagtgtggtgctgacttgaagagggtgtcattttactgatggttatttgcccaagtgaaaatcagaggtatcagtggtccctttaggggtatctagttayagggatatttactctctcaccttatttatacagagttttgccacaatggttctaatatttttagttggaacgtgttggagaacaagaacatttggtggtgtattagtccattttcacactgctgataaggaca

SEQ ID NO: 13171 - DNA, 453 bp, Homo sapiens
ttatcgtaaactctcataataaaaaatagaatagagaggcaggaaaatttttttgctcccttcaccatattttccctatatttaaaaaagaaagagaaatttcaaaacaaaacaagaagccaaagcaaacataccactcatccctgctaaactactgccattttcagacatcttgagttttttttttccytttggtggcaaattcttgagatgagtagttaatacatcttgaacatattgatcacactggaacacatttacatgctgttttcattcccattctgtactgtgtcagcactcaacaaaaatgactgtattctcttatttccccagtccttggccatatcctcattatcttcctatatttcctagtaatggatattccttatgcctatcacttgggtcacatctcttccattttttctcttactaaattaattcttttggatgtat

SEQ ID NO: 13172 - DNA, 504 bp, Homo sapiens
caaaagttagctttccccatttaaattcaaccaagtgagtgccccgtacttggaatcccttaagtttgtaccatatcaaattgtgattatagattactcagtagactttatttttaagaaatgaatcttcctatagaacttcatttatttattcattgattcattcaacaagtatttcctgggcgtctgttatktacactatgtctcttatataggggggttgaatacttattggatgaatgaattaataaatatcatgttgtttgttggtgctgagcatccagcaataactagcttactgatctcgtgggggttacaatttagtgggcaaagaagatagatattaaaaactatatatgtaatgtaattaatatttatattacctatttgattataactaattatttagttattactggaggagctaccaaggaaaagcatatggcgtgctgagaatgttggagaggaggccctaacctagtatagggagtgaggactggtacc

SEQ ID NO: 13173 - DNA, 1169 bp, Homo sapiens
tccgatacaggagggtgcgaactggggatcaggttaattgtgctttaaagttatggggtctttcagtggatttgcatgatgagagttttagtccaaagcctgtttcaaaatcctcattagttttctctaatccacctaaaattatgaaggcctggattgtgaaggtcatctgtgatgattcaaccctgtttaatttcatgggggtttgcacccacttctctatatgaaaaagagaattaataattttgaattgtcttctctatcgacaattttggggactgtcatgggagagaaacaaagaaatgcagactgtacacttttatgtactttgcttaaccaatttgaaatgaaagcagttttttttgttttttttktttttgttttttttttgtttttttgcatcctgtgtaccaaggaaaaggagttaagtgactggacagaaatcagaaagaggacttcttagcaggagataaaaataaggaaacagcaggaaaaaaaaaagcatttaaacctctcatagctatactcaatctggcattcacaacctgagtctgtatcagtttgaaactacaaaaatagtttacaagggtcacagtcatttttttctactcagtgtgtcagaagttgggatgtgcgacccagaactgccattccattacacagaataaaatgatatctggtgggtggatcgaaagcttgccaaagaagacacagtgaaagctaaccctctcagtctagctcctgtttttaaatatttatatctctggcagactttttgggggtagaggaaactgaaagctcttttgctatctgtcatttcacccaggcaaatgagagagagtctcacgacttgattttcctcgagtttggcaccaggaacaggcgatggcgtttctttgggatggtgaatttctctttgtggaaaagtggccgggaccaaggatttttacaagagccaacagccactttccatacccgcttggggcagggccaacttcccattagcactgctgttacagatcgggcctgctttgcagccggccagtgccaactgtggtcatggcctgttaggaaacctacgaggaaagccaccgtgagcctggggtggtgggaagtgtatcgctctagatcctgggcaatctggctcactagcttgcctctctcgtgaa

SEQ ID NO: 13174 - DNA, 626 bp, Homo sapiens
ctgaagaggaagacacgggtggtagtgacagcttgagtgtccaggaaggagggacgctgcaatattctgaacctgcagcaytgggagaatgtgaactgcctctgccaacagggagagccattagagctgtagtatttacacttcaagaaatttcccataaggaaatgctctcaatactgatctctgtggaggcaatgactgaataattcagatggaccaattgttgatgagattgtccagacacagctatggagaacccttaggttcccaagtaacccctgatgtggatagacaaggctgctcagcctcttgatgcctctcactgcacaggaaatcacagtcatttgctccagcctcccagtcctctctccactgggaggctgggaaatttgatagttgtggtggacatttgtggtaatttggccatccagcgtcagttcatcctgttcttgataacaagtgtttaatttttgtcttaaaagtcatccctcccccatccatgctgtccaggttactcaacaggctccgcaagtaacccagggctgtaacacacatcatgtatctgggcaattgactggtccaggaatgggcactgaaacccaatatggggttgctgttgcgccata

SEQ ID NO: 13175 - DNA, 626 bp, Homo sapiens
ctgaagaggaagacacgggtggtagtgacagcttgagtgtccaggaaggagggacgctgcaatattctgaacctgcagcactgggagaatgtgaactgcctctgccaacagggagagccattagagctgtagtatttacacttcaagaaatttcccataaggaaatgctctcaatactgatctctgtggaggcaatgactgaataattcagatggaccaattgttgatgagattgtccagacacagctatggagaacccttaggttcccaagtaacccctgatgtggatagacaaggctgctcagcctcttgatgcctctcactgcacaggaaatcacagtcatttgctccagcctcccagtcctcyctccactgggaggctgggaaatttgatagttgtggtggacatttgtggtaatttggccatccagcgtcagttcatcctgttcttgataacaagtgtttaatttttgtcttaaaagtcatccctcccccatccatgctgtccaggttactcaacaggctccgcaagtaacccagggctgtaacacacatcatgtatctgggcaattgactggtccaggaatgggcactgaaacccaatatggggttgctgttgcgccata

SEQ ID NO: 13176 - DNA, 626 bp, Homo sapiens
ctgaagaggaagacacgggtggtagtgacagcttgagtgtccaggaaggagggacgctgcaatattctgaacctgcagcactgggagaatgtgaactgcctctgccaacagggagagccattagagctgtagtatttacacttcaagaaatttcccataaggaaatgctctcaatactgatctctgtggaggcaatgactgaataattcagatggaccaattgttgatgagattgtccagacacagctatggagaacccttaggttcccaagtaacccctgatgtggatagacaaggctgctcagcctcttgatgcctctcactgcacaggaaatcacagtcatttgctccagcctcccagtcctctctccactgggaggctgggaaatttgatagttgtrgtggacatttgtggtaatttggccatccagcgtcagttcatcctgttcttgataacaagtgtttaatttttgtcttaaaagtcatccctcccccatccatgctgtccaggttactcaacaggctccgcaagtaacccagggctgtaacacacatcatgtatctgggcaattgactggtccaggaatgggcactgaaacccaatatggggttgctgttgcgccata

SEQ ID NO: 13177 - DNA, 626 bp, Homo sapiens
ctgaagaggaagacacgggtggtagtgacagcttgagtgtccaggaaggagggacgctgcaatattctgaacctgcagcactgggagaatgtgaactgcctctgccaacagggagagccattagagctgtagtatttacacttcaagaaatttcccataaggaaatgctctcaatactgatctctgtggaggcaatgactgaataattcagatggaccaattgttgatgagattgtccagacacagctatggagaacccttaggttcccaagtaacccctgatgtggatagacaaggctgctcagcctcttgatgcctctcactgcacaggaaatcacagtcatttgctccagcctcccagtcctctctccactgggaggctgggaaatttgatagttgtggtggacatttgtggtaatttggccatccagcgtcagttcatcctgttcttgataacaagtgtttaatttttgtcttaaaaktcatccctcccccatccatgctgtccaggttactcaacaggctccgcaagtaacccagggctgtaacacacatcatgtatctgggcaattgactggtccaggaatgggcactgaaacccaatatggggttgctgttgcgccata

SEQ ID NO: 13178 - DNA, 544 bp, Homo sapiens
caggactccagggagaggctggaaagttgctttagtatctcattctcaagaaagaaactggagccaaaatgataaaatcaacaatggaaagaaattaattacagagatattgaataggtaaatctgacagaacttgatgacccattaaatattgaggaatcaaggatgtctctaagtttaaagtttgggaaactgagcgaatagtgcagagagaagagaacaggtagccttaggagggaaggttgctattttagaaccattatgtttgagaggcctcaggaacatgtgagtaaccaagtccagtaattggttatttaggtttatagatcaaaagacagtgttaggatagggttatcaaattaaattctaaaatctgttcaagtaatatacaggctaaaagttatgatactctgtagaataccaggaaatataaaaaataagcctaccaataataaagtgtttaaaaattaaatagatactagyttatatgatattaaacaagtagcatcagacacaattttaaaatacatatgtgggagaaaaa

SEQ ID NO: 13179 - DNA, 504 bp, Homo sapiens
cttcttcctggagctactgatccagccacaccagggattgtcagctattgcagggcactctgtcagctgtcaggaaataaatctctctatcagacggaagcagtctgagttggagcaagtcctccacagcatgtcaccccgggagcgctcaacatgcttggcgaacaagggctccctgttgtactctgatttatgtatatctgtaaagttactcctgatagggtaaaaggaggagactgatcaagagtctgtcacactcgaaatgctttcatactgttgccaccccactcaacctgtcgtccatggaagcaaggaaacaaaagcactgcagaccgttctcagmagccctttcctttcctcggtgaccctttcacagaccgttaccagaaccaccactcacttcttgtgctagtagagaacagcaagtagttatatttgtgttttaaaggttgtcctgttaatagattgtcctttcacacatgccatgtaccttattatctgaaa

SEQ ID NO: 13180 - DNA, 514 bp, Homo sapiens
tgtggtgggagctcttttataacctagtgtttatttctttgctgacaagtaattaactccccatctcctaataaaaatgtgggccatgtgtggttttatttctgctctttgttgatcctatgatttttgtttgttttgtttttgagacggagtttcactcttgttgcccaggctgaagtgcagtggtgcgagctcggctcactgcaacctccacctcctgggttcaagtggttctcctgcctcagccgcctgagtagctgagattacaggcatgcgccaccacgcctgmcttttttttttttgtatttttagtaaagacgacgtttctccatgttggtcaggctggtccggaactcccaacctcaggtgatctgcctgcctcagcctcccaaagtgttgggattacagccatgagccaccatgcctggtgatcctatgatttttatagagcataaatgtaatgtttggattcaagaggccaccattatcgtcaaactctgcttcaataggaaaa

SEQ ID NO: 13181 - DNA, 566 bp, Homo sapiens
aacacacattataataatgtataaaaattaaaagttattaaaagtccattgataaaattctttcaacatttaaatgaataattgatctatgtatggcttgtgtttactctaagttataaattctcaaagaatagggagcattttttcttcttatattctctccmcagctccatacgcaacactgcgtgtaataactctgtaatggctgttgattgactgggtatttagacgtcaagcattgaggagatattagcaaaaatagctaagaactaaattgcatggctgggcctttggcactagaatgttaataattgaaaactaaaaccttcaagtcatttgtttttattataaatgaacccacctctcacaactccccttcggttttgaaatcctgccaaagtgtttcttctgatcccatcctttggctaatgtgaaagttttaaaagcttcttaatgacatcattatcctgcaaatcatcatgaaggagacaaaaatgaatcaggtttttggtaaagccgtgcatggatctgtgatttctgatatgggagcagagattgtctaggca

SEQ ID NO: 13182 - DNA, 2070 bp, Homo sapiens
ttccatttttatctgttccttccctctggctcccagtgttctattattgcatctgttcctctttccttagaggaaaagagttgacaaatttattcacactaaagtgtgagtcactcaatcaccaagaatccttgcattctagtttctataatgagaattcactcatttgactcatatctattaagcatgcactatttggcaggctcgtgctaggaaaccacagaagatacagaggtgaaataagacaggcatttaaggggtaccaacatgcagttagctagaagaagtaagttctagtatttgatagtacagtagataaatatagtaaaaccagtttattgtatatttcaaaattgctagaataaaagaattgtaatgttcccaatgcaaagaaaagacaaatatttgaagtgctggatatcccaattactctgatttgattatcacatgttgtatacaggtatcaaaatatcacccccaaaatatgtacaactattatacatcaataaaaatataaataaaaaataaagcaatgccttaaaaaggcatattttacaaatgtattaatattgtaatagaaaaaaacaagctatattttcatttaaaaaatgttaaggtcatcagggagggggaaaacatgtcagtattttcacacttaaggagttcattaaaattgcttggagctgatttctgtcacctcactccaaatccagagttctatttcaacaggtctgaagaaaaatccaggaacctgaattttatgaagcattccgaggtgattttgatgaagatggtcagaggatcttactgtgagttcctctggcttaacccaaaatgattattctctagaggctacatttctggaaccattgagtctctcctaaaaaaggcaaatcttggagcaataccttacccttcaaaacatactgcataagcaacatggaatcctgcctcttcataaagcacccacttcctccaagttgggatttgcaaggtggatgaatgattccttatgggcatgtgacatattacagcagatgctcctggtgccctgcccacatccctgtagtatcaatctcttcacaatggggagtgttactgtgaacacatgtgcctctctgcctgagggttttttcctggccatgcgagcacatttggcccatacaggtccaggtgaaaggctggaccgtgaatgctcctaggatagccttcaaccaatgcctacgattttcctttccwttgagagatgggagaaatgttctccatggtctctgagttacccaaaggtgttaagcttcagctgcccacagtggaaactggcttgtgaggttcccttcactggctttcttccctacctcatctcacattccactcttctcctagtgtttcttgtcatcacttcctgtgtaactgaccagcaccttaatccttgtctcagggtcatctttggaagaccaaagtgaacacccttcaatatctaattgtaaaagtcatgtggttatgtgctgtgtttaacatagttcttagaaagattaagtgctgacaattgccctcagattacataaccaaagaattccttccagtcaagtatctaaagaatcaagccaaggcttaaattagaatagattcctcaatatctctaacacacaaacaagcacacatgccatcagctatcaagcagaagctgaagaccttattaccattgcaattattattattaccattaactctggaaaaagtactcagcccaaatcatgctaagcagttattccaaaaaggaagtggggaagaaacaaactaatattaaaatgttgttgtacattttaatagtcatagaaagtgcaaagagtgggtttattatgcagaatgcattcaaacatgattagctgtttggcagtatagcaagaagaaaaaagtggaaaaatcccagcaaagaacagccagacccaaagatgtacttaaagaatagatagaaaactgcttcttgggatttagatgttgaggcagaactgcatctcccttctttatctactttcaaatggtaacaaatcattctgatgataattgcag

SEQ ID NO: 13183 - DNA, 571 bp, Homo sapiens
aacacagagaaactttgcaccgattctccatttctttcccagaggctttttctgggtgctcgagtgtgttattctgatgaataacagcagtgcaggagaactaagagaaagtcatccaggtgatctcaggttttcaacaagttggttctccaactttcagtggtgctccaaaggctgaatgtggggcaggaggactaagagaaattccataaagtttatgctttaatcaagcataaacatttccttttatttttcaactctctctctattatgtatatacataaaacactaaactgtatattacatattttacataacatatatattatcatatacaacttaaaaagtcctggctgataaggaagatatttttaagacatgtgaatgtgrtaggaaataaatttctaaacagcacccaaattcaaaatgccaggagaggctctgagacagagatcccagaagtcttaccagtactcacatctcaagtccttgtgaagttaaaatttttcaggtgaactgaatcaaactaatgcttcatcaaagctaaaactagattagattgactcagctc

SEQ ID NO: 13184 - DNA, 383 bp, Homo sapiens
caatatttctttgtactaacacgagtgcaattgttccttatgacaaagatccaattattctactgaagcaaagggcaaagtggatatgttatcctggagtttgaaatgttgaattccaagcttgtttgtgcacttgggaccagtttggggactatgaaatgactcttgtaaatctaacataatagggaatttgtaaatcaatgtggctgtaamcctaatggcaggctaaggcctgaaacttagctggactccccaggacatgtctttagctacctttggggaggggactattaagaggataagcctggctcattttctagctcttatccatgataagggtggcttctaaagtgggagggctttggtaaaactgcactcctctt

SEQ ID NO: 13185 - DNA, 572 bp, Homo sapiens
tctggtataatttaaacagactttgattaaggcctgtgttttaggctgtaactttcaatagcaagtatcaaacatgctgtaataataataattatttattgtatattccaacaagagctgtatttttattacatcactctacccttcaagtctgtaaatgccttaatttattttcatcttgtgtaattttctttacaactatggcaagctagaatatacttgtacgttataaaccaggtctgtggacatactgcagaagaatcatctgagcaagacaggtttctggattccttccataggagactcgcatttattagatttgatctagaggctgagaatctgtattttagcagaggttgcccagatgagtccagtctgtgatcaggcctgggtaccactgtaatgtgtaattgtgagactgtctttatgactctcaygtacacacctatcagcatctttcttaaactttgcatctctgatttgtagccaacaattcaagatttgaccatagaactcctaaaatgaaaatgaattgctgtagcatcaaatgcttataaaacataattcataat

SEQ ID NO: 13186 - DNA, 1247 bp, Homo sapiens
actgtaggatgccttgggtcttttgcacacatatcctagcaacctgaggcactgaagaaagttacccgaggagccccaagcatcwggatttccaccactggggaattttattttagagagcttgagggctgagttacctaagcagcccttagagctaaccctctctgcttgaggcactgcgagaactagggggcctttaaaaactttccactcagcatggccaatttagcaagtctttaatttttttttttttaattagctgagcattgtggtttgcacctgttgtcccaggtactcggaaggctgaggcaagagggtcctttgaacacaggagtttgaggctgcagtgagttatgatcgcaccacagcactccagtctgagtaacagagcaagaccatgtctctgagaagaaaacaaaaaacttactacctgttcctcctttttctgtacccccaaactctgcaactgtaataaaatcccaaagagaccttaataccaagccatcacttgctttatcactcacttcattaacttgcatgtatttcaatctgagtaaatcaagtgactttgctcagtctctcacaatttctggttatagctactagctataacctctagtatacaaggttctcagttcagtctgtttatgggccatctggcgttcttgcatttcaagatcaaagactcacctataactctgaccaactctagacaactttaagcccaagcagaacaatatcagagagtcttgttcatacttgttgctcaacaagggctgtttttcttcatccactaccatggcctcaccaatctcggggcattcctatgagcagtttggcatttcccttcctccctactctttctaaaccccttaatattgcaaatagatacacacacgtggttgaagttttcttctcttccactctcagcaattaagcagctaaagctggagggatcagagaattggactatcaggataaaacataagagcaaaatccagggtgaggtgctgactcacaagcacaagttagaactgaaaatatttaaacaattattgagggaagctttggttggggtaagcctgtagggtagatttgccaccaaatagtgtagcactagctcttgatggtttggagagaagtgttctatcaataggtcagaacatgtcaggaatggggagaagagaacgtacaggaccagacttctgccacaggccccaaaccctctgttactttctttctttctt

SEQ ID NO: 13187 - DNA, 1247 bp, Homo sapiens
actgtaggatgccttgggtcttttgcacacatatcctagcaacctgaggcactgaagaaagttacccgaggagccccaagcatcaggatttccaccactggggaattttattttagagagcttgagggctgagttacctaagcagcccttagagctaaccctctctgcttgaggcactgcgagaactagggggcctttaaaaactttccactcagcatggccaatttagcaagtctttaatttttttttttttaattagctgagcattgtggtttgcacctgttgtcccaggtactcggaaggctgaggcaagagggtcctttgaacacaggagtttgaggctgcagtgagttatgatcgcaccacagcactccagtctgagtaacagagcaagaccatgtctctgagaagaaaacaaaaaacttactacctgttcctcctttttctgtacccccaaactctgcaactgtaataaaatcccaaagagaccttaataccaagccatcacttgctttatcactcacttcattaacttgcatgtatttcaatctgagtaaatcaagtgactttgctcagtctctcacaatttctggttatagctactagctataacctctagtatacaaggttctcagttcagtctgtttatgggccatctggcgttcttgcatttcaagatcaaagactcacctataactctgaccaactctagacaactttaagcccaagcagaacaatatcagagagtcttgttcatacttgttgctcaacaagggctgtttttcttcatccactaccatggcctcaccaatctcggggcattcctatgagcagtttggcatttcccttcctccctactctttctaaaccccttaatattgcaaatagatacacacacgtggttgaagttttcttctcttccactctcagcaattaagcagctaaagctggagggatcagagaattggactatcaggataaaacataagagcaaaatccagggtgaggtgctgactcacaagcacaagttagaactgaaaatatttaaacaattattgagggaagctttggttggggtaagcctgtagggtagatttgccaccaaatagtgtagcactagctcttgatggtttggagagaagtgttctatcaataggtcagaacatgtcaggaatggggagaagagaacgtacaggaccagacttctgccacaggccccaaaccctctgttactttctttytttctt

SEQ ID NO: 13188 - DNA, 533 bp, Homo sapiens
atggctgctgggctctcagccaattcgcctgctggaatagttggtctgcaaggtgcaggctcacggctgctggggtagatataaacccagaaactgtgaggggacaggtctgaggtatgttccacacagttcctcagtgagttcccagcaggactaggccccagttgtccattgcaataacccacttttactggcatttcttgtctcacttctctcttttctcactgtgcttcctggcgtcaactctcaaataaactgcttgcacctcaatcctgactcagggccagcttttggagaaatccaaactragacaatgcctttcaatgattaagggctttgtctaccttgcagcaggtcctttcactgtggccgattgggattgccatttttatgctcaaaatgagagtactgagacatcaaaacagttggcgtttacctattagtgagtcccaaagatatttctccctcttccccctctcttgaatcccaccatcttcttaattttcccatgcctgactgccccctaaataggt

SEQ ID NO: 13189 - DNA, 586 bp, Homo sapiens
ggttgttccatatcaggctgaaattctagcagctttcattaagtgcagaagacatgtaatgggaattttatcttccattctgaattcatacagaattgattgaaatgcatcagcctcttagtctgtgcctcaatagtccatctaaagtatctcatgggaaatgaccagaaaagaaaattcacagtcttttttaaatcaataactgtctcagtgtccttccactttatccttcaatactcacycatgcccccaccctcaaaaacacacctctttttcaactagtctcctctcagatattgctaaactactgtagatcacctttgtaagacttaactcatgaggttgtacattccccaagccgtcccattattttttctcttggagaattgggtccaggtctccacttctttaaactccatggtgctagcacaatgcttttcatatggcatgttctcaggaatgagcatccaattctttttgtgcaaagactctcaactgagggtaattataacttcctcttctgaggtatatgtaggtgataacagatctttcttctatgaatatttatttcaagcagtttatcatt

SEQ ID NO: 13190 - DNA, 566 bp, Homo sapiens
caagagaaaccatcctctgtctcatttcaaccctgaatttttgggtctctttgttgcagcaacttagtttaaaccttaagtaaccactggaaaaatgggatttgagttgagctctaaagtagaagtagacaggagagaaaaggaaagatgagtacactgaagaacagcgtaataatgatggtagccaacagactgagcatctactagtaacaccactgtatcttatgtacaccgattactcgattgagcctcacaataataagtactattatccttcattctactacagaagacactgaggcccagscagattaagtaacttggctaaggtcacaagttagccattcctagccctatctgcacatttaaacatttcttggggaccttttaagaatgtgcctcaccctccaggcattcttatttgagtggccccaggcagtggttctgctacccccttttttaatgctctcccaacctcaagtgattctaaaaggcagccacagctgggaatcaatagaataaaaggtgaaataacactgaggaaaaggaacggccagagatggaaa

SEQ ID NO: 13191 - DNA, 566 bp, Homo sapiens
caagagaaaccatcctctgtctcatttcaaccctgaatttttgggtctctttgttgcagcaacttagtttaaaccttaagtaaccactggaaaaatgggatttgagttgagctctaaagtagaagtagacaggagagaaaaggaaagatgagtacactgaagaacagcgtaataatgatggtagccaacagactgagcatctactagtaacaccactgtatcttatgtacaccgattactcgattgagcctcacaataataagtactattatccttcattctactacagaagacactgaggcccaggcagattaagtaacttggcyaaggtcacaagttagccattcctagccctatctgcacatttaaacatttcttggggaccttttaagaatgtgcctcaccctccaggcattcttatttgagtggccccaggcagtggttctgctacccccttttttaatgctctcccaacctcaagtgattctaaaaggcagccacagctgggaatcaatagaataaaaggtgaaataacactgaggaaaaggaacggccagagatggaaa

SEQ ID NO: 13192 - DNA, 549 bp, Homo sapiens
gaatccgggaattattttaccagccgtctcaggaaagactctgcagtcagacttcatctcgccaaacccccttccactcaagagtgaccaagaacactttctgagtccaatttaagtgcctaccaaggcccctcaacctgggcccaagcatcagtgctttgtacttgcccaatacaaatttattaagcaacttcaaattatatactgcccctttcctcacataataatttccagaatcataaaaagtgaagggttttagtctaaatttactttgacattgagcttgggatagtgataccaaaacaataatatatccatgttttcactttttattgattttatgatggtttgacaatttaaaaataaaccaatttactttttctgtctcttatatttcatcaaaaaattttcgggtcatcagaacakttttggtggataagatttattatgagttttgacaataaaactggatctttaaaaaaatatgaatcagagggggtcagtgccataacagcactgctcttctatcttgtctgtgtgcctgctttc

SEQ ID NO: 13193 - DNA, 552 bp, Homo sapiens
atcttggctcactgcaaccttcaactcccaggttcaagcaattctcctgcctcagcctcctaagtagctgggattacaggtgtgcaccaccatgtccagctaatttttgtatttttagtagagatggggtttctccatgttggctgggttggtcttgaactcctgacctcaagtgatctgcctgccttagcctcccaaactgctgggattacaggcgtgagccactgcgcccggcctcttttttaaatagtgcattaatttttttatcttgatcactgagttttttggtgcccccttaaattcyacccacaaggcaagtgcctcacttgtctcgtctaagtcccagccagctgtctccagaaacctcacagaactaccttgatctctgcatctgaaaggttgtaatgatgagcctggatgtggatatttttttcactgactgagttggatactcagtggatcttaccatctaggacacatgtcctttaattctgggaaattttcttgtattatttccttgacaatttcattccttcctctctccatttccgg

SEQ ID NO: 13194 - DNA, 573 bp, Homo sapiens
gttggaggggcaaagggtactgaagagtcaccgaagtacaagtgacattcaatcctacagccctttaatcattcccctacatccagtctcaatctggctatgttcacagtcacccaccctttcacacccttraaggtgtgatccttcaagggtccaacagtgtgccagaagtctgtgtgtgtgtgtgtgtgtgtgtgtgtgtgtgttagtggagggcaaaggaatgcccagaagaagaagggtatggcaggagacagcagcagataagtctgcagaggtgagcaaggacacccagtgtatagatgtctttgcttgccatgctgaagagcttttctttgcgttgcagcccaactcaggttgatcatcggagtcatctagaatctcctaggtatcatttttgaaaacacagattctttgggctcctctcagacttaatgaatcagataaaatagtagcttatattattaaaaagtcctattttagtccccagtctgatgaccaggtttgagtatccctgctttaggctatagaagccactgaagtgtaaaatgataggagccacattttatttcc

SEQ ID NO: 13195 - DNA, 553 bp, Homo sapiens
aatcagagagtatattctcctatcactttctgcagggacttcttccacagctatgttcaattcatatattaaaagtaacacctagctaacaataagagaagtggtaagtctattcagggattcaacttcttcctggtttagtcttgggagagtgtatgtgtccaggaacttagccatttcttctagattttctagtttatttgtgtagaggtgtttatagtattctctgatggtagtttgtatttctgtgggatcggtggtgataacccctttatcattttttattgtgtctatttgattcttctctcttttcttctttattagtcttgctagcggtctatcaattttgttgatctttgtaaactagttcagccattgtggaagacagtgtggtgattcctcaaggatctagaactagaaataccatttgacccagccatcccattactgggtatatacccaaaggattataaatcatgctgctataaaggcatatgcacacgtgtgtttattgcggcactattcacaatagcaaakacttggaaccaaccca

SEQ ID NO: 13196 - DNA, 579 bp, Homo sapiens
tgggaactaagyatatgggagggaggtagttggggaaggggaacaagaagttcagattcagatattttaagcatgagtaaccggattgatggtgataacaactagaatagaaaatgtgcaagaggagtcttatggaggaagcttgtggtctcatttttttgacacgttgattctgaggtatttgtgcaaaaaagtctctgggagtcatcaatatatgaaaggtagctgaaatcagaaaaggagagaatcatccatggagattcaaggaaagagaagagtggctacagccagtcaagaaagaggaacctgtggagatgacagagaaataatagagaaccagatgaataaacataaaggaatgttagaaaggaaataaatggtcagtggtgtcaaaagtcagctgaaattgtcactgatttttatttcagccatcctaataggtatgtagtgaaaacgaatcaaggttttaatttgtattaccataacggctaatgatgttgaacatctttcgcgtgcttatttgccatccgtgtatcctctatggtaaaatgtctgttcatatctttctttttgggagga

SEQ ID NO: 13197 - DNA, 579 bp, Homo sapiens
tgggaactaagcatatgggagggaggtagttggggaaggggaacaagaagttcagattcagatattttaagcatgagtaaccggattgatggtgataacaactagaatagaaaatgtgcaagaggagtcttatggaggaagcttgtggtctcatttttttgacacgttgattctgaggtatttgtgcaaaaaagtctctgggagtcatcaatatatgaaaggtagctgaaatcagaaaaggagagaatcatccatggagattcaaggaaagagaagagtggctacagccagtcaagaaagaggaacctgtggagatgacagagaaataatagagaaccagatgaataaacataaaggaatgttagaaaggaaataaatggtcagtggtgtcaaaagtcagctgaaattgtcactgwtttttatttcagccatcctaataggtatgtagtgaaaacgaatcaaggttttaatttgtattaccataacggctaatgatgttgaacatctttcgcgtgcttatttgccatccgtgtatcctctatggtaaaatgtctgttcatatctttctttttgggagga

SEQ ID NO: 13198 - DNA, 517 bp, Homo sapiens
gaaggccacatamatgttaccattagcaatgagctttaaatgaaagagaggatttcaggtggagacatagttttcctgggatctaaaaaaacaaagaccccaagaaacaggaaggcaaggaaaggatcaaagggggaaaaaggaagcaggggtcgttcaatccacccaaaggtgacagtgtcaagtggagataagtctggagaagtggattgaaatatccagctaaaggcctcaaaaacaagctttttaatccaatagacaatggggagtaatcgagaggttttgagcatggaaacatatttaggaagacaaatctaatagtctataatgctagatatactagaagagatggccaaagaaaaaagcatacaagggaaattaaaagagaattcagaaaaaattgtagggtgtcaagtacgacaggaatgacgaaaaacaacaattgaatgagcaaaggagataccatcaggtaggtaagaggagaaacaaaaaaaaaaaaaaaaagaaaaaaaatctg

SEQ ID NO: 13199 - DNA, 517 bp, Homo sapiens
gaaggccacatacatgttaccattagcaatgagctttaaatgaaagagaggatttcaggtggagacatagttttcctgggatctaaaaaaacaaagaccccaagaaacaggaaggcaaggaaaggatcaaagggggaaaaaggaagcaggggtcgttcaatccacccaaaggtgacagtgtcaagtggagataagtctggagaagtggattgaaatatccagctaaaggcctcaaaaacaagctttttaatccaatagacaatggrgagtaatcgagaggttttgagcatggaaacatatttaggaagacaaatctaatagtctataatgctagatatactagaagagatggccaaagaaaaaagcatacaagggaaattaaaagagaattcagaaaaaattgtagggtgtcaagtacgacaggaatgacgaaaaacaacaattgaatgagcaaaggagataccatcaggtaggtaagaggagaaacaaaaaaaaaaaaaaaaagaaaaaaaatctg

SEQ ID NO: 13200 - DNA, 517 bp, Homo sapiens
gaaggccacatacatgttaccattagcaatgagctttaaatgaaagagaggatttcaggtggagacatagttttcctgggatctaaaaaaacaaagaccccaagaaacaggaaggcaaggaaaggatcaaagggggaaaaaggaagcaggggtcgttcaatccacccaaaggtgacagtgtcaagtggagataagtctggagaagtggattgaaatatccagctaaaggcctcaaaaacaagctttttaatccaatagacaatggggagtaatcgagaggttttgagcatggaaacatatttaggaagacaaatctaatagtctataatgctagatatactagaagagatggccaaagaaaaaagcatacaagggaaattaaaagagaattcagaaaaaattgkagggtgtcaagtacgacaggaatgacgaaaaacaacaattgaatgagcaaaggagataccatcaggtaggtaagaggagaaacaaaaaaaaaaaaaaaaagaaaaaaaatctg

SEQ ID NO: 13201 - DNA, 603 bp, Homo sapiens
cctggttgatgagattccagagaggggcaaatgagttcctttcagataagagaactcagagaaggcccttctttgtgttggctgttccctaaattctcttagattgaaataatcagcataccaaagcagtatgttttgaagtggtatgtcctggattccttcagtgatatcattcaaatgctctggccttcaatttcttgattgagaaaatggcacattatgtggtaatcaattatagctatttctcaatatgtgcagagaagtttgtattaattcctcctatgaaatttagtctgttacttgaggttgtaaggtctttaagtcaasgaaacttattttattctcttttgtgtcaaacagaataatatcttttctgtgtttctcaagcacccagatactgtttaaacgttattagactttcaaaactttcttgaaagaatatctgcttaatgcaagagaagtattaattttaaagcttaagaagaaaaaaaaaaaggactgttcaactgtcaaaatctaaatcttacatctttgggaactggagctcagtgaggttataggcacagtgaagctatactccaggtctttagatctctcatccca

SEQ ID NO: 13202 - DNA, 444 bp, Homo sapiens
aactgcttaaagaaacacctgtcatgtgccaggaggtaggctgttctaggaaaacgcaaacaaatggccccatccttgccatagagagccaccccacacaaacacctgtgcgcacatcaccaccctgatgtatctgagatcccagagtgaggtacatgcacagagggctgtctctgtccttgctcttcccatcccaaatgccagagaagccccgagtgtgaggtcagccacagggctgcatgtctgcgcttgtgtcctaggttcaggtttgggctggtgctgcttgtgagcagtcactactgtgtgcctggctgtgtgctgagggcacactctgcattgcctcattttgccttccaccytggacagagggtgtgattgctgctgggttacagataaggaggctgaagctgtgactcacttgggaatgctgggacttcaactccc

SEQ ID NO: 13203 - DNA, 524 bp, Homo sapiens
attgttcttattgtttagggctatttttagcagtgatcagactttttggctcataagtgctctaaacaattttaaactatatgttccccattctttaatatctcaaataatttttcttattatctaataaaagatagaaartgttcaatatttcataagattacataaaaacgactgtagttataacaaatattctacagcatgatttaataaaaataggtttttatgcactactgaataaagcacagtaagtttgaaaaaaaaactatgtaaaatttttatccatagattttgtccaacatatctcaaaaatttgtaagcccctgaagcattttatttaaattttaaaaaatgagttatcagacactctactgctgtggctgttatgaatttgaaaaatccccatagagaccaaaatacttctctctcttagctcaggaccaaacaatattatcagtccatgtggaaattacaaattcagactggagtgtagcggccccattatggctcactgcagcctcgac

SEQ ID NO: 13204 - DNA, 524 bp, Homo sapiens
attgttcttattgtttagggctatttttagcagtgatcagactttttggctcataagtgctctaaacaattttaaactatatgttccccattctttaatatctcaaataatttttcttattatctaataaaagatagaaaatgttcaatatttcataagattacataaaaacgactgtagttataacaaatattctacagcatgatttaataaaaataggtttttatgcactactgaataaagcacagtaagtttgaaaaaaaaactatgtaaaatttttatccatagattttgtccaacatatctcaaaaatttgtaagcccctgaagcattttatttmaattttaaaaaatgagttatcagacactctactgctgtggctgttatgaatttgaaaaatccccatagagaccaaaatacttctctctcttagctcaggaccaaacaatattatcagtccatgtggaaattacaaattcagactggagtgtagcggccccattatggctcactgcagcctcgac

SEQ ID NO: 13205 - DNA, 639 bp, Homo sapiens
ttttatgatatatactagaaatttttcacatgtgtggaatattcctccaattttaaaacctttaaatgtatctttttacattctattcaagtcaattcattagagtgcaaggagtttgcatggcattgttagagaaataacactaaatttatttttaaattaactagaaaataaaatttaaatattatttgtaagaaactgagacacatttcacaactgactgcaacactctggtatattaaaacattgtcaataaccattgagcaccaagaaacattcttaaacgtttttattttaagcagagggactagcttagattttatccaccctgaattagtgaatagatccaggaggaagaygtacaaaacacttcaataagccctgagaaatagttcctctgtttatatgcatctagtgagaggatttaaggatttctactgccatctaagcttgagagctgctgagataagatcttttcttctctttctagcaaactttattctctagaaactatccaacttgttacatgcatcatagttggttgcaccaaatatggttgtgtttcagagagacagatctagtctcttaagtttcataaggaagacaaggcatgcagtaagtttagaaaccagaatagag

SEQ ID NO: 13206 - DNA, 673 bp, Homo sapiens
gacttagatattgaatgtgaagtttgaacccaatcaagttaagtacctggtaaaacaaaaatatcaacagtcttcattggacaatagtacaaagactttcaacaatataacattcatatgatccatgatacaattaaatattaattgatatttgaaaagatgcagaaaaagatgcagaaatatgttaatcattctcaatttttaaaaaagtcagtgaaggctgacttctagatagccctgattttgaaattaataaataacaacattaaagcagctattttaactaagatagatgagataaaggaaaatacacataataaataaaacgataggcaacctaagtaaygaaatagaggatgtaaaaagaataaaatgaaaattctagacctgaaaattatagtagctgaaataaaaaattactggataaaagtgacttttaatcacggtaaagagaacgttttgtttctggtggatttaagactatataagaaataaaagtttgcaacactacttaagcactcagataaaataagctatgcagttatcaaagaagtcttcaaaaagctttttgatatgtaggtatgtatatgtatgtatatatttattatatataatatataatgtgttatatttatatagtatattacatgtcatagggtattatatacttcaa

SEQ ID NO: 13207 - DNA, 673 bp, Homo sapiens
gacttagatattgaatgtgaagtttgaacccaatcaagttaagtacctggtaaaacaaaaatatcaacagtcttcattggacaatagtacaaagactttcaacaatataacattcatatgatccatgatacaattaaatattaattgatatttgaaaagatgcagaaaaagatgcagaaatatgttaatcattctcaatttttaaaaaagtcagtgaaggctgacttctagatagccctgattttgaaattaataaataacaacattaaagcagctattttaactaagatagatgagataaaggaaaatacacataataaataaaacgataggcaacctaagtaatgaaatagaggatgtaaaaagaataaaatgaaaattctagacctgaaaattatartagctgaaataaaaaattactggataaaagtgacttttaatcacggtaaagagaacgttttgtttctggtggatttaagactatataagaaataaaagtttgcaacactacttaagcactcagataaaataagctatgcagttatcaaagaagtcttcaaaaagctttttgatatgtaggtatgtatatgtatgtatatatttattatatataatatataatgtgttatatttatatagtatattacatgtcatagggtattatatacttcaa

SEQ ID NO: 13208 - DNA, 673 bp, Homo sapiens
gacttagatattgaatgtgaagtttgaacccaatcaagttaagtacctggtaaaacaaaaatatcaacagtcttcattggacaatagtacaaagactttcaacaatataacattcatatgatccatgatacaattaaatattaattgatatttgaaaagatgcagaaaaagatgcagaaatatgttaatcattctcaatttttaaaaaagtcagtgaaggctgacttctagatagccctgattttgaaattaataaataacaacattaaagcagctattttaactaagatagatgagataaaggaaaatacacataataaataaaacgataggcaacctaagtaatgaaatagaggatgtaaaaagaataaaatgaaaattctagacctgaaaattatagtagctgaaataaaaaattactggataaaagtgacttttaatcacrgtaaagagaacgttttgtttctggtggatttaagactatataagaaataaaagtttgcaacactacttaagcactcagataaaataagctatgcagttatcaaagaagtcttcaaaaagctttttgatatgtaggtatgtatatgtatgtatatatttattatatataatatataatgtgttatatttatatagtatattacatgtcatagggtattatatacttcaa

SEQ ID NO: 13209 - DNA, 596 bp, Homo sapiens
gagacagggtttcaccatgttgcccaggctggtctcaaactcctgagccacaagccatctgcctacctcagcctcccaaactgctgggattacaggtatgagccactgtgcttgaccgagaaacaacttccttatcagttaggaagagctgaatcctcttcayggtctattaactgatcattagggtaagaaacacaggttgagattgcacggaagggtcactacacttagaaagacagctttacatttatcagagcctaaaagcaattcatttggcttctcgtattactggaagtcagctaaattccccaagtaatgttatccccaaaagagatacttaaatattccagaacgaaagaaaacaaaacaaataaaacctcctaaggaaatagtacctgatgactgtattctaaatcctgtgctctcaaagtagtgtttgagagcaggcaaactccctaactatacaaagaagttgttgggaagtgagtgaaaaaggtagattagactgctccttgatgtggcactatgatgcttatgatgttcatcacacaggaagtaaaatatttctgagttccatgttagatcacttcacttcc

SEQ ID NO: 13210 - DNA, 469 bp, Homo sapiens
tacaaggcattttaaaggaatcattccattagacatagagagcaaatcttgccctgaaaatattaccttgcatttaactttggaatttgtaaccctctgacaagagttctttgtttgcctagtttagctgtaggtggttgctgtatacatttctatacttaacatgtgttatcaacttagtttgacagcttaaatctarcataatgatgtggaaatataaacaaacgttaaatgcacttttgcattccaatatttttccccttaaatcttacccttaaaaccagtcgtttgcaagaaatacagaatctgagaggagtttttttaaaaaaaaatctatatgatgtcattctatatatctagtagtccaatttgacacactatttagattaccctaagcttaaaccaacttagatatgggttttgacctttagtgacctcgttggctttccaaaggattgtttcaataaac

SEQ ID NO: 13211 - DNA, 695 bp, Homo sapiens
tgccaatcacgaaggctctgctctcatgatctcatcacccccgtaaagtcccagttgctaataccatcatcctgggggtcagattttcaacacatgaatttgcaggagagacataaacattcagaccatagcaccaccctagactgtaagttctcagagaagacagaccatgtctgatttgttgstcctagaacacttgtgcctagcatagttgaatgaaagaacccatgagatatggatttggatttaatatgaagatttatgtatttttttaatagtgttgtgcaaattcatgggctgcctcaagagggagcagttttcctttcacgggtggcctgcattcagtcttaaaacggcagtgagagtgagcggattaaaggtgactaggctaaatgaattttaccctctttgccaactgaagaactatgatttgaattcttctgggaaacatcagctcaattctgatccattttggaaaagtttaataataaatttttcataattgctcctgttcaaacccaaatttcatttgtttctccccactttttatttatccttctctccctactccccaaagctgatgattaatatttctattttattgtaaggatgtataaagcttcagaaaacatagtagcagacagtgaggtgaagtcagacttagagacaaggaaaatatttctgagattgttagc

SEQ ID NO: 13212 - DNA, 695 bp, Homo sapiens
tgccaatcacgaaggctctgctctcatgatctcatcacccccgtaaagtcccagttgctaataccatcatcctgggggtcagattttcaacacatgaatttgcaggagagacataaacattcagaccatagcaccaccctagactgtaagttctcagagaagacagaccatgtctgatttgttggtcctagaacacttgtgcctagcatagttgaatgaaagaacccatgagatatggatttggatttaatatgaagatktatgtatttttttaatagtgttgtgcaaattcatgggctgcctcaagagggagcagttttcctttcacgggtggcctgcattcagtcttaaaacggcagtgagagtgagcggattaaaggtgactaggctaaatgaattttaccctctttgccaactgaagaactatgatttgaattcttctgggaaacatcagctcaattctgatccattttggaaaagtttaataataaatttttcataattgctcctgttcaaacccaaatttcatttgtttctccccactttttatttatccttctctccctactccccaaagctgatgattaatatttctattttattgtaaggatgtataaagcttcagaaaacatagtagcagacagtgaggtgaagtcagacttagagacaaggaaaatatttctgagattgttagc

SEQ ID NO: 13213 - DNA, 569 bp, Homo sapiens
tcttccttctttttttttttttttttttttgagacggagtctcgctctgtcacccaggctggagtgcagtagtgcaatctggcctcccgagttcatgccattctcctgctcagcctcccgagtaactgggactacaggcgcccaccaccacgcccaggtaattttttgtatttttagtagagacggggtttcaccgtgttagccaggatggtctcaatctcctgacctcgtgatccgcccacctcggcctcccaaagtgctgggattgcaggcttgagccaccgcacccggccgggaacactcttaagctcacgtttccgtagttgaacttcaggagtcccctgacacacagaactgtttggaaatgacgaattcttattggcctgagcctgagtggggttcataaattccttgcatgagaatcatatgggggataatgaaacatgcagattcctagacctcccaccaaaaaaaaaaaaaaaamaaaaaaaaaaaacagcatcaaagctccttgggatatagtccaagagtctgcattttaaaatgctccccagataagtcttatatat

SEQ ID NO: 13214 - DNA, 569 bp, Homo sapiens
tcttccttctttttttttttttttttttttgagacggagtctcgctctgtcacccaggctggagtgcagtagtgcaatctggcctcccgagttcatgccattctcctgctcagcctcccgagtaactgggactacaggcgcccaccaccacgcccaggtaattttttgtatttttagtagagacggggtttcaccgtgttagccaggatggtctcaatctcctgacctcgtgatccgcccacctcggcctcccaaagtgctgggattgcaggcttgagccaccgcacccggccgggaacactcttaagctcacgtttccgtagttgaacttcaggagtcccctgacacacagaactgtttggaaatgacgaattcttattggcctgagcctgagtggggttcataaattccttgcatgagaatcatatgggggataatgaaacatgcagattcctagacctcccaccaaaaaaaaaaaaaaaacmaaaaaaaaaaacagcatcaaagctccttgggatatagtccaagagtctgcattttaaaatgctccccagataagtcttatatat

SEQ ID NO: 13215 - DNA, 547 bp, Homo sapiens
aagaatctatttggcaatggcagaatccccctttgaaactgaggaaggagaagaaattaagagctcgcaaagccagaacccattytacccattctagtgaggctcaggaaaggagagtttggaagcatgcatataaaatataaaataattttaaccccaacatgtttattgatgtatacatcatgttctggagtggattccagggaaaagtttaatggggggctaggggaggaggtgtcaggatatgaaagtataacagcttctcaggcccttaagggagtttggctccattatatattgtgaatcgtttcataagggggagaggaaagaaataaaaactatatggagacttcaaatttaaggtttcttctggttcctaaaacctatggaaggtcaacatcactaatcttcagagaaatgcaaatcaaaaccacagtgagatatcatctcataccagtcagaatgcctattattaaaaagttaaaaaacagtagaggctggtgaggctgcagagaagaaggaacatttatatactgttggtgggaat

SEQ ID NO: 13216 - DNA, 434 bp, Homo sapiens
agagtccaaattatcaggaggccttttattctgaataattcattctatcctaaaaaatttaataaaactgaaagaggtctacgaaaaagtaaagcaaaagtagacaccaaaactaaatgcagtgaatcaggtaaaggtcaggtcatggaaactactttgtcttttaattttgtttaatttttaaaattttttgtagagacagagtccccctgtgttgcctaggctggtcttgaactcctgggcaacatgggagggatcttcccaccytggcctcccaaagtgttgggattacaagtgtgcgccatcacacccagctgtaaactatttttgaataaaacaaacagaagccagaatcactaaacatccatcatctcagcagagagcctaaggtcgccaccagcattatcttctcaatctcacctgtaatggaggtg

SEQ ID NO: 13217 - DNA, 620 bp, Homo sapiens
tccttctcttaccaactgctgtctctactgcccacctcctactgactcttcacctctctgctttctggcttcctgtgctgggcccctctgaaaccatctgtatacttaaccatagggttcttgcagctaaacccagtggaaatgtttaacacgcagaagcatttgccacttttgtgccctcctccctgacacactcttcccctggcttctaaaactggacctcctcttggttttctcctgctcccagcccactctttcccagtctyctggtcaggttctatttggcacttcagtgcaggttatccatccaaagctctcacctctttcctctctggacactcccctgggaaactgcagccatgccccaggctcccatctcactgacatgcggccgccttctgattccattgcccctaagtcgaatactgatggcacaccttcccgtgggtgcctcagagacgcttcaagcttgacaggtcccagattgactcatcctcttcccacccaagcatactcctcctcctgtgtcctctgactccaaggatggcaccatcatccacccacttgctcaagtcagaaactttcaatagtgaaacattgagtcaggtagtgaactaggt

SEQ ID NO: 13218 - DNA, 620 bp, Homo sapiens
tccttctcttaccaactgctgtctctactgcccacctcctactgactcttcacctctctgctttctggcttcctgtgctgggcccctctgaaaccatctgtatacttaaccatagggttcttgcagctaaacccagtggaaatgtttaacacgcagaagcatttgccacttttgtgccctcctccctgacacactcttcccctggcttctaaaactggacctcctcttggttttctcctgctcccagcccactctttcccagtctcctggtcaggttctatttggyacttcagtgcaggttatccatccaaagctctcacctctttcctctctggacactcccctgggaaactgcagccatgccccaggctcccatctcactgacatgcggccgccttctgattccattgcccctaagtcgaatactgatggcacaccttcccgtgggtgcctcagagacgcttcaagcttgacaggtcccagattgactcatcctcttcccacccaagcatactcctcctcctgtgtcctctgactccaaggatggcaccatcatccacccacttgctcaagtcagaaactttcaatagtgaaacattgagtcaggtagtgaactaggt

SEQ ID NO: 13219 - DNA, 620 bp, Homo sapiens
tccttctcttaccaactgctgtctctactgcccacctcctactgactcttcacctctctgctttctggcttcctgtgctgggcccctctgaaaccatctgtatacttaaccatagggttcttgcagctaaacccagtggaaatgtttaacacgcagaagcatttgccacttttgtgccctcctccctgacacactcttcccctggcttctaaaactggacctcctcttggttttctcctgctcccagcccactctttcccagtctcctggtcaggttctatttggcacttcagtgcaggttatccatccaaagctctcacctctttcctctctggacactcccctgggaaactgcagccatgccccaggctcccatctcactgacatgsggccgccttctgattccattgcccctaagtcgaatactgatggcacaccttcccgtgggtgcctcagagacgcttcaagcttgacaggtcccagattgactcatcctcttcccacccaagcatactcctcctcctgtgtcctctgactccaaggatggcaccatcatccacccacttgctcaagtcagaaactttcaatagtgaaacattgagtcaggtagtgaactaggt

SEQ ID NO: 13220 - DNA, 544 bp, Homo sapiens
tttccaaggagaaggcagagccccagagttcaaggccacaaagtctccacctactgggaggctgggtgcaagagatttatctgagctgctgtttctattaggatggttgtttttcttagggcttttgatacaaactcctgcaggtgttgaaggacaagccctaacctttttttttaaccccataagcactgctatttggagtgcagttttgcatataaggttgtttatggaagaatatgtggcatcacagaagaaatgtttgggccatgatgggtgttacagatgcatagaggaggagatggggtgacrtctggagaaagtgaaccctaagctgagatgcaacaccagagaagctcgctagataaaaaggagagcaagaatgtttcaaaccaaacaagacaaactgtcctgcgacaaaattagatttatctttgatgatattagaaagttagcaagcaggccaaaggtttcctgtcatctcagtgtggtttgatcacctttcaacttcctggtgaattgaccctgcccagtgctgcctttattg

SEQ ID NO: 13221 - DNA, 520 bp, Homo sapiens
aatatagcttttttttttctttctattccagagtttgtggtagttacagaaaaatagcaatgagtgtttctttaaatagaagagctatacttgtgggctttcaatgytaacgttcagtgaccactaatatcatttcttaccaggcaaaactgtgttttattcattacagagtggagcacatcttgagactcttatagaggactgcatgaaatgtaggggcaaactgacacttgtctgagctctgcaggatagaaatttacatgcatactttgaacaattctattttttctattcaattcctttaacaaattatgggatttctcctagctttgtcatttgggacttcaagctgcttagtagccacagggagtgttaccagagattacctggtgctcagaatgattgaaaggagaggcctgcattctggtacacatgcacaaagcacaatcttaactcttgaaatatagtggaagtcataatacagctcttctatagtggcactcccattacaccttgggat

SEQ ID NO: 13222 - DNA, 520 bp, Homo sapiens
aatatagcttttttttttctttctattccagagtttgtggtagttacagaaaaatagcaatgagtgtttctttaaatagaagagctatacttgtgggctttcaatgctaacgttcagtgaccactaatatcatttcttaccaggcaaaactgtgttttattcattacagagtggagcacatcttgagactcttatagaggactgcatgaaatgtaggggcaaactgacacttgtctgagctctgcaggatagaaatttacatgcatactttgaacaattctattttttctattcaattcctttaacaaattatgggatttctcctagctttgtcatttkggacttcaagctgcttagtagccacagggagtgttaccagagattacctggtgctcagaatgattgaaaggagaggcctgcattctggtacacatgcacaaagcacaatcttaactcttgaaatatagtggaagtcataatacagctcttctatagtggcactcccattacaccttgggat

SEQ ID NO: 13223 - DNA, 658 bp, Homo sapiens
ttttatggtcatattttattttcataagacatgtgacttgaaagctccctgccaaaataatgagcttatatatttgaaagcatggaacaaaacacaaagcttacattgttttctctcagtcttcacatttgttttatacattctgctaaaattatttcatttattttggcggagagagagaaattatttatttgttcatgttactaatttacagagggtaatttattaatgataatatgtaaaccatatgtgtagattgccactcaaattgccaagttatctccatatagctagtagcattaaygaattaaatattccaagttcttacattttcagtatcatatcaatatgaatttaagttacatttcagagctaattgctggtatataaacacaacattactacgcttcttgatacaatatcttgttatatttcaaattagttaatctctcagtactgcatataattgttgcactggtaaccatgctataaagaagtagaggagaatttcaagcatttgctgatgcatcatgatattttcaataagcattcattgaacgcctccaatatctcaggcactgtttggttagacttgggctatacagtttaaagcaagagagaaccagtcctcattcccatggaacatacatgctcttgg

SEQ ID NO: 13224 - DNA, 658 bp, Homo sapiens
ttttatggtcatattttattttcataagacatgtgacttgaaagctccctgccaaaataatgagcttatatatttgaaagcatggaacaaaacacaaagcttacattgttttctctcagtcttcacatttgttttatacattctgctaaaattatttcatttattttggcggagagagagaaattatttatttgttcatgttactaatttacagagggtaatttattaatgataatatgtaaaccatatgtgtagattgccactcaaattgccaagttatctccatatagctagtagcattaatgaattaaatattccaagttcttacattttcagtatcatatcaatatgaatttaagttacatttcagagctaattgctggtatataaacacaacattactaygcttcttgatacaatatcttgttatatttcaaattagttaatctctcagtactgcatataattgttgcactggtaaccatgctataaagaagtagaggagaatttcaagcatttgctgatgcatcatgatattttcaataagcattcattgaacgcctccaatatctcaggcactgtttggttagacttgggctatacagtttaaagcaagagagaaccagtcctcattcccatggaacatacatgctcttgg

SEQ ID NO: 13225 - DNA, 602 bp, Homo sapiens
aactttagatagatgtaatatctcaaatagrctttgagaaagaacgttacattttgatgaactgcaaaatcttacaaatacatgaacaatgtaagttaattaaagtttcaaataattttttctttacatcgaagctttcattagaaagacagaaaacaagataattctaatttgtcactgcttaccatgagtcatgagtaactgtccttatatggcccagtttttaatgttagtaatacttaaaagcaaagaaaaattgataaaaataaaaatttataatttagaagaaagttttaccaaagacagtcagctctgctgggtcactgtccctttctcccaccatattggtaccaacacaagtatacatccctgcatcacttttcctggtattggagatcatcagttttccaccacggatctgttaaaatcaaacaaaaagaaaagagaagggaagaaaaaggaacagaatagaaaataaaggtcattaataaatagttttgagtatttgagcatatttgtttcccaaaggaaaaaactctcccattattttggcatttgcaggtatgttttcttttcttaaattcaccctcaatgtaagtttc

SEQ ID NO: 13226 - DNA, 1577 bp, Homo sapiens
tgccactacaacatctgtggggttttgtcggaagtcatctcgtaacactgaggaaaaataattacaggaaaagaaaactcaacgacagtaacttaggctttttgttgtacaaggtaacttcaagtcttgtttaccttgttctagtaaaaattgccyggatttttactgagaacatagctacatccaccttaaaatattctggagccaacataaatgatcatcaacaggagaatggctgactaaattatcatgcacctttggtcaaaaattcaactttaaaaatgaaatcagtcaaaaaaatgagaaatattcatgtacagttctgcgattaattaaaaaagcaaggtgcagaacccttcattagtataattctattttctatatagaaactcatatatgtgtgtgtgtgtgtgtgcacgcatatatatatgcatgtggtttgtgagcctgcaagcctaatgatctgtgagggaaagtggggtgagaattctttgacaaagtcctttctcatgacacaaacatagacaagatccacactgttttcattacacttcagaagacagattcatagttcacccttgcagcacactagcacccacatacgcagggctacattttcattctgcaactccacctgccgagtgacatctgggcagtgtgacattcagggcagagatatcccttatagcagttttgcctgtctgaaatttccctcctttcattaaggagaacagcaggttggaccttcgctgtaaccaccgaaaatctggcatgcctgcctctccaaatgtcacctatctatctacttgtgcttctctgctcctgacaagatgaaaagcctggagagatggctcagccctatcggactgcatttaggtggtaaatcagagctacattaattttagggtaaacattcaaaaaagtagttgagatcagcaaatgtaccatatactgcaactgcctctgcttttcctgactggctttactatttctgttcttggacattccaacaccgacatgtttggttccaaagtaccttgaggtaaaatgaacctacacacacacacacacacacacacacacacacacacatacccacagacacatgcacacatcaagctgtttgaaatcaacattaggcagcttgtggtagcctgttatgtaaatcatgtgccgcgactggggattaggtcaaaccaactgccttccgtgtcctataatgagacccacttcagcactctgcttctttgttgtgccaagtctgtaggttaattgtcattccccaaataaataaaaaaccctgtccttaaaagagctccagagagtcaactcagtgacttcagggtttttcttttctcgtattttgcaacacaccctttaacatggttttccatcttaatgaagtcatggccctttatgagattagagcaccttgtctcttattgaaggagcagtaagaaataattcagcacaaattgctcactctcagtttataagctgattaatttactgatttcactgctaaagaaatgtgttccattttagctctgtgaactgcatatttttggcccccttgt

SEQ ID NO: 13227 - DNA, 623 bp, Homo sapiens
cttccctctctgttcttggggcaagtggaggggagaaacaaaggaatgtcagagagacattgawgttaaggaagtttctaatgacttacaatttcctttagttcaaagtgctcagaaagccaaagcaccacattttgggatatcgttttctgagccccaacaccagtctcactattaacactgtgagatctacattaccaaagagagttttgttctcagtggtcttgcttgggtaccaaatttatgaaaatgtactcctgatgatggagtaaaatcattgtttatggattggtagtttatgtttatagcatttagctcttgcctatttaaaggtgtgctggcagctgaataatccaggatgaccttacccacaagtctggcaattggttgactctcagctgggtatcttcgttcccctccttatgatctctaattttccagcaggctagttcagtcggttcccatgttggtctcagttccaactcagcaagagaaggcaagacacaatgtacaagaacctttcttccagtgaagtatttgctgtagttccattggtcaaatcaagtcatattacctagctctcagcttcaaggggaaggagaaatggccttcacagccatttt

SEQ ID NO: 13228 - DNA, 596 bp, Homo sapiens
ttgatgcaaggagatartaatggaagctcagcatgactttaaaatcaagcaaatagatattaaacctggaaaaaagtaagaagattatttccagacaactaaatattgtatcacaattcttcctcccaggaagcagttatatattagactctcatttgaactcatgagaagtaataggacatcattttgtgttcttagtttttcagaacaaggcaggcggtctattcatataatttctgcaacttaggagaatggatgacacctgtgacattcagacaatcagaattgggctctcattagggcatgctgtttgctgctgcccatggtttacttgatgactgagtaaatgattcactggcatcctgttggtaatttctgatcaacatgcagtcctgactatttcagtacataccagtagaatgcattaacctcgaaaacaattcctttttttcattagctctcagacaggaactacttaatttacacaaaagataaggtactggaagactttaattattattctttttaatcactgctgtggcctttatcacttttcccggatagaatttactttttgtagtgtttgtttttaaaat

SEQ ID NO: 13229 - DNA, 1362 bp, Homo sapiens
tttttcaaaaaaattttcatgtgtttttgcaagaaacttttattgaatacttcctttttaatgaatagtgaagcccagaatagatcatttctctatttaaaaaaaaaacaggaattataaactttgtgagtgaattattattgtgactatgttatttaaatcatcattatgtataaagctattatacattaggtaaagactagctagatatttcaagaaaatccaattcagggataccataataatctcactatacttctgagctatgtcttacatctcatagttgatggtgcaataatattgtgaaatccagagacaattactaataaatagtaaaacttaacttmtatagactttagaaaatagttactactgaaagaactacatgttcaagattttatctaagattagaattataaatgccagtgctatctttcttaaaattattttcttatttatatgtgtattcaattattcaagtttatttattcaatgaacttattcaattattaaaaagttcaattattcaaaagttatcttttgagtgccttgtatttattagacattatcctgggtgctaacaatatcaaagtgagcaagatgtacaagttcctgttttcacagctataaattttaattgtaggaggaaatagataaatagatatataagtgagacagggagaaagaaagaaagggagaaaagatctcaaatttggcgatgttgtgcagagatttaaaactaagctgttatagagagcaggcagttcaaatcttatgaataggaaccagcatgcaaaataagtaggaagaacattacaggtagcaattacatgaagttcaaagacaataatttaaggaaaagatttctatttgaaaaacagaatatattcagaggggcagaagaattgtggccaatgtgaaaaatgatgttaaaggttttatttgttttcttttgttttgtttttaaaataacaaggaggagacattatttacagccttttctagccagaataagttagatttttggggaaaccactggaagaatttaatctaggagggcaaaataacagagttgttttatcagtaagaaatctgttacagtatgacatgtgaaagagaacagaagtttgactagctagtactagggaatttgatgacccatggataaattaagtatacatttctaagctaaaatctattgcaaaaatttctgaaatttttctttagagaaagttggtagatatgcacatttgtaggcagtatctcatagtgataaaaagcaaaacaccatctttagggttagcatgtgtattagtccattttcacattgctaataagacatacccaagactgggcaattta

SEQ ID NO: 13230 - DNA, 1362 bp, Homo sapiens
tttttcaaaaaaattttcatgtgtttttgcaagaaacttttattgaatacttcctttttaatgaatagtgaagcccagaatagatcatttctctatttaaaaaaaaaacaggaattataaactttgtgagtgaattattattgtgactatgttatttaaatcatcattatgtataaagctattatacattaggtaaagactagctagatatttcaagaaaatccaattcagggataccataataatctcactatacttctgagctatgtcttacatctcatagttgatggtgcaataatattgtgaaatccagagacaattactaataaatagtaaaacttaacttatrtagactttagaaaatagttactactgaaagaactacatgttcaagattttatctaagattagaattataaatgccagtgctatctttcttaaaattattttcttatttatatgtgtattcaattattcaagtttatttattcaatgaacttattcaattattaaaaagttcaattattcaaaagttatcttttgagtgccttgtatttattagacattatcctgggtgctaacaatatcaaagtgagcaagatgtacaagttcctgttttcacagctataaattttaattgtaggaggaaatagataaatagatatataagtgagacagggagaaagaaagaaagggagaaaagatctcaaatttggcgatgttgtgcagagatttaaaactaagctgttatagagagcaggcagttcaaatcttatgaataggaaccagcatgcaaaataagtaggaagaacattacaggtagcaattacatgaagttcaaagacaataatttaaggaaaagatttctatttgaaaaacagaatatattcagaggggcagaagaattgtggccaatgtgaaaaatgatgttaaaggttttatttgttttcttttgttttgtttttaaaataacaaggaggagacattatttacagccttttctagccagaataagttagatttttggggaaaccactggaagaatttaatctaggagggcaaaataacagagttgttttatcagtaagaaatctgttacagtatgacatgtgaaagagaacagaagtttgactagctagtactagggaatttgatgacccatggataaattaagtatacatttctaagctaaaatctattgcaaaaatttctgaaatttttctttagagaaagttggtagatatgcacatttgtaggcagtatctcatagtgataaaaagcaaaacaccatctttagggttagcatgtgtattagtccattttcacattgctaataagacatacccaagactgggcaattta

SEQ ID NO: 13231 - DNA, 1362 bp, Homo sapiens
tttttcaaaaaaattttcatgtgtttttgcaagaaacttttattgaatacttcctttttaatgaatagtgaagcccagaatagatcatttctctatttaaaaaaaaaacaggaattataaactttgtgagtgaattattattgtgactatgttatttaaatcatcattatgtataaagctattatacattaggtaaagactagctagatatttcaagaaaatccaattcagggataccataataatctcactatacttctgagctatgtcttacatctcatagttgatggtgcaataatattgtgaaatccagagacaattactaataaatagtaaaacttaacttatatagactttagaaaatagttactactgaaagaactayatgttcaagattttatctaagattagaattataaatgccagtgctatctttcttaaaattattttcttatttatatgtgtattcaattattcaagtttatttattcaatgaacttattcaattattaaaaagttcaattattcaaaagttatcttttgagtgccttgtatttattagacattatcctgggtgctaacaatatcaaagtgagcaagatgtacaagttcctgttttcacagctataaattttaattgtaggaggaaatagataaatagatatataagtgagacagggagaaagaaagaaagggagaaaagatctcaaatttggcgatgttgtgcagagatttaaaactaagctgttatagagagcaggcagttcaaatcttatgaataggaaccagcatgcaaaataagtaggaagaacattacaggtagcaattacatgaagttcaaagacaataatttaaggaaaagatttctatttgaaaaacagaatatattcagaggggcagaagaattgtggccaatgtgaaaaatgatgttaaaggttttatttgttttcttttgttttgtttttaaaataacaaggaggagacattatttacagccttttctagccagaataagttagatttttggggaaaccactggaagaatttaatctaggagggcaaaataacagagttgttttatcagtaagaaatctgttacagtatgacatgtgaaagagaacagaagtttgactagctagtactagggaatttgatgacccatggataaattaagtatacatttctaagctaaaatctattgcaaaaatttctgaaatttttctttagagaaagttggtagatatgcacatttgtaggcagtatctcatagtgataaaaagcaaaacaccatctttagggttagcatgtgtattagtccattttcacattgctaataagacatacccaagactgggcaattta

SEQ ID NO: 13232 - DNA, 1362 bp, Homo sapiens
tttttcaaaaaaattttcatgtgtttttgcaagaaacttttattgaatacttcctttttaatgaatagtgaagcccagaatagatcatttctctatttaaaaaaaaaacaggaattataaactttgtgagtgaattattattgtgactatgttatttaaatcatcattatgtataaagctattatacattaggtaaagactagctagatatttcaagaaaatccaattcagggataccataataatctcactatacttctgagctatgtcttacatctcatagttgatggtgcaataatattgtgaaatccagagacaattactaataaatagtaaaacttaacttatatagactttagaaaatagttactactgaaagaactacatgttcaagattttatctaagattagaattataaatgccagtgctatctttcttaaaattattttcttatttatatrtgtattcaattattcaagtttatttattcaatgaacttattcaattattaaaaagttcaattattcaaaagttatcttttgagtgccttgtatttattagacattatcctgggtgctaacaatatcaaagtgagcaagatgtacaagttcctgttttcacagctataaattttaattgtaggaggaaatagataaatagatatataagtgagacagggagaaagaaagaaagggagaaaagatctcaaatttggcgatgttgtgcagagatttaaaactaagctgttatagagagcaggcagttcaaatcttatgaataggaaccagcatgcaaaataagtaggaagaacattacaggtagcaattacatgaagttcaaagacaataatttaaggaaaagatttctatttgaaaaacagaatatattcagaggggcagaagaattgtggccaatgtgaaaaatgatgttaaaggttttatttgttttcttttgttttgtttttaaaataacaaggaggagacattatttacagccttttctagccagaataagttagatttttggggaaaccactggaagaatttaatctaggagggcaaaataacagagttgttttatcagtaagaaatctgttacagtatgacatgtgaaagagaacagaagtttgactagctagtactagggaatttgatgacccatggataaattaagtatacatttctaagctaaaatctattgcaaaaatttctgaaatttttctttagagaaagttggtagatatgcacatttgtaggcagtatctcatagtgataaaaagcaaaacaccatctttagggttagcatgtgtattagtccattttcacattgctaataagacatacccaagactgggcaattta

SEQ ID NO: 13233 - DNA, 1362 bp, Homo sapiens
tttttcaaaaaaattttcatgtgtttttgcaagaaacttttattgaatacttcctttttaatgaatagtgaagcccagaatagatcatttctctatttaaaaaaaaaacaggaattataaactttgtgagtgaattattattgtgactatgttatttaaatcatcattatgtataaagctattatacattaggtaaagactagctagatatttcaagaaaatccaattcagggataccataataatctcactatacttctgagctatgtcttacatctcatagttgatggtgcaataatattgtgaaatccagagacaattactaataaatagtaaaacttaacttatatagactttagaaaatagttactactgaaagaactacatgttcaagattttatctaagattagaattataaatgccagtgctatctttcttaaaattattttcttatttatatgtgtattcaattattcaagtttatttattcaatgaacttattcaattattaaaaagttcaattattcaaaagttatcttttgagtgccttgtatttattagacattatcctgggtgctaacaatatcaaagtgagcaagatgtacaagttcctgttttcacagctataaattttaattgtaggaggaaatagataaatagatatataagtgagacagggagaaagaaagaaagggagaaaagatctcaaatttggcgatgttgtgcagagatttaaaactaagctgttatagagagcaggcagttcaaatcttatgaataggaaccagcatgcaaaataagtaggaagaacattacaggtagcaattacatgaagttcaaagacaataatttaaggaaaagatttctatttgaaaaacagaatatattcagaggggcagaagaattgtggccaatgtgaaaaatgatgttaaaggttttatttgttttcttttgktttgtttttaaaataacaaggaggagacattatttacagccttttctagccagaataagttagatttttggggaaaccactggaagaatttaatctaggagggcaaaataacagagttgttttatcagtaagaaatctgttacagtatgacatgtgaaagagaacagaagtttgactagctagtactagggaatttgatgacccatggataaattaagtatacatttctaagctaaaatctattgcaaaaatttctgaaatttttctttagagaaagttggtagatatgcacatttgtaggcagtatctcatagtgataaaaagcaaaacaccatctttagggttagcatgtgtattagtccattttcacattgctaataagacatacccaagactgggcaattta

SEQ ID NO: 13234 - DNA, 1039 bp, Homo sapiens
  misc_feature (1)...(1039): n = A,T,C or G
tgcataaccacctcctggattaagaagttaaatgttacgagcaccctagggccacttctgtgcccctcatcacaacacccttcctcactatcctgaacaccatagatttattttgcctatttttgatgcttctaaaactggaatcatatagtatgtactccttcgggtatggctgcttttcagttcactgtatgtgtttgagatttacttaggatgttgagtgtaactgttccttttcattgctgtacaatattcactgtatgcttatgctataatattttttatccattctggtgttgatggacatgagttgctgaacatatgcatgtatatatctcttggttaggtagctaagagtgtaattgttggatcataaattatatttacttatgtctagtagatattgccacactgtatttcagagtggttctgygtgttcataagtttggattaatgggagttggttcctaaatttgtatacaaaaacatttatacacacacaaagcacactatatatgcatgtataaatgtgtatatattaatagataccatcatacctacatacagttcatcctcttatgaaacctttttttctgggatgggtaaatgtttgatccttaactatggtacatgttttcagggactgttccatatatgacactgatttgcttagtaggatcattttgtacacctctttcacttgcccccgatgagccatattaaaaatcacctgggctgggctcagtgactcacgcctgtaatcccagcactttgggaggccacagtgggtggatcgcttgagcccaggagtttgagaccagcatgggcctcatggaaaaaccctgtctctactaaaaaaaatacaaaaaattagccaggcattgtggcacacacctgtagttccagctacccgggaggctgaggtgagagcctcagagcctgggaagtcaaggctacagtgagccgtgattgcaccactgcattccagcctaggcgacagagtgagaccctatcntcaaaaaagaaaaaaaaaatcacc

SEQ ID NO: 13235 - DNA, 541 bp, Homo sapiens
agcatatatatacatattctacatttacaaaagaatttcagatggtttgatataacagaaacacaataagatcatcacataaagataaaaatgtagggtactttataatggaaaaaataattattattttattaataggtaaaataataactgatgaaaaatggctactgcaactaagacctaatttgattttgagtttccaaacagctatcatcattagataagatccatacgagttmatcctgcctatcaagaaaaggacttttccctctcactcatagacaagcctatgtgtaagggatactaaacataaaggacagtgtcttcaacaatgttttatagaagatacagattttcatgtggcagagactgcaaactggcaacccgtgggccagattcaacccacagctgtctttttttgaccttcagtgtccataaaaaattttgaattgttgccaatatttaaaacttcagatatttaacataagaactctgacttccacctcctcttgaaaaatcagatttgggaacactggcccta

SEQ ID NO: 13236 - DNA, 541 bp, Homo sapiens
agcatatatatacatattctacatttacaaaagaatttcagatggtttgatataacagaaacacaataagatcatcacataaagataaaaatgtagggtactttataatggaaaaaataattattattttattaataggtaaaataataactgatgaaaaatggctactgcaactaagacctaatttgattttgagtttccaaacagctatcatcattagataagatccatacgagttaatcctgcctatcaagaaaaggacttttccctctcactcatagacaagcctatgtgtaagggatactaaacataaaggacagtgtcttcaacaawgttttatagaagatacagattttcatgtggcagagactgcaaactggcaacccgtgggccagattcaacccacagctgtctttttttgaccttcagtgtccataaaaaattttgaattgttgccaatatttaaaacttcagatatttaacataagaactctgacttccacctcctcttgaaaaatcagatttgggaacactggcccta

SEQ ID NO: 13237 - DNA, 541 bp, Homo sapiens
agcatatatatacatattctacatttacaaaagaatttcagatggtttgatataacagaaacacaataagatcatcacataaagataaaaatgtagggtactttataatggaaaaaataattattattttattaataggtaaaataataactgatgaaaaatggctactgcaactaagacctaatttgattttgagtttccaaacagctatcatcattagataagatccatacgagttaatcctgcctatcaagaaaaggacttttccctctcactcatagacaagcctatgtgtaagggatactaaacataaaggacagtgtcttcaacaatgttttatagaagatacagattttcatgtggcagagactgcaaactggcaacccgtgggccagattcaacccacagctgtctttttttgaccttcagtgtccataaaaaattttgaattgttgccaatatttaaaacttcagatatttaacatragaactctgacttccacctcctcttgaaaaatcagatttgggaacactggcccta

SEQ ID NO: 13238 - DNA, 568 bp, Homo sapiens
catgtaagaatcagaagcctttctatatgccaacagcaaataatctgaaaaagaaatcaagaaagtaatcccatttacaatagataaaataaaatatgcatgaatgaacttaatcaaagaagtgaaagactctactttgaggaaaaaatttacaatttctgacaaacackatatgaccttgtaatcgtacttcaaagtgtaaaaaaataaaaattcatgtttacacaaaagcctgtatgccaatatttacagatgcttcattcataaattcctagaattggacacatctattttgtttttccttttataataaattctggaaaatataaatgtattgggataaaacaatagttgggtgtaatagttaagtacaggagtgtcatgcaaggaatattttcaggggaagtaatgatcatgggtggggatggtagatgcatggctctaactctagatttcaatttagatttgtcaaaaatcatggaactgtgcaccacaaagaatgaactttcctgcatgaaaattaaaatcaaatcaatgagcattagggtatttcacaggaagaaatgca

SEQ ID NO: 13239 - DNA, 546 bp, Homo sapiens
caagcaatcctcccacctcagcctcctgagtacctgggaccacaggtgcacaccaccatgcccagctaatttttctatttttttgtagccatgttgcctaggatggtcttgaactcctgggctcaaggaatctaccctctccgggattatgggcatgagtgactcctggccctgcatttttttcaatctgtatgccttttatttctaagttttgctttattgtattagctagaactgccacaacaatgtcaaatggaagtagtgagagtgracatccttgcgttgttcatgaccttagaggaaagtattcagccttcccccattaagtgttgaattagctggagtttcttcatggatgccttttatcaggttgggaaggtttttaatcatgcatggatgttgaagtgttttactgttcttaaaaggagtcggaaggaagaaactctgttctctggaacatttttgtacctggttatgatgattggaactgtggcagccattttgtgaccaggaagagagctagtttgaggagcaaagtcaatccat

SEQ ID NO: 13240 - DNA, 570 bp, Homo sapiens
taaactttacacgtgtgtgtatggtatataatctgtaaatattcacctggtatctggggacttaatatagttttaacagaattaaggcctccttaaaagtgtcttattttaaaactactacaaattgtgaaagaaaaaattgccaagttcaagacctgagcattttaaattagtcmtccaatcaaaactcagtgtctgtccaaatctgccaaataagtctgttccagcagccttagtaattttcttagtatatggcattgttaatgtattttgagataatttatttagccctgattgtgtaacattttttatagctaaaatatagcaatgtgaaacaacaaattgtccatttcatgctgggtaaatgattgaaaagaaaaccatacaatctatctcacccataattttatccatcagtccttttcagaaagcaacaatgggaaatgcatgccatgaatctctgtatacagaaacttttttttgcagtgtagctttcaatatcacagaatttacactataaaaaaaacctgtttcttcgtgttagatttcagctgcgtgtggttctacatt

SEQ ID NO: 13241 - DNA, 570 bp, Homo sapiens
taaactttacacgtgtgtgtatggtatataatctgtaaatattcacctggtatctggggacttaatatagttttaacagaattaaggcctccttaaaagtgtcttattttaaaactactacaaattgtgaaagaaaaaattgccaagttcaagacctgagcattttaaattagtcatccaatcaaaactcagtgtctgtccaaatctgccaaataagtctgttccagcagccttagtaattttcttagtatatggcattgttaatgtattttgagataatttatttagccctgattgtgtaacattttttatagctaaaatatagcaatgtgaaacaacaaattgtccatttcatgctgggtaaatgattgaaaagaaaaccatacaatctatctcacccataattttatccatcagtccttttcagaaagcaacaatgggaaatgyatgccatgaatctctgtatacagaaacttttttttgcagtgtagctttcaatatcacagaatttacactataaaaaaaacctgtttcttcgtgttagatttcagctgcgtgtggttctacatt

SEQ ID NO: 13242 - DNA, 526 bp, Homo sapiens
aatcttttcagcaagataaaaatgtgtgggttttcgtttcccagattattaaaaatgtttataacttgctaatttaatttttgaggttggataaatatagttcaagactttgtttctcctaatagcatttaaacacccttaaagagattgattagagatactggtgctagtactttaggaaccaattttccacctttttaaaaattttatattttcggccaggcgtggtggctcacgcttgtaatcccagcactttgggaggccgaggmgggtggatcacgaggtcaggagatcaagaccatcctggctaacacagtgaaaccccatctctactaaaaatacaaaaaattagccgggagtagtggcaggcgcctgtagtcccagctacttgggaggctgaggcaggaaaatggcgtgaacccgggaggcggagcttgcagtgagccgagaacgcgccgctgcgctccagcctgggtgactggagcgagactctgtctcaaaataaataaataaataaataataata

SEQ ID NO: 13243 - DNA, 541 bp, Homo sapiens
ggaaaattcagttttatattatctgttcccrcagctgctcagtttcttctaaccacaggtcagggaatataataggttttccgattagttttagataaaatgtgaaagaacagttcatgtcaaggacaatggttgccaaatatatttggcaggatttctatattgaatcccaaaggaaatacacaaacaaaaccccacaaaagttaggaaggagtaaaacccaggaaccctggaacattttgtcatttactatgcagatttgcctgaaagtgagacaggcaaataaatcacatgtttctgccagcgtggaaaatattcactcaaatggcaaaggtctcaggctggggagctggatattgtcctgtaataggttcatctcagaactgaatcacacacttggagggtgttaatgctcttaggaacatctagttattccctttgaatagagtcctgtcctgaatcacatatacttgacctagggcctaggcctttttgtttttctgtctcacaatcttgtttctccatcaattatgtgttttca

SEQ ID NO: 13244 - DNA, 592 bp, Homo sapiens
ctcagacattgttgataattttcttgctgtttgatgtgacaaggtgatgcgataagatattctaggctcaacttttacatttcctgaagttagacatttttttcaaagattcatggtttattttactgagaaatttagagactagattatgtatgctagtgtgcttattgccactgggatggtcatgatgtctaggctttttcagtagacagagctatgtgtcatacttgttttgaagctaaaatacattacaagtttataatgatacatccaattcaaatacaagataatagttttttgcttaatctttttgatattatatctcctttttcccatcccaaaaactctagatttcataaacattagcataactcctttgttttattctatgccatgtacatgaygatcttagaaaaatactgtggtagattactgttatctattgccccagtttttcaccagtactcacatctacacaccttgctttgtaaacttgtagtgttttttcattcttattctggctctgcccagtggcttgccatggcccataggatttcagcaaccatgaaacaagaagaggatttaaaaaaac

SEQ ID NO: 13245 - DNA, 556 bp, Homo sapiens
gggtaaacactgtgacacactcaaaacattagaattcccttgacagatatttcatgtggaacatgtcacaagctcagcagttttgctagtcacctatgaaacatagatttttttagtaaggatattagtgctttcaggatatattacacattagtgaggaaastggtttagttgtctgtaagagggattcaaaataacaatgttctaaataagatagaagattttttctccctcagataaaactcatatgtagaaaatcagccatcactcttggctccataaccttctgggagccatgcaacctccagctgtcctctctgccagtcccaaaatgatggccttttcattagggtaaagagagagtttcagtcatcacacccacagtctaagtaagacatcactctgataggctgcctttgtccagtataagtaggaaccaatcattgttttaatattacttatattcctaaagaatcttctgtcactacaccaattgtctcattttctttttctttgtatcagaactgttttatttatttttttattatactttaat

SEQ ID NO: 13246 - DNA, 556 bp, Homo sapiens
gggtaaacactgtgacacactcaaaacattagaattcccttgacagatatttcatgtggaacatgtcacaagctcagcagttttgctagtcacctatgaaacatagatttttttagtaaggatattagtgctttcaggatatattacacattagtgaggaaagtggtttagttgtytgtaagagggattcaaaataacaatgttctaaataagatagaagattttttctccctcagataaaactcatatgtagaaaatcagccatcactcttggctccataaccttctgggagccatgcaacctccagctgtcctctctgccagtcccaaaatgatggccttttcattagggtaaagagagagtttcagtcatcacacccacagtctaagtaagacatcactctgataggctgcctttgtccagtataagtaggaaccaatcattgttttaatattacttatattcctaaagaatcttctgtcactacaccaattgtctcattttctttttctttgtatcagaactgttttatttatttttttattatactttaat

SEQ ID NO: 13247 - DNA, 534 bp, Homo sapiens
ggaacagatggaatttttgaagtttgctggaatgccgcaggagacaaagttggagccagtgcatcagatggttcagtttgtgtattagactttcggaaatagcgctactagttggaagccatggaccaactatgaatgtgtacatagccaaaatgactgtccctgacccacgtactgctatagtcccacttgaaccatggccagtcgactacagmcaaatctaaaagaaatataggctgggcgcagaggctcatgcttgtaatcccagcactttgggagaccgaggcagacggatcaagggtcaggagtttgagacaagcctggccaatatggtgaaaccctgtctcttctaaaaatacaaaaattagccgggcatggtggtgcgtgcctgtagtcccagctactcgggaggctgagacaggagaatcgcttgaacctgggaggcggaggttgcagtgagcagagattgtgccactgcactccagactaggcaacagagcgagactccttctcaaaaaaaaaaaaaaaaagaaa

SEQ ID NO: 13248 - DNA, 534 bp, Homo sapiens
ggaacagatggaatttttgaagtttgctggaatgccgcaggagacaaagttggagccagtgcatcagatggttcagtttgtgtattagactttcggaaatagcgctactagttggaagccatggaccaactatgaatgtgtacatagccaaaatgactgtccctgacccacgtactgctatagtcccacttgaaccatggccagtcgactacagacaaatctaaaagaaatataggctgggcgcagaggctcatgcttgtaatcccagcactttgggagacmgaggcagacggatcaagggtcaggagtttgagacaagcctggccaatatggtgaaaccctgtctcttctaaaaatacaaaaattagccgggcatggtggtgcgtgcctgtagtcccagctactcgggaggctgagacaggagaatcgcttgaacctgggaggcggaggttgcagtgagcagagattgtgccactgcactccagactaggcaacagagcgagactccttctcaaaaaaaaaaaaaaaaagaaa

SEQ ID NO: 13249 - DNA, 534 bp, Homo sapiens
ggaacagatggaatttttgaagtttgctggaatgccgcaggagacaaagttggagccagtgcatcagatggttcagtttgtgtattagactttcggaaatagcgctactagttggaagccatggaccaactatgaatgtgtacatagccaaaatgactgtccctgacccacgtactgctatagtcccacttgaaccatggccagtcgactacagacaaatctaaaagaaatataggctgggcgcagaggctcatgcttgtaatcccagcactttgggagaccgaggcagacggatcaagggtcaggagttygagacaagcctggccaatatggtgaaaccctgtctcttctaaaaatacaaaaattagccgggcatggtggtgcgtgcctgtagtcccagctactcgggaggctgagacaggagaatcgcttgaacctgggaggcggaggttgcagtgagcagagattgtgccactgcactccagactaggcaacagagcgagactccttctcaaaaaaaaaaaaaaaaagaaa

SEQ ID NO: 13250 - DNA, 607 bp, Homo sapiens
tgttactgggagttaacatgcaggggggactccctctaacggcagcatgctgagtactggcagcctcactgatccggtcatgtggcctcgggagccgcacaggcttcatgggggttttgtggttttaaggactgtgagggttgactgaattatatgcactcacttgtcatgtttctgggctttttgtgcccttttccctggtactgcaggaaaggaaaagacaaagtactgtsaagagcaattgctgagcagatttgatgtgatgcagtaggatgagacatgatactgggatcacctcttccaggtcaccgcaagggtttatactgctccatgcctgcagtgcttctggctctgttgcgggagcacctgaccccagtagccacagccaagaaggttttacttttaaatggcatcggcaggtgggtaagagttgatgatgctgctggcaggtgagggaccggctgtggacttccatcgccggttccacctgccctcctgggccagggtctctgagatcttggatgtggatttcatctccttgttgtcaatacctggtgcttttatctatcatcagtacactgtacttttacttctctgctatgttgac

SEQ ID NO: 13251 - DNA, 1320 bp, Homo sapiens
tatcctaaaatctgtttgggattgtgaaaactcagtgtataaaagacaatgttaagaatattagggagaaaagcagactagaactttgcaacactacattttggggttggtctccatcaacaaatattatgtgcatatttatatgtatcaaaatatacatttaagttgcttcattaatggagcaaacaccttcaactttctcaatcaacaatcaggacagatgtgacaaaattaagacaatataaaaccatagtcttcatgatttactaagtttcctgaaatatattctgggaattattactgttgagataactttagatcctcaaaattaatttagttagaattgcttcttatctaatttatgtatgtcacaagtgcatcatttagagcacttaaaaattaatacaatactcaataccgtgactcactgaagatttatacttctgcttcctgaaacttttgttattacctgagactaatgcggcaaaaatgaacagaaaccattcatgtctttaggatacatcagaatacaaggaaaagactactggcttgggaatcagaaatctccctcagactctacagtcaaaattatctttgaatcttcacaaatacaaacatcctggccctcacagttttgttactttttcaaggggtgagggctttaggtattgatttaatacctattttatgtccaacaaaatattatctcatgataattttagtcatatcatattaatataaatagaaaacttattaaataattttcaaaaatattttgttataatgaaaattatgagaaatttttgtaagaattaggcaagtgtaggctttatttactttttaaaaaatctaatgcaggtagccgatttaatattttattttttaacagaaggtaaactattaaaatagggatcattaaaatgttttaaagctacacacaatatctacctttttaaacttaacgaaagtagggctgtatttaaaaattaattttctttcaactgttctttctttaggtagtaactagaaaagccaggtaatgtgatgtctccaactttattattatttttcaagattgattgagctattgtagttcctttgtgtttccatataaattttggaatcagctgtcaacggtaaattctacagaatttctttctttttttttttgatttacatttgagtattttgcttttggggtaattttaaatgatttttttttwaaaaaattatgtgtccttttgtaccttgctaatatacacaaacacaattgatttaatgtgtttgtcttgtatcgtaagatctgcataaactcactta

SEQ ID NO: 13252 - DNA, 440 bp, Homo sapiens
atggaagttataacattgcaaatgcaacaacaacaaaaaagtaagtgtctcttgccacagtcatatcccatcaccaccacccctcccccaaaaaactcatccctctcacatggagttgttcattaggttctaatttttggttttcatgtcaggaatcctcatmatgatgtccatgtgcagagaggtgcacgtgtatgaatatatcccatccgtgcggcagacggagctgtgccactaccacgagctgtactacgacgcagcctgcaccctcggggcgtaccacccactactctatgagaagctcctggtgcagcgcctgaacatgggcacgcagggggatttgcatcgcaagggcaaggtggttcttcctggcttccaggcggtgcactgccctgcaccaagtccagtcattccacactcttaaaaagggtttcttggga

SEQ ID NO: 13253 - DNA, 440 bp, Homo sapiens
atggaagttataacattgcaaatgcaacaacaacaaaaaagtaagtgtctcttgccacagtcatatcccatcaccaccacccctcccccaaaaaactcatccctctcacatggagttgttcattaggttctaatttttggttttcatgtcaggaatcctcatcatgatgtccatgtgcagagaggtgcacgtgtatgaatatatcccatccgtgcggcagacggagctgtgccactaccacgagctgtactacgacgcagcctgcaccctcggggcgtaccacccactactctatgagaagctcctggtgcagcgcctgaacatgggcacgcagggggatttgcatcgcaagggcaaggtggttcttccyggcttccaggcggtgcactgccctgcaccaagtccagtcattccacactcttaaaaagggtttcttggga

SEQ ID NO: 13254 - DNA, 1371 bp, Homo sapiens
cccacctcagcctcccaaagtgctgggattaccgacgtgaaccactgttctggaccaagtatgtacatttataaataacacccattttcctgtgatttccttagcttcactctatgaactgctagcttgtcatgcctccctgtcatattctctgacagtttccagccttatgccccatgggtgtctctctctctctctgtctctctctgctttctttaattcctctttggctgccaagagttcattttctcagcctgtgacagcaccccatgttccccagtttcttatggggaatcacagctcccctgctacatttagtctgttgggagcacaattctgggtaatcagcttctacagcagaagtgacagggtctgagcagcctctcactagatttggaagaactagagagcaggtccgggtggcccaacacccagcccctaatgccatgcacttcctgccccctgagtttcattgattccacacctggcatccagccctcaagtccattttggaagcatcctgtccctccccccagacagacacatgcactggttatcctttcaataaaaccatctgggatgggatccagtctggaaggtaaatcttagaaacctttcccttgtcttcttatgcatctctttggaattcttacatctcagatcaattctgctagttaacacttcccaggaaagtcaccatcccctctgacgtcagaatgtatcaggagagagtctgtggcagggagagtaacattcctcagcattcaacccagtctccacattgtcctgcgttcttaccacacagccagagcaggagcatgtgactggttctggaccagtttgggcaagagtggtgtgtgtcacctctgggccaaaatacagaagaaacagtgcgtgagcccccaggggtcccttcygctgctctactctcccagatggtagagtctcgatcagcctgggtcctgggtgtctcggtagagcagagcccctgccgacctccacaaaacacgtagcctgaaaaagaagtcaatctgtgctgggtcagtttccaggacaccaggattggctccaacgtgttcctaatatcagtaatttctatgtcttggctaaaaataccttgccctccccaaggagacaaaaatactctctatatgtccttctggaatttttcaggtttttttttattacacctaaatctttaacgcagctggaatgtattgtgtgtatggaatgcattgtacatatgaaatgtattgtacgtatggaatgtattgtacgtatggactggcagaaagatgttactttttaggtaacatggttttctctatggagagccagtgatctaaaatcttgtattcaattctccctact

SEQ ID NO: 13255 - DNA, 1682 bp, Homo sapiens
tgtaacacatactaaggccaggcacagtggctcacgcctataatcccagcactttgggaggccgaggcaggcggatcacctgaggtcaggagttcaagaccagcctggccaaacgrcgaaacctcgtctctagtaaaaatacaaaaattagctgggcttggtgacgggtgcctgtaatcccagctactcgggaggcttaggcaggagaatcacttgaacttgagggaggcagaggttgcagtgagccaagatgatgccactgcactccagcctggatgacagagtgagactctgtctggaaaaaaaaaaaaaaaaagaatagaatgtaacacatactaaatgatttctggcactgctttttaaattccactgctcactgtctaaatgcaaaatcctctttttctatcattttaatctccttaaatgaacaacaggcactggcaactgcttttccttttaacctgtgtgaaatgatgcattgcacagtgagcgcggaccccatctgaaggcatggaatggctcctgggcgcccccattttcaccaacccgttgttgaccgcgtatttagctgttgaaatgaaggatgttgccgggaagccaagcccggcacttcagggagatgggtgcagaggtgaacagaggtgccctgcatagtctgtggttctgcctggggcggtctctggctctgaggctctggtgcaggccggcctggttttgaagtcagccatggtcaggggaaagtatacagaggtgtttgtttataagaaatgcaagcgcttgatttggattccctgcaattagaggaaatactttcgaaacataataaattattttggaaaaaaaaaaagtatttcccgcttaagagaactattttcaagcacttgagaggtggccctgcatatcgacagctgctattaaattactttatcttctcatagaagcagcacagcaaagcgggaggcaggctatggaggtctcaggaaacacggggtcctggagtccagctgcctcctccagagagctgtaacctgggaaatgtcacttagcaacccagagctcatatcctccaatgtcaaatggggatgtcggtatagcatatgataatacacattatatcatggctggcaacaagctctgatgtgtttacttaacacatttgtgtttgtgcataatatattattgtatatttcattattcagaaaagtatttacactaatatattattgctattattaaataaaatttccaataattttaatattttaattatataacatagtaatttattgatcacaaggatttttgaagggtcaagtggaaatacaagtccagcattcctgaccaatgcccagcattttgccaacacccagtaaatgctatttggtgataataggaggaggaagagtatcattattattgttattatcatttaataattatttgtgagatgagttgctgtaggaattcaaaagaattaaaatttgagtcttcagaaatagtctaagtttcagaaactgttttctgcaatccaatcaagcctttccttaagtaccccagactctctcgcagcatccatattctgtaaacagaggttaaacacagagcttcagtctacccgcacctctgctcattccacactgctgataggaacgcaagcctctcctcctcatctccaactccac

SEQ ID NO: 13256 - DNA, 1682 bp, Homo sapiens
tgtaacacatactaaggccaggcacagtggctcacgcctataatcccagcactttgggaggccgaggcaggcggatcacctgaggtcaggagttcaagaccagcctggccaaacgacgaaacctcgtctctagtaaaaatacaaaaattagctgggcttggtgaygggtgcctgtaatcccagctactcgggaggcttaggcaggagaatcacttgaacttgagggaggcagaggttgcagtgagccaagatgatgccactgcactccagcctggatgacagagtgagactctgtctggaaaaaaaaaaaaaaaaagaatagaatgtaacacatactaaatgatttctggcactgctttttaaattccactgctcactgtctaaatgcaaaatcctctttttctatcattttaatctccttaaatgaacaacaggcactggcaactgcttttccttttaacctgtgtgaaatgatgcattgcacagtgagcgcggaccccatctgaaggcatggaatggctcctgggcgcccccattttcaccaacccgttgttgaccgcgtatttagctgttgaaatgaaggatgttgccgggaagccaagcccggcacttcagggagatgggtgcagaggtgaacagaggtgccctgcatagtctgtggttctgcctggggcggtctctggctctgaggctctggtgcaggccggcctggttttgaagtcagccatggtcaggggaaagtatacagaggtgtttgtttataagaaatgcaagcgcttgatttggattccctgcaattagaggaaatactttcgaaacataataaattattttggaaaaaaaaaaagtatttcccgcttaagagaactattttcaagcacttgagaggtggccctgcatatcgacagctgctattaaattactttatcttctcatagaagcagcacagcaaagcgggaggcaggctatggaggtctcaggaaacacggggtcctggagtccagctgcctcctccagagagctgtaacctgggaaatgtcacttagcaacccagagctcatatcctccaatgtcaaatggggatgtcggtatagcatatgataatacacattatatcatggctggcaacaagctctgatgtgtttacttaacacatttgtgtttgtgcataatatattattgtatatttcattattcagaaaagtatttacactaatatattattgctattattaaataaaatttccaataattttaatattttaattatataacatagtaatttattgatcacaaggatttttgaagggtcaagtggaaatacaagtccagcattcctgaccaatgcccagcattttgccaacacccagtaaatgctatttggtgataataggaggaggaagagtatcattattattgttattatcatttaataattatttgtgagatgagttgctgtaggaattcaaaagaattaaaatttgagtcttcagaaatagtctaagtttcagaaactgttttctgcaatccaatcaagcctttccttaagtaccccagactctctcgcagcatccatattctgtaaacagaggttaaacacagagcttcagtctacccgcacctctgctcattccacactgctgataggaacgcaagcctctcctcctcatctccaactccac

SEQ ID NO: 13257 - DNA, 1682 bp, Homo sapiens
tgtaacacatactaaggccaggcacagtggctcacgcctataatcccagcactttgggaggccgaggcaggcggatcacctgaggtcaggagttcaagaccagcctggccaaacgacgaaacctcgtctctagtaaaaatacaaaaattagctgggcttggtgacgggtgcctgtaatcccagctactcgggaggcttaggcaggagaatcacttgaacttgagggaggcagaggttgcagtgagccaagatgatgccactgyactccagcctggatgacagagtgagactctgtctggaaaaaaaaaaaaaaaaagaatagaatgtaacacatactaaatgatttctggcactgctttttaaattccactgctcactgtctaaatgcaaaatcctctttttctatcattttaatctccttaaatgaacaacaggcactggcaactgcttttccttttaacctgtgtgaaatgatgcattgcacagtgagcgcggaccccatctgaaggcatggaatggctcctgggcgcccccattttcaccaacccgttgttgaccgcgtatttagctgttgaaatgaaggatgttgccgggaagccaagcccggcacttcagggagatgggtgcagaggtgaacagaggtgccctgcatagtctgtggttctgcctggggcggtctctggctctgaggctctggtgcaggccggcctggttttgaagtcagccatggtcaggggaaagtatacagaggtgtttgtttataagaaatgcaagcgcttgatttggattccctgcaattagaggaaatactttcgaaacataataaattattttggaaaaaaaaaaagtatttcccgcttaagagaactattttcaagcacttgagaggtggccctgcatatcgacagctgctattaaattactttatcttctcatagaagcagcacagcaaagcgggaggcaggctatggaggtctcaggaaacacggggtcctggagtccagctgcctcctccagagagctgtaacctgggaaatgtcacttagcaacccagagctcatatcctccaatgtcaaatggggatgtcggtatagcatatgataatacacattatatcatggctggcaacaagctctgatgtgtttacttaacacatttgtgtttgtgcataatatattattgtatatttcattattcagaaaagtatttacactaatatattattgctattattaaataaaatttccaataattttaatattttaattatataacatagtaatttattgatcacaaggatttttgaagggtcaagtggaaatacaagtccagcattcctgaccaatgcccagcattttgccaacacccagtaaatgctatttggtgataataggaggaggaagagtatcattattattgttattatcatttaataattatttgtgagatgagttgctgtaggaattcaaaagaattaaaatttgagtcttcagaaatagtctaagtttcagaaactgttttctgcaatccaatcaagcctttccttaagtaccccagactctctcgcagcatccatattctgtaaacagaggttaaacacagagcttcagtctacccgcacctctgctcattccacactgctgataggaacgcaagcctctcctcctcatctccaactccac

SEQ ID NO: 13258 - DNA, 1682 bp, Homo sapiens
tgtaacacatactaaggccaggcacagtggctcacgcctataatcccagcactttgggaggccgaggcaggcggatcacctgaggtcaggagttcaagaccagcctggccaaacgacgaaacctcgtctctagtaaaaatacaaaaattagctgggcttggtgacgggtgcctgtaatcccagctactcgggaggcttaggcaggagaatcacttgaacttgagggaggcagaggttgcagtgagccaagatgatgccactgcactccagcctggatgacagagtgagactctgtctggaaaaaaaaaaaaaaaaagaatagaatgtaacacatactaaatgatttctggcactgctttttaaattccactgctcactgtctaaatgcaaaatcctctttttctatcattttaatctccttaaatgaacaacaggcactggcaactgcttttccttttaacctgtgtgaaatgatgcattgcacagtgagcscggaccccatctgaaggcatggaatggctcctgggcgcccccattttcaccaacccgttgttgaccgcgtatttagctgttgaaatgaaggatgttgccgggaagccaagcccggcacttcagggagatgggtgcagaggtgaacagaggtgccctgcatagtctgtggttctgcctggggcggtctctggctctgaggctctggtgcaggccggcctggttttgaagtcagccatggtcaggggaaagtatacagaggtgtttgtttataagaaatgcaagcgcttgatttggattccctgcaattagaggaaatactttcgaaacataataaattattttggaaaaaaaaaaagtatttcccgcttaagagaactattttcaagcacttgagaggtggccctgcatatcgacagctgctattaaattactttatcttctcatagaagcagcacagcaaagcgggaggcaggctatggaggtctcaggaaacacggggtcctggagtccagctgcctcctccagagagctgtaacctgggaaatgtcacttagcaacccagagctcatatcctccaatgtcaaatggggatgtcggtatagcatatgataatacacattatatcatggctggcaacaagctctgatgtgtttacttaacacatttgtgtttgtgcataatatattattgtatatttcattattcagaaaagtatttacactaatatattattgctattattaaataaaatttccaataattttaatattttaattatataacatagtaatttattgatcacaaggatttttgaagggtcaagtggaaatacaagtccagcattcctgaccaatgcccagcattttgccaacacccagtaaatgctatttggtgataataggaggaggaagagtatcattattattgttattatcatttaataattatttgtgagatgagttgctgtaggaattcaaaagaattaaaatttgagtcttcagaaatagtctaagtttcagaaactgttttctgcaatccaatcaagcctttccttaagtaccccagactctctcgcagcatccatattctgtaaacagaggttaaacacagagcttcagtctacccgcacctctgctcattccacactgctgataggaacgcaagcctctcctcctcatctccaactccac

SEQ ID NO: 13259 - DNA, 1682 bp, Homo sapiens
tgtaacacatactaaggccaggcacagtggctcacgcctataatcccagcactttgggaggccgaggcaggcggatcacctgaggtcaggagttcaagaccagcctggccaaacgacgaaacctcgtctctagtaaaaatacaaaaattagctgggcttggtgacgggtgcctgtaatcccagctactcgggaggcttaggcaggagaatcacttgaacttgagggaggcagaggttgcagtgagccaagatgatgccactgcactccagcctggatgacagagtgagactctgtctggaaaaaaaaaaaaaaaaagaatagaatgtaacacatactaaatgatttctggcactgctttttaaattccactgctcactgtctaaatgcaaaatcctctttttctatcattttaatctccttaaatgaacaacaggcactggcaactgcttttccttttaacctgtgtgaaatgatgcattgcacagtgagcgcggaccccatctgaaggcatggaatggctcctgggcgcccccattttcaccaacccgttgttgaccgcgtatttagctgttgaaatgaaggatgttgccgggaagccaagcccggcacttcagggagatgggtgcagaggtgaacagaggtgccctgcatagtctgtggttctgcctggggcggtctctggctctgaggctctggtgcaggccggcctggttttgaagtcagccatggtcaggggaaagtatacagaggtgtttgtttataagaaatgcaagcgcttgatttggattccctgcaattagaggaaatactttcgaaacataataaattattttggaaaaaaaaaaagtatttcccgcttaagagaactattttcaagcacttgagaggtggccctgcatatcgacagctgctattaaattactttatcttctcatagaagcagcacagcaaagcgggaggcaggctatggaggtctcaggaaacacggggtcctggagtccagctgcctcctccagagagctgtaacctgggaaatgtcacttagcaacccagagctcatatcctccaatgtcaaatggggatgtcggtatagcatatgataatacacattatatcatggctggcaacaagctctgatgtgtttacttaacacatttgtgtttgtgcataatatattattgtatatttcattattcagaaaagtatttacactaatatattattgctattattaaataaaatttccaataattttaatattttaattatataacatagtaatttattgatcacaaggatttttgaagggtcaagtggaaatacaagtccagcattcctgaccaatgcccagcattttgccaacacccagtaaatgctatttggtgataataggaggaggaagagtatcattattattgttattatcatttaataattatttgtgagatgagttgctgtaggaattcaaaagaattaaaatttgagtcttcagaaatagtctaagtttcagaaactgttttctgcaatccaatcaagcctttccttaagtaccccagactctctckcagcatccatattctgtaaacagaggttaaacacagagcttcagtctacccgcacctctgctcattccacactgctgataggaacgcaagcctctcctcctcatctccaactccac

SEQ ID NO: 13260 - DNA, 1682 bp, Homo sapiens
tgtaacacatactaaggccaggcacagtggctcacgcctataatcccagcactttgggaggccgaggcaggcggatcacctgaggtcaggagttcaagaccagcctggccaaacgacgaaacctcgtctctagtaaaaatacaaaaattagctgggcttggtgacgggtgcctgtaatcccagctactcgggaggcttaggcaggagaatcacttgaacttgagggaggcagaggttgcagtgagccaagatgatgccactgcactccagcctggatgacagagtgagactctgtctggaaaaaaaaaaaaaaaaagaatagaatgtaacacatactaaatgatttctggcactgctttttaaattccactgctcactgtctaaatgcaaaatcctctttttctatcattttaatctccttaaatgaacaacaggcactggcaactgcttttccttttaacctgtgtgaaatgatgcattgcacagtgagcgcggaccccatctgaaggcatggaatggctcctgggcgcccccattttcaccaacccgttgttgaccgcgtatttagctgttgaaatgaaggatgttgccgggaagccaagcccggcacttcagggagatgggtgcagaggtgaacagaggtgccctgcatagtctgtggttctgcctggggcggtctctggctctgaggctctggtgcaggccggcctggttttgaagtcagccatggtcaggggaaagtatacagaggtgtttgtttataagaaatgcaagcgcttgatttggattccctgcaattagaggaaatactttcgaaacataataaattattttggaaaaaaaaaaagtatttcccgcttaagagaactattttcaagcacttgagaggtggccctgcatatcgacagctgctattaaattactttatcttctcatagaagcagcacagcaaagcgggaggcaggctatggaggtctcaggaaacacggggtcctggagtccagctgcctcctccagagagctgtaacctgggaaatgtcacttagcaacccagagctcatatcctccaatgtcaaatggggatgtcggtatagcatatgataatacacattatatcatggctggcaacaagctctgatgtgtttacttaacacatttgtgtttgtgcataatatattattgtatatttcattattcagaaaagtatttacactaatatattattgctattattaaataaaatttccaataattttaatattttaattatataacatagtaatttattgatcacaaggatttttgaagggtcaagtggaaatacaagtccagcattcctgaccaatgcccagcattttgccaacacccagtaaatgctatttggtgataataggaggaggaagagtatcattattattgttattatcatttaataattatttgtgagatgagttgctgtaggaattcaaaagaattaaaatttgagtcttcagaaatagtctaagtttcagaaactgttttctgcaatccaatcaagcctttccttaagtaccccagactctctcgcagcrtccatattctgtaaacagaggttaaacacagagcttcagtctacccgcacctctgctcattccacactgctgataggaacgcaagcctctcctcctcatctccaactccac

SEQ ID NO: 13261 - DNA, 591 bp, Homo sapiens
ctcctctcccagctctgattcatgttccatttagagtgaaacatatggggaacaagaactctctgtttcacaatctgactcttaacggttctaagggccaattctgctcttcccaggactaggaagatcagtcacacactttgaagctgctttctgaaacacatctgaattcggattttcagtgattcttccccattaacgagcatccttgctgtgggaggccatgtgcccattcacgtgaagattccattgcttgaaacaatttttgagctgtgccttggagagtgcctcccctcaagactgtggcctctctcctgagtgagctaaatgaaggtgcattgtcctttgagggtgtattagctttctggaatcagcctgaagtcatttgaagtcaagtggtgaagcgaaagggagccagaaataaggtgcatctttgccctcagtcagttgggattcttttgggcatttagaaggggcggtcctagarttctagagaatttacggaggagagtttcagatccatgctgggcagggcaatagaggcttggttagactatatctgcaaaggagggttactttgaaggaaacagc

SEQ ID NO: 13262 - DNA, 533 bp, Homo sapiens
ggaagccaagtcactgtaacttactgatgccatcactgtattcccgatgccatcagcaagtagaattgatagcaacaccctgttcacactagacgtgcctccaccctgaatccaagtccatcttgctcctacccccatcagggcagctgggaccatttgctgctgtcttggttcctctgtgtggaaggaaagtctgacctatactgcacagcctcagcttcaattgcccaaacctgaccatctctcagtactgccgttgttctgtctcccaatctctgacctgccaccaccacagggcttgattctagatcttggatccttctctttcccctgtcctgtgtaagtcatgagaccttgttcagcaaagttttctgtcaattatcagatggacagagattcaggtacatgaaggaaaacagggatctcagatttagaagtggaaagaagtcttcagcccacttcwtagaagtattgcacaaggtcagaatcagactgagtccagatgatactcctctaataaacttgaccttgtg

SEQ ID NO: 13263 - DNA, 1246 bp, Homo sapiens
tcaatgggtatttcaaatgttacttaaaaaaaattgaaatagttactgtatgtgtgactcttccccttcactgctggaatgaaagttgtttgtcttgccatataagcatgactgtaagaagtccaaacgagctctgagttatataacatatttcacatttttaggggctgtaattagagtgataatattatggcaatactcctagaasagattaaggacctaattgtgatgaaagagggctttgggtcagaagtacatatctgaaactgttttatttaacatgactttggcacaaggatcggtaataatcccatatttacagaacaccttgaaaaaaaaaaactgtttttctgaaggccctacaaagttttcccacttcaaatgtttaatttggatgggaagttgccttgtgagtgtagaatgaagttacaaaacaaaacaaagagggtccctcaggaaactaccacaattctagaagggtttagaaagacgggagctacacagaggccaatgtggtttctgaaactttcttcttctagtaaaaatgctacaccaaacaagaacattgcgtggcaatcaaaaccctgaccagggaggtgcctgtgaacaaggatgctgggaagaagcccacagtcaggctggagttaccattcctgattagccaggaagaactaggtgggggtctctagctgagcttttgagagtgtgcacccacccttcgcctctggtgttttgtaacatggaagaagcctccagggagacatttcttctcccattagttacttaagagaataccactcagggctcatgccattagttgaaattaagtagaaggaccaagaggggtttatctgatgggctttaaaagcaggtctcggccatgcttttccagaggcaaagagagagaactgcaggctggcgcaagtacctcttaagccctgctggccaatttaccctgtggctagtcctgattgaaattcggaacagaatcttggactctaacctctcctgtttacttttgtttgttttcttttcttaccaatgctccttgtgaaaaactccaactgacccaggcaataagcaaacaggagaaactactttcctcacctgttcaacaagaataaaaagtggcaacattctgagactaggacgctgggggaaagagtgaacaggaggggagaactcacccagacagactgtgtgtcagctgtggatgttactccctgtctcagccagaagaattgat

SEQ ID NO: 13264 - DNA, 1246 bp, Homo sapiens
tcaatgggtatttcaaatgttacttaaaaaaaattgaaatagttactgtatgtgtgactcttccccttcactgctggaatgaaagttgtttgtcttgccatataagcatgactgtaagaagtccaaacgagctctgagttatataacatatttcacatttttaggggctgtaattagagtgataatattatggcaatactcctagaacagattaaggacctaattgtgatgaaagagggctttgggtcagaagtacatatctgaaactgttttatttaacatgactttggcacaaggatcggtaataatcccatatttacagaacaccttgaaaaaaaaaaactgtttttctgaaggccctacaaagttttcccacttcaaatgtttaatttggatgggaagttgccttgtgagtgtagaatgaagttacaaaacaaaacaaagagggtccctcaggaaactaccacaattctagaagggtttagaaagacgggagctacacagaggccaatgtggtttctgaaactttcttcttctagtaaaaatgctacaccaaacaagaacattgcgtggcaatcaaaaccctgaccagggaggtgcctgtgaacaaggatgctgggaagaagcccacagtcaggctggagttaccattcctgattagccaggaagaactaggtgggggtctctagctgagcttttgagagtgtgcacccacccttcgcctctggtgttttgtaacatggaagaagcctccagggagacatttcttctcccattagttacttaagagaataccactcagggctcatgccattagttgaaattaagtagaaggaccaagaggggtttatctgatgggctttaaaagcaggtctcggccatgcttttccagaggcaaagagagagaactgcaggctggcgcaagtacctcttaagccctgctggccaatttaccctgtggctagtcctgattgaaattcggaacagaatcttggactctaacctctcctgtttacttytgtttgttttcttttcttaccaatgctccttgtgaaaaactccaactgacccaggcaataagcaaacaggagaaactactttcctcacctgttcaacaagaataaaaagtggcaacattctgagactaggacgctgggggaaagagtgaacaggaggggagaactcacccagacagactgtgtgtcagctgtggatgttactccctgtctcagccagaagaattgat

SEQ ID NO: 13265 - DNA, 554 bp, Homo sapiens
catagtttacactttaaataaacggatgtgtgtgtgtgcatgtgtgtgtgtgtgtgtgcttgtgtgtgtgtttactgtgtgttgggggtgggggagggatatgctgattacagaagagcagattttcaaccaaaaggaagtaatctaggcatatccctagaaggaatacatagaaaagggaagaacaaaaaagaccacaacatcataaatgaaggtatctactttccccagtacataaataagttacagtagagaaaaaaaatgtgtttgttccaaaagcatctgagataccgccccctaatccctgcacagcaactaatgatgctgtgggtgtaatggattattacataacgtcacatgtctctaaaataatcaaggaagtctgagggtaagccagtggcactagagtgtccttgtgtcagatgaagagaaataaaaacctcaatggcctgataggttgtctctaaaacaactggtttgcactctgaaaacaaagtcaatgtcatgaatatttgkgagactgtgagagagacagtgacacagcagcgtgtgct

SEQ ID NO: 13266 - DNA, 551 bp, Homo sapiens
aaaacatcttatgtgactttacttgaacttcaaaaattaggcatgagaaatctaaggagctaaaagtcaggtgcatagttakgtgtggggaggaggaagtcagtgttctatatcttgatctaggtgatgattgcacaggtatattcaccatgtaataattcattgatctatatacttataatttgtgctttctattctgaatatatgatagtttacttttaaaatttttaaatgattttcaatttcccaggggaagatttgttttgaagacaccttgagaatggtcaatatgtaattaccttagttccctaacttttatcttatactccaccttggggctgagagggaaacgtgaaaaatttgaattcttaacactatctgtagttcttagatttcataatcgtcccagattttttactttcagataatcccttgcttgtattttccaacaatacatgataaattatagacaaatacaatctcattttctccatttaaactaatgtctttattgccaatcatttctgaaccagccaactgtggtagaactg

SEQ ID NO: 13267 - DNA, 551 bp, Homo sapiens
aaaacatcttatgtgactttacttgaacttcaaaaattaggcatgagaaatctaaggagctaaaagtcaggtgcatagttatgtgtggggaggaggaagtcagtgttctatatcttgatctaggtgatgattgcacaggtatattcaccatgtaataattcattgatctatatacttataatttgtgctttctattctgaatatatgatagtttacttttaaaatttttaaatgattttcaatttccyaggggaagatttgttttgaagacaccttgagaatggtcaatatgtaattaccttagttccctaacttttatcttatactccaccttggggctgagagggaaacgtgaaaaatttgaattcttaacactatctgtagttcttagatttcataatcgtcccagattttttactttcagataatcccttgcttgtattttccaacaatacatgataaattatagacaaatacaatctcattttctccatttaaactaatgtctttattgccaatcatttctgaaccagccaactgtggtagaactg

SEQ ID NO: 13268 - DNA, 551 bp, Homo sapiens
aaaacatcttatgtgactttacttgaacttcaaaaattaggcatgagaaatctaaggagctaaaagtcaggtgcatagttatgtgtggggaggaggaagtcagtgttctatatcttgatctaggtgatgattgcacaggtatattcaccatgtaataattcattgatctatatacttataatttgtgctttctattctgaatatatgatagtttacttttaaaatttttaaatgattttcaatttcccaggggaagatttgttttgaagacaccttgagaatggtcaatatgtaattaccttagttccctaacttttatcttatactccaccttgggkctgagagggaaacgtgaaaaatttgaattcttaacactatctgtagttcttagatttcataatcgtcccagattttttactttcagataatcccttgcttgtattttccaacaatacatgataaattatagacaaatacaatctcattttctccatttaaactaatgtctttattgccaatcatttctgaaccagccaactgtggtagaactg

SEQ ID NO: 13269 - DNA, 551 bp, Homo sapiens
aaaacatcttatgtgactttacttgaacttcaaaaattaggcatgagaaatctaaggagctaaaagtcaggtgcatagttatgtgtggggaggaggaagtcagtgttctatatcttgatctaggtgatgattgcacaggtatattcaccatgtaataattcattgatctatatacttataatttgtgctttctattctgaatatatgatagtttacttttaaaatttttaaatgattttcaatttcccaggggaagatttgttttgaagacaccttgagaatggtcaatatgtaattaccttagttccctaacttttatcttatactccaccttggggytgagagggaaacgtgaaaaatttgaattcttaacactatctgtagttcttagatttcataatcgtcccagattttttactttcagataatcccttgcttgtattttccaacaatacatgataaattatagacaaatacaatctcattttctccatttaaactaatgtctttattgccaatcatttctgaaccagccaactgtggtagaactg

SEQ ID NO: 13270 - DNA, 551 bp, Homo sapiens
aaaacatcttatgtgactttacttgaacttcaaaaattaggcatgagaaatctaaggagctaaaagtcaggtgcatagttatgtgtggggaggaggaagtcagtgttctatatcttgatctaggtgatgattgcacaggtatattcaccatgtaataattcattgatctatatacttataatttgtgctttctattctgaatatatgatagtttacttttaaaatttttaaatgattttcaatttcccaggggaagatttgttttgaagacaccttgagaatggtcaatatgtaattaccttagttccctaacttttatcttatactccaccttggggctgagagggaaacgtgaaaaatttgaattcttaacactatctgtagttcttagatttcataatcgtcccagattttttactttcagwtaatcccttgcttgtattttccaacaatacatgataaattatagacaaatacaatctcattttctccatttaaactaatgtctttattgccaatcatttctgaaccagccaactgtggtagaactg

SEQ ID NO: 13271 - DNA, 986 bp, Homo sapiens
cagctgattcaacccttcttctcattacccaaagctccagtacccttcctactattcctgcagagattaatttatctccaataaccccagtaggaaccaaagctttcctgttacacacaatcaagatgtaattccaagttatgtttgagtatataggaagaaagttcarccatatgtacagaaatggcaatgattttaacctgtaactctacctactaatagccattggaaggcatctaaaagatgtggatagatttcctctaaggaggtgcaggccataccaacaaactgctcaacattgccattttaaaggtgtgggaagtaagagcttgtttccacatacccaccatgagctgagtgagaacaacaggattatgaattggattcacatgtctaaaattgggtcctgcaccaagtccctcgtgatgagtaaaactgagaaaaagaacccagaaacacatccatgacagcttaataggatttaaacaactctatctcattaacttttcaagggaaccctggcaaagtatgaaatttaagcaccactccaggctgagaacagttatctgttgttcatgtcactgcacctgccctatactccaaagacatgggccacagctgcttctcccaaatgtgccctagaatatctaaagggttggctggcacacagcaggagggcattctgttagtgagggatgccccttttgaagctgtgtgtgcatagcaagtgcccagtttttatttagattgcatatttatttggagtaggatgggtagaaattccaacagggctgaagcccttccaagccatatttttgctccaacgtaggtatatccaaagtgaacacgaacctcaatggcagagtgaaaagtggcccaatatgctctatctattgcaatgtgggaagcttctttttcttgtattttcctttattttgatctttttttttttttggcaaaagtaaaaggatagagaagcatgaata

SEQ ID NO: 13272 - DNA, 562 bp, Homo sapiens
ggtaaactaaataacagtgtgcttccatctgcaattttcctgcttaatttgcattgaagttcttttcattctgtagtatgaaatgtatctaatttatgtacaaaggtacaacaatacaaaatatgtaaatgcaagtgtttagccacatctatgctagttgtcatttcaatagttcactattttaagcttttggaaaaaatgctgtaagaaggattattgcacatgcytattggtgtacttgtgcaaaaatttctttaagataatattaggtgccaagtactgtgtttagtgagaaaggtgttattattacatttgcattgtacataaggcaaacagtgacttgcctaagttcacacaactagtgagttccagatctgggatttccacacatcctacctacctagcacaagggccaatattcttaacaacttctatctactccttgctttgtaaaaaattaatatttaaaaatcgaaaaaaatgtatatatatggtgtacaagatgctgttttgatatatgtatacattagggaattgttaaactaattaacgtaccctttac

SEQ ID NO: 13273 - DNA, 348 bp, Homo sapiens
acagtttttcatgtggcatgtccaaagaatcagaagcatcatacagcggtaaagaatgaatgcaagctcaatcacagctatttaaaggtatatatgttaaaatcctcctaggtcataagaagattaagtatactcaggtaaagaattatggttcatgcttgtaaaccaacattttgggaggctgagatgggaggattgcttgagcccagagttccagagtttgaggctagcctgagcaacaaagcaggaccctatctctacaaaaagaaaaaaattaaaaattagctgggcccagyggcacgcatctgtagttcagctattcaggaggctgtgcccaggaggttgaga

SEQ ID NO: 13274 - DNA, 568 bp, Homo sapiens
ggggtctcagagccgcctgctggaagaccaaaactgcaccatgagagaggggagcagaggacacccccgtccttttggtgccacaaattctaagataaattttagaaaggtgaaaacatgagaagtgcacatcttggacaaaagagcagaattatgagctctcagctcagtcaagcttcttcatttgcaaggacagaaaccccctgtggctgggaccraggaggatggggcgttgaaagactgggcatcttgtgtcactccgggcttcacctcgcccagctccccctgcctctgccagccctcccaactcctctgccctgggctcctgcattcccctacagatcctggcagaaacggtctcccacacccatatgcccactgccaccgaactgagagtcctgcctcgcgccttctgccctcaaaagagaatccgactggcatctgttcagctctcctcagcccacgcagacacagaacacatgcttcacacaagtgggcccacggctgtcttggagaccagcatcacgctgaccgccagcatgggaaagccagctccatcctgccggct

SEQ ID NO: 13275 - DNA, 568 bp, Homo sapiens
ggggtctcagagccgcctgctggaagaccaaaactgcaccatgagagaggggagcagaggacacccccgtccttttggtgccacaaattctaagataaattttagaaaggtgaaaacatgagaagtgcacatcttggacaaaagagcagaattatgagctctcagctcagtcaagcttcttcatttgcaaggacagaaaccccctgtggctgggaccaaggaggatggggcgttgaaagactgggcatcttgtgtcactccgggcttcacctcgcccagctccccctgcctctgccagccctcccarctcctctgccctgggctcctgcattcccctacagatcctggcagaaacggtctcccacacccatatgcccactgccaccgaactgagagtcctgcctcgcgccttctgccctcaaaagagaatccgactggcatctgttcagctctcctcagcccacgcagacacagaacacatgcttcacacaagtgggcccacggctgtcttggagaccagcatcacgctgaccgccagcatgggaaagccagctccatcctgccggct

SEQ ID NO: 13276 - DNA, 568 bp, Homo sapiens
ggggtctcagagccgcctgctggaagaccaaaactgcaccatgagagaggggagcagaggacacccccgtccttttggtgccacaaattctaagataaattttagaaaggtgaaaacatgagaagtgcacatcttggacaaaagagcagaattatgagctctcagctcagtcaagcttcttcatttgcaaggacagaaaccccctgtggctgggaccaaggaggatggggcgttgaaagactgggcatcttgtgtcactccgggcttcacctcgcccagctccccctgcctctgccagccctcccaactcctctgccctgggctcctgcattcccctacagatcctggcagaaacggtctcccacacccatatgcccactgccaccgaactgagagtcctgcctcgcgccttctgccctcaaaagagaatccgactggcatctgttcagctctcctcagcccacgcagacacagaacacatgcttcacacaagtgggcccacggctgtcttggagaccagcatcaygctgaccgccagcatgggaaagccagctccatcctgccggct

SEQ ID NO: 13277 - DNA, 568 bp, Homo sapiens
ggggtctcagagccgcctgctggaagaccaaaactgcaccatgagagaggggagcagaggacacccccgtccttttggtgccacaaattctaagataaattttagaaaggtgaaaacatgagaagtgcacatcttggacaaaagagcagaattatgagctctcagctcagtcaagcttcttcatttgcaaggacagaaaccccctgtggctgggaccaaggaggatggggcgttgaaagactgggcatcttgtgtcactccgggcttcacctcgcccagctccccctgcctctgccagccctcccaactcctctgccctgggctcctgcattcccctacagatcctggcagaaacggtctcccacacccatatgcccactgccaccgaactgagagtcctgcctcgcgccttctgccctcaaaagagaatccgactggcatctgttcagctctcctcagcccacgcagacacagaacacatgcttcacacaagtgggcccacggctgtcttggagaccagcatcacgctgaccgccagcrtgggaaagccagctccatcctgccggct

SEQ ID NO: 13278 - DNA, 538 bp, Homo sapiens
cattgctgaaagtttaggactcaagttttaagtgagttaataataactgagatggtttaacgtgagtggatgatgttaatggtaattatggtggtggaagggagctaaatttacaaagaactgtaactgtctcttttatatatttatgtaatgttttagtttcttttttacaccagggttattatttactttaatgattgcaaaaatgtatacaacaaatattttaagtatcataagggaaatggtttccctgtcaagaattaccaattaaaaaatgtcaagaatatagtgtagaatggaatgaatttgtaataacatagatacaggtacttaaaatgattgagctgataatataatcacctagaattactttcttttgaaagtaatacataaaattatatagttcagagaggactcagagccaggatgctttcagatgtcactgcttaacagctgtataactctgtgcaagttactgaaatttatatgcctcagtttcctcatctgtaaaacaaagatagtcatmgttctttcctca

SEQ ID NO: 13279 - DNA, 578 bp, Homo sapiens
tagctctcagctgcagcacttcaggctccatttgtctcaaaggtgggaaaacacattctgagacagagcctctgccataaatttattctggctttggtacaaaggccttagaacctattgtccatggctttgtttaagtgggaggcaatgttaaaacaacccaaggaaagaggtcatggtcccaatcactgtgaagtgttagctttcctggatttctcatcttgggctgagttggaagatgtaggaattctccatcgttgttactcagtaatgggaaaggactcaatctctgtgtaatcatccagctctagacattagagcagcggttctcagactgtggtccctggatcaagtcctgcagcccggcatcctccggatgattctgatgtactcgaaagttgaaggaccgctgggcacagtggctcacgcctgtaatcccarcactttgggaggccaaggtgggtggatcacttgaggtcaggagtttgagaccagcctgaccaacactgtgaaatcccatctctactaaaaatgcaaaaatttgccaggtgtggtggcgggtgcctgtactcccagct

SEQ ID NO: 13280 - DNA, 523 bp, Homo sapiens
ctgaggagggtggatcacctgaggtcaggagttcaagaccagcctggccaacatggtgaaacctcatctctactaaaaatactaaaattagcctggcatggtggcgcacacctgtaatcccagctactcgggaggttgaggcaggagaattgctccaacccaggaggcagaggttgcagtgagccaagatcgcgccactgyactccagcctgggcaacagagtgagactctgtaacaacaacaacaaaaaaagtagtagtaataacagtgtacattataatgcattgtctcatttattctttacaaaaacctacaaggtaggtactatcatgattatcccatttagagatagtaaaagtgagttcataagggtgataagtggcaaacgcaggatttaaactatacctacctgtttccagaatgcctgacctctgcgacatactgcttccctgaaacacatctgaacatgtcattaccctgctaaaaatctcgtaaagattcacacttgcctaaagtaagaaca

SEQ ID NO: 13281 - DNA, 498 bp, Homo sapiens
agacaaacacaacaggaggagacagtgcaatgtttccacagtatacttcactgtgaggacattccctggaggctgctaggcaacccaacaccagtcagcacactctataatcagcccattccctagacattaaacacaccaaggtcaagttttttcacaatacaaagtaatttctcatgtccttcaaagccaaagagatcaggtaaggcaatgcaaaagagactgaatatgacaaagaggaaagaagaataaggtggattaaaaataaataagagaacaatttttaagaaaggaagcaaacrtaagtaccatgtacataatttagaaaaaagttttagccaactaaaaatattccgcaaaacaggatccaaaaagagaaataacataaaggtcatatatacatatatatacacacacatttatatacattatatattaatatatattttatatgcattatatatatttcatttacatatataaatagaatgtgtgtgt

SEQ ID NO: 13282 - DNA, 545 bp, Homo sapiens
gcacatctttgggaaaaagatttctgtttgattgcctctaaagcgtagctcattcacatttaattatcttaagaataggccacttgtaacattaatccacaaagctgaatttataatttgtaagagatggcacctttgaagttgacatttcttttatatcaatgagattgcagctgcagatgaagtgcaaatggcaaattatgcaaaataaaataatcacgaggggaaacttcagttgaatatttctgtttgattaataatctatcagcagataccatctaatttaaatttgcacaaaagcataactgctgttgaaaaattgctgctgtttaacggggacacmaattcacatttctttccctcctcctctttgtgtagccaacgattgcagttacttggttttgaattgggctttttagagttaatgccttgaaaatagaaaaataataaaaagctttccttcatcctatttatgcctattcacctgcttatcatcttcaagtcttttctaggtcctatgagactagaatcattattcagttttg

SEQ ID NO: 13283 - DNA, 782 bp, Homo sapiens
attaatatccatttatattcaatatttcttgtgttaactgtccttacaaattgtctggaagcattttaaaaacagtttgtagacattctcttaaaaatattaatttgcaccmtctgtaatgaaactagttcttcgaacaaaggttaccatcaaccctaacatattttccaattagggggcactgctaggattggtggagtataaacgaataaaattttattatgttggcagagagagaaagtgaaaaaacttttcacttgtaaagactgcattcttttaatccctttttctgctactattaatatataatatacagggcatcttggtttggcaattcatttgaaactttaatattcctattaatactcactttacctccaagtcccttaatttttagaaagcattttatttatttatttatttatttattatttatttatttactttgagacagagtcacactatgccacctaggctggagtgcggtggtgcaatcttggttcactgcaatctccacctcctgggttcaagtgagtctcctgcctcagcctcccaagtagctgggaccacaggtgtgtatcaccacgcccagctaattttttttttttttttttgtatttttagtagagatagggtttcctcatgttggccaggctggtcttgaattcctggcctcaagtgatccacccaccttggcctcccaaagtgctgggattacaggcgtgagccaccgcacctggcccgaaggcatttttaaaataagagtttcttcatttcataga

SEQ ID NO: 13284 - DNA, 782 bp, Homo sapiens
attaatatccatttatattcaatatttcttgtgttaactgtccttacaaattgtctggaagcattttaaaaacagtttgtagacattctcttaaaaatattaatttgcaccatctgtaatgaaactagttsttcgaacaaaggttaccatcaaccctaacatattttccaattagggggcactgctaggattggtggagtataaacgaataaaattttattatgttggcagagagagaaagtgaaaaaacttttcacttgtaaagactgcattcttttaatccctttttctgctactattaatatataatatacagggcatcttggtttggcaattcatttgaaactttaatattcctattaatactcactttacctccaagtcccttaatttttagaaagcattttatttatttatttatttatttattatttatttatttactttgagacagagtcacactatgccacctaggctggagtgcggtggtgcaatcttggttcactgcaatctccacctcctgggttcaagtgagtctcctgcctcagcctcccaagtagctgggaccacaggtgtgtatcaccacgcccagctaattttttttttttttttttgtatttttagtagagatagggtttcctcatgttggccaggctggtcttgaattcctggcctcaagtgatccacccaccttggcctcccaaagtgctgggattacaggcgtgagccaccgcacctggcccgaaggcatttttaaaataagagtttcttcatttcataga

SEQ ID NO: 13285 - DNA, 568 bp, Homo sapiens
aatgtaaagcatttccctaagctattctgtcaaacacagaagtgggtcatgggagcccttaattcatagctagtaagccctcaagttgtggaatctgatgctaactccaagtatatagggtcagaattaaattaaattgtaagacacccaattgatgttcagagagttggagaagtgcttggtgcagaaaaaaaaattcacgcatctggtatccaaagtgttggctgaaagtgtagagaaacagagtgtgttttgctcaaccacggacaattggagacaaatactgcaccttcagcactacatagaacagttatgcagaacacgaacaagaaaacagaagacttgaacaacactgtaaaccaactagacctgagagacatctattcaacacttcaccccaaaacagcagaatacacattctcctgaaacacagaacattctccagaggagaccatatgttaggctataaaacacattccaataaattgaataggactggaatcatatatgttatcagatcacaatggaasgaaattagaagttagtaacagaaaaaaaaattggtaaa

SEQ ID NO: 13286 - DNA, 697 bp, Homo sapiens
aaagggcatcattgcctcatggccacatgtttttcccatgagttctgttctataaaatgccatcactgaaacatgctgtccaggtgactggccagtctgaaggagtctgtaccgatcattagagagtttctaaggcatgttgctggtcacagtggatgcctttccagtaatctaatggctgggctgaggagaatccctacatgaggtaagaagcacatccaaaatactgaaaaagtttaccataggcactgcaaaatttgggttttcgggaggcttttaagccaaaactcagacagttgactatttatctaggacagatagtatgctgtccctatctctaacagtaagaattatgccgttcttgtaatggtagcaagacagctctkgtaaggtttgattgtttcctgtgtctcagcctattcaatggtgaaaaatcaagagagatttaaagtcgttttaaggcgcatattgaatatgagttgtaatccaagtcccatgaagtcaaacagtgtctgatcgtaaggatgcagtagaatctgaagaaaacattagtatgtccaccagcatgagccaggctccccagtccacccaatggactctgtgattattacacctggcagggcagggacaaggaggaccgctgcagcaaagagcttgaggcaacccacaatgaggcatcaaataccattggcttttt

SEQ ID NO: 13287 - DNA, 624 bp, Homo sapiens
tgcagccctttgagggacaatgattaatcattaacagatatctcctctggatatgggtttaccttccttacacagaggcctcctgtaacatcacctctttacttacaacatgattcctctatcactgtgcaattccatgcaatattaactcacaccaaagaacagttgggacaataggttattgacatgatatcatgtcatattaccatgaaccttgaattcaaatgcacttgattatgatggaatggcctaataaaggcccagataagatgccaattcaggcacaacaacctgaattgttgggctttcacattacaagatgttggatatttgctgaacacttgcaaatggttctacatatggtgctagaatatgtaggtacgggaatcaggacggaaagatagtactgactgcccatcattattcccactgacacatttcttggatttgaaattcttaagcccacaaccttacattctagcagcttgtgtttatgatttctacaaartaaaacattctttccaacacttaataaatatttgactaaacttgaagatgaggctgtgtactagatccattgagctttttatctcacctaacaaaggtattagtagaccaacagac

SEQ ID NO: 13288 - DNA, 601 bp, Homo sapiens
  misc_feature (1)...(601): n = A,T,C or G
acaaagaaagctgtagttggaacaccaggacagtacatatatctaccaactctaagcagtaaaaaaactttgagaagagtaatgatgaatggacactaggaatcaaagaaaatgactggtcatttaaacattgtatttaatgtttaaaaggagtgcggtggtggctttctaaaatgcaatttcattgtagattgcttaaaagagaacaggctataaaaggcagaatcaccagaggggagtaactgactgtgtccrtagcaagttccagtggggcaggttagtctgccactggattcctaatgggtggtttgttgttgtttttcaacaggctgaatatgctttccacatttaaaaagatgttttggcaacagaaatccaattttgaatgaatgaaagactcacaacaaggtcttaaaaaaactgaaaagcaaacagaaggaatgaggtgggaattataataattatttttctatataantgataagtttcattgacacaaaagacaccccatcnctgtccctaaaattccccactgcctcagtgtggcttgcagcatcacatccccagatagcgcctgaccaagcgttttccaacattcacc

SEQ ID NO: 13289 - DNA, 1168 bp, Homo sapiens
ttctgtctgcattagctgcgacaacattagtaggctactaatgaaatgaatattttcatttaacatctgtaaactctgaaatgcaagttaatcatttcagagaagagaccagatttrtccacatctgaattcgtattcagaatcaactcctcttctcttctcctgactttgcttactctgaggactgtgaggcctttgggggcaatgtagagtgtgtaaacctggtggcacgacagattgacaggtagcccaggtgtgagacattttgtctgcagacaaccgtcaggagcttgcccagcagcagttttgtgcagagccctgtttggggtgggctaggttgtggggcagtcaggagaacacatactttctatcctcaaggagcttagtgtcctccagctgggtgggtatgactgtagttcttgaaaatgctagaaaatattatgctgagttttatgtgccaactcttagcagagaaagtggagatagctttccggaagaggagagattgattagagcaggaccttgaagcctgggagggtctgagaggtggcgtaggcacagcacagtaccttggactcagctagttctggttttagattcaagctctgcctattattatgtgaccttaggcaagttgcttaaacctttaaatgggggaaaagagctgttatgagaattcaaactgtgcacagctcaacaaacaatatttccctcaggttaaaggtgggaaagaagaacaaataggaaatgaacttctctttgggggacagtagaacagcatcctgataggttagagtatagggaatatataggcttttaggggggaatggtgcctgttttttagttcttgagttatgatattcatctttttccaagaaaacatacagttaatcttctgtttgccctgcagagcaataccctttttatcccactacagtggtggttgacttgtctctccctggctgagtcccagctgtgcctgactaaccgtgtttctcttgtatctaggagtgctcccaccccagcccgttgctgcccagctattggaacactgtataacaccaacacactcgagtctttcaagactgcagataagaagctccttttggaacaagcagcaaatgaggttagctgtgaaaacgtgatgtatgtgtcatatttcctgtgg

SEQ ID NO: 13290 - DNA, 1521 bp, Homo sapiens
caatgaatgacagctattagcaccgtctgattagaacctgcaacgcttccatctgctcaggaccayttattcagcacttagatggttccaggcatgggctgggtgctcagggcaaaaaacagctgagacagcatttttaaactcaacgtgctttctcatatcaacctgaaaccttcatagatatgaagattcagggccacgaattttcagcttttgcacccttttaaacttatacaagatggtggtgtcctttatgcatagtgagttctttttcttccatttagttcctcaggaggcggtgattaaagctcagcagacaggtatttttcatgatattctgattcccgcacagggatcgcatggcatgaatgcttcttgccctggtcggtgctgccctagaatccttgtctgaagtgtggtgctctgtggttgtttttctgcctcccccagagttgaggctccaggcaactgtaatgcagagatgagaccagcacgttggctgccaatctgcccacgacatatctgcatggatcctctctgtccaccccaaggctgccgccgtggttctgagactcagcatgtcaccccgtaaatcctgtaaaagtcctgatggcagcctcctccaagccatcctgattgcgctatggggatgaatcttatcacaggctcggtcatttatcactcctgcccaaactttcagtggacagcggtggtgctgcccccactgggctggcctcattcctctctcaagggcactgtgctctctgctccctctaaccacacacagatggacctcatgtacaccttgtctatgtctcctcagccttggctcagtgtggccccacttcctccagcaccccctgagctctgccccaaatgatggcttcaaaatcagccgtccttcaagaccacatcccggaggctctcctccataaggagccattgaaccctgctctgcactctgcacacccaacactatggccagccccgcagaggcacctccttcttagggcctgagcgtctcgagagggaggaacctcctcaccatcccgcctttccctcctcctgcccctgtcttgaagtctttggagcactgtgtctctcccaaacagaagtgctcaaggaacgtgtgttgaattgtgtagaaacagacagaggggtacaagtcacacttcatgtctgcggtcagctgtagtagactgtttctgccggtgcctgctctacccccgccctgctgtgattgcctgtgctgggctttggaaggagctccacctggagccccgtgagccttttcatgaagtgcaggaggacgccacaggctgtggtttcctcatgatgttctgctacccaggggccgccatacctgtcattcttcgctgtatctgaggggctgtaattagagtcatagccaaagagcacttgccctgcacagctcctgggagaggaggacggcgtttctgtctgcagaattttgaccggttttgggcatggggcaaacaatctttgcaatgggtttatgca

SEQ ID NO: 13291 - DNA, 503 bp, Homo sapiens
ggttaggctttgtgtccctacccaaatctcatcttgaattgtaatccccgtaatccccatgtttcaaggtagagaccaggtggaggtaacttgatcatgcaggggcggtttctcccatgctgttctcctgatagtgagtgagttctcatgagacccgatggttttataaggggctcttcgccccttcgctaggcacttctccttcctgccrccttgtgaagaaggtatctctgcggctcccccttccaccatgattgtaagtttcctgaggcctccccagccatgctgaactgtgagtgaattaaacctgtttcctttacaaattacccagtcttggacagttctttatagcagtatgaaaatggactaatacacacctgaaattggttgatgttatggtcaaagacttcctagttcagacagagggagaaaaggactgtgtagatcagtgaggtctagaaggaaaaatacctttgaagaaacatcatttgttattttcaaaa

SEQ ID NO: 13292 - DNA, 556 bp, Homo sapiens
tttcatggacatcttacctttcttcttgctctgttatccttctctgcttgcagccagagaagtgaagacttaaatgtggtctaggattgtgatttggactgccttatccatgattagaagtaagtggaaaggaggaaaaaacataaggtcttagggaggaatgtttctttttctttttatttttttgagactgagtcttgctctgttgcccaggctggagtgcagtggcacgatcttggctcactgcaacctctgcctctcaggttcaagtgattcttctgcctcagcctccgaagtrgctgggactacaggcacgagccaccacacccagctaatttctgtatttttactagagacggggtttcaccatattagccaagctgatctcaaactcctgaccttatgatctgcccacctcagcctcccaaagtgctgggattacaggtgtgagccaccacgccagcaaggaatagttcttaaactttgtggttattttgtcatcaataaattgggaataatgaattgtggtgatgactaagtcatataacacggggat

SEQ ID NO: 13293 - DNA, 425 bp, Homo sapiens
cacaggagcatggtccttagaatccactttcctggattataactccgtccttgccatttattcatcatggcttttggcagctcagaccattcctcttagcctcagtttcttcatctacacaataagcaggttagagctgataatatgtaaagtcttttgccacagacacttcagcttgttgacagtttttccctgagccaaacttctcagatgttctttcgctaaaaaaaactgcacagcataaaacttaaatgaccaagaacctattagaaaattagtagttgcaaccccaaggaaatgaaaagtttaactagtgtgmaggcagagctggtgtttaaatgggggaaaagcattcacacagaacccttaattggtaactagggcagcccgagttaggcagctaacaagctgaacaattttgatga

SEQ ID NO: 13294 - DNA, 631 bp, Homo sapiens
catccagattaccaagatttttttttattcgtracatgataagagcctttgtatatacagaaactaacttcagaattgactatgtcatgagtagttagaaagtaaggccacaaacaagcaaacaaacaaaaaactgctgaacttaataaaaacacagaaattacagaagacggggagcggcacatctgctccagaaggaattttcaatgaacagcaagaaaaagaaaaaagcttcaccctgaagatttttaagcctggcagagaataaacacaaccattacccaagttcacagctgtaaccttggggagctgaactggaacacagaacagttgccacctgcacagctgaagaaagactaatagcaggaacttaacatcagatcggtgatttcttggctgcagaaaatgtggcatctttcataaagcaagctgttttcctgcttttagtgactccaattctactgaagattgttgttttataatggagaaaaacccttgctggcaacattgcctatatactgatctgtcataaaagactctaacagatgtttgtgcccagtctcccctgtgacagaatattcattgtgggtaatgtttgcagcacattctgcccacgagaagataccagtga

SEQ ID NO: 13295 - DNA, 513 bp, Homo sapiens
tttgttcggggattttatattataaatttgtttttatttattctacacatggttggttgtagtttgtcctccaaaatgaaatgaaattggtattattacagaaagatgactgagtcatattatgatagagactaayttctctgacctagtagactaaaagttttctgtagtctcttaatgagactccttttatagcatttgtatctttgtgcttaattattcttagtataaatatttagaaattgatgcatcgttttacttctatggcatgtcataaagctattttttcaaaaaaattgttttgtgtataatgtcatgcgaaaaagaattcttaaaatgatttaaaagatttagacccccctccgaaaatatcaacaaaatgaattttctaagataataagaaaatgaataaaatccccccgtagcagcaaataattgggcaaggaataaaatccgggtttggaggcagagctgaggaatacagcatgacttggttcacagagcttaccctct

SEQ ID NO: 13296 - DNA, 555 bp, Homo sapiens
ctttagtcttacttcattcctccaatcttctcaataagaattattaaaatacccagtcatggaactgacaactgggtaaaagtaaggttaaaaaaattatgagcaatcatttgatatatgacccgagagattaaaataaagcaataatactatactattaccattattattattattacaaacaaaataataaaatcagagctagtattcattcattgagtgcttggtctggatgttggcagaccatgtgacagacaatttacctacrttactctttaatgtacacgatttataaaataagtatagttatctcattttacagattagaaaaagtgaggtttgtgaaatgaagtagctagctcaagatctctctgctaaaattaaattttgaaaccaagacctaaaatctacaagccaaaattttattgcctcagttcaaggcagtaagtaggactgatgtacttgcaggagttgcatctaaccaaggagaaatgccttttgaaatgtgtttgaccaaaagatgtgatgtctttattgcacattctcaaaaagttg

SEQ ID NO: 13297 - DNA, 533 bp, Homo sapiens
ttaattctcaaattatgttaaatgtctagatccactctaggatgactaaatatatagaactaagtaatacaatttactaaaaagaattgctccctctagtgaagtcacaatattatttcatttcctggcactcctgtactgagtaatttaataaatgttataagtgatgatgactattatgttratgatagtggtctggcctacttttgtgatattaaattttaatgttttctgtgcttgaaaacaggaaagttaataatggttgattacagctgtttactggatattttagaacattacatttaaaaactctgtgttgaaaaagtaatttatttctaaaactcttgagattatttctgaaacactattggtactatgtgatgttgaggcctatgacaaagttgacattagcagagtaaagaggggaattaatgcaattgtcctaataattaaaagtgttctggggaaagtaagtttaactggaaatctaattttagccataatgcctatctttgctctggttaccatatacc

SEQ ID NO: 13298 - DNA, 1154 bp, Homo sapiens
tttgctcattcattcattcaacatgtatggaatgagaaactgctagatgcctggcatggtgccaagcccgaggtgcaacagttagtgagactaagtccctgctgctcttcactgtgaccccattatgacaatactgggtagcaaatgatatgaaaaaggaaaatagaaagtgaggaagcagaaaggaaggagcaaccaacactaactcctttatccaaggggaacatgtgtttgccttcaaaggagagtaactatacttaaatccagaaatgaccaaaacatttcttatgtgccattgggtaaacactgatatgtcttaagacctgaatctgtaaaatcatcttttatagacaaaactaaaggtaacttaaaagaaattatctagatatctagatagctatttgggggggaaagtgrggaggcaattgtccagagaaaagggtacaagtatataaattattgagaaacttgctgagagcatctgttggcaggaacgcaagttcacatttgtgactgagaattaacaatccaacttcaccacgaagactgccagcgcaaattcacggagactccttctaacctacggtgatataagacttcatgatgttcaaggcactttttttctcattatttccatgcaccaaagggttaatcacagaatagtaaattgaggcactgagagaaaatattaaaatcccaacttgactgggaaaattgagggtcagagagccatgctggtaaacagcacacccaggatgagttctccagtttcctaattcctgaccagagctcttctaccaacatgttgcctctgacacttcactgtatgaagaaacaaagcagagagattaaaatctaaatacaaaaaacaagggcttccagttagataaatcagataaatgtagttgaatcacataaatatgatgcaaataagttcgatttctaatgcttccaataccccactaaatatctagaataggttctttgctatgcaagatctcaggttcagaaagaataaactttaaaaaatgacagtgggagcagagcatcttctttgaaggtttcagattttggaggtcagtactttctactgaagtctgaaggaggctcaagggattgtggacaggaaaaatcagtcttgtgaaatctactca

SEQ ID NO: 13299 - DNA, 544 bp, Homo sapiens
agagagtgcctggatttcatgtcagtgaagccawgtcaccatatcatatttttgaatgaactctgagtcagttgaaatagggtaccatctaggtcagtttaagaagagtcagctcagagaaagcaagcataagggaaaatgtcacgtaaactagatcagggaacaaaatcctctccttgtggaaatatcccatgcagtttgttgatacaacttagtatcttattgcctaaaaaaaaatttcttatcattgtttcaaaaaagcaaaatcatggaaaatttttgttgtccaggcaaataaaaggtcattttaatttagctgcaatttcagtgttcctcactaggtggcatttaaatgtcgcctgatgtcattaagcaccatccaaaaagtctgcttcataatctattttcaagacttggtgattctgaaagttttggtttttgtgactttgtttctcaggaaaaaaaatattcctacttaaattttaagtctataattcaatttaaatatgtgtgtgtctcatccaggataggataggttgtcttc

SEQ ID NO: 13300 - DNA, 1158 bp, Homo sapiens
tactcagtcattgtattttaacatcagctattgatttgggcacttaagtgatgttctttaatgaaagaattcacattcaggggttttgttgttgttatctctatttctcttgctctctcatcagccatgcagagcagaatttcagcccatttctcttgagcatcatggaatcagtttggaaagtagggagatgtgtgaggtagtcaagggggaagagcctcgtggtcaagggtgtagtttttggagccagacacagtttgttcaaatccagtttctatcggttaccttaagccatgtcatcttgggcagacttctttaatkgttctaaatatggatttcctcacttgtgagtgggggtgctaattctctctccttcgcttgtagtggtcaaacgaggtgagtaacgtactgggcacatagtgagcgcttggtgatgacaaagacactagatgtttggagggagtaaaccccagtggaaccaatggcactcggggggaatgggctccccagaagatggtgagtgaatgcccagtcccaacctgtgcccagaagttttggggcaaacagcggggcctggttgtcagggatgtagtggaagagacctctcaaagtagtggttgctccagggaccctgcaaatgcttgtcttctaaagttccagggtgtcctagtcctttcaggactgtggttgcatgtggggactgagagagaaggcacatctgttaaccacagagatggaagcccccttcctcagtgggtggcctggtctgttagtcccaccctgtcaaggggagtctcatttgtgtatggctctggctttgagagcatttcatgctctccctggtgaaaacaaacggaaggtcatgcaggttcacacgtgcaattgcagttggggtccaggatattcatccagaggaagatttaaatgaataaaatgctttacctgttgcggattatgtgctccagggaacctgtggttagataatctggggtcaggggtgaagggggctataaatagttgctccgtggctttgctttctcttgatgaaaatgcaaacttgttttctcagcagcaagagcaataaaaatatcttcagaagagctgtctcttttctttttccctgactcgttgagagcagatgatttagaggtatctcta

SEQ ID NO: 13301 - DNA, 521 bp, Homo sapiens
ttggctaataatgatgtgttcgggcaggtttattaattgtaacaaaagtaccagtctggtgtaatctggtgtggggtgttgatagtgggggaggttgtacatgtagggaaagggaaagggggtaaatgggaattttctgtactttcctcttaattttgcttgtaacctaaaactattctggcaaaaaaaaaaaaaaaaaagaraagaaaaaatctattaaaaagaaaaaagcctgccagatgaatgagtgtggaattatgtgacggggattctatgtggtctctgtgataggccatgcatcgtgggaatttgcagggaacatgaaagcctttatgactggctatcttccctcatctttccttggaaaggaccaattcaggaacaataaaaatagttatagccacatctctttttaatcattcacaatgaaaatagctctttttgactctgataagaagcattttcttacacccaagattacctattttattgaaaaaaatgtcaaaaagaaaattagtgct

SEQ ID NO: 13302 - DNA, 568 bp, Homo sapiens
aaaaaatcaaagcaaacaaaatcatcaatacgtttttaaacaagtttaaaatttcagggaaatcatactttacatacatatctgtaacctacttgcctttattaacttcatatcttttattgtcattaaatttgttctacaaaaatttgtaatagctatatagtatttctacacagatgtaacatagtttaggtaatcaaacctctatttttgtccatttatatcattttcaatttctcataagtaacaggaaggtaaacatctttaactgtaaatactttgtaaatacatgattttttggcatgtgtgacaaattcttaggagaaaaactgctgagtcaaatattttcatccacatgtccaatttgtcctgagaagttttgtaaccatttgctatcccaccatgagcaagcrgaggttagatgcctgattagaattagcttgttttgtatcatatgaacaaaaggagaattgtgcaacttattcccaagaaaggccaccaacgtggttggaacagccatctgaaaccttcaaggacaacattccagtagcagttgtttctacaatca

SEQ ID NO: 13303 - DNA, 495 bp, Homo sapiens
atcaaagagtgctaaacctcaaactcctgggctcaagtgattctcctgcctcagcttcctaagtagctgggacaatacatggatggcactgcatcccacccctccatttcctgaaaagttttctgcagacaaagaatgccgattctttcttcctaagatgttttataaaatccacccattaaaacttctaggccttgagttttctttatgtaagtgttttctctgtagaatattaatctatttgatatggttgaacttaagtatttcagtttattattagtcatttgtgattttcttcctctattcttttttctaccatcattgagatttgaatatttttataactgcattttattttattgatttgacttttatctataccttttattttggmattttttggtagttgcaagatgtgaaatatattgagttttcagtgtcagcttacagctaattttgtatcacttaaaggaaaaatagaaactttcaatcaca

SEQ ID NO: 13304 - DNA, 536 bp, Homo sapiens
tatatatagtgtatatatwtatacacacatataaagtattccatcagtaatataatatatcatatatatataataactgctcagtcataaaaaggaatgaattaatggcatttgcagtgacctggatgagattggagactattattctaacagaaataactcaagaatggaaaaccaaacatcgtatgttcttactcatagatgagagataaactatgaggatacaaagtcataataataacacaatggatttggggactcaagggaaaagggtgggaaggcagtgagagagaaaaaactacaaataggtgcagtgtatgcttcccaggtgagggatgcaccaaaatctcacaaatcaccatgaatgatggtcatttaaaatgagcttaagagttactttttgtcaggctaagagagtggagaaaaatatttatgggtggtgggttcaggtgtatcactgcatccaatttcactgactattttatcttgatgtacctgcttttttttcagccaatcttggcagattgaggtactgc

SEQ ID NO: 13305 - DNA, 539 bp, Homo sapiens
ctctgaggagtctccctgccccctgcccaccttccaggcactcagggtccacccctcccatgtctgggctccttctgggatctgcctagcccctgatctggcctcagaacacaggattccaggcattttgttcccagggtatttcctctgcttggctctgagttcctgcagggcaggccagtgmctcatttctttcagggcccagcccagagtctggcccaatgggcaccgagaaaggattgaagaatgaatgaagttggaattgagctgaaccttggatagataaaggagaaaagaagaaagcatttcagagacagaggcaggaacaacatggctggaaagatagggcatacgtgaccgactgtcttgagggatggaaggatctggtttgggagggaggttgacatttgtgccagttctctctctctccctctttatctctgtctctctcaaacctttcctatggtcctgagccagtgctctctcaaacatctgccacagtgtttgtgagtctggtcctcacatcagccctgagaaaa

SEQ ID NO: 13306 - DNA, 539 bp, Homo sapiens
ctctgaggagtctccctgccccctgcccaccttccaggcactcagggtccacccctcccatgtctgggctccttctgggatctgcctagcccctgatctggcctcagaacacaggattccaggcattttgttcccagggtatttcctctgcttggctctgagttcctgcagggcaggccagtgcctcatttctttcagggcccagcccagagtctggcccaatgggcaccgagaaaggattgaagaatgaatgaagttggaattgagctgaaccttggatagataaaggagaaaagaagaaagcatttcagagacagaggcaggaacaacatggctggaaagatagggcayacgtgaccgactgtcttgagggatggaaggatctggtttgggagggaggttgacatttgtgccagttctctctctctccctctttatctctgtctctctcaaacctttcctatggtcctgagccagtgctctctcaaacatctgccacagtgtttgtgagtctggtcctcacatcagccctgagaaaa

SEQ ID NO: 13307 - DNA, 618 bp, Homo sapiens
gagaagaatttgaactctggatatttgatatgtagacatttaccaccctttcaggtatttatatagttttgttttgttttttttaatgcttgagatacgcacaggaataagggaggggagaaatgccaaaaaagcccactttagctgcttcatacctgtgacaccttgggacaagttaaaatctcaaaamcctcttacctacaaaatggaaataccttttcattttgtgtggagattagccagaggtggcttcagttactatcttcacaaaattggtcgaaagtaggtatttcagtgggagctgatagagtcagagaaaagccccttcccctcatcttgcccatcctgaaggtgtagtcaaagctattgcttccatccttgttgttcatgacctgtgtccaggaaatgtctaagcactgacctgccatttaaggccctttcctctgggaaggggagctctcagataaccccctgtgaaatctaacccctacacgcccatgagattagtctgtgctgtcactaagccctcctgtgtggctggcctgcctttccctttccacatctcttccaactcaaactcggctgagggagacttttgactccccacatcattaatcc

SEQ ID NO: 13308 - DNA, 1087 bp, Homo sapiens
tatgaaatattttagactatcacaatcttttttatttataaaaggtcataatctaggagaaatcatcccattacctgttttttgtaagtaattttagtgggacactgctacaccccttcagtctgcatattgttcatggctacttttgtgctgtaattgcagggccgagttattgcaacaaggatcttatggctcacaaagccttacataatactatctggccctttacagaaaagttcacagacccctgctctaggactaaaacacaacattcttcttgcttttgaattacattttatcaattacatactcaaacttacaaactggtaaaatgtggaaagataaaggattacctcacgctaagcatttatattttgaattccaaacactaccacatcaactataattttattttttgtatgtatgcatttagttttattatagcaaagcaacttgcacatttttaaatatttaaaactaagcatcatctttcctttctagggaaacaacaagaaaatttaaaaacaagcaggaacaaaattaaaatcracaaagtcagttccaaataagatcctacaggatcttattgactctcccattgaatagcaggactcaggtcatcattaggagagaagtaatttaaaagcgtcatcttaaactgcaaagatgtccattaaacatgccaaaggagaagccctgttgtctaaatgcccacttaaccaacccaaacatctcaaacccatcctttgctgaccttctataaccccctttttagtttagctttttctacaaataagagaaaatagatacatgttggcaaatgctaactgtccatattcatatagagacagagtgtgctctctgagcccaatacaaaggaagtaaggattttcatcgaaataaaaatttattcagtaaaatggcctttctgaacaagttaacctgaaatctaagaaatacgtatacacaggttctttatacattcagaaaagtagagactaaaaagaagataattttctgaaacattccattagacattatcctctgaattaacctggcttgcctcaccatgccaatagagaaatca

SEQ ID NO: 13309 - DNA, 596 bp, Homo sapiens
ggttttgtgaaaggcaatttttctacaatgaactggtgagaatggtttcaggatgactcaagtgcgttatatttgttgtgtactttatattattattatgttgtaagatataattaattatacaactcaccataatgtaaaatcagtgggagccctgaggttgttttcctgcaactagacagtcctatctgggggttatgggagacagtgacagagcattaggcattagattctcataagaagcatgcagcctagatccctcacatgtgcagttcacaataggactcatgcttctataagaatctaatgccgccgttgatctgacaagagcccgagctcaggtggttatgtgagcgatggggaatagctgtgaatacagatgaagctttgcttgctcaactcctgctgtgcagcccagttcctaacaggccaggaattggtaccagtccatgccccatggactggggacccctgcgttagaggatatggatgtaatatttagatataaaatttgcctttgttttgaatgttattagctagagagaattataggaataattccattttgatgaggycaaagcaagttcttgatttaa

SEQ ID NO: 13310 - DNA, 532 bp, Homo sapiens
tttggcttacttctgaaccctgcttaaaagtttatgatccttttacattttatacagcctagaaaatgttgcagatctttgcataagtatccacatgtcaagcctcatcttcatgccatttactaaagcactttacaaaaaactcgtgtttataagtagcaagagaaaactgccagtttacataattttgtttggagggaagaggtattgagatcttgagttaggggctagcagagaaataatacagcaataaatgcatatttagctgtgcagagaggacttattacactattagatatagcattttggaaaggaatgggttagcaattaactaaaattagaagattaaggaaaatatgagaagtttttggaatatatattactgataagtatatttagcttccttgtatatagaacttctctgagtattaatatgctaatttccaatgtaaatatacagtttagaaaaggatgttatacrttgtagtcactagatgtttttaaatcatggcttctattttcaaagtggtga

SEQ ID NO: 13311 - DNA, 539 bp, Homo sapiens
tgaagcaaccttgtattccttggataaaatcaacttattcataaagtttgcttttttaattattttattcagtttgctagagttttatttagggtgtgtgtgtgtgttcataaattatattagcccaaaattattctctcttcatatttagtattttgtcttatttggtatcatggctgttagactactttcatcagataaactgaaaaatgttctttctgtttcttttttcttcttttcccctcaaagtttgaggtttttcctgaaatattttatatattcaaatacataaaatctttttaggttaagtgataatacccatataaccaccatgaagattggaaaaatacaacattgctaataccacaaagccatctgcctgcccaaaccaaattaatctctttcactctccactgaagtgtaactattaagtagattttgtaaaaatcattctctgctattataattttttgccaactttgtataactccctaaagaatattatacagctttgcctgcttttaaacttrtgtaaattg

SEQ ID NO: 13312 - DNA, 900 bp, Homo sapiens
aaaaaaaaaaaaaagaaattatcagccccagagacccacaagataagccactgcatttaaaactgtttgtggtcactctcagtgcttggggatattaataacaaagtgttgamcacatttttaatccaggtttttaaatttacataaactcgattcacttcagtttttccatagaaaaaatttctttaaaatcctaaagtgcttttaaattttttgggaagtagtaagactattttaaaaactatctatgcatgaatataatacacttatgatatgatcaaagacattaaaactttaggaatcttctatttaaaaaacaatccattccttgaaatatcaaaaatcaaatgctatatggtatccataattctaaggactctataacacatggttttcactacattcactatgtgtgctcatacagtgaatatttaaacaatatggtaaaaaacacaggctcctaagatagcatcttaaaacaagtgattcattaatatttccagataggtttactttaccacatcatttagtaacatcacttatttttttaatctagtataaaatgctttgctagtccactttatctcttactgctatcttcatcctacattaaatgaaacagacatgaattgtcatttaactgactctctaatgtttacttttaccacatacatactggctggaggcgaagacggggatgggaagggaaagggagctggtggttgtctcagttttatcaaagtgatgcagagaaatgggagattaaagtgagcacattaagacaagggtgtaaactcactccattctcaacagcatccagaacataaatcaagaaggtacaatatgcttattacatgaaccaagtcaaagaaatggcagcatctacaaatgctgaaatat

SEQ ID NO: 13313 - DNA, 900 bp, Homo sapiens
aaaaaaaaaaaaaagaaattatcagccccagagacccacaagataagccactgcatttaaaactgtttgtggtcactctcagtgcttggggatattaataacaaagtgttgaccacatttttaatccaggtttttaaatttacataaactcgattcacttcagtttttccatagaaaaaatttctttaaaatcctaaagtgcttttaaattttttgggaagtagtaagactattttaaaaactatctatgcatgaatataatacacttatgatatgaycaaagacattaaaactttaggaatcttctatttaaaaaacaatccattccttgaaatatcaaaaatcaaatgctatatggtatccataattctaaggactctataacacatggttttcactacattcactatgtgtgctcatacagtgaatatttaaacaatatggtaaaaaacacaggctcctaagatagcatcttaaaacaagtgattcattaatatttccagataggtttactttaccacatcatttagtaacatcacttatttttttaatctagtataaaatgctttgctagtccactttatctcttactgctatcttcatcctacattaaatgaaacagacatgaattgtcatttaactgactctctaatgtttacttttaccacatacatactggctggaggcgaagacggggatgggaagggaaagggagctggtggttgtctcagttttatcaaagtgatgcagagaaatgggagattaaagtgagcacattaagacaagggtgtaaactcactccattctcaacagcatccagaacataaatcaagaaggtacaatatgcttattacatgaaccaagtcaaagaaatggcagcatctacaaatgctgaaatat

SEQ ID NO: 13314 - DNA, 517 bp, Homo sapiens
tatattctctatacatattctatatatatatacacacacacacacacacatrtatagtagcctgatatttaaaaaataagattgggactgcgtaaaataagctcacccagacaataggggtacagacatatgtataattcagcaagaactggtaacaaagtgagatatgtcaactctttgtagcatattgttaagtagtattaaaaaacaagtaatttttggttgggtccattgagagaataacattatttttagaatgatctaatggcacaataagcattttagcattttacctgcaaaagcattatagctgtgccagtttctgttccaagaaaaaaatacattggtgtattctctaaaggaggaaattctgacctcaactatgttcagatagctgtggcagataatactctgatcaggtactaagtcatatatctttcacatttccctttgctagttatactcagcatgtggttggaaatggaatcaaagcccagtctggaaatcctgaagtcaa

SEQ ID NO: 13315 - DNA, 511 bp, Homo sapiens
ttacggatgtgaaaagagaggcccaaagagctcaagcaatttgcgctaaatcatrtccctagcagatggaggggtaggattcaaacccagaattcttagccagtacctggcagttcttccacaatcttaacaattaccctccaccaccccttgggccctctgtccccaggagcccggccagccaagactcacatcctcaggcgagtggcaaccaccagaagtggttgtctcagggttagtgccattatttattttcttctttttggtgtcgcttgctgctgtaccaacactagggttggtctggggatgatggtctgtcaactgtggaaaggaagagcagtgatactcatgagaactacaagctcctacagtcacatcctgctttacagtttatactaaatactcttatagaccatctgatttaatgccaccaactgtaggaaatgttgtcacaatcacttagtgactgagagagattgataccatggctgaaaaaaaaggcagtaatgga

SEQ ID NO: 13316 - DNA, 511 bp, Homo sapiens
ttacggatgtgaaaagagaggcccaaagagctcaagcaatttgcgctaaatcatatccctagcagatggaggggtaggattcaaacccagaattcttagccagtacctggcagttcttccacaatcttaacaattaccctccaccaccccttgggccctctgtccccaggagcccggccagccaagactcacatcctcaggcgagtggcaaccaccagaagtggttgtctcagggttagtgccattatttattttcttctttttggtgtcgcttgctgctgtaccaacactagggttggtctggggatgatggtctgtcaactgtggaaaggaagagcagtgatactcatgagaactacaagctcctacagtcacatcctgctttacagtttatactaaatacycttatagaccatctgatttaatgccaccaactgtaggaaatgttgtcacaatcacttagtgactgagagagattgataccatggctgaaaaaaaaggcagtaatgga

SEQ ID NO: 13317 - DNA, 522 bp, Homo sapiens
aaatggctttcaccacctgtgaaatgaccctttttacctaccacatgatttaccagatctttgtttaggtgaacctaggcgaaagcagattgtttcctctacttaggaaatacttcgcacattttcgttgcttataaatttgatgattttaatttgtacagttataatttatgatattgacttgtacagttatatatattttacatataatatatattatatattatatatagttatactatatataattttattttctaaagtaaagaatatcattacacattaacaaaatagatataactgttttctttctactatttgttactggtgtatactgcaaatccctaatggatactgaaattcttatctctaagcccctctatgactatgaaaagaaatgggttcaagtttattttaaaaatcaaagagtgtattaataatattattgtkatcatgtccaattgatactatcattattaaaaagtttaatcacttatttcttgaaggacctaattaggaaat

SEQ ID NO: 13318 - DNA, 522 bp, Homo sapiens
gttataacrtggatgagctctatggacattctttgaagtgaaagaagccatgtggtctacagaacttttcaccttacaaaattaaaactcagctgggcatgatggtgcacacctgtaatcccagcagtctgggaggccgaggcaggcagatcacttgaggtcaggagctcaaaacctgcctgagcaacatagtgaaaccccatctccactacaaatacaaaaattagctgggcatggtggtgcacacccgtagtctcagctacttgggaggctgaggtgggacgatcacttgaacccaggaggtggaggttgcagtgagctgagatcatgccactgaaccccagcctgggtgacagggcaagactctagctcaaaaaaaataaaaaataaataaataaaacagcctggccggatggggttaccagcgaaaccccgtctctactaaaactacaaaaaaaattagctgagcgtggtggtgtatgcatgtaatcccagctactcgggaggctgaggcagaagaac

SEQ ID NO: 13319 - DNA, 522 bp, Homo sapiens
gttataacgtggatgagctctatggacattctttgaagtgaaagaagccatgtggtctacagaacttttcaccttacaaaattaaaactcagctgggcatgatggtgcacayctgtaatcccagcagtctgggaggccgaggcaggcagatcacttgaggtcaggagctcaaaacctgcctgagcaacatagtgaaaccccatctccactacaaatacaaaaattagctgggcatggtggtgcacacccgtagtctcagctacttgggaggctgaggtgggacgatcacttgaacccaggaggtggaggttgcagtgagctgagatcatgccactgaaccccagcctgggtgacagggcaagactctagctcaaaaaaaataaaaaataaataaataaaacagcctggccggatggggttaccagcgaaaccccgtctctactaaaactacaaaaaaaattagctgagcgtggtggtgtatgcatgtaatcccagctactcgggaggctgaggcagaagaac

SEQ ID NO: 13320 - DNA, 522 bp, Homo sapiens
gttataacgtggatgagctctatggacattctttgaagtgaaagaagccatgtggtctacagaacttttcaccttacaaaattaaaactcagctgggcatgatggtgcacacctgtaatcccagcagtctgggaggccgaggcaggcagatcacttgaggtcaggagctcaaaacctgcctgagcaacatagtgaaaccccatctccactacaaatacaaaaattagctgggcatggtggtgcacacccgtagtctcagctacttgggaggctgaggtgggacgatcacttgaacccaggaggtggaggttgcagtgagctgagatcatgccactgaaccccagcctgggtgacagggcaagactctagctcaaaaaaaataaaaaataaataaataaaacagcctggccggatggggttaccagcgaaaccccrtctctactaaaactacaaaaaaaattagctgagcgtggtggtgtatgcatgtaatcccagctactcgggaggctgaggcagaagaac

SEQ ID NO: 13321 - DNA, 500 bp, Homo sapiens
gaggccagagtaggaggattgcttgatctaaggagtttgagaacagcctgagtaaaatagtgagacacycaactctacaaaaaaactaataataattagctgggtgtggtggtgcacacttgtagccccagctacttgggaggctgagacaggaggattgcttgagcccaggtgattgtagctgcagtgagctatgatcatatatcaccacactctaacctgggcaacagagcaagacttggcctcaaaaaataaaataaaaatgaaaaagtacaagttcatattcatgttaggacttattctgataacaaaatgcactatcctatcaagaggaaccccactggtctcattaacattatttagacaaaaatctaaagccatttataagcctcgtctactaaactatcaaagtggggccactatgttagaaaaccacagctgaattatttatctaacatttcctggtattttacttaatgagtaaactgtatgttgatcta

SEQ ID NO: 13322 - DNA, 1089 bp, Homo sapiens
gtagagagagcaaagtgcccagcagccttaaaataagatgccggttgtcattgcagacccttgtatctcacgaggaatgaacaaggggagcctcagaatgctgctgctggtccatggccctgagctgggtcggggaaagaggcagacatggcttggactaaagagctgggaatgacatgagatacacagggatcttcctgatgcagtgggaaacaatttgcttttatttctgaaataaaccctcaagtgaccttgaggcttgagagtgccttttggaaacgatctgtgatacaaaagtcctggcccaaatgggaggggctccagtgtgcaggtgacatcaagggcataggctttggggcctgacagtggagctggcatcccagctctgtctttaatgtctcactctgcctaaattccatcatcttaaacaggggctaataacgataacacttgtcacatagagtccctttgagmattacatgaagaatgtaaaaagtttagcacagggcctggcatctagcaaacactcaataaatcctggagctccaggacaggaatgggagagagacatttctctctaagctttgttatactgcttgaaattttattttatttattttattattattattattctttgcagacaggatctcactctatagctcaggatggaatgcaatggcacattcatagctcactgcaggcttgacctccctggcacaagtgatcctcccacctcagcctcctgagtagctgagactacaggcatgcaccaccatatccagataattttttaaaattttttcttagggacaggtctctctatgttgccagggctgctctcggactcctgggctcaagtgatcttcccagcttggcctctcaaagtgctgggattacaggcatgagccaccacacccagcttgaaatttttagataaagtgtctgtatcacctgttttaaaaattttaatttaaaaagtcagtacctttttaaatgacaaataataattatacctattcatggggtacacagtgatgttttcgtacatataatgtatggtgatcagatcagggtcattagcattca

SEQ ID NO: 13323 - DNA, 544 bp, Homo sapiens
tgaagttggcttgccctttaaatgtctttcattcctcttgagaattaaatcagtttcaatgaggacccttttttgattatttgaacagcagttgggggtaaggagcaaaagaagaaggctcttcacctgcttgtaatagcctattgtcattgtgattgccaacctttcaactcttccmctgtccttaagaattcataaaagagtgacaggtgacagcttccttctcggatggaactccttgcttgagaatcaaatgggactggaagtcgatgcagaggaggctttttatgagcatggctttgagagagccatggccctgccattccctggcacacaggagatacctatcagttggattcacagaggcatatcctccctcttaatgtagtctgcagacatgaggatccttctggtgaacatagggtctacatgggagtcaatggggatgggcaaaagccaaaaattagtgggtcaaaagctgagaatgttagctactgtggcctgtggttgagacaaatgcaggcacaaaggggataggaggtat

SEQ ID NO: 13324 - DNA, 542 bp, Homo sapiens
taattaatattatgccacttaatataaagaaaaataacccacaatttcatacttctccttctctcctagtatttgtgctattattgccattctttttacctttacatagttataaaccttacactgtatcattatcatttttattttaaaaaatcaattatcttttctctctgacaccctgttctaagaactgtagccacctcgtgagtcagccaggcctctcctggatttcctgttcctctagtggaacttgaaaattctctcaatatagtaaattggaaattttatacctcatcccatttgtctttgatctttcaaggctcactgtcctttatttccttayaacaagtgttttgaaagctggcatttcatatattttgtttgtttagtaggaaggtaaatctggtcctttttattaaattttggccttccaaaataagaggagagtagttctttatgtagtgattttttgcaagtgttctaacaggaatttaaatctcatgtggcaatatcaaatatacacacacacagttatgtagctt

SEQ ID NO: 13325 - DNA, 542 bp, Homo sapiens
taattaatattatgccacttaatataaagaaaaataacccacaatttcatacttctccttctctcctagtatttgtgctattattgccattctttttacctttacatagttataaaccttacactgtatcattatcatttttattttaaaaaatcaattatcttttctctctgacaccctgttctaagaactgtagccacctcgtgagtcagccaggcctctcctggatttcctgttcctctagtggaacttgaaaattctctcaatatagtaaattggaaattttatacctcatcccatttgtctttgatctttcaaggctcactgtcctttatttccttacaacaagtgttttgaaagctggcatttcatatattttgtttgtttagtaggaaggtaaatctggtcctttttattamattttggccttccaaaataagaggagagtagttctttatgtagtgattttttgcaagtgttctaacaggaatttaaatctcatgtggcaatatcaaatatacacacacacagttatgtagctt

SEQ ID NO: 13326 - DNA, 1351 bp, Homo sapiens
atggtttggcatatttttgaatggtatctactgaatgaagcaactatatgagtaaaatacactgcacctgttatgaactggcttaaaaaaataccaccaagtgctataaaaaagcaattctactgagtaggtatgaacgttgataagagatattaatatttacagtcaggaaacctgaattgagcaggtgttactaaactaaatggagtgaattcataaacttccagcaatagatcatcttgsagtacatcacttcagataaaaagaaaactttctctagggcaagaaaccaattaatgttctatagttggattttagatctaatatcaccaggtgatactgataagttacactggagaatgtgtatgaatacgtgggcatagttaactttttttcaattaagaacaagtggattgatgtcactctacaggaaaggaatatgttactaggattctaccccatagctatgccacatggtgtcttctacgttgccctaaatgaaaaatgtgatgaagatgcattttattaaaagcttaaagtcttctatgcaatacagcatttatctctttcagatatggaaatgccaattcaaaaggaaaataattacttgtagagaattcatggtgtcctagttgatcctaccttctacacattcttctgatcattgctcttctctccatttttacttctgctacattaattcaacttttaatattttcaaaagtattaaatcaataatttggctctttggagctgccaaaatactcttttctaaaatcaaattgtatccctccctgtattatatcctttagtagctcctctaatgtctcaagggtaatatctgcactttttatcttttggtttttggaccatccctatgatagacacactaatattcccccaaagaagtctctactctgatccccagagcccataaatatgtcaccttatatggcaaaagggtcttgactttgttatcctgaatgatccaggtgagtccaatgtaatcacaaggctcctggtaagcgagaagcaaaaagctcaaaatgaaaaaggagatttaccatttgacccagccatcccattactgggtatatacccaaaggattgtaaatcatgctgctataaagacacatgcacacgtatgtttattgcggcactattcacaatagcaaagacttggaaccaacccaaaagtccatcaatgatagactggattaagaaaatgtggcacatatacaccatggaatactatgcagccataaaaaaagaatgagttcatgtcctttgcagggacatggatgaagctggaaaccatcattctcttcaaactatcgcaaggacaaaaaac

SEQ ID NO: 13327 - DNA, 2843 bp, Homo sapiens
aatgcatggtccctgggtggaatccaggaaggtcagctgttcatccaaggatgagcttgccatgtgtgggcctgagggaatgggggcgcttaggctatgggtttcttaaaggtgaggatggctaaggacatcttggggcccctgtctctctagaaggagggagaagccatggggctctggccctaggtctcaccacattagttctccggtagtgccctccaggcttatcaaagtcgatggggaagtcgtccagggtccaggtgaaggtgaggtccatggtggggtcgtgggaggcatggcactgtagggtcaggttgtcacccaagttgatgtcggcacttgagggggctagagtgattttggttgcatctgccaagaaaaacaaggcccttgggtggatgggggaggaaatgggcccaggccgggtccgcagggcaggctgagaggctctgtcctaaggcccagcaaagagaagaggtggtgtgacccacaggtcccaactgcccaggactgcatgagtgtgtggcaggcagggaggcatgaccagagtctcagtggtggccagggggtggtcccaagcaaaactgaatcctggggtggccttgacaccaaactaggagcaatgtggacacaggagcaggatgatggggaggacagtaccctgaggaggctgagcccccggcctacccacatggcagccctcacctcgcacagataggattccagtgctgttggctttgcccatgaagttctcagcaaagcaggtgtatttgccttcatctgaccggctgatgtttcttatgatcaaggtgccatctggagttacagtcactctgtggcaaggacaaggcagatgtggccaactcaggcatggttgtccctggggctggccaactcctgtgactgttgtcacaggaggggaattggcctccatggagaatgaggaggagcaggaactgtgcagggtggggtgtgggtggtacctgctgctgttgaccaaaatctccgtgcctttgctccagagcaccacggcctttggagctgcccggggctggcaggggataaggatctctcccccgcgggccgcggggatcagacgcctcacgggattcagcctgaagtcaggggcgagtgctagaaggaaaggggagagccacagagaaaagtactgtcacccttgattaagacgttacttggcgtgccctttgaagccacgccatgagtgactcctattagcacctcttccagaatgcatccagaaccaagcccttttttctctggcctaagctatcaaatctccygcctggactattgacaacgcgccccccctccgcccctcaccaccacccctgccaccccacatcagtcttcctgtttctgcaccttccttctacaatcttttctccacccagttgggaatgaacagctttttcaactcacactcagtgaagcccggctcttcacaaataagtctccacctttccaatcgcatcttgctccactctatcccccattcattatgttccaatcacctagcctttttttttctctctctctctcttttgaagttgtgaagtcttttcctgcctccagagctttgcacttgctgtaaatcttgcctggaaattccccagatcttcacgcggctggcttcttaacattcaggtcacagtctaaatgagacttcctcagagaggacttctctgaccaccccacctaacaggcccatctcacgcccatcactctactgggttttcttttcttttctttctttctttctttctttctttttcttttcttttctttcttcttctttttttttttttaaaagacaagtcttgctgtgttgcccaggctggagtgcaatggcacaatctcagttcactgcagcctctgcctccagggctcaagtgattctcctgcctcagcctcctgtgtagctgggactacacgtgtgtgctaccatgcctggctaaattttgtgtttttcatagacatggggtttcaccatgttgcccaggctggtctcaaactcctgagcttgaggagatccactcacccctgcctcccaaagtgctgggattacacaggcatgagccactgcaccctgcctggattttctttatactatatttgatggctagctgaaattatttaattgtttgatttggggtttatttgtccctttccctctactggattgtaagctacttaaaggcagagaccgtatcttttatattcatccctgtgaagtgttgagtaagtagtggttgaatggatgaaggaacgaatgaatgcttcttagcaaagcttcactaaaacctgatgtggtgggtatcactgtgtccattttatggatgaggaaactgaggctcagtgagctcaagtcacacaactaaatattagcactggcttacatttcccgggcacctgctgtatggtgggcaggccctttatgctgtacctctttcatctcacttgttccatacagcagcccaggagggcaggactattattgcctatattttataatcaagaaactgaaacacagaaacactaagtaacttgccaaagctcacatagctgaaagggttgggttacacaaatctgattgatttggtttctgtttttttcactcactgcagcaaacatttactgtgtgccagacatggaacaagtcagagaccctgccctctggcagctgtcaaccctgtgtctcatctcctttcttaaatctctgagttctcctacttagaaactgttggaaaaccaaggaaaatggccacagggtatgtgcatgtgtgtttggaaacacctaaactcagagctctgaaagccaccat

SEQ ID NO: 13328 - DNA, 495 bp, Homo sapiens
agagggaacaaactggcaaggttaaagtactcccttacacacacacacacacacacacacacacacacacacacacacacctttcatgccagaatgactggcagcattggcaaataatgtcaatgaaaggatgggggaaactatcacttatagtgtttatagaaacctaaaatactaatgtttctgctaagaaattaaatagtttggggaaatcaaaaagctaccaatagctgatctatgaaatatgaaaatgaaactgatttttaaaarcaggaaagaaaggccaaaaatctactagaaatttttaaaaatcagcctcaattttattttctgatgtcagactagttattaattagataccatttgtttgcaaaggagcaaaattataactctatcactggaacctatcctcagccacttcagtgcagtttctagcagcactatttggatacaaaaagaatgtggtcagacaatgcccctgaaaaccccctggtt

SEQ ID NO: 13329 - DNA, 540 bp, Homo sapiens
cttccctagtaggtggggtagaacctgtgaatatggtaagataattgctttgttgttaagagtcaatgagatttccatctagtattagtagagtgagaaagaagaaaagaagccaattgcaaatcaatccgcctgcccagaagaggtaaggaataggtgactgaaattaccattgtaacaagatgccattttacctagccacaattcccacctgatgccacctgaacrtgagtactcatttattcatcctttggctcacctgatcctatcaaaaattcagtttaatgctgaccctgtgtggggcatcgggctgtcatgtggtataaaaaacacagcttttgatctcatgatgatagtctaggaagcaaactgaaagcaaaacaaccagtcctaaagaaaatggcactgtggtgagcaattaaaatgctgaggtggtaacgtccagtgttttcgtaaatgtggcagactattatgacaatattagtaattatcacatattcaaataattataataaacaaattatggagaaaggtgctatt

SEQ ID NO: 13330 - DNA, 530 bp, Homo sapiens
tcgctgtttttgcctaggctggagtacaatgatgcgatcacaactcactgcaacctccgtcttcctgattcaagtgattcttctgcctctgcctcctgagtagctgagattacaggcatgtgccaccatgcccggctaattttttttttttttttttttttaatagagacagggtttctccgtgttggtcaggctggtctcgaactgctgacctcaggtgatccgcccacctcagcctcccaaagggctgagattacaggcgtgagccaccacgccctgcccaaactgtcttcttgagtaactaagcttggaacaacttagtaacaagaccacattcctaacacaatagcaagtggaaggggttagaacaggatggatggttgatattttcaagattgccatgccttatatccagtattgcrgggactcacagatctacttatttactgtggtagttttccctctattgtccttttctcaagttattatattgtttccataagagatactagtttgtgaatcattaaaat

SEQ ID NO: 13331 - DNA, 530 bp, Homo sapiens
tcgctgtttttgcctaggctggagtacaatgatgcgatcacaactcactgcaacctccgtcttcctgattcaagtgattcttctgcctctgcctcctgagtagctgagattacaggcatgtgccaccatgcccggctaattttttttttttttttttttttaatagagacagggtttctccgtgttggtcaggctggtctcgaactgctgacctcaggtgatccgcccacctcagcctcccaaagggctgagattacaggcgtgagccaccacgccctgcccaaactgtcttcttgagtaactaagcttggaacaacttagtaacaagaccacattcctaacacaatagcaagtggaaggggttagaacaggatggatggttgatattttcaagattgccatgccttatatccagtattgcagggactcacagatctacttatttactktggtagttttccctctattgtccttttctcaagttattatattgtttccataagagatactagtttgtgaatcattaaaat

SEQ ID NO: 13332 - DNA, 616 bp, Homo sapiens
ctagtcttaactaacttcagcaaggaaagtccttcaccaatcagcccgtccagagattcttgatgggctgtctggtggatttctcaggcaggattgctgatacagtccttgagcaggctggcctggtgcctgggtcagtaggtatatgagtctggtgcttgaatctatggggttgggcctgaagccttggtccactgggcttgcttggcacttaggtccatgggggcggacttgaaacctgtaaccatgggcctggcctgaagcctggctctacagaacttggccaggtgctggggtggcccttaagcctgaacctatgggagccaggttagaacctgggtccacaggggwgttcctgaaggctgggtctgtggatgccagcctggtgcctgggaccatggaggctagcttattgccttcaattatgaatgtagattataaatcattgttctgggaaaggttccatgagctttaccagactaccatggcacattcctaatagagtattttcctaggagtagctttgctggatcatctcagggaatgtgttttcacactattaataggaaactatcatactctccattctagtctttctcgccaggattcctcatct

SEQ ID NO: 13333 - DNA, 592 bp, Homo sapiens
cagttattgtgaagactcgatgatataatacatgtaaagtgctaagagctcaataaatgttagcaattattattaaggtagtatgtacagtacttatgggtcaggttgaatttctaacttatcaatactataattacttgaataattacctcycctgacttttttgtttgtttgtttcagagatcttttcacatttaaaagggaagaagaatgaaagagaagggacatcaggcataattaaataattgctcctccaatatgtctcattacaaaaaccacatgggtcccagaatctctgctcctatggcaagagcatggtatacattccttgaggggctgccaaagacttagttagagcagtaaggacttgcaaaatgtttaccgatgctaatgcacttttaccaaactgggtcatttctgcgtctccaaatttatgagaatgtcaacagtcctccagggtgaaaatatatactgggaaaggaaaacaaaaacaaaaacaaaaacctcaacatatttagtcttaagattgtgcttgaggaactacttcttcctttacttaggccttttgtattattgtcactaataagttaca

SEQ ID NO: 13334 - DNA, 265 bp, Homo sapiens
ctactattttaattttgtcyatgcatctccatttacttcaagcttctagtaaaggtctctgtttctgcactctcccctccacatttctatacgacttttaaaatgtagttttttttcaaatcattttcccccatgatattttctctagtatctctacgccacttaactaaattttcctttgttcataatttgttagaacaaatatttactgagcatctactatgagccagatgaatgttagacttactagaaacacaaccataaa

SEQ ID NO: 13335 - DNA, 1938 bp, Homo sapiens
tgtcactggctctgggaagtcttttcagatcccactcaccacccagctcaggcaaggtctgattctgctgctaaactctcaagcatcctggacttgtcttcygtagcacttaccacaattttaactataactaattaatgagggatacattgcttaattcctctttatttccatgattttgcatgtgccataaagccagaggctctttctgccatgttatgctccatatcccctgcaccctgcagacatctagtgctaacaaataaatagtgaattataaaattaatgatttaatgaagctagtcttttgggaactgcagaaaaatagcagaacaatttaaagacccacttaggaaaaggtatcagcttcaacaacaaattgatgaaaaattaacacaaataataaaatgtattgggtgcttatacaaatctagacagtgtgcaataagttttatgtgcattacctcatttaatcctcacaataactctgaaaggtaggtattatttttatccttttcaacacatgaagaaatgaggcacggagaagtgaagtaacttttccagtgtgacatagaggaaaggtttgaaatcatgcttttacgactcctttgccctctacttttcctctttgattttcattcatgcatatatatttttattactgcaattggtacttttctatttgtgtgtttattaagcccagtaaagatcatttcattaatgtagaactaaatacaatttaatgttgaactttataataaattgtaataattttacataaataaattcagccataagaaaaaaaaaggagtaaaatggggacactgagaattctacactcaaggtatacacttctgctttataaatgaagaaaagttgaaactgccttgatacaaggtaacactgctatgggcctaaagctctgaatctcaaaagtatttaatataaacattaaaaaaaagctgagataaaaaactataccaaatcctaaaatcatttattaggaacaaaacgtattactatccttaataatagagaaatatgataaaaatatatcagactccttaatggtttcaaatcatgcaaaacatcttcattatgtcactttctctttaagccatcacaaaaagatagtctaatctatttcgtctttttaaaatatgctattaccacatgcaatactgagccttagctcttaacgaaggaagaaacgtaaaaattcttacaacatcaactacctattcagtttttttgaaaagctcaacttgcaagcagaagcattctaataagccttaccattttattttatcccatggatattttagggaaaaaggaccacccaccatcctatcttctacttacagatgaaatagacctacagaagttacatgactaattcgatacaagttaagagagtgataacatcattcctgaaatcagaaatgagaactctcaagggcaagactaagaaattccaggccgagcgcggtggctcatgcctgtaatcccagcactttgggaggccgaggcggatggatcacgaggtcaggagatcgacaccatcctggctaacacggcgaaaccccgtctccattaaaaatacaaaaaaataaaccgggcgtggtggcgggcgcctgcagtcccagctactcaggaggctgaggcaggagaatggcgtgaacccgggaggcggagcttgcagggagccgagatcgggccactgcactccaacctgagaagcagagcgagactccatctcaaaaaaaaaaaaaaaaaaaaaaaaaaaattccataatagaaggcagcatgtgctacaaaactgccatgtaactttgggcaagttacttcaactcttgacaatatatttttaaggaaactaaaacccaggagagtctggctttcaagattccttctgtacctttctttatttcacatgca

SEQ ID NO: 13336 - DNA, 578 bp, Homo sapiens
caggcatcaaccaaagctccaaaaggtagacataatgttacagaaaaattgttcctgcctaccaacagataatgtatatagctatttaaaataatctcactagaccagtatatattataaagttacagattcttataatataaatattcagtataaagccaaaaattatcatatcagaattttaaatttaattatttaatcatctatttttgctggtactgtcakatctactttttccaaaagctgaaatttaccctatcacagtaaaagacaacattttccagtatccacatggaggattattttattttttaaattttaactgtagccctagaattgaagactgttatgttatttgttcactttttaaactttgtgcttttaaaaaggaaacaataataatgttcgatgtttaagcatgtagatgcaagacatagcatttaagaatatcaatgtgtgtgcctactatgccttactagctaaatattctactgttgtataacaggatgatttggttatgctgacttcttcagattcctgaacagtccagtaacaatgtctttcctttactgatatca

SEQ ID NO: 13337 - DNA, 578 bp, Homo sapiens
caggcatcaaccaaagctccaaaaggtagacataatgttacagaaaaattgttcctgcctaccaacagataatgtatatagctatttaaaataatctcactagaccagtatatattataaagttacagattcttataatataaatattcagtataaagccaaaaattatcatatcagaattttaaatttaattatttaatcatctatttttgctggtactgtcagatctactttttccaaaagctgaaatttaccctatcacagtaaaagacaacattttccagtatccacatggaggattattttattttttaaattttaactgtagccctagaattgaagactgttatgttatttgttcactttttaaactttgtgcttttaaaaaggaaacaataataatgttcgatgtttaagcatgtagatgcaagacatagcatttaagaatatcaatgtgtgtgcctacyatgccttactagctaaatattctactgttgtataacaggatgatttggttatgctgacttcttcagattcctgaacagtccagtaacaatgtctttcctttactgatatca

SEQ ID NO: 13338 - DNA, 578 bp, Homo sapiens
caggcatcaaccaaagctccaaaaggtagacataatgttacagaaaaattgttcctgcctaccaacagataatgtatatagctatttaaaataatctcactagaccagtatatattataaagttacagattcttataatataaatattcagtataaagccaaaaattatcatatcagaattttaaatttaattatttaatcatctatttttgctggtactgtcagatctactttttccaaaagctgaaatttaccctatcacagtaaaagacaacattttccagtatccacatggaggattattttattttttaaattttaactgtagccctagaattgaagactgttatgttatttgttcactttttaaactttgtgcttttaaaaaggaaacaataataatgttcgatgtttaagcatgtagatgcaagacatagcatttaagaatatcaatgtgtgtgcctactatgccttactagctaaatattctactgttgtataacaggatgatttggttatgytgacttcttcagattcctgaacagtccagtaacaatgtctttcctttactgatatca

SEQ ID NO: 13339 - DNA, 574 bp, Homo sapiens
ccagttcataaaatgcagtattttttctgtttaatctttatcacaaytgtgtttaactgtgtcgcatgagaagcactcaagctgggcacactagtggcttatgccaccagcactttgggaggccaaggtgggtgggtaacttgagctcaggagtttgaagccagcccaggcaactaagcaagatctcgtctctacttaaaaaaataaaaaataaaaaataaaaaaaaagtagctgggcatggtggtgcacacctgtagtcccagctactcgtgaggctgaggtaggaggatccgttctgttaggaggtcgaggctgcagtgagccataatcgtgctgctgcactccagcctgggtgacagagcaagacgctgtctccaaaaaaaaaaagaagcacttaataatatttcttgataaatgaatgaaaacgattaatgattctaaatatagtatcttctattataggactcttcctcttttaaaaatttgaattcactaagttgcttttcctaaaccacacttacttaacattttgcccaaagactcttaaacaaaaaacatttttaaaacatactt

SEQ ID NO: 13340 - DNA, 574 bp, Homo sapiens
ccagttcataaaatgcagtattttttctgtttaatctttatcacaattgtgtttaactgtgtcrcatgagaagcactcaagctgggcacactagtggcttatgccaccagcactttgggaggccaaggtgggtgggtaacttgagctcaggagtttgaagccagcccaggcaactaagcaagatctcgtctctacttaaaaaaataaaaaataaaaaataaaaaaaaagtagctgggcatggtggtgcacacctgtagtcccagctactcgtgaggctgaggtaggaggatccgttctgttaggaggtcgaggctgcagtgagccataatcgtgctgctgcactccagcctgggtgacagagcaagacgctgtctccaaaaaaaaaaagaagcacttaataatatttcttgataaatgaatgaaaacgattaatgattctaaatatagtatcttctattataggactcttcctcttttaaaaatttgaattcactaagttgcttttcctaaaccacacttacttaacattttgcccaaagactcttaaacaaaaaacatttttaaaacatactt

SEQ ID NO: 13341 - DNA, 524 bp, Homo sapiens
caaaccactggactgggaggctgactaggrgggtgcttcagggatcctgctattcagccagaagagctcagctcacagtttttctctcaaactctcaaatccatgctacactgccttttgccatcccctatgaatatcttcaagcaggaagatttcttgcggaagagtagcctggagccttgtctatccaattgcctgctgatttgcgtgcgcatgcactcctcatccctgcgggacagcccaggatccaatccaatgctagttacaccccagcaccctcacttaattcctcagggagcagtcagagtcacggctctagctggaaatcaaagtgacgagtattctgtaattttttttttttttttttgagatagattttcgctcttgttgcccaggatggagtgcaatggcgccatctcggctcactgcaacctctgcctcctgggttcaagcgattctcttgcttcagcctcccaagtagctgggaattacaggggcctaccaccacgcccagctaatttttt

SEQ ID NO: 13342 - DNA, 558 bp, Homo sapiens
gaagagacttagtgaatcctatcaggatggttttcgggggttttttgtttgctttttctctagaagaaaagcagctaaaactctcaaagtctgacctgaactcagtattgaatcaagctgacctttgatgacayaggtcacaaaagctgattccacaagccacacatggtaggcagctctcatatctcagatgactgcagacagcccagtggctgagcagctgaggcgcacatccccactgtgcaggtaggaagactctaccctgctaccagggcctgctagaccacggctgcaggaaacaagggttttgggagaaggaggtagttctaataaaacaccctgaggcacaaatccaaaacgctttttcgcctggatcaaaagactccctgttatcaaagcaaaggttgcaggactgcctttctccaaattccgtaaatcccctgcatcagtaattactaattatcccccaatagctagctatgccctctctcttccacactactaagatccatgattttttgtgcggtgcctggatgccagattaaagaccatatttct

SEQ ID NO: 13343 - DNA, 558 bp, Homo sapiens
gaagagacttagtgaatcctatcaggatggttttcgggggttttttgtttgctttttctctagaagaaaagcagctaaaactctcaaagtctgacctgaactcagtattgaatcaagctgacctttgatgacataggtcacaaaagctgattccacaagccacacatggtaggcagctctcatatctcagatgactgcagacagcccagtggctgagcagctgaggygcacatccccactgtgcaggtaggaagactctaccctgctaccagggcctgctagaccacggctgcaggaaacaagggttttgggagaaggaggtagttctaataaaacaccctgaggcacaaatccaaaacgctttttcgcctggatcaaaagactccctgttatcaaagcaaaggttgcaggactgcctttctccaaattccgtaaatcccctgcatcagtaattactaattatcccccaatagctagctatgccctctctcttccacactactaagatccatgattttttgtgcggtgcctggatgccagattaaagaccatatttct

SEQ ID NO: 13344 - DNA, 555 bp, Homo sapiens
catcagtcattttacttggccctcacattctgttgagaatcttttagcgatcatcaggctatttattattttaaagctgctttctaaatagcggaggcagtgaggcctctccccttcctaacagcaccttacatctgctgacagcttttgtccccagaaaaagcctgacatttggtctctgaagaaaatatgttttctgcctgggaaggatccaggtataggattgagcctgagtattgaaacaaatcttttggtaactgtagccatcaccctgattagattcttagggaaccaaaaaggcagctccacccaggagtaaaatacactgaagggcaatactcccagactacagccctccttcttttgtccctctagggttctcctggctgctccatgcccttctaccctatagagaggcccgtgcccacttaatcagagcacacagccygctcccctatttatgggagaggtttgttgggtgaacagccttgtcctacaaaaaaacaagggaaccttatgaccaaaggtcatctcatgttgaagaaaagctgattc

SEQ ID NO: 13345 - DNA, 517 bp, Homo sapiens
tcagcattaggcttttggtgggagcacgtgggattcttagtccttcttaggctaagcctgtgtacctgagcctctgaggtagggtcttctcattttcctgcccctcctcaatcctgtggctaccaaattctactttgaattggtggaagctcttgggcaaaagagtttccagcttctcctttagtggtrgcagacctccgctttgtattggtgcagaatcgagagaccaagaggcttttctgcctctcccatatatggcctttatttctacttcttccccagtgggtatttgcctgagtcctcttagtaagggagagagttccctctccaagaggcagatgggttttgcttctacctctccccaggaagtaacagaagttcacctaggccctggggatgagagggtttgctgctcctccattgtgagtattaaaaaagttctgagaaaaagccagtgcttcaggtgtcttgccaagtcaacaaatcaacttttgcatgctcagccactgaggtgggc

SEQ ID NO: 13346 - DNA, 567 bp, Homo sapiens
gttgcagtgagccaagatcgtgccactgcactccagcctgggtgacagagtgagaactccgacaaaaaaaaagaaagaaaaagagagagaggaaggaaagaaggaaggaaggaaggaaggaaggaasgaaggaaggaagaaaatgtctagggctgaagtatggggaggaagttccagaagatgagaattaagagcaaaaatttaagagtcagacagacctgagtttgaaacttgacctaccacttaaagactatgtgactttggatagttgagtaagccttttaaactgcattttatcagtctgtcaaatagaagtattcatgcctactcctcagggttgttgtgaggattaaatgagataatctaagtaaggcacttagctaaacacatctggaacacatctgtgctgaatacataatggctgttactactgatagtaatggttctccatcacagagtagtagtagcactacacatcctctgcagccctattcatttgggacttttctagaaacctgaaggagccagagggtcacatgctttaggaaaacatttgtctccctgtgg

SEQ ID NO: 13347 - DNA, 1889 bp, Homo sapiens
tctttttcccaagcaaattatatgccctggggaatataaagttgtttcataatattgggctaatatttagtaatgtgtagacattgccaaccctttctcaagaatcaattttataacaaatactctgcctgaatgttgaaatgattaaaaaaatctatagtgtagtaatcccaaaatcagatgattcagatattaatccttcattttccaagtaagggtcatatttaccaactctatttccagggatacaaattttgtcactatacttatatttttaggttctcaaaagcaacagagtaaccaggacacaaaactagcattagtcaaattagcaatttttaaaagacactgttgccagaagtatcttgctcccaagatatgtctgcctttcattctctttcattgacacaaacattgagttataattcaccttttcacacatttcatctgctgagcctgacacaaacagtacaggctcttttaaacgaaagaggtcttcatctctgagtttatgctgctgctttggatggtgcagtgggtaagaaatacaaatgagaccccgaacaaaatcatcaccatcatctggctcaatgtgacacattacagaagcagctgctcttgagcccattgaacgacctaaaatcaattaaaattaagttcagtttgaaatataaactttcacataaagtagcagtgatggtgtggcaaattggatcttttactgttcatcatatctgtttaccaacaaattaactccaaaaggcagcaattaacaagttgcaataccaggccaggcacggtggctcacacctgtaatcccagcactttgggaggcctaggtgggcagactgcctgaggtcaagagtttgagaccagcctgaccaacatggcaaaaccctatctctactaaaaacacaaaaattagccaggcatggtggtgcacacctatagtcccagctacttgggaggctgaggcaggagaatcacttgaatcccagaggtggaggctgcagtgagccgagatggcgccactgcactccagcctgggtgacagagcaagactctgtctcaaaaaaaaagctaaaaattgatcttaaatgctaaaaaaataaaaggcaattatttttctaaagaacacttaaaaggacaaggacaatcattgtaaaggaatcatcatatgcaggatgatgattcagggatatgaataaaaggagagaggctcagattataatacatatacatgaggttcaagtttgctctaagtatataaagtgctttaacattaaaaaggtgacttaccaaaacaacaaaaaaaatccttaaattagcttcctatgatcaactaattttaattctccattacctattcctatattaaaacaggtaattaacaagtattcacaagtattgcacttacctccaagaaaaacacctgcaagtttgtattctcctgatgtcttcaggtaattctagaaaaataaaaaaatmatcagttcttcacctataaaatattccactggaaaggcaagatatattgtttctcatcattactgaaatgtatgaaaatctatgcaaagataaccagaaaatcttaagggatttttcttaaaagaagtaagcagtccttcctcttctggtcatgccttcactattaaatcacatgttaggtaatacaggcaaatatgtgagaaaaaaagtcaatctacctttactaaaatatttaagcactaaactattttttagagaattattttttaaaaaggccagcaaaggcttccaactaataccaaatttgataatgttaacatctaaagttctaaaaaacttattagtaagcttgaaattatttagatcaggggtgttcaatcttttggtttctctgggccaca

SEQ ID NO: 13348 - DNA, 527 bp, Homo sapiens
taacccttttttgatgagtgtctttgaagttccaatgagatacatgtatattgctgaacctacacatatgtatatatctttatgctttgctaacaatttcaaggatctcctagactttgttcagtaaagtcttctaggtgaagaagagagagccccttacagctctctcactgctatcctaggtcaattagattagtctggtaattaagtggttttttgtgaaccagtaactgtrttgaaagtcaaatatcaacaattcaggaaaactgtctttgacttctttatttggaaatattctatgaagagagaatttttaatcaccacataggactgatgttttatttgtagtttgatcaccaggtaactgcttcattcatgcatttcatttatttttactatcattacctcgctttacataataatatttaacaattactgtaatcagaacactattcacactttaaccaagtgtcttttatgacactcctgagaaagagatatctcttctggataaccaagccagagaa

SEQ ID NO: 13349 - DNA, 1249 bp, Homo sapiens
acacaaagtatcagtattaccacagtcattgcctttctgcattgcaccaaaatctcctgttcatggaattgtgtcacagattagactgcattcctcaagtgaagagccacatgttattaaactttgctatcccattgtctcatataggatctgagaaggtgcttaataattgggagccaaacagaaatgaaaggtaaaatgagataggtttgctacccatcctcaaatggcatgagtcctataagtgagttatgcagacatttagtaaaattacaaccacgaataatttttaaaagaaaataaatagtagaaaaactaccttctaggtttcctttaggtctatgctcctggctatttcaactaaccatatatttagtttgaaacgactaggaaaaaaaaatgtagtctcttagggaactatttaatactaagagataataatttatcttgaaagaattaacacagctcctaagtgctttatatattctcaagaagtagcttatgttgcaggagtctaccttcttaaaacttaatttttctacacatgaaattgttattttagtttctttacttaaagagacctttagaacagtcagagtttttcactctctaagctacattttgttgtcaaattgtattttacatgaatactgcagaagcttcacattgcacccgtagggaaagaatctcatcccatctccagcccaagaaggattaatcacagataagtataatacaaaactatagccttttataacagcactaaaacttcattacataaacagagtgccaagaactttcagaaataaaaagaagctctcatactgaagtttacattacaaataaaacctccctccataatgaaattctgtaagcaaattatatttgggagtacgtagtcaaacacctaccacaaaaccatgtatcacatctggaggaggctgtcacacccaacttcagcttttttggatcaatgtttcttttatcttctggtttcccttttatttaattttccttataaaatctakaactatctactttccttagtatatgagccttaagtaagacacaattcattttccacagtgctgaaataaactttgttgcatgtctattttaaaaacatttatgacaccaagtaccttccaaccaccgaatactgcataagtaccttcgtaattcatcatgtgaacaattacatattaactaataatttagtaatattggaagcatacatgtaagtatgtac

SEQ ID NO: 13350 - DNA, 880 bp, Homo sapiens
tgataactaagtcctaatattcatattgaatatattaggcttacatgtacttaagtgtatagtctatctatattatacatgtacacacacatatacaaacagataaaacacacacatgcttttctcttacatttcaaccaccatcagtcttacagaattttagataagatggaaactwtctttaactggcatgcatatcctgggaaaaattattttttactacctagccagaaagatgtatatttaaagccatttaaaataaagcagtgtgtagagggaaatttatagcactaaatacccacaagagaaagcaggaaagatctaaaatcaacacctaacatcacaattaaaagaactagagaagcaagagcaaacacattcaaaagctagcagaaggcaagaaataactaagatcagagcagaactgaaggagatagagacacacacacacacaaaaaaaaaaacttcagaaaatcaatgaaaccaggagctggttttttgaaaagatcaacaaaattgatagacgactagcaagactaataaagaagaaaagagagaagaatcaaatagatgcaataaaaaattataaaggggatatccccaccgatcccacagaaatacaaactaccatcagagaatactataaacacctttacgcaaataaactagaaaatctagaagaaatgtagaaattcctggacacatacccacttcctaagactaaaccaggaagaagttgaatccctaaatagaccaataacaggctctgaaattgaggcaataattaatagcctaccaaccaaccaaagtccaggaccagatggattctcagctgaattctaccagaggtacaaagagaagctggtaccattctttctga

SEQ ID NO: 13351 - DNA, 546 bp, Homo sapiens
tgtttttgatgaatattttgcttttccaatgtattagtacttcccaattaaatgttgtaattatgcattttaatcagtttcaatttgtgagaagtggtacattaacctcatctacagccctttcttttaagggtgctgctgataataaagcctagcccattcttgacaagttatyttgactctaactttgtttttcctttgttaatgcaaaattagggaaaatcttgcctactctgaaagaatttcagagactctgcacaaaccagacagcctgtcttgggccatgctaccaaaagtgttcacagtggctgatgtcattttttggtggttttatctcacaattgtactggttcccatgaggaaatgaataaatgccttatatggaatatatagataaaaaataggaccttgaattacattatatttaattttaccaatatttttaaaatattcatttcaatttcagtcatttttctttttatgtactacagatatgtttaaaacaataattttaaaaatatcattagagttcacaattttatattt

SEQ ID NO: 13352 - DNA, 525 bp, Homo sapiens
caccagaaccaagactgcgttttcctggaaagctaagagagaggtcagcttcgggaggcagtggaactaccttcctggtctttgctggcctctagcacgcggtcctcggtgaccgaaatcctgggggaaccttagggatggggcgttttctgagactcagccagaggcaaagcagccgcatctgcgcgtaagatcacgtttgctttgctcctgagcagagactgggtggcacaaaagtaatatgagtatcaagtttcccctcagagccaagtggagcccaggaaagacccaagtgcttgagcttccggccctggcaagggcatctygttatatggacagcctggggccccttgccccagcattcccctccccacccgggacgcaccctggccccgcttctagagaaggacccaaaaaatcagctgtttccgccagttccgccacgttccccacatggcgtcctgaccagtgacatcaccggaggctgtctcgtctcaacgtgaatatttttaaaaatacgtcccg

SEQ ID NO: 13353 - DNA, 530 bp, Homo sapiens
tcaagagttgcagactatccagataaatgagataacagcagaagtcacatatctaccatctgtgcaacacaacttttacactgttcaatgtcagtgctgcctctgaatcccggctagagatcagtttgagactggacccgtttaattagctggcttctttaaatcctccctttcaaagtaaattctaggaaagatattttgaaaagttagtagcactcttgtcctcaaatgctctaaagcaggagccacaaataggcattatcaaatagattagcagcaaagtaccagtgacattttataaccagtgcttgccagtgcttttgagattaggagtggcagaaagggaaaggattagaaaactctcgtttaaacaatgagctttgcctgtctctaataagctgcttcctttcttgcctgggagtttcctaggaaataagctgcctgtgacgcagcatgggtgacatcagcwgctttatctttttgcctgcttcagtgaacaggcactgtgcaaactatgtctactagtaaat

SEQ ID NO: 13354 - DNA, 525 bp, Homo sapiens
agtcaccacagggcatgatacatcaatcattatgcctaagtccattattcttcattaaataacttccatcagggaataatgtcccacacatagtgactaggtaggtgaggattctcttaaggttactgaacatgattgacaacattacatactaaccaattctcctagagaacttaaccatttcttgctgttgtatttcctgttgtattttagtgtctccatcattttcctttgtcatactcaccaaatgagttacacaatggtcagtatgccaaactaaggaaaatgcacatgtatcattagttttgttgccaagagtggacactgatgagtgtcataatgtcagcrttggattctgcctagaaacaaatactacagacacaatcctggaagctacgactgttcatgtcaggaactgcatctgctagttgtcccaggtgactgctaaagaagcctggtcaataaccctccagaaaaaattaaggtccatgacaatatatgatagttcaaaaatgatatatttcc

SEQ ID NO: 13355 - DNA, 547 bp, Homo sapiens
gcctgcagaagacctaagcctaaggcttactctttctttactgaaatggatgaatatcacagactagcaccaaacgaagacmctttccttgatgtaatcagaagtaaagagcaagcaaagtggggaaagaggaataacataacttaggacagccgtctgctgtgacaactcattacacactgagcatctgtctattcaccaaacttgaaacatatctcaaaatgtatttcaaggaatcaagacaaaagccaactgaatgagacttgataaccagaaatgccttcctttagagataacaaagtgtttattagtacgcaacttcttggcacgaccaaaggcagactgcagtgcacttactttttgcttgcctcacagacatctgtaatattggagaaaagatggtgcctctcggttttagtcattgtatcactcagttctttagaatttttaaacattcgtatcaagatctccaagctgagtaaatatgaatgttcagaggatatgacttcaaagatagcctggtaagaaggaaaaagaaatgtattat

SEQ ID NO: 13356 - DNA, 547 bp, Homo sapiens
gcctgcagaagacctaagcctaaggcttactctttctttactgaaatggatgaatatcacagactagcaccaaacgaagacactttccttgatgtaatcagaagtaaagagcaagcaaagtggggaaagaggaataacataacttaggacagccgtctgctgtgacaactcattacacactgagcatctgtctatycaccaaacttgaaacatatctcaaaatgtatttcaaggaatcaagacaaaagccaactgaatgagacttgataaccagaaatgccttcctttagagataacaaagtgtttattagtacgcaacttcttggcacgaccaaaggcagactgcagtgcacttactttttgcttgcctcacagacatctgtaatattggagaaaagatggtgcctctcggttttagtcattgtatcactcagttctttagaatttttaaacattcgtatcaagatctccaagctgagtaaatatgaatgttcagaggatatgacttcaaagatagcctggtaagaaggaaaaagaaatgtattat

SEQ ID NO: 13357 - DNA, 572 bp, Homo sapiens
tgtctccattcgtgggaaagaaaatataatataccagtttctaaaacctatgagtcttacttgatacataaagtgaaagaaattaaaattgtacaggctcctttttcgtatttatttatttattgagataragtctcactctgtcgctcagactggagtgcagtggtgctatctcagctcactgcagcctccaccttctgggttcaagcgattctcctgcctcagcctcctgaggatgaggagctgagattataggcgtgcaccacagtgcctggctaatatttgtatttttagtggagagggggtttcaccatgttggtcaggctggtctggaactcctgacctcaggcgatccgctcaccttagcctcccaaagtgctgggattacagacgtgagccaccatgtccggcctcatttttaaaatatacatttcataccagcttcagctgggtacaaatgggaacatgtagacagccaaagcaacactcctttaaacacacagacagccaaagcaacctcatttgaactttcttattcctcactggtttaaatttcttatttaaatatgtca

SEQ ID NO: 13358 - DNA, 572 bp, Homo sapiens
tgtctccattcgtgggaaagaaaatataatataccagtttctaaaacctatgagtcttacttgatacataaagtgaaagaaattaaaattgtacaggctcctttttcgtatttatttatttattgagatagagtctcactctgtcgctcagactggagtgcagtggtgctatctcagctcactgcagcctccaccttctgggttcaagcgattctcctgcctcagcctcctgaggatgaggagctgagattataggcgtgcaccacagtgcctggctaatatttgtatttttagtggagagggggtttcaccatgttggtcaggctggtctggaactcctgacctcaggcgatccgctcaccttagcctcccaaagtgctgggattacagacgtgagccaccatgtccggcctcatttttaaaatatacatttcataccagcttcagctgggtacaaatgggaacatgtagacagccaaagcaacactcctttaaacacacagacagccaaagcmacctcatttgaactttcttattcctcactggtttaaatttcttatttaaatatgtca

SEQ ID NO: 13359 - DNA, 661 bp, Homo sapiens
caactggcagccaccaagagctgttagcttttgttctttgaattgtaggaatgagataagcaattgagcagccactttgttcaacgtgttctagtatgagctcactgtatgccttgtacggacgctttacctctctaaacagtgatttccttgttgctttgttttttgttttgtgtttgctgtaaaatatttaatacatgcatgtagtaaaaattgggactgcacaaaagtaaaaaaaatctctgtcactcttgtctctagtttccaagttggcccgctagaggcgtccactgttaacagtttgttgtattttataaattttcagatgtatggtagacattagtaaacatatatatccctacacatactayacactggcaccctataacactcctctgttccttacaaattaccttaaatacaattcatttaatgccggtacttatagaactaccatatatttttaatagctgtagagcattaggtagatcaaataaaattgccatttttatgagtcaaaagcaatcaaatatcaggaatttcatatggtttcacctaatattacataattcattagcaagtttcctattaacagacatttaaattatttattcgcaaaatctgagcaccaatggaaaaactgtaaaattccttccagctc

SEQ ID NO: 13360 - DNA, 1656 bp, Homo sapiens
gcaactggggcagtaatttcaatgaaaaaacatcttggaattaaaaattcatttattgtaaaaacccattcttaccaaggtcatttgcttccactgtattttttgtgaatcttattagtaaaaagtgaaatatgaactttgaaatttctaagtgaaggaagaaatcacgatgcaaacacaaataacacctagatttgagttgtattttcctgagtgagcctgttatctatataggggaaagtatgtcaagttagaccacagagaagaccatggagaagagtccatgtagatggacttttgcctttggattatcttattctagactccatgtgtcattttaaaaaagaacactaatcttagatgtgaatttctctaaatagcagatagtgttgtaaaatatttttaatcaataatctttgatacagctctgccttaaaaccaactactttaataataatgattggaaaaccaattacatgctgcttacataatatctatgctatgtgttcttaatattttttatgccacagaatcctctgctttctggtaaagattttggtctcctttctagaataatgttttaaaaaatgcataaaataaagtatatmgggtaataaagaaaataaaaaaatagtaacagaatactgaacaaagttgtaatatactcacatgtgcttttatattaataattatatgacaagatatagtggctggtatgatcattagtataattttaaagtagtaatgaatgtaaatagtatttcaagatatcttcatgaactgtaatcggataggaaaactctgtgagtgttattagtgacaatgtttcagatactgctaataatattgtagtttgttgcctatacccatatttgaagaaaatataaatttcagtaagggcttaatgaaaataaagatgtaaatttttcccatccaacttcccagaccccttaaattccatcaagagaccattcgggggcttgatgcctttttccagaaaactgaaaggtgattttggctaacagctttcctcttgggaaggtttagtcttatggatactactatactagtttcttaactcttttactactgaatgaatatgttcggggtagtagtcaaaacataaaacaagtggtttagtataggcagctaccatcaggacctatagggatccaggaagaaatgcctggaaagcccctgccatgccaggatttaacccctctgatactgaatttctttagctacttacacataagtacttcaacattttagtaactgttataagctgcaacaccagatgaatggcagccagccctggataggagtaacatttaggattggggcatatttagatgcacaagttttggcccagataacatccagtacctcacctgaataagaagtctaggaggggtcagtggggagaatgaagggagaatgctcacgaacagtgaagtaagttgtctacttctgaagagcctactctttctgtgctaactcctctgagagggtttctgttgctgtgggactgccgatagcagagagatttgtagtggtctgttccctaagtagagctgtccacagattacttgattgttttaagaggtagctgaactttcttagtctgcagccagaaattgactatttcttctttaa

SEQ ID NO: 13361 - DNA, 577 bp, Homo sapiens
tatgtattcattcctcaggattttgagtgaaactccaagttttatttacactcgcaaagcttctacaaatttgtaaagccacaaaactcaaggctgactctaaaatctttagacatgccattccaatttggtggcaatcagagttcaggtcatatttatgtggcttcttagtcccagcaatatttaaacttcaaatgctgagcatcgtatgtacaagcatgatgcagtgcaacctgaacctggaaaaaaaaacactccagcacctttgattgtcctgttgattgcagagtggtgaacccatgtacactgacttttcaatcaaccactttttgcctcagtcggctcagaaagagaacttcagctaaataaatatttctgacaattgacctgcagtgcmacaagacgctcacaaaagaaaaaggaaaagatacatctaaactgcctgtcagcttttctttttctgatagaaagtagagcttcagatactctgagaaagattccaatttgtacaatttgtacatactggtggtagcagaaaataaagccaaactataagggagttcaaagtgtcactcat

SEQ ID NO: 13362 - DNA, 614 bp, Homo sapiens
gtaaggtttgtcctcacttataattgggtagattgtacatagctaaagagtccacattgcaggttagaagaaaaaacttgacttttggcttggttttataaaattaagaatgctgcaaattcattatttatttttctttagccacccacttcctgaccaagtgttgaagtcctgacccttgaaggtctaactctattactttccactaattccttacaatggttaggactgcttactaagtaaatcccaagttagttaaaataattttctaaagtcagtctcgattatttataaaaatgtccatacttcagaataactcacttttatttacatttktatttatgtataggatcacaagcaaactcctaaactcagagctagaggagactcaagagcaatgagtcatcccctcattttataggtgaggaaagatttccaagacaggttgaaatgactgcttaatattagtcatatagaatgccttaaaattctaggacaagaatccaggacttagaattaatgaaacatatttgagcatttacacagtcacatagcatttggtatttttttttaaatttaaataacattgaaaagtataaataattatttgtatt

SEQ ID NO: 13363 - DNA, 537 bp, Homo sapiens
attgcctcatacaaaattcagaatctctcattcttcctggcagtttcatttgtgttttactgaacactgactctttaaaagatttrcattgatttttaaatgattgtactctcatagatgatacttaatggttgtagccttgtgctttcatgggagacctttcatcaccttatgtaccttgttgttcacttatatctgaatctcttgttttttttttttttaatgtgttctgatcacaacattcagacaatgtgagcaaaaatgtttggtaattaggttcctcaataggaaataagttccgtgctgaacttccaaatgactaccctcataattttataaagctagcttgaaataataccttagtaagcaccattttgaactattttttctccaaatatttaaaattagtctgaaaatactcaatatattttgaatctcaacatgataaaacattcaatttgaacagttgaggcctaaggttaataattttatgttgtgatatttcacacatattatggaaaatggctgcatagcaat

SEQ ID NO: 13364 - DNA, 637 bp, Homo sapiens
gccaggatcttttctaagggatcattagtttgttgtaggtttcaggactcatttgtgattggatctctatgtatgaatgaagctcagtttatttttgagggatgccaaatactagagaaagagtaggctaaataaagaagtccaggccgggtgtggtggctcatgcctgtaatcccagcactttgggaagccaaggcgggcagatcaggaggtcaggagttcgagactagcctgaccaacatggtgaaaccccatctttattaaaaatacaaaaattagccaggcttggtggtgggcacctgtaatcccagctactcaggaggctgaggcaggagaattgcttgaacccaggaggcagargttgcagtgagccaagatcacgctattgcactccagcctgggcaacagagcgagactgtctaaaaaaaaaaaaatgtgtgtgtgtgtgtgtttgtgtgtgtgtgtgtgtatttagaaatgcagatgtgggctaggggtggtggctcatgcctgtaatcccagcactttgggaggctgaggcaggtgaattgcttgagcccaggagtttcagaccagcctgggcaacatggcgaaaccccatctctaaaaaaagtataaaaataagctgggcatggtg

SEQ ID NO: 13365 - DNA, 596 bp, Homo sapiens
tataaaaaattagccgggcgtggtggtgggtgcctgtagtcccagctattcaggaggctgaggcaggagaacggcgtgaacccgggaggcggagcttgcaatgagccgagatcgcgccagtgagcgagactctgtctcaaaaaaaaaaaaaaacaaacaaaaaaacaaacaagagtccctttgtgtcaacaaatgaaattaaaagaaaaatctggggtaataagctttatgaaacatagccagctttatgtgactttttttttttttttcttttttgagatggagtctcaatctgtcgcccaggctggagtgcagtggcgcagtcttggctcactgcaacctccctctcccaggttcaagtgattctcctgcgtcagcctcccaagtagctgsgattacaggtgcacacctatgtggcctttttgaatcagtattggttagtgaaattctaaggcatcctttcccactctcaccctccatcccccaaatttatcatttttaaaagaaaacacaagacattagagccaacattgccaatgttgtattataatcctaaatatgatccataaattagaggataaagcgttgtgaaaatt

SEQ ID NO: 13366 - DNA, 695 bp, Homo sapiens
cacagagtggctgagttcttggctcaggatttcacaaggctgcaatcagggcatcaagtggctatattctcatctaccacttgggcttctcttccaagctcacatggctgtggcagaattcagttccttgtggtggtgggattaaggctcccatttccttggaggcagtcagcctgggtctgccctcagytcctggaggccacccacattccctgccacacggcccctccaacttcaaggttggaaatggaagactcttctccacatcaaatccctctcacactctgaatatctctcacccagaaaagctcacgccctctgaagggatcacctgattatgtcaggcacacccagcagaatcacctttaaagtcaaccgtggcatgtaacataacctaaacatggcagtgactgtccgatcatattcacagctcacctccacacccaagggatgggagggttacacaaggcatgctcaccagcgggtgggaatcttgggggctatcttagaattctgcctaccgtacccccactggagtatttgcctgtcttgttatctctgcatcccgagacctggtatactacctgcaaccacatacagtacatgcagaaaatgattgtactacagagtgcagtgtggtcaaccaatgtgactgctcagcaactaaagatgatcaaagcccaggagccccacca

SEQ ID NO: 13367 - DNA, 553 bp, Homo sapiens
taaatatttggcatctactattatttcaagaaatgtagtctaatattaaaaggtctggttgtcccaatgcrtggttgagaaggatgctatctggtttgaaatcatcatggatgaaatcatttatttattcattcattcaaccctcaaaaatgtgctgagtgcctgctatatgccaggcaatgcacaggaacaccttgggatagattttctctgccactaggagagactgaaggggacccctgggttctagagaagagcctgtcgccagctctcagcaggcttttgttttgtttttttggtttttggtttttttgttgctgttgagacagagtctccagctcaggctggagtgcaatggcactatctcagttcactgctatctccgcctcccaggttcaaactattctcctgcctcagcctcctgagtagctggggttacaggtacccgccaccatgcccagctaatttttgtatttttaatagagatggggtagcgccatgttggccaggctggtctctaattcctgtcctcaagtgatctgcccacctcagc

SEQ ID NO: 13368 - DNA, 553 bp, Homo sapiens
taaatatttggcatctactattatttcaagaaatgtagtctaatattaaaaggtctggttgtcccaatgcatggttgagaaggatgctatctggtttgaaatcatcatggatgaaatcatttatttattcattcattcaaccctcaaaaatgtgctgagtgcctgctatatgccaggcaatgcacaggaacaccttgggatagattttctctgccactaggagagactgaaggggacccctgggttctagagaagagcctgtcgccagctctcagcaggcttttgttttgtttttttggtttttggtttttttgttgytgttgagacagagtctccagctcaggctggagtgcaatggcactatctcagttcactgctatctccgcctcccaggttcaaactattctcctgcctcagcctcctgagtagctggggttacaggtacccgccaccatgcccagctaatttttgtatttttaatagagatggggtagcgccatgttggccaggctggtctctaattcctgtcctcaagtgatctgcccacctcagc

SEQ ID NO: 13369 - DNA, 641 bp, Homo sapiens
  misc_feature (1)...(641): n = A,T,C or G
tggggtctgtgtattcagtgcccctgcattgatctgtaactgcccccccgatgcctgcatttgctcaggatgaagatctcaggatctgggccaattaccaagctgtgaataaccccagtctcgccctctgcaggccagcagcccccacaaggtcatcaattgtccatcctgtgtaccctggtgctagaggcatttgcatcccgtgaaaggatcatcagctccctgcagagctccaaggataagcaacccttaaaaaagacaccatcgaagccagcacagcaccgcatccattgcaccatgaaaggcaagatgggacagtgtgacggtgacaagcaaagccagctctgagtcctcagtatgatcaacgccaaggaaacaatgcaccagtcccctccaaaatgaagtctcaggctgggtagtgcatttcaaattattttcagccyaagctctcttcacacagaagctgctgattagatatttttctgtagtatgggatccatgcctgaaaatacagatgactctgagacactcactactggatttcccaaataagacaaaatggaaccatgaaataaancataggtctcagctgttttcttcctgaagattgctccaggatctgatgacttaggcaactgacc

SEQ ID NO: 13370 - DNA, 593 bp, Homo sapiens
gctcaggaaaatgacagaaggagcttattgagtaagggttagagagacatgggtgaaagtaaggagctagcaagagctatgccaggagcaaacactaggagagcaatttagtaagaattgctaatgtaatttaaaataaaaggtactttttcaattacagagaaaaataacaccctggaaccttatttgtttacttctagtttatgattttagcttcaatatttttcactaaatgcaatatccaaaagggtatgttggtttaataaacattttcttcaaatcartttgcatcttctcaaagactttataaatgattaactagtgaatgagaaaaaaatcacaattctctgcttttcaatttataagagggataataattgatacatataacatcttcaagaaatcaaaataaagaaaagtgcaaagaatgataagaaaatattagtttttccactgtcgtgaatttaaaactgtcaagctgctcatacttaccctatcttttgttaataaaggttaataaagatatttcagataatgctgaaatgaccattgacaccactcccagtcatatttttctttttttcttcttcctc

SEQ ID NO: 13371 - DNA, 627 bp, Homo sapiens
tttttttttttttttttttttgagacagagtctcgctctgttgcccaggctggagtggagtggtgcgatcttggctcactgcaagctctgcctcccaggatcatgccattctcctgcctcagcctcccgaatagctgggactacaggygccccccaccacgcctggctaattttttgtattttttagtaaagacagagtttcaccgtgttagccaggatggtctccacctcctgacctcgtgatccgcctgcctcagcctcccaaagtcctgggattacaggcgtgagccactgcgcccagctgacacagttcttaatctgttgatttaggaagcagggtacagttagcaaattcagaactagaatcagcatgtaggggaaagtccgtaccagtgggatatgactgcccaacccaatacctagatacacacacattcacacacatacacacacacacacactctctctcttttgcatacatacacacacacacacacacacacacacacacacacacacacacaaaatccattcgcattttgaggctgaagtaacagtagtaagacttccaggagtatatgtaaaagatatcagtaagacctctgtatgtgatattctatgatgaga

SEQ ID NO: 13372 - DNA, 521 bp, Homo sapiens
ttggcaaagtttaggtatataaacctatcagtatccaggtaggggaagtctaatccttataagccagtgtgcaaaaatcaagtttaacccttgagatggaacatgaactctttccaattctacaggccagatggccctaaagatgcccaactcacattcatagtcactgtctgtacctataacctctgtttcataaatgacattgtattagtctattctcatggtgctaataaagacatacccaagactgggtaatttttaaaggaaagaggtttgattgactcacaggtccacatggatggggaggcctcacaatcatggctgaaggtgaaagacgagcaaagtcatgtcctccatggtggcaggcaagaggcctgtgcaggggaactgcccttttataaaaccataagttaytgtgagacttattcactatcataacaacagcatggaaaaacctgcccccatgattcaatcacctccatggggattattggagctacaatttaagatgagatttgggt

SEQ ID NO: 13373 - DNA, 529 bp, Homo sapiens
agaagaatttattttattttccacattctcaagcttgatcgagagcaatgctgtctgacagaaatataatttgagccacatatataatttaaaatttttagtggccacatgtaaaaagcaaaaataagcaagtacaattaatttgagtagtatattttaatttatacaaaataatatttcctttcctttyttttttttttttttttttttgagacggagtcttgctctgtcgcccaggctggagtgcagtggcgtgatcttggctcactgcaagctccgcctcccgggttcacgccattctcctgcctcagcctcccgggtagctgggactacaggtgcccaccaccacgcctggctaactttttgtatttttagtagagaccgggtttcaccctgttagccaggccgctctccatctcctgacctcgtgatccgcctgcctcggtctcccaaagtgctggcattacaggagtgagccactgcgcccagcacaaaataatatttcaatattaaataaatttaaaatcat

SEQ ID NO: 13374 - DNA, 583 bp, Homo sapiens
atgccccctgcctgtcccccctgcccctgacctgctgaactcgtagatgtcctcaatgttggcaaacagcgtgcccacctgctccacgctcagccccaggaccccgccgtccagcagagggcccaggtagtcctgttgggatgactggggttatgggggccaaggggctggcctgggtacccactgccctctggtgtctgcccgcctyacctccacgatgctgcggaggtccctgacataggcccgttctgtctccacgatctcccgggccacacgctccagccttgagggtctggctgaacctgggatccccaccggagagagatgtaggcggatgggaggccctggaaggggctctggcctggaggctgagcaggctggagtgggcccaggggctggatccccctcagagcccactgtgctcagggatgtggagctcccagaacctcggggggaggccatggtgggggctgcaggagctgctggggtgtggaacaggaggtcagagaaatctccccatgcacggacttccacagcctttcatgcgttcagcccacaccctcacccacacctgtccaacagc

SEQ ID NO: 13375 - DNA, 323 bp, Homo sapiens
ggttatttgaaacttaacaatgattctaaaaaagcattcagaaagcgaagtagtaatattggttgataacaaattaaaaaaaaaatctttgtcatgttccacatctttgttatcactttttcttgttctcttcatcagttttcttcactcttgtctttttttccccttaatattttcttcctcactactctrcaataaattcttcggtaatgggtatatatctgggtaaggaggttgtaagatttgataatgaacataaaaaatgaattaccgtaaaaattcggttagctgtgcttcttgctttaatgccccagcagtgagat

SEQ ID NO: 13376 - DNA, 323 bp, Homo sapiens
ggttatttgaaacttaacaatgattctaaaaaagcattcagaaagcgaagtagtaatattggttgataacaaattaaaaaaaaaatctttgtcatgttccacatctttgttatcactttttcttgttctcttcatcagttttcttcactcttgtctttttttccccttaatattttcttcctcactactctgcaataaattcttcggtaatgggtatatatctgggtaaggaggttgtaagatttgataaygaacataaaaaatgaattaccgtaaaaattcggttagctgtgcttcttgctttaatgccccagcagtgagat

SEQ ID NO: 13377 - DNA, 600 bp, Homo sapiens
cagttacaattcctaaattcatgggatttctcccagttattgtccaatattttatttttctgatatagaaattaggctcctttctgtaagttattgaacaacatagtaggttgactcactgataattcacttcttttttgaaaaaaaaaatcaactatttttagagtagttttaggttgatagaaaaattgagcggaaagtagagttccctctcaccgtctactgcgcccacataccacamtttcccttagtattagcattctccattggagtggtacatttgttacagttgacccaatacattattattaactaaagtccacagtttacattagaattggctctgtactgaagatggattttgaataatgtatgacccgtatcaactattatagtagcatacagagtagttgcactgtcctaaaaaccccctgtcgctccactgattcctccctcctcccaaggccttggcaaccacttttttttttttaaattatgctttaagttctagggtacggcctcatcctttttgaagaggcagggtgaaccccagccaccccaaatttgattgagatgccaatattgatgaccgcagatgca

SEQ ID NO: 13378 - DNA, 600 bp, Homo sapiens
cagttacaattcctaaattcatgggatttctcccagttattgtccaatattttatttttctgatatagaaattaggctcctttctgtaagttattgaacaacatagtaggttgactcactgataattcacttcttttttgaaaaaaaaaatcaactatttttagagtagttttaggttgatagaaaaattgagcggaaagtagagttccctctcaccgtctactgcgcccacataccacactttcccttagtattagcattctccattggagtggtacatttgttacagttgacccaatacattattattaactaaagtccacagtttacattakaattggctctgtactgaagatggattttgaataatgtatgacccgtatcaactattatagtagcatacagagtagttgcactgtcctaaaaaccccctgtcgctccactgattcctccctcctcccaaggccttggcaaccacttttttttttttaaattatgctttaagttctagggtacggcctcatcctttttgaagaggcagggtgaaccccagccaccccaaatttgattgagatgccaatattgatgaccgcagatgca

SEQ ID NO: 13379 - DNA, 560 bp, Homo sapiens
ttcagtcagctaatactatctgcatctacattctggctcttatatttacttaacacagttttagttttttgtttgtttatttttgagacggagtcttgctctgtcgcccaggctggagtgcagtggtgcaatctcagctggctgcaagctttgcctcccgggttcacgccattctcctgcctcggcctcccgagtagctgggactacaggtacccgccaccacgcccagctawtttttttgtatttttagtagagacggggtttcaccctgttagccaggatggtcttgatctcttgacctcatgatctgcctgcctcggtctccgaaagtgctgggattacaggcgtgagccaccgcacctggcctttgaaaagataaattataacattcctgtttctacctaccaacttctatcattctggctttttcccacagttctcccaaaccacagatcccttcttcctcaggggcttaactccagacatctttttctctgtgtctgtcagctcttgctgtcttcacttccttctctgagacactgagattctttaatgctgca

SEQ ID NO: 13380 - DNA, 538 bp, Homo sapiens
gggaaatacagtggaataatatgtacacatcatctgacacagcgtaacaggcaatattgtcttttacagtctagcactgaatagttttagtcaaagcaaacctactgggggaattttgaaaacatatgtgtttgtttccttacatttccttgagctagactagcctggggccagttgtcacacaaacaatgtccatgtctgtgctaatttttctcgatgtaatgagctccttagctaaacaggagtggtatagaaaagaatgtctctgcagactcagacacttgggtctctcttgtcatgtccagactgcagtcactttgcaatgaacacataaagtaagaaaatcagctctaaatcagatgtgatttttaaagtccaagcaaatttgtctttacctgaaaatgaagggaatatatcrtatctcattgtggttagtcctctgctctcataaagaaaaaaaaaaatcatcttttttacaatcttcacaggatttcagggttggaaggagtcaagaaaccttttgcccagtgagataact

SEQ ID NO: 13381 - DNA, 2024 bp, Homo sapiens
gagaatctattcttccagtcctctccattaatggggataattaagagtctgcagtgatcccaggagaacagacaatgcacaaatatcaaataactgaactagagaaattaaatgcaaagactagtacttggttaccctggcaacttaattgaatatttcacattactcttgggtcagtcaaaaactatacaaartgtatttccatgtattttctacagaatatttttgagaataatctcaagatatagagttttccaacgcttacctacattcttaagtgttttctttgttgagttcataagaaatatacatataaagagaattgaacaagttgtagtggataacaatttaagattttgaaatatattttcagaatttcaaggtacataggcccaaagcatttatattttcagtcacattatgcatatcaaaaatacatattttaagaataagacgtttgtatgtaaaagatgattcgtaaccctaggcacacaacctactcaatgtatccactcaagggatcctgttaagaaaaggctttctgtcaaaagccatacataaacacacacctcatcaaaacatgattataaaagcacttaggctctgcatttaaaatgtgaagttggtggttgatcagcacacatattgctgtctacaacggaacataacctttcctaaagtggcacactgtgtgggttctgcaggccctgataatgaatgctgacagaggtatccaattattcaggcttggctgcagccacagtcccttaactatgtgagatgaatgggatgatggagaacacacagagggaacacaaaccttagatagccaagtataaaatgaaagaaatacattttcaaaaacagaacttaaaaacagtaattttaagttgataggaaggctcataatatttttagaaagaatcatgcctcagtgaaataagcaatgaatcagaagtcaggacctaattttggctcaggccttaagtagctgtgtgatcttgaaataaaattttctggacttttgtcctcatttgtctaaaggcaggaggtggcaattgaacgctgaaatagattaactgtaagaccccatttagctatgacatttcatgattcaattatacacatacattctttatatatgggaaatgtgtattttatactggtatgtatatcttatctcacaatactaattgtttaaccaatatatcaaatcttatgtaaaaacactttaatagcttcacagactcactttcaaaggatacttacatttatttatttatttatttgtttacttactcattttgggatggagtttcactcttgttgtccaggttggagtgcaatggcatggtctcggctcattgcaacctctgcctcccaggttcaagcgattctcctgcctcagcctcccgagtggctgggattacaggcatgcgccaccacacctggctaattttgtatttttagtagagacagggtttctccatgttggtcagactggtcttgaacttctgacctcaggtgacccatccaccttgacctcccaaagtgctgggattacatgcgtgagccaccaagcccagccaggatacttatattaaataaaattgcgactgtttaagcttcttgaaattctactcttagaactgcattcaggatgcatttctgcaatttttgttagcaattaaaatctttattctttgaaattgaaattttataacactccaaggaatcaataattattttatttaataaaactagagaataatccaggtaacaagtttgagataaaacaaagcagatatttcaaacaatgccacatggttggagtaggtaaactccttccccaggcgaccaacttgaaggacaatggtcattttaaactgtaagcttagatgtacgaggatcttctagatagatgcatatgcaagtggatgtgctcaaacacagattgagtttcaattaatattgattaaataaaatgggctgtttgactatttttacgcacatagacactgaat

SEQ ID NO: 13382 - DNA, 500 bp, Homo sapiens
gatcaaccctaattcatcacagcagcatgaagtgaatatcacacaatgatggcgagagtcatatgaggagatacctggataccaagtacttgaagatgttcggaagttggaaaatgctgctgtgtccgtgactgtcaaggaaaggttatggaagaaatcaagttgaattgagttttgagggatttatcctctaatgaacatttattatctattatataataatagcaagaagactctgtccttgtccaagcagggcaagaggttggcaaactgtgctttccaggccagatgcggtcacctgtgtttataaagcgctgtatgggaacatggccgygcctatgtgcttacatctcgtctacggtgcttttagcagatgagtagttgcacagagacacaggcccccaagccaaaagttttttttgttggccctttacaaaagagtgtgcattccctgagtaaacctcagggtggggggagggacagcactccacccccaaaat

SEQ ID NO: 13383 - DNA, 538 bp, Homo sapiens
caagacaaccctcaactctgacacaaatgacaagtttgagggattcccgaaaccatcatcagtttcaataatttgctacagggactcacagagctcactgaaactgtgatcctcactgttatggtttattgcggggaaaggatacagatcaaatgcagccaaaggaagatgtacgtagggccgaggctgcggaagtaccagacacagctctcattgtctccctcccatggagttagakcacatcagtctcccagtttcctcatgtgacagtctacatagagcgttgccaaccagcgaagctcacccaagcctcagtattcagaatttatatttggcacccttatgtagcggattgattgattgtccacatgattgatctctgtatccaggtggcctgactcaaagctcccatccttgacttggaagtttgacttggaagagtgagggaatgggatgatgaggaattacttaataggtacagtgtatgtcactcaggtgaaggatgtcctaactgccctggcttcaccactgtgccatg

SEQ ID NO: 13384 - DNA, 535 bp, Homo sapiens
ttttttgtcttgtcatttcttcacaattcatcacctcttgtgaaagtggtagataagccctggggtctaactgcctctttcagtttttgacctcttttctgtgggggtctcatgcacatagaaaaattaacattaataaagaaacatatgcctttttaaatctatattttgtctatttagatcacaggccccagtcacagaaccaacgagatacaagaaaagttttttgccttccttaacattagtatgtagatagatagatagatagatagatagataaatggatagataaatggataggcagaaaaggtagaaacaaaaaaggatggatagatataaggatggatagatggatggatggatggatggatgratgaatggatggatggatggatggttaggcagatagatatgtagagaaaggtgatatgtaaaaagattccaagttctgtcttcaccagagtgttatttagaggactaaataagataatctatatcaatatctattattgtctgctgtataaattttattact

SEQ ID NO: 13385 - DNA, 535 bp, Homo sapiens
ttttttgtcttgtcatttcttcacaattcatcacctcttgtgaaagtggtagataagccctggggtctaactgcctctttcagtttttgacctcttttctgtgggggtctcatgcacatagaaaaattaacattaataaagaaacatatgcctttttaaatctatattttgtctatttagatcacaggccccagtcacagaaccaacgagatacaagaaaagttttttgccttccttaacattagtatgtagatagatagatagatagatagatagataaatggatagataaatggataggcagaaaaggtagaaacaaaaaaggatggatagatataaggatggatagatggatggatggatggatggatggatgratggatggatggatggatggttaggcagatagatatgtagagaaaggtgatatgtaaaaagattccaagttctgtcttcaccagagtgttatttagaggactaaataagataatctatatcaatatctattattgtctgctgtataaattttattact

SEQ ID NO: 13386 - DNA, 640 bp, Homo sapiens
ttttccctggaggggaaggtagaagtaacaaagcactgtgaggaagagttgttcatggagttgaccaaactgtcctctgttatgtgctgataggtctggcatgccttttaaattctttctatttgatgtttttgaggaattgtcattctatactgatttcaaaacaattagtttggcaggatatgcttacatggttgtaacaaatattgtgccagcrttatgaggacttagcatcaatctcagcttgacatgacaattaatacattcagtaacttggagatgataacagagagaatggagataggtaccagtttgtactccttcagtttggtcttaaaaatcaaaattacttagggataatgctttgtcaaactctgataacatattggactctggttttaatctaattttcaataaatattcccaggatgggattcaccaagtttcataatttaactgtagctctcaggtggcattgacaacctttattatcatataaggttttcctagcattggcaagtttgtgactctttccaagccactgctataaagctctgtgttgatgctgtgtggtggtccacgggcaagtattcttgggtaaatttcttttttttttttttttttttttgagacagagtct

SEQ ID NO: 13387 - DNA, 1244 bp, Homo sapiens
cacggtggctcatgcctgtaatcccagcactttgagaggctgaggcaggtggatcacgaggtcaggagatcgagaccatcctggctaaaatggtgaaaccccgtctctactaaaaatacaaaaattagccgggcgtggtggcgggcgcctgtagtcccagctacttgggaggctgaggcaggagaatggcgtgaaccccggaggcggagcttgcagtgagccgagattgtgccactgcactccagcctgggcgacagagtgagactccatcgcaaaaaatatataaataaataaatgaataaataaataaataaaaaagaaagtcaagtccattggtaacgtcagagccatttgagaactgagtggtgtgaaaaaagagggaagagggaaatgaatgttttgcttgttcttctgagacatcaactagcatctagaatagagcaggtgtccggagctctctcatgctagaaagagccatcctttaggctgttggctacatgatccctgattctcaaagtcctgttcaggctgtcactactcagagaaaacgatggacagcaaggcattcagaagagggcagcatgtgcgaggtaggtgaagaaggctctatcttgctctggaccatcacaaagagctgattcaaactctcaatattggcagaaaataagaccttggaagaagaaaaggggttattcagcactaaattaaaacatgataattgatcatcttcctttaaatcatacaacatataaaagaagtaacttttatttcaaagaaaagcactaggaacagatgtaaaacaagaatcaaagctaaaagatwgggtatttttctaatgtacaatatattctttgttctatttatagtatatataaatacaatgcctatttaaatagagatttccttttaaatagtttcaaattttagaagaaaaatgatgatgaagaagagtgatagtacttaattggcactggtttttttgagaactttttgttgaatctaatctcaaaatgacttaaagataacattactttgcacattatttggggtctccattaattcaatttgaatgagttaataaaagtctggcttttaggcatagtcctatttattagtctacaggttttgtctgatgaagaattatgtaattttactagatcagcttttgtctttcttaaaatacgatccattccacattataatcatgactttagcactgaagtcgaaagctcagataaattctg

SEQ ID NO: 13388 - DNA, 535 bp, Homo sapiens
aggaggaacagattagaaaatatatatgtggtagaattgacaggattttgctgattggatctatgatattaaaaagagagagaatttgagcacagttctgagatttgtagttcaaatgacttgatcaacagttgtgccatttactgagatggggaatacaggagtttggagggggaacataatgagatcaccatgacatactgagtttgatttgtctatggggtattgaggtgttcttgtccagcaggaagttggaaatcatgagtcttaagttcaggagggatgttggaataagtgtaattggcaaacaagagattgtggcaggggctgtgattattaattcaactgggataaacccaagggccatatttgcagtaattcaaacccttggcagtaaacagttgaatgtgaacttcaggtcagcagagaaattaaatttattttggagactrtcaggcaagaggaggccaggactttggggaggattttgtggtctttctactctccaggcttaaaactaaatgctgcttctttt

SEQ ID NO: 13389 - DNA, 638 bp, Homo sapiens
ttgacttatttattaagctaaattatttacactgaggagtcagctgctctgaataatttatctcgggttccaagtccaaacgccatgttgaatgggaatgggtgaccctagccagtaaaagaagactcaaaagtataaaaasagagagcgtgctcaagtgctcaacccttccttgtcgacgtctgtacctctgaggggaagaggagactggcagggaaaggggctctggaggtggcctaatgtgccacccactgcaaaggagggccacctgggctgggtggctgctctcccattcctctttgctgattggggagtatgactcaggctgccaggggctacaaagccaccaggctacaggggaccaggagtggcttcctaagatgtgacgagaagctacagaggactcgaatcacatcccacaatgatgaagggagctcaattcaatatttgtaaaaccctgggtgggatccccctcctcacataagaatttagtaattatcactgggaggacatttgctattcatctcttttcaattattcaccagcaggaaaggccaggagtgcatggaaacccaagcacgagcagttagccaggtcttccccagtgtgggagaccccagaatttgctgaagacagga

SEQ ID NO: 13390 - DNA, 570 bp, Homo sapiens
tccaaagtgctaggattacagcactttggagccactgtgcctggtcccaggtaatatttttaatgraatctatcatttcccaaaatgtatcacatattttgctgacttgtttgttatctgtctcttccctgagaatgaaaactccatgatggcaggattcttctctgtcttactcactgatacattcttagagcctagaattaggcctgacacagtcagcattcagttgtttgaataagaatttatagtgttagttcactatactcctgctgtattaagcaccacaggtgacctcttactcatcccacatcaattatgttgccttgaggttgttctcaaagctcatgtgctataagctgacttcatgattttgcctgtacaatgcagataccctttgagttagcaaactaaagtaggaacaaagagggatgggggagagagcacaaagagaagaatagggaggattgctgcaaaagacactaggaaaagacttttgaagtgagtgtgacttcatgcctgtgtgagtttatgtgtttgtgtctgcacatgtgtgtacatatgtgtctgaga

SEQ ID NO: 13391 - DNA, 532 bp, Homo sapiens
cccatgtttgtaaatgacctcagctttcttctggttgctcaacaacaacaacaaaaaaacaaaaaaaaaactagaagttatccttgattcttctttttcctgacttaatctttaaatatatcctgaatgtgtgtgctactttccaccttcaccaccaccaccctagtccaagcctccacatcactctctgctacgatcctccagcctctcccatgatggctttttttctgtcgctcagctcccagttctctgctcttcacactaatcataacatatcatttctacctccatgcctctgtgtgatctcttccccaagtctagattgctcatacccmtggtccacacacagctcttcttgacactcagatcctcaacagtgactttcctgaccacccaaactaataaagatactagaaacttttctcattctccccccaccacctttttttgagacgcttttttggggtctcactctgttgcccaggctggtgtgcagtggtgcaatcatgacccactgcagcctcaacctccc

SEQ ID NO: 13392 - DNA, 535 bp, Homo sapiens
tgtgactgtccattgacactgacatgcaagcttcaatgttcacagatagtcacagcgagacagttgacctcctatacatttttagagggggggtgattctatgaggttcactcaaaaaggctaaaaataaaaatataccagtgcaaggtttagattactttgtgaatggtaaaatatcgaccatctagttcatagaaatatgctaatttcacttttagcaccttccatcgaatcctgggcagattaccaattagaagattacccacgcatttagccacaccatgcacactaccaatgaaagaactaagcacacaggctctgtgtccttttggaccttgattagagtaacttgcaatatgaatggaaccatcctttgcagttcaaatcacaaaagaagagagaaaagttytaggatatctagttttaaaaacacatacatttctatttttaaaaacatttcctcactcttcagtatgcttttctaaaactgaaaccaaatgatgggcatattgactttattaaaatatcagttaag

SEQ ID NO: 13393 - DNA, 581 bp, Homo sapiens
gaatccccttcattattatctgaatgaaaaccacttcctttaataaaaacaatttatagacatatatatatagagagagagagggagagagagaattaacacaatgatgagataatgatattatgtctattagaaggactaaaatacaaaacactgttaacaccaattgctggcaaggatgtkgaacaacaggaactctgattcattgctggaggggatgcaaaatggtgcagctactttggaagacagtttgacagtttcttacaaaaataaacaatcttttaccttatgatccatcaactgtactccgtaggatttatccatattatttgaaaacttactcacatgcaaaagcctccacataaatgtttattgcagctttactcataattgccaaaacttgggaattaacaaaggtgttcttcaataggtgaatgaataaacaaattgtggcatacccatacaatagaatattatgcagtgataaaaagaatgaaatctcaagccacagaaagacatagagaaatcttaaaggcatattgctaagtgaaggaaaccaacttcgaaaggctacataatgt

SEQ ID NO: 13394 - DNA, 505 bp, Homo sapiens
tcactgaaatttacttagtatgaggaagggagacatcaagctggctccatgataaaagctctctaaatacattagctccttgagtggactgcagagggacaaatagaacacttcttttaaaacaaattagccttcttttatgttttagaagagataaggccaaagtcctcagcagtgaatgataacattagccgaagcaatttcagaatttgctttatcaaacgccgaattctctctcatcccattgaccatggtgctrcttttctcataaggtgtcctcactgctttcctagaatgcatcaagttcaaacaacagtgccttatttcaaaccccagacccatttcattcctattctcagatctctgccttgtttacctactttttattttttggattcaatcaaaaccccaattggctgccctctgtttttctggcatttcatggcaccttttgtggccttttgcggtaacacatattctatatcctttcaaaagctgcccaaat

SEQ ID NO: 13395 - DNA, 640 bp, Homo sapiens
ataaatttaaggtggtcctttgactgtcatgttatttagtatataattttctatcttgaataaagaacwtctttaaaaaaaacattcacagtattcaaacagtacattagatttgtgggatttactgtctattaggagtcatagggaaaattggccaatatgtttcttcaagaagtacttgctaatgtagtaggttcatgtacttttagagttggaacaaaatttaaaagctatgctccagcttttccactatgtatggagggtaataatggatctattgctaagtattcagagtaatagctccaatccttgtccatcacatagctagcatcgatgtatttcttaatatatactagtgcttgtgcttagtccatcattccatcctatttaatttttacaaccattctgtgaggtacttttatctcccttttaaagttaaagaagcaaaagattctaaaagcttgttaaaggacattgtataagaccacgtaactagtaaggggtagaatctgaattcaaatctaggtcttttatattttaaacttgtactattactatggtcaccattatcttattctaagtccactataaatgctgtctattggaattgtattataaacaatactatactgtattttta

SEQ ID NO: 13396 - DNA, 640 bp, Homo sapiens
ataaatttaaggtggtcctttgactgtcatgttatttagtatataattttctatcttgaataaagaacttctttaaaaaaaacattcacartattcaaacagtacattagatttgtgggatttactgtctattaggagtcatagggaaaattggccaatatgtttcttcaagaagtacttgctaatgtagtaggttcatgtacttttagagttggaacaaaatttaaaagctatgctccagcttttccactatgtatggagggtaataatggatctattgctaagtattcagagtaatagctccaatccttgtccatcacatagctagcatcgatgtatttcttaatatatactagtgcttgtgcttagtccatcattccatcctatttaatttttacaaccattctgtgaggtacttttatctcccttttaaagttaaagaagcaaaagattctaaaagcttgttaaaggacattgtataagaccacgtaactagtaaggggtagaatctgaattcaaatctaggtcttttatattttaaacttgtactattactatggtcaccattatcttattctaagtccactataaatgctgtctattggaattgtattataaacaatactatactgtattttta

SEQ ID NO: 13397 - DNA, 640 bp, Homo sapiens
ataaatttaaggtggtcctttgactgtcatgttatttagtatataattttctatcttgaataaagaacttctttaaaaaaaacattcacagtattcaaacagtacattagatttgtgggatttactgtctattaggagtcatagggaaaattggccaatatgtttcttcaagaagtacttgctaatgtagtaggttcatgtacttttagagttggaacaaaatttaaaagctatgctccagcttttccactatgtatggagggtaataatggatctattgctaagtattcagagtaatagctccaatccttgtccatcacatagctagcatcgatgtatttcttaatatatactagygcttgtgcttagtccatcattccatcctatttaatttttacaaccattctgtgaggtacttttatctcccttttaaagttaaagaagcaaaagattctaaaagcttgttaaaggacattgtataagaccacgtaactagtaaggggtagaatctgaattcaaatctaggtcttttatattttaaacttgtactattactatggtcaccattatcttattctaagtccactataaatgctgtctattggaattgtattataaacaatactatactgtattttta

SEQ ID NO: 13398 - DNA, 512 bp, Homo sapiens
ccaaccccacagatagcttcacagaggccactgaataataactcagccaaggtttcacagctcaaggtaataggagcagctacactttggggacagtggtgcccccagggttgaacacttgacatgcccattcacaggtagggacaagggggctgggagaggaatggagcagcaagccaggcctccctggtctctaaagccctmaaagcccccacaatgctcccagtagagccctatgctgatgatccccagccctgcagcccccgctcacccacacagttgctttcaggatcctgcaggaagccatccatgcagcgctgcctggcctggcagtagaaggagcccttggtgttctggcacaagaagcccggctggcaggtgtgcgtgcccatcgcacactcatccacgtttgcagcggagaggctgggtgtcaagggctggggggcaggtcctgcctttacactcagcagccctgcccacacatccccgccctcagacccatgaccttgatg

SEQ ID NO: 13399 - DNA, 541 bp, Homo sapiens
ccagaaagttacaggcatgtgatgagaggaagcacattgctcagttcgtacaggaagggcctgaaagtgttggatgttgaaagcaaaggcctaggaagagaggccacaggaaaagtccagctctttggatttgatcttataatattataacttgttagagtcgtcctagccgtcctcgcccccttttcttagtagatattttgtaagatggaggtttgggcaagaacaggcttgttcaggtaaggtatgttaacaagaggttcagaggatgcagtagagacactagggtgcctttcatctgcatataaccctctcccctttgcctctgacctaaagagctggtgaagagtagtagaaagtgctagtaatcyccaaaaagggctccactgacaacatgatctccagtcatccttcagggcaaaattggagaaaataaaccacttatttattttttcaagtgggagttggcgagaatgttcaaatgttaaaaacaggaataaataatttatctgaattagaggtgtattgaatagttgccaaa

SEQ ID NO: 13400 - DNA, 541 bp, Homo sapiens
ccagaaagttacaggcatgtgatgagaggaagcacattgctcagttcgtacaggaagggcctgaaagtgttggatgttgaaagcaaaggcctaggaagagaggccacaggaaaagtccagctctttggatttgatcttataatattataacttgttagagtcgtcctagccgtcctcgcccccttttcttagtagatattttgtaagatggaggtttgggcaagaacaggcttgttcaggtaaggtatgttaacaagaggttcagaggatgcagtagagacactagggtgcctttcatctgcatataaccctctcccctttgcctctgacctaaagagctggtgaagagtagtagaaagtgctagtaatccccaaaaagggctccactgacaacatgatctccagtcatccttcagggcaraattggagaaaataaaccacttatttattttttcaagtgggagttggcgagaatgttcaaatgttaaaaacaggaataaataatttatctgaattagaggtgtattgaatagttgccaaa

SEQ ID NO: 13401 - DNA, 677 bp, Homo sapiens
ccattctctttaaatgcagcatggcatagtttaattagtgcaatgtaataatctccaattgctcatagaaaggaactaattctgtcaaagtgttttcttagtttcccccaccatgaaatgcattttattcattttgaagcatctgaaaaataaataagcagctgatatccagaaatgaccataaaataactgtgtttaaagagtttaaaacaaaatacagtaaagcacacaaagacaatattcacaaaatgctaccaaataaacacattcaacttcccacaggtttcacacaggataacttttgatataacatcagcagctgtaaaaatataaaaatcctatgtaattggcatcgtattctagaaaaatagctaactgagcctatagggaacgtttttggtctycagattggaaagcatttggatctgatagagaggtgctcctgattagcagatgacataagcacagccaaagctttactcagaaattcccagtcaacatcactgtccttcactcaaccttagggctgctgcagaagctgcaaatgtctgcaatctgaacagagtcagaagtctaggtaggaaaggttcttatcctctctccttataagacactgattcatatattccaaaatagcttggtacactgtgcacatctggtgctatttatttaagtaa

SEQ ID NO: 13402 - DNA, 683 bp, Homo sapiens
cccacaacccatgagtgtcccctgcatcccgagtctgctcctgtccccagcaacaagcaaaacaaagatggaaggagccccctcagtgtcagagacccctcaccgtgagggttcagctctgacccccactagggcgtgcagaagcaatgcccaatcaggaacaagaccagcactttaaattagacaggactcattcagaaaactatgtcagcagaaaaacagagaatcttctcaagatatctccaaggggtagaaattggggcatttggcttyccccagctgatagcagtgtttgggtggaaagtaacatgccttcatattcaggtcaaactggtacagattcctcagcagttcccaatgaactctacggggaatgcaaagaatgttctaatgaggaaggggtcaggaggcctgggctctggttctctgttgtcaatttgctgtgtgattgggatgagtccttagccctctctgggcctcagtttccttggctgaacagtaaggaagctgtttggggtgagctctggcaggcaggagcctactgtcctcactctcctgcagggctggcaggagaagggagagagataggctgggtgaagaaagggtctctggggaaaaggaggaaaagaggggctttcctggggctgatagaggcagggagcatccgtgccagaggtgacacg

SEQ ID NO: 13403 - DNA, 683 bp, Homo sapiens
cccacaacccatgagtgtcccctgcatcccgagtctgctcctgtccccagcaacaagcaaaacaaagatggaaggagccccctcagtgtcagagacccctcaccgtgagggttcagctctgacccccactagggcgtgcagaagcaatgcccaatcaggaacaagaccagcactttaaattagacaggactcattcagaaaactatgtcagcagaaaaacagagaatcttctcaagatatctccaaggggtagaaattggggcatttggcttcccccagctgatagcagtgtttgggtggaaagtaacatgccttcatattcaggtcaaactggtacagattcctcagcagttcccaatgaactctacggggaatgcaaagaatgttctaatgaggaaggggtcaggaggcctgggctctggttctctgttgycaatttgctgtgtgattgggatgagtccttagccctctctgggcctcagtttccttggctgaacagtaaggaagctgtttggggtgagctctggcaggcaggagcctactgtcctcactctcctgcagggctggcaggagaagggagagagataggctgggtgaagaaagggtctctggggaaaaggaggaaaagaggggctttcctggggctgatagaggcagggagcatccgtgccagaggtgacacg

SEQ ID NO: 13404 - DNA, 536 bp, Homo sapiens
gggcaaaacattaaaagggaaaatttatttttttaatttttttaacgtatgttttttgagacagagtctgactctgtggcccaggctggagtgcagcggtgtgatctcggctcactgcaacctctgcctctaaaagggaaaatttaaaagcaccccgtctatcagaaaataaaagacacagtcacactcaaaatcattttagacctatttgtggtacaaaaatggaccgaaaccccaatgctgtaaggtgccagagacctgacctcttggggctctgggtcagcgtcagctgtctaggttgggtgcggtggctcatgcctgtaatcccagcactttgggaggctaaggtggcaggatcacttgagcccaggaggtggaggctgcagtgagtcatgattgtatcatctcactccagcctggacgacaaagcgagaacctgtctcaaaaaaaaaaaaraagaagaagaaaaagaaaggtgtttctttattgtcttatcgtctttcctggcatctcttacagctaggtgtacctatgtg

SEQ ID NO: 13405 - DNA, 556 bp, Homo sapiens
aaaatcaaccagtcctcaactctcattggttttcttaattcactgtaaatttgcaaatacttttataaaaactgccctttataattgtacagcaattctatctctactatgctaattataaagagagttttgccactatcttaccaccaagtataaaagaaacaaaatattcataaaaaatgatccaaatgggactcacttccagaatggtgatgtgaagagcttttcaaatccactccctaaaaacaacaataactggtgaaaattatagataaataaccatttaaagttcctggwaattgtcctaaggacatacagcacgaagaaaatatttattcaagacaatctcttatatttcagtaagaactgcaaacaattgtgatgcttgaaccacaatatatttccccaccctctccagttgagtgtgatgatgttccagtaaggatgggtgcagccactaacgcagggccccctctcaacctagatcctcgtctacagtataccctgagagaagcaggccaccagcattactcatcatccccagctttgtgtttca

SEQ ID NO: 13406 - DNA, 556 bp, Homo sapiens
aaaatcaaccagtcctcaactctcattggttttcttaattcactgtaaatttgcaaatacttttataaaaactgccctttataattgtacagcaattctatctctactatgctaattataaagagagttttgccactatcttaccaccaagtataaaagaaacaaaatattcataaaaaatgatccaaatgggactcacttccagaatggtgatgtgaagagcttttcaaatccactccctaaaaacaacaataactggtgaaaattatagataaataaccatttaaagttcctggtaattgtcctaaggacatacagcaygaagaaaatatttattcaagacaatctcttatatttcagtaagaactgcaaacaattgtgatgcttgaaccacaatatatttccccaccctctccagttgagtgtgatgatgttccagtaaggatgggtgcagccactaacgcagggccccctctcaacctagatcctcgtctacagtataccctgagagaagcaggccaccagcattactcatcatccccagctttgtgtttca

SEQ ID NO: 13407 - DNA, 556 bp, Homo sapiens
aaaatcaaccagtcctcaactctcattggttttcttaattcactgtaaatttgcaaatacttttataaaaactgccctttataattgtacagcaattctatctctactatgctaattataaagagagttttgccactatcttaccaccaagtataaaagaaacaaaatattcataaaaaatgatccaaatgggactcacttccagaatggtgatgtgaagagcttttcaaatccactccctaaaaacaacaataactggtgaaaattatagataaataaccatttaaagttcctggtaattgtcctaaggacatacagcacgaagaaaatatttattcaagacaatctcttatatttcagtaagaactgcaaacaattgtgatgcttgaaccacaatatatttccccaccctctccagttgagtgtgatgatgttccastaaggatgggtgcagccactaacgcagggccccctctcaacctagatcctcgtctacagtataccctgagagaagcaggccaccagcattactcatcatccccagctttgtgtttca

SEQ ID NO: 13408 - DNA, 526 bp, Homo sapiens
ttaaatgagccctttgtaaaattattttaagcaactgatcaagggcttaaagagtatttgtgaagtttcacattgacatgaaaagacaaaaagagatgtattgtaatgccaaagaattaaaatttattacaacaatccttcaacattcattgtggaaaagaacattaaaatatcagtgcatatgaatgtatggtagattaaaaaaagagaattaaatgaactttcatggcacatcaaaaatttygttattatactctgagttgcatccaaagaattcaactctgtcactagggaaaagagaaagcaatttaaatcctgtggaagatgctacttttgatacaaaacaaaatccatttttctagtaatacgtcaacttaaacatcttttacaattagaaaatataatagaaaagtaaataacccatcacagtagcagtacaatacataaggttcttaggaattaaaataacaaaatatgtatatacactttatgtagtaatttcaaagaagataatagaagacattaa

SEQ ID NO: 13409 - DNA, 526 bp, Homo sapiens
ttaaatgagccctttgtaaaattattttaagcaactgatcaagggcttaaagagtatttgtgaagtttcacattgacatgaaaagacaaaaagagatgtattgtaatgccaaagaattaaaatttattacaacaatccttcaacattcattgtggaaaagaacattaaaatatcagtgcatatgaatgtatggtagattaaaaaaagagaattaaatgaactttcatggcacatcaaaaattttsttattatactctgagttgcatccaaagaattcaactctgtcactagggaaaagagaaagcaatttaaatcctgtggaagatgctacttttgatacaaaacaaaatccatttttctagtaatacgtcaacttaaacatcttttacaattagaaaatataatagaaaagtaaataacccatcacagtagcagtacaatacataaggttcttaggaattaaaataacaaaatatgtatatacactttatgtagtaatttcaaagaagataatagaagacattaa

SEQ ID NO: 13410 - DNA, 519 bp, Homo sapiens
tagaacrtctaattacattgcaaaaagtatcgttctttgctatcgataaagaaaacagttagtggtattattgtaaatatcagaaaggctacaaaaaagaaataagatttcttttttgtctcttcaaagtgttttccatgcagtgaagcacttgccctgtttaactgagtgcactactagagaatgttctgggtctgagatgctcttgagagacaagactaggcttttccaaatcaaacattcaaaggaatcatgcaaccctcttatgactgagataccgtcatgtgccacttatcaatgctgtctctccagaaaaccattcaagacgcttaaaaaaaatcagacttatgataaatatacataaaatgaagacaccaactgctatttgacaagactactggtaatgtctgtgctatgtgaaagcacctttaaaaagagcctatgcagcaagagataagtgtctaaagattcaaaatgaatcaacagtattggataacaatataattctcaactcagaag

SEQ ID NO: 13411 - DNA, 519 bp, Homo sapiens
tagaacgtctaattacattgcaaaaagtatcgttctttgctatcgataaagaaaacagttagtggtaytattgtaaatatcagaaaggctacaaaaaagaaataagatttcttttttgtctcttcaaagtgttttccatgcagtgaagcacttgccctgtttaactgagtgcactactagagaatgttctgggtctgagatgctcttgagagacaagactaggcttttccaaatcaaacattcaaaggaatcatgcaaccctcttatgactgagataccgtcatgtgccacttatcaatgctgtctctccagaaaaccattcaagacgcttaaaaaaaatcagacttatgataaatatacataaaatgaagacaccaactgctatttgacaagactactggtaatgtctgtgctatgtgaaagcacctttaaaaagagcctatgcagcaagagataagtgtctaaagattcaaaatgaatcaacagtattggataacaatataattctcaactcagaag

SEQ ID NO: 13412 - DNA, 519 bp, Homo sapiens
  misc_feature (1)...(519): n = A,T,C or G
aagcaccaaactgcttggcatttaccaagatccataatcttgtcccctttcctttcatttattttggaactgtagttactgacttctcctcttcttttctccccacctcggcaccccggtggagctccttgtctgaattctgcttgagcactctgtatttgtttccatgcacagatgtatatgtttaagtgtgtatcttttctccccagccagcacttaacacagtatgttgctcatgatgctttgctccttactgcatgttgataytgggattcaacagaaaatatatggtccatagactttggcttggatatactggccgtcatgagggacttggaatgaacttgagagttcaatctggtttgagttctggcactgacattgaccgtctctggggacttgcttaatatctcagatttttttttttaactccggaggacacanattagattatggttgagagaattgttaaagatctgccttgggacagagtattttcttacatatgttaatttggat

SEQ ID NO: 13413 - DNA, 546 bp, Homo sapiens
atttgccaaaaggaacacagagggtcatgatgatctactccaaggatttcagggttcccagacgcctagttttctgtctagttctggaagatgttattcttggggagcaataggtcctcgagtttggggctctttcaggttctctctccatttccccattctgctacaatagataaacaaacaaaaacaattctcacttccagaagatcccgcctgtacgtctgcacgagcccttcaggaggtctggatgtctggttcacaactcccctgcttcttttccagcttttgctttcccttcccccgctcccgccctaccgccccacgacccgaccaccgcccagctgagccccagaggctccacagcgcagaaggtgcaccggaggycgtgtcagttgcccgccccgcggggtgccaagaaatcaacgctttgtaaaaagaacttccccgtggaaaaaaatctcttgatttccactctcacctctcttcaaaggactaaaagctaaaggcgacaagggattcattcgacaagtcctagtcgtgcgccct

SEQ ID NO: 13414 - DNA, 510 bp, Homo sapiens
tgggctmatgctatgaataataataacaaacactgccttctgtcaggccctgtgctgaataccgtctgcatatgtataggaaagggttaactcagcaggtcttgtttgcccagactctgtacatttccaagaaaggtctgcctttaggactggtccttggccagctcctggagaatgagctctcagcttttagaaaattctatctgctaagaatagttttgcatgtctcaggtcttgggccacaaaatatcagtttaatcagatggtttatgttaacaagtatgatttatggcaaacatagatctctaatctccatttctctctcatatatctatatttatctatccatatatatgtacctatatatatcaaatatgaagatatgtttatagcaattgcatatacatagagagatagtatgtagtaggaagagagacatagatattattcttcattttagaatgttatcttggtatgtttaaaaggaaaaacttaagatgtgttgcaatt

SEQ ID NO: 13415 - DNA, 510 bp, Homo sapiens
tgggctaatgctatgaataataataacaaacactgccttctgtcaggccctgtgctgaataccrtctgcatatgtataggaaagggttaactcagcaggtcttgtttgcccagactctgtacatttccaagaaaggtctgcctttaggactggtccttggccagctcctggagaatgagctctcagcttttagaaaattctatctgctaagaatagttttgcatgtctcaggtcttgggccacaaaatatcagtttaatcagatggtttatgttaacaagtatgatttatggcaaacatagatctctaatctccatttctctctcatatatctatatttatctatccatatatatgtacctatatatatcaaatatgaagatatgtttatagcaattgcatatacatagagagatagtatgtagtaggaagagagacatagatattattcttcattttagaatgttatcttggtatgtttaaaaggaaaaacttaagatgtgttgcaatt

SEQ ID NO: 13416 - DNA, 510 bp, Homo sapiens
tgggctaatgctatgaataataataacaaacactgccttctgtcaggccctgtgctgaataccgtctgcatatgtataggaaagggttaactcagcaggtcttgtttgcccagactctgtacatttccaagaaaggtctgcctttaggactggtccttggccagctcctggagaatgagctctcagcttttagaaaattctatctgctaagaatagttttgcatgtctcaggtcttgggccacaaaatatcagtttaatcagatggtttatgttaacaagtatgatttatggcaaacatagatctctaatctccatttctctctcatatatctatatttatctatccatatatatgtacctatatatatcaaatatgaagatatgtttatagcaattgcatatacatagagagatagtatgtagtakgaagagagacatagatattattcttcattttagaatgttatcttggtatgtttaaaaggaaaaacttaagatgtgttgcaatt

SEQ ID NO: 13417 - DNA, 590 bp, Homo sapiens
tttttcctaaaaggtaagggttcaaaagagtatgccaagaaaaaataagacctagtcagagctcaattttctcatagtatcattatatttagagtttgtttaaataagatcaagttatgactcatctattgcaattagttgatatgtctccttttttttttttttttttttgagatggagtctcgctctgttgcccaggctggagtgcagtggcgtgatctcagctcactgcaagctctgcctcctgggttcacaccattctcctgcctcagcctcccgagtagctgagactacaggtgcccaccaccacgcctggctaattttttgtattttttagtagagacggggtttcaccgtgttagccaggatggtcttgatctcctgacctcgtgatccacccacctcggcctcccaaagtgctgggattacaggcgtgagccactgcaccyggccaatatgtctcttaaatctctttaaatatatatattttaattgggactttattaatttgatttctatgtaaagagtgaaaaaatttctccctcattgtcaaattgaatcatcaatacaatctaaataatttagttgtg

SEQ ID NO: 13418 - DNA, 605 bp, Homo sapiens
agccccatggcaatatatctatgaaaccctatggaacacaatttgaaaaccgtcactctaaagaaatactgctgcttgtcatcagctgtgaagaatgtcccatggaacagtacctgggcaatctatattttcttcagtgcctcctgttttctcttatgtaaaaatctcatcagaacaggatgctatcattaaacccaaaaaaaataaacaattttgttctttgttacattttgatcaaaatagtgagagtcaaaggcctgatatacaaaaataaaataattaatgatcctatctggcttgaaagcagctgtacttctagcaattcctacaaagtctcatgggtttcagggaggggcacacttctgtaaaaaatctgcttaagcctctctgcttgataatggtttctgtaaatayagttgagtgagatattataaatcccagtcacatctattctctttccaattccttgtttcaatccacatagctcagagttctctcctttaagtgctctacataaatacataaatacagagtagagacatgttaagccccgttgtctaaggtggtggtagaaaataagtgagattaaaattaaaatgtgaata

SEQ ID NO: 13419 - DNA, 541 bp, Homo sapiens
ggtgcaatctcagctcactacaacctccgtctcctgggttcaagtgattctcctgcctcagcctccagagtagctgggattacaggcccatgccaccacatccagctaattttgtattttttgtagagacagggtttcaccatgttggccaggctgatctcaaacttctgaccttaggtgatccacctgcctcgacctccaaagtgctaggattrcaagcatgagccatcacacccagcccaataatggcatttttaagaaaccttccattattaaaaatcacataaaaaaaatgattcagtaaaagaaaagtttagaactagaagttttcaggattataattgccagtagctccagaataatgcaagtaaaacaaatttgattccttaattacataatcaatatcatagcttattcaagctatgaaaactctcaggagaaattcctatacttcaaaaagcatctggccactcttccttctcattcccttgcattcccattgctttgatagacagctaatgaagcttgcccagacccgtct

SEQ ID NO: 13420 - DNA, 551 bp, Homo sapiens
gggatgtgacggggagaactgagggcttgcaggagttaagacaaccaaaggaatttcaaaattgttgtgcattagatcttgagtgttaggaacatggagaaaagagagaggagctagtgtggtggccagaggctagtgaagtgctcctgttagtggaaaggagggccaaggaatgtgcctggagatgataaatggtcaatttgaaggacctgcattttagtcatgtaactgttccacctcttgcagttttctgaaattctcacccaaatgcacagcttctgtaagtgatgtgcatgtgtatgtgtacacgtatgtgtgcatggatgtgtgtgaatgtaagcatgtgtgtrtacatgtggtgaatatgtgtatgtgtgtgtgagagagagggagacacacagaaagagacagagacagaaacagaaagacagagaatggtttgtgtagatggagagacctgagcttctccttaggagggtcgctgcagtgcagaacagggaatggatgaggagataatacagaaatagagtgaattttgcagaagcaggatt

SEQ ID NO: 13421 - DNA, 1699 bp, Homo sapiens
ttaaaattttatttctgtaaatgggaagcaaaaggcataaagccttctttaaatttcatattttaaatttagaatcaattatagtttttttattcctacatcattacaatattaacaggttttctaacattagccacaagttcctacatcagtgcagaatatctcaattcagaaggtgaattatggaaattaaataattatatataaatcaaatattttcacttctatttaagacctaatacagaaagcttaaatgttcatattgtaaagaggagttcccagtaatgcaactattttgagagccccaagctaaactggggtttcagtaccacatccaccagcagccctgacccactaggaaatgaaggggaggtggatccacgtgttcacwgcgtgcctttcacagctctattacctggtggatggcctaatgtctggttgtctcacccacgaccagaaggtgactcacaaccacgaccagaaggtgattataccagcagatgcccttatcgctcttgtctgacccgtgtgcagtttatgcctgcctggctctccctctggtgccaggagcctgaccttgtgttctccacagctagggaagtccctttttcttcggatggaaggtgcaaaatcaacccaccactacagcagaaaatgagctcaaggatttattactttcagattctgggaaaggagagtgtaatgagttaggagagcagtaacaagtcattcatgcaagaatgaagaggcaggcagagagaaagaatacgcgtggcaaccagcagtgtatacgtaaagcaatagggtgtgggtcactttaagttcatggggaaatgcctgaatggtccctttaaaggaggcagtgggaaagtgggagcccccgcctgctaggcaggagagataccctaagttctttactctggccaccagcttgagccatttgggtgtggcagagaactggaaactgtgtcacaggtaactgagacctgcttctggtctgaaaaggttagaactatattcaaaataaaggacaaggcgatataaaaatcatagaaattcactacagcaactaacataaagtcttccaatgtaagaacatattttctattctctgatgtgctttaatttcataggccatagtagcagataatgtacatctctttaaagaataaagtagggccattgtaataaatatgaaaaacatacatgaagatgtaattttattaaagatttaatgaagactgcagtgaattgataaaaagaaataaattacctatggaaatatccctataatatgttagtgtataatttgcctttcttgttaacagaaaaaatcagacatatttttacttaatattgttaagaccatagattaaattagtggtaaagtcatctatgaaattccaattcaccaacagccagtcaaattcaattatattttgtaatgctatgatttgttagttcctgcattttactgtcagtattatctaaatttatgttaaagtatgacataaaaacattattttcaaaatgtaacttctatggtaaacttaatcctatacttcacagggattaatgtaaagcagaagcacacacaaatatacatgcacatttaagaactgtgtttgcactttctctttttaataagtagaaatcatacttcattaaggtttcttgcaaacatgttttaaagagctga

SEQ ID NO: 13422 - DNA, 596 bp, Homo sapiens
gggaggccaaggtaggaggattacttgagcccaggagtttgacaccagcctgggcaacatagagagaccctatctttacagaaaataaaaagaaattagtcaggcatggtggcatggccctgtagtcccagctagctacttgggaggctgagatgggaggatcygcttgagcctcggaggttgcagctgcactgggctgtgattgtgccattacaacagagtaagacagagtctcaaaaaaaaagtgttttatcatttatgtagagcttggagtttcaaacataaagtagaattactttatcacttgtaaaaaatgtgttctctgaaagttgataaacaatgaggtagaatgactcctgaaattaaaaaaaataatagcaggactttaatagataaatctgaaataagtacgatgaacaattttttaaataaaatataccctgaagctaatactttgtaaataccaacattttctttatggctatagtgtaaccaaattcaggagtaagtaactcaattatttggctgtcgggttgatggaatgaaaataaatttcttagaatatgatatgaaatatgatatgaaattcaacttta

SEQ ID NO: 13423 - DNA, 596 bp, Homo sapiens
gggaggccaaggtaggaggattacttgagcccaggagtttgacaccagcctgggcaacatagagagaccctatctttacagaaaataaaaagaaattagtcaggcatggtggcatggccctgtagtcccagctagctacttgggaggctgagatgggaggatccgcttgagcctcggaggttgcagctgcactgggctgtgattgtgccattacaacagagtaagacagagtctcaaaaaaaaagtgttttatcatttatgtagagcttggagtttcaaacataaagtagaattactttatcacttgtaaaaaatgtgttctctgaaagttgataaacaatgaggtagaatgactcctgaaattaaaaaaaataatagcrggactttaatagataaatctgaaataagtacgatgaacaattttttaaataaaatataccctgaagctaatactttgtaaataccaacattttctttatggctatagtgtaaccaaattcaggagtaagtaactcaattatttggctgtcgggttgatggaatgaaaataaatttcttagaatatgatatgaaatatgatatgaaattcaacttta

SEQ ID NO: 13424 - DNA, 355 bp, Homo sapiens
gacatgacatgaaatttaatgaaaatcaatcaaaaatttgaagcagtaataataggaatgtttcccatgtaatttgtggactgtgtacaacagaatctcttggagcagtggaggaaagagtatgagtcaaaatgtaaatttttaggctccactttcgaaccattcagccagattctctgagtagtaggacccaggactctgtattttaaaaagccttggaggtgatccttatggtctcttatgtttgaatgtcaatgtcagctttgagactaatccaccaaaattcttaagaaaawggagtgagcatttttagtttacctgttataaagcattctctgatcttgaaaaaagtagc

SEQ ID NO: 13425 - DNA, 525 bp, Homo sapiens
tgttctgcctgcatatctatatgtgtttcaagtgtgagtgtgaatgtgtgtgcacacatgtgcatgcattrtgtctatgctgtacacttgacagtctcaaactgggacaagaggggagctgattttcacaggtgctcaccatgtgccagactccatgcagggtactttgtatgcacgattgagtttcatcctcacaattctataaagtgggtatttttagccacatttcacaaaagataaaaccaaggcccagagaggtgaagacactcacctaaagtcccacagctaaataaatagaggaaacaggattcaaaacccatatacatctggctgtaaagcctgtgttctttagcctcctcccggcactgctttcccaaatgcctggctcattctcatactttagatctcagcttaaatgttacctttcccaagaggccttccgtgaccactctatttgaaggctgtcatcaatgattctttttagtaagacattacttttccttcaggacatgcctttgtttactg

SEQ ID NO: 13426 - DNA, 525 bp, Homo sapiens
tgttctgcctgcatatctatatgtgtttcaagtgtgagtgtgaatgtgtgtgcacacatgtgcatgcattgtgtctatgctgtacrcttgacagtctcaaactgggacaagaggggagctgattttcacaggtgctcaccatgtgccagactccatgcagggtactttgtatgcacgattgagtttcatcctcacaattctataaagtgggtatttttagccacatttcacaaaagataaaaccaaggcccagagaggtgaagacactcacctaaagtcccacagctaaataaatagaggaaacaggattcaaaacccatatacatctggctgtaaagcctgtgttctttagcctcctcccggcactgctttcccaaatgcctggctcattctcatactttagatctcagcttaaatgttacctttcccaagaggccttccgtgaccactctatttgaaggctgtcatcaatgattctttttagtaagacattacttttccttcaggacatgcctttgtttactg

SEQ ID NO: 13427 - DNA, 525 bp, Homo sapiens
tgttctgcctgcatatctatatgtgtttcaagtgtgagtgtgaatgtgtgtgcacacatgtgcatgcattgtgtctatgctgtacacttgacagtctcaaactgggacaagaggggagctgattttcacaggtgctcaccatgtgccagactccatgcagggtactttgtatgcacgattgagtttcatcctcacaattctataaagtgggtatttttagccacatttcacaaaagataaaaccaaggcccagagaggtgaagacactcacctaaagtcccacagctaaataaatagaggaaacaggattcaaaacccatatacatctggctgtaaagcctgtgttctttagcctcctcccggcactgctttcccaaatgcctggctcattctcatactttagatctcagcttaaatgttacctttcccaagaggccttccgtgaccactctatttgaaggctgtcatcaatgattctttttagtaagacattacttttccytcaggacatgcctttgtttactg

SEQ ID NO: 13428 - DNA, 529 bp, Homo sapiens
cactgcctccagccagcctggccaaaatggtgaaaccccgtctctactaaaaatacaaaaattagccgggtgtggtggtgggtgcctgtaatcccagctgctcgggaggctgaggcacgacaatcgcttgaacccgggaggcagaggttgcagtgagccaagatcgcgccactgcactccagcctagtcaacaagagtgagaccctgtttcaaaaataaataaataaaaaaaatcattgcctccctaatgggaggcttctgggatgctgaataaagttctttttcttgagctaggtgctggttccacaagtgtgctcactttgtgaatattaacttaggtgcattcctctgtgtgtaagttacatttcaataaaaagttgaccaaaaaaaaaaaaaaaaatcagtgcyacctgactcttgccccaggcttccccaccagaccagcatggattaaggcactctgccccccacaccatcctttctctctacttccccaaacatatccagaggcccttcccatgtaagggtt

SEQ ID NO: 13429 - DNA, 533 bp, Homo sapiens
atccttggctctcatgtgatagtgctgcattaatgacagtgattgtaggcaatagtttgatagtcagggatggttcactgcaaaaacaatcctatgtccctgaaataaatattaattcaaaacaaaataactggtgacaaaaatacataatgaagtgccctaacattatatgtgccctagaactctctgtgcttgaggaactcagaacagatcatatttcaagggaatactggtgtatacaggagtatagayagcaaagcaaattggaaaatgatagaggttttttttgtttagtctctagaattagccccaattgataaagtgatctttatttttgtgactgttaaccaacatggataagatatttagaaattggatttttataaatacaatccaattgaaaattggagattcagtgtcataaatacatattttaaaattatatcaatcagataaagctgtataatagcaacaaagctaggggaagcgatggatcagaaagttatttatcacagtgatttgaaaggctaaat

SEQ ID NO: 13430 - DNA, 533 bp, Homo sapiens
atccttggctctcatgtgatagtgctgcattaatgacagtgattgtaggcaatagtttgatagtcagggatggttcactgcaaaaacaatcctatgtccctgaaataaatattaattcaaaacaaaataactggtgacaaaaatacataatgaagtgccctaacattatatgtgccctagaactctctgtgcttgaggaactcagaacagatcatatttcaagggaatactggtgtatacaggagtatagacagcaaagcaaattggaaaatratagaggttttttttgtttagtctctagaattagccccaattgataaagtgatctttatttttgtgactgttaaccaacatggataagatatttagaaattggatttttataaatacaatccaattgaaaattggagattcagtgtcataaatacatattttaaaattatatcaatcagataaagctgtataatagcaacaaagctaggggaagcgatggatcagaaagttatttatcacagtgatttgaaaggctaaat

SEQ ID NO: 13431 - DNA, 689 bp, Homo sapiens
gggaacacagtctggcccaaaacaaccatcagtacaatcagcatgtgtgagagtctccaaagaagaaaaattaaagccaaaagaaactgggtcccaaaggctgacgtagaggagacccacagttaaaatatagcaagaagaagccacaaaaagaggtcagaaaagtagaagtgctgccaggacactaaagtaaagaatcagtttctaaaagtctccagtgcaatgtcaatatgttcaaaagctgtaataagcaaaagagaaaagaattcagaagaggtarcttaaactgacagttcaagaatattggttgcctttgggaaacgggtaaagtggattggagatagagtataaaagattaggaatttacatttaattgtaagaaactaaattccatgtttgagaaatctggcattaaaaagaagaaaataacttttaggatgcagttaacaaagttgaggttgaaccacataaatctgtcatttttgtaggccgaaaaataatcaattatcagcaatttcatatggttcaatctaaaaaacggtctgttttcaagaaagttccgaaatatataagggagtggtaaggaattcttgggaaaggagatattgaagaagcaaggagttgagaagtttgaggagaaaccagatattggaaaaaaaaaacaacaacaatgaaaaatcttttttttt

SEQ ID NO: 13432 - DNA, 572 bp, Homo sapiens
gctgacttgatccattaacagatcagcagtctacaaactaaatatcccaaaaatcagaacctgttgtctttcaatccattgtggaaataagggcctttatatggactccaagagtattctggtccagtgaggcaataattctcatcctatcagagaatgtgtattgccccagtaggacatggaatgcctgggaatgttcatcagtatccaagttttctgcatagtagataatgtattaactatatcatttactctggtacctaatagtaaacaacatrcatttaggtacattttttaactactagagcatatctgtgtgctctagaaaaaatggtgaggctttgcaagcattttaagtagacaagggcagggtagaagtaaaatatcacactttagtcaaaaattcatgtggcattttcttatttgaatgtttatagattcttgttggaggaaagggagagatggagacatgaaggaaagaagagaaaggtaggagggagagaaggaaggaagggaaaaagggggaagaaagggagaaaaggaaggaaaagggagagggaggggaaaagaag

SEQ ID NO: 13433 - DNA, 637 bp, Homo sapiens
ttttgaatcaaaataataagattaaacatttaaagaatgccattatagattaaatttaaagaagaaaactgcatttccaggagtaattctgagaatagtttttgattacctacctctccatgactgaaaaagaagcacaacactgtaaccaggcctcctaatcggctgccactggaaaagaagaaaacataaataacaaaaatccaggtcaatcctaagaaaaatgttaaaatggcataacatcataacctctggtattataaaagattttagycacactagaactctcctatgcttatttataaaatagtttatttcctccaaagtattagtcaaaataatcttttttcatttttaaaaaatcatttgctatcttcaatatgtatagactcagaaaagcacgcaaactgaaagggaataaaaaattcttactagtcacattgctgtacatcatgcaacctgatttttctttttattttctttataacctcatatttatttatgtccttcaacatttctcaaactgctttccttgggacagatgacatacattaggaaaaagggtgagaaagacgtgcaaggaaagggatccacggtcatgaggatggaaaaccccacactgcctacctgctcctag

SEQ ID NO: 13434 - DNA, 637 bp, Homo sapiens
ttttgaatcaaaataataagattaaacatttaaagaatgccattatagattaaatttaaagaagaaaactgcatttccaggagtaattctgagaatagtttttgattacctacctctccatgactgaaaaagaagcacaacactgtaaccaggcctcctaatcggctgccactggaaaagaagaaaacataaataacaaaaatccaggtcaatcctaagaaaaatgttaaaatggcataacatcataacctctggtattataaaagattttagtcacactagaactctcctaygcttatttataaaatagtttatttcctccaaagtattagtcaaaataatcttttttcatttttaaaaaatcatttgctatcttcaatatgtatagactcagaaaagcacgcaaactgaaagggaataaaaaattcttactagtcacattgctgtacatcatgcaacctgatttttctttttattttctttataacctcatatttatttatgtccttcaacatttctcaaactgctttccttgggacagatgacatacattaggaaaaagggtgagaaagacgtgcaaggaaagggatccacggtcatgaggatggaaaaccccacactgcctacctgctcctag

SEQ ID NO: 13435 - DNA, 1939 bp, Homo sapiens
aaagacattttttaaaaaattaaaggaatgaaaaccttacaaagtccttatttcagaagacaaaaaaaaaaagtcaattccttcaccaggacaacaggatttaactactgtagacagccacttactctcttgaatagaaaaataataagaggtgagtgtctaggctttaaactgcttattcatcatcttgaactaaggaaaataagtcctatggaaaatgcatttaaagaaggggatggatagtgaaatacaaggtcagtaggcaaacccattccaatgtttgggttgaaaggggccatgaaagacctgtaactgggagaacatgagtgggttgtggttgcatgtctgcattaggaactatgtatttcagagataaggagtaaagatctgttatcatctgttatctgctcctgtatcttaagtctagttggtttgggagcttttctatataatataaatatattatataagccacacatataaattctccagtagggacatttaaaaacaaaaaaaggtgaaaataatgtgataataaattttacttaacccgatacatccaaaatattatcatttcaacatgtaatcaatgtataaaattattgatggcatatttcactttctttttccatattaaatttttaaaatctaatgtgtctcttacacttgagtatgtcttaattcatatgytaaatgttaatcagaaataattaatccttaattagctttaataacatttacagttaagtagtagattcacatactcaagttatcccagattttaaaagttttacaataactcaatggagtatcagtttgaaaatccagatttaaattcattaaaattaaaaattgagctcctcagttggaccagctacattgcaagagctccatagtcacttatgcctagtagctaccatgttggacaacgaaattctaattagttgatcattttatgtgaatagattgaaaaaacagtacaattcagtaaaatgtgtttggctataatattttaatcccttattgcaagtaggtagcaaataaatgaggaaaaatcattgccactggaaaatatggtaactgggttaatgccagggcactactcaatgatacccagtaaacagcttttgtagcccttattctaaaggacacacactgaacatgtggtcaggtgaaaggaaacagaacaatagatgtgtccattattacacttttctgactttcacagtcatggtaaatagcctcgacgttataagaatgggataaaaatcatattcattctcagatctagtagaattaaatatatagtaaaactgccaagtaaagactatctattttgaagaactgacaggttgtttaaattaagacaatacttaaagtattagaggatacttaaaaacttaatataatgtgaaaacagtggtttaatgaaaacaaaattcttacgacagcaaaatgcagaatttcgtcttcgttcagttcatttttcaattttctgaataaaggttgcattgctctgcaaggtccacaccaggcttggtaaacatcaatcactagaagatgatgatatttatgaaataacaaagtctaccaatctaggatagcagttatcccaatctggagccatggccagggcaaaggcactgcaggatttcttggtcaaagtggggactctagagggacagggtgccaggaggagctccgggtcaaaccccaggtggccagacagccggggagtccttatacctgttaagcctttgttctgcaacatctcatcccacaggctttgattattgatgactgtctgcaaagtggaaggcactgtaaaaggtattcaagcactagtgcaccagataaagaattgttgatatgtcagacccacctgtaactggacttctcgttttttgcttgccatttatctactatcataggaaaaaga

SEQ ID NO: 13436 - DNA, 1939 bp, Homo sapiens
aaagacattttttaaaaaattaaaggaatgaaaaccttacaaagtccttatttcagaagacaaaaaaaaaaagtcaattccttcaccaggacaacaggatttaactactgtagacagccacttactctcttgaatagaaaaataataagaggtgagtgtctaggctttaaactgcttattcatcatcttgaactaaggaaaataagtcctatggaaaatgcatttaaagaaggggatggatagtgaaatacaaggtcagtaggcaaacccattccaatgtttgggttgaaaggggccatgaaagacctgtaactgggagaacatgagtgggttgtggttgcatgtctgcattaggaactatgtatttcagagataaggagtaaagatctgttatcatctgttatctgctcctgtatcttaagtctagttggtttgggagcttttctatataatataaatatattatataagccacacatataaattctccagtagggacatttaaaaacaaaaaaaggtgaaaataatgtgataataaattttacttaacccgatacatccaaaatattatcatttcaacatgtaatcaatgtataaaattattgatggcatatttcactttctttttccatattaaatttttaaaatctaatgtgtctcttacacttgagtatgtcttaattcatatgctaaatgttaatcagaaataattaatccttaattagctttaataacatttacagttaagtagtagattcacatactcaagttatcccagattttaaaagttttacaataactcaatggagtatcagtttgaaaatccagatttaaattcattaaaattaaaaattgagctcctcagttggaccagctacattgcaagagctccatagtcacttatgcctagtagctaccrtgttggacaacgaaattctaattagttgatcattttatgtgaatagattgaaaaaacagtacaattcagtaaaatgtgtttggctataatattttaatcccttattgcaagtaggtagcaaataaatgaggaaaaatcattgccactggaaaatatggtaactgggttaatgccagggcactactcaatgatacccagtaaacagcttttgtagcccttattctaaaggacacacactgaacatgtggtcaggtgaaaggaaacagaacaatagatgtgtccattattacacttttctgactttcacagtcatggtaaatagcctcgacgttataagaatgggataaaaatcatattcattctcagatctagtagaattaaatatatagtaaaactgccaagtaaagactatctattttgaagaactgacaggttgtttaaattaagacaatacttaaagtattagaggatacttaaaaacttaatataatgtgaaaacagtggtttaatgaaaacaaaattcttacgacagcaaaatgcagaatttcgtcttcgttcagttcatttttcaattttctgaataaaggttgcattgctctgcaaggtccacaccaggcttggtaaacatcaatcactagaagatgatgatatttatgaaataacaaagtctaccaatctaggatagcagttatcccaatctggagccatggccagggcaaaggcactgcaggatttcttggtcaaagtggggactctagagggacagggtgccaggaggagctccgggtcaaaccccaggtggccagacagccggggagtccttatacctgttaagcctttgttctgcaacatctcatcccacaggctttgattattgatgactgtctgcaaagtggaaggcactgtaaaaggtattcaagcactagtgcaccagataaagaattgttgatatgtcagacccacctgtaactggacttctcgttttttgcttgccatttatctactatcataggaaaaaga

SEQ ID NO: 13437 - DNA, 554 bp, Homo sapiens
cagagcctgaagagaaactgactgggctttcggggtcggggcagagggaaccccacggacatggatcccacactggaggaccccaccacgcccaaatgcaagatgagaagatgctccagctgcagtccaaagcccaacacccccaagtgtkccatgtgtgatggggacagcttcccctttgcctgtacaggtggagaagccaaggacaggctcagggaaccggagaccgagaaggcgctgtcctcttcactgcacgtgccctggaccagtgccggccctgatcatgcagctcttccaggcccactgcttcttcctgtccactaggccacagccgccctccaggcccactatgcacacatcttcccctccaaggtttgttctgcccctgccctgactcccagccctgtgggggtcctgaccgcacctcacctggctcagactcttgacgctgccctggctgccccaccactgcctctgcccgagagtcacgtgaggctgagagtaggggcaggggcagcagtggtgccagttggggggcggtccagtgggaggag

SEQ ID NO: 13438 - DNA, 554 bp, Homo sapiens
cagagcctgaagagaaactgactgggctttcggggtcggggcagagggaaccccacggacatggatcccacactggaggaccccaccacgcccaaatgcaagatgagaagatgctccagctgcagtccaaagcccaacacccccaagtgtgccatgtgtgatggggacagcttcccctttgcctgtacaggtggagaagccaaggacaggctcagggaaccggagaccgagaaggcgctgtcctcttcactgcacgtgccctggaccagtgccggccctgatcatgcagctcttccaggcccactgcttcttcctgtccactaggccacagccrccctccaggcccactatgcacacatcttcccctccaaggtttgttctgcccctgccctgactcccagccctgtgggggtcctgaccgcacctcacctggctcagactcttgacgctgccctggctgccccaccactgcctctgcccgagagtcacgtgaggctgagagtaggggcaggggcagcagtggtgccagttggggggcggtccagtgggaggag

SEQ ID NO: 13439 - DNA, 593 bp, Homo sapiens
ctgggattataggcgtgagccactgcgcccggccactgtagctcatcttttaaagctgtaatgctccttgctttccttgcttccttctccttttctcttctgtttcaatgagaacaaacttgaaaaccatcagactgaargccacttcaagaggaatcatggtctggtgtagaagccctaatgctacagactgagtgagccccggcaagcaattttccctctttgggtcttggttttctcatcttttaagccaaagcagtgactcagacctttcttactccacacagttattctggagatccaaagggctcataggtgtgaaatgctttaacttgaataactttccatgttgacatgagggctaactggatccctattccttcatcattggatatcagctggtaacatcctggctggcttttacatctatattgctttccaaaaagagctgtggtatcctataaaataatttatcattgtatctgctatagcaatagggaaatgtactagaatagaagatcgtggccatgggatgtggtgactcagatgtgggtcatgggctctgctgcctcctctgttctctgggaaggact

SEQ ID NO: 13440 - DNA, 593 bp, Homo sapiens
ctgggattataggcgtgagccactgcgcccggccactgtagctcatcttttaaagctgtaatgctccttgctttccttgcttccttctccttttctcttctgtttcaatgagaacaaacttgaaaaccatcagactgaaggccacttcaagaggaatcatggtctggtgtagaagccctaatgctacagactgagtgagccccggcaagcaattttccctctttgggtcttggttttctcatcttttaagccaaagcagtgactcagacctttcttactccacacagttattctggagatccaaagggctcataggtgtgaaatgctttaacttgaataactttccatgttgacatgagggctaactggatccctattccttcatcattggatatcagctggtaacatcctggctggcttttacatctatattgctttccaaaaagagctgtggtatcctataaaataatttatcattgtatctgctatarcaatagggaaatgtactagaatagaagatcgtggccatgggatgtggtgactcagatgtgggtcatgggctctgctgcctcctctgttctctgggaaggact

SEQ ID NO: 13441 - DNA, 572 bp, Homo sapiens
ccaactgaaagctagcaaagcactgtgcctaagggaaaagggaagtcccctgcagtctgagttagtccagtaacctcttcccaatgcaagggaagaggaattgaggtgccatgcagtccaagcagaccagcctgcmcaaaagctgaagccagcatggggaggctaagcaatctaggaatagttgtgatccaactaggttaagtgacacagtgaggcacagtttgtttgactcccatagaaacttgttaattgtaactaacggacaagtcacttttactctgtgagttctagttttcttgtccataaaatagagatgttaatatccatttcacatggctgttgcgaggatctgcccaaatgagactgtgtgtggctgaactctggaaacaatgaggtgccttgtagcagttaggtgatctctgggaaagagaaccattagatgactgcctttctaccttgatctaagagtgtttgttgttgttgtttgttttttggagacagagtctcactctgtcgcccaggctgcagtgcagtgggcaggagtgcagtggcgcgatctcggctcgctgcaa

SEQ ID NO: 13442 - DNA, 631 bp, Homo sapiens
tccaatttgtaatagtaaatctttggctacagcctatttctaatatagatgcactaggcagaaccayctgcttattttgaactttaaaaaatattttcagtgagtggatttgctgaatataattcaatttgcacatgaaacttaatgcctggcatttctctagttcattgattatgtgtcagttgaaccatatttatattacttggtttatttgagggaaaaaaggtaaaaataattgtaatttttcaaatgtgaaaaattagctttgtctcagagtatatatcataactgtcaacagtttgcaaatgtataaattagcatccaatattagacttcttattaagacactacctataaaaaaacccaacaaaattcactagatttataaaaagtagtaattagctaggcatggtggtgcatgcctgtaatcccagctactcgggaggctgaggaaggagaatcacttgaacccgggaggcggaggttgtggtgagacgagatcaagccattgcactccaggctgggcaacaagagcaaaactctgtctcaaaaaataaataaataaataaacaaataaataaataaataaataaataaaaagtagttcactatattggaaggtggaatatat

SEQ ID NO: 13443 - DNA, 631 bp, Homo sapiens
tccaatttgtaatagtaaatctttggctacagcctatttctaatatagatgcactaggcagaaccacctgcttattttgaactttaaaaaatattttcagtgagtggatttgctgaatataattcaatttgcacatgaaacttaatgcctggcatttctctagttcattgattatgtgtcagttgaaccatatttatattacttggtttatttgagggaaaaaaggtaaaaataattgtaatttttcaaatgtgaaaaattagctttgtytcagagtatatatcataactgtcaacagtttgcaaatgtataaattagcatccaatattagacttcttattaagacactacctataaaaaaacccaacaaaattcactagatttataaaaagtagtaattagctaggcatggtggtgcatgcctgtaatcccagctactcgggaggctgaggaaggagaatcacttgaacccgggaggcggaggttgtggtgagacgagatcaagccattgcactccaggctgggcaacaagagcaaaactctgtctcaaaaaataaataaataaataaacaaataaataaataaataaataaataaaaagtagttcactatattggaaggtggaatatat

SEQ ID NO: 13444 - DNA, 516 bp, Homo sapiens
gatccccaaggtccagatctcagcaactgttcttctccttgggtcaatcatataacacagaaggtaaatcttgtgactgacaagaaagtctttgctaaaactatatcatctgttgttgatgatagctgttggaaaaaaaacagtcaagaattcttttaaaatcaatgtagaaaatttcacatttaatgacaacctctaatatgttatgagctaattctagaattttgttgtttttaaagtgcaaatccatgaatttcttcttatattgcttataataattttattattaataaaatttctctggtattgtgcactacagctataaaagtccaagagrcattatacattaagcaagtaaaagtttctagcatgtatacttacgagttttcttgtggaaataattataatttttcaaagtctacctttggaatcttaagccatctgataaatgttctgtaacctaatcatttatcaatgataaaaatatacacatgtgtgacagaatcttgcagactc

SEQ ID NO: 13445 - DNA, 516 bp, Homo sapiens
gatccccaaggtccagatctcagcaactgttcttctccttgggtcaatcatataacacagaaggtaaatcttgtgactgacaagaaagtctttgctaaaactatatcatctgttgttgatgatagctgttggaaaaaaaacagtcaagaattcttttaaaatcaatgtagaaaatttcacatttaatgacaacctctaatatgttatgagctaattctagaattttgttgtttttaaagtgcaaatccatgaatttcttcttatattgcttataataattttattattaataaaatttctctggtattgtgcactacagctataaaagtccaagaggcattatacattaagcaagtaaaagtttctagcatgtatacttaygagttttcttgtggaaataattataatttttcaaagtctacctttggaatcttaagccatctgataaatgttctgtaacctaatcatttatcaatgataaaaatatacacatgtgtgacagaatcttgcagactc

SEQ ID NO: 13446 - DNA, 1040 bp, Homo sapiens
tcactcattaaacccctctttactgagcagctcctatgtgtaaagcactgtgataaacacagaggataaaatggtgagaaaaacagacacggttcctccactgatagagcttatagtacagcaagagacactatttatcaattcagtgactagagttgtttgcacttcaagtttttgttctttacttwatgtgtgtttgctttggccttactgaatcctaagtactgggctaaatgtggctgggtgaagtgcagaccatacaccctctgcctccatagaacttatgaataatgtgatatgacagaggttacaggatgctttggtggtacacgaagtttaccccaggcttggggaatcaggggaggctgtccagagattgtgacatctcattaagacctgaaaaatgcatgcgaattggccaggtaaaaaagacggaggagtcaggcaaggtggaagaatttcagagaactgtcagcacttcaatgtcattgaagcatcaaggagcaagcctgacaggtcagcagggccagatcgtaaaaaggttatataatatatgcagataattgacttttccccaaggacaattgaaactattgagcataaatttcttttttgttgttgttttttagagtttttccatctgaaacttcattttgcaatcaaataaagttacttttgtctactgtattcctaccttaaccccaatgctagaaataaataaacacagaaaagacatttaggattggtcagagtaggtaagtgtggctatttctataagaaagtggagaaatgccacaaactaattttattagccgtagtactgaaaacattcagtctttcagagacaaaaggaaatatgactttttttaaaagctcacttcttcccaaaacctgcacatttttgttgtagatatagatgaattactgccagattctacttaaaatgacaaatacactcagataactgttgcctgagtatttcagtgtcatccctatgttagtaacatttttctccagagtgtcagacataactcttcact

SEQ ID NO: 13447 - DNA, 496 bp, Homo sapiens
ctctgtgaggcgcctcctgactgcctggtcctgtgtgggtgtggtggaggctctggggcctcaggggctgtttgggtctctgcacagagctgaagtgaggtgggcagggctggtgatcttgggggcctgaccaggtaagtccccaggatgccagatcacctggaaagtaagctgggggcagatggttcccacgcctcccttccttcagcaccccctggaaaagtacagaagattcagggaatgctatggacacctgggcagatgcccagtgccttgcaggggtgctgccaaccccgccccacaacttggaacattttgcctgtgcacatgggctccctgctgggcgkccccagggagaaggcaggcaaccctgctgtttgtaccaaagggatctggagactgttcccaggctgaccctttcctgctagccaaggctcagacccaggggatgtctgcctgccttgcccatgtccttgtggctgcctcacatggctgc

SEQ ID NO: 13448 - DNA, 549 bp, Homo sapiens
tgaattagaaataaatgacatgctacaacatttaatttaataaaagccccaatggcagaagaaacacaaagaaacaagttgatgctttctatccagtaacaaaaagtgactctagaaaaagcaaatgttattctaacatttcagacacaatccgctaaatatttattataaataggagtccagtagacaaagggttgcaaaggaaacmctcggaaggcaggtaatgctactaccatagagttttaagagaaaataaaacaaatttacaatctagagtgttatctctttttaccaggatgaaaaaataaaccttaccacctgaaaatatgcagcataagatgaagttttcctgacctaagaaagaaatcaaagaatgatggatgtacaagaaagtcaatagtgaattcctctgacctagaaagaggaataactaactatattcctttaatttccaaattagtctcagataaatagcctagaaaggaaattgactcatttatttgaaaaatctattctctacatctcatctatcaattgtttcaatgttgt

SEQ ID NO: 13449 - DNA, 1328 bp, Homo sapiens
tgcctgtagcataactacggaacagagaatactccaaacttcaaattatgcccaaacaggtaaataaatgaccaaattcagaagaaaaagtgcagaaaagaagaaaggaaagcagaggagtaggtatggaaaacaccccccagggaaacaatgtctcatcccaaatgggaaaacattgaacacagttgtgagacgtggcggattagggcactggctactgagaatcacaaggaaggagattgaaagtctgcaggaacagaggtaggtatcttgggaagccaggggttccgtaggaaaaggattaactggaaagggcggccttcagagatttgatgttgaagaaaaacaagaaagaactggaaatkaaagtactggaaaaacaagagaattacaaaaccagaaggcaaactgccactccccaaaaggagggcaatttttaaggaaattgcacttcacaaacaaacagaagaatctcttgaattcagaaacctcatgtatcacccggtcctcacctcctcacctctgtctacatgtgacagtcattgctggccgctccaggaaagaaaacatctcaaaatgaagggtaaatagcaacatatccatacaaagtgactagaagatgaaagcagatcataaaaaaccttttagctgatgaatattcttcctccccaaacaataatgaagcatgagaaaatgtgaacaccccagtcttaattaaataacaagtaaacttggaggtatgggagaaaaaaaacaccctgcctcaggaaatgtaacccatggcatcactaggggtattttggccaaaatatttaatctgaattgagtcattcagaaacagccagacaaattcaaattgaaggctattttacacaaacagcctggacatgaaaaatgccattattaaaaaacaaagagagagcagaaagactattccagattaaaggagactaaatgaagtcaagcaattaaattataggagatgactcattatatcatatgtagtttttaaaaaactatacaatttttgaaatgattggggaaatctgaccattataactgcattgcttcatcaatgattaattttatgagggtgataatggtattggggttatacaggagaacgtctttgttttaaggtgataactgataaagcatttgggggaaaacatgatgtttacaactttagaatggttcagagaaataagaaaatacggcaaaatgttagcaatcagtgaatctgggtaaggaaaatatgagtgttcattgtactgttatttcagttaacctaatttgaaattttcaaaattaaaaaaaaattgaaaaaa

SEQ ID NO: 13450 - DNA, 536 bp, Homo sapiens
tgttctgcccctacccaactagctgtttggccttgatccttgatttctttcctcatctataaagtgggaataatggcacctgccttacttgtctcactgggttgaaatgaaagcgaagtgaaatagcaaatgtgaaagaattttggaacgtttttatgttgtaagttggttsctaaggtctaaaagaaatattaataattacgtcgaatatcttctgcagaaaaaattaaaccgaccccatcccccgcacatctagccctacctggcataggttttagttcttttaattttcgaattagaacattgtaaaggaactgtagggacgagagtggcatcaggtctcctcatccttctcacatccttgcccccgcacccctctctcaccccagagttcaagcaccaaccgaaaagattgagagtagctcagggtacggtaaacggaggaagctttgaaaaaggcggggaaagcctgggatggcgagggggtgctcgctgaggaggaggagagaagcgacagtcgcggggcccggaaaaga

SEQ ID NO: 13451 - DNA, 527 bp, Homo sapiens
cctgcccacctccttccagcactgactggaagggaagttcaggctctgagacacgccccaacatgcctgcacctgcagcgcgcacacgcacgcacacacacatacagagctctctgagggtgatggggctgagcaggaggggggctgggtaagagcacaggttagggcatggaaggcttctccgcccattctgacccagggcctaggacggataggcaggaacatacagacacatttacactagaggccagggatagaggatattgggtctcagccctaggggaatgggaagcagctcaagggaccctgggtgggagcataggaggrgtctggacatgtggttactagtacaggttttgccctgattaaaaaatctcccaaagccccaaattcctgttagccaggtggaggcttctgatacgtgtatgagactatgcaaaagtacaagggctgagattcttcgtgtatagctgtgtgaacgtgtatgtacctaggatatgttaaatatatagctggcaccttagttg

SEQ ID NO: 13452 - DNA, 566 bp, Homo sapiens
gaccgaatcatttctattctattttcagtatcatcaggacaagttcaaatgatcctgaaagaaataattcactaacctgtttgtaaggagtatcattcaggtaaatttcagtgtccccaactgaaatcaaaacacttttagaacaaacaatatcgttgtcaaagcatttcttgttctgggcaatgacagatatatctgaatcatctgcactctgaaatgtcacaaatattttattaatacaaatatatacaacctatattatttttagttatttttattaagaaatcttaaatattgacaatggattgcattagaactgaaaaacaamttacctctaaaataaaaagtcatttttaactaacaatgtgaagaagtctatagaaatatagtaggatagctcaatctttaaacacctataatatctgttaaaattttgttccagccaagtttaccattttatttctatagctcaaatgtaccaaccattatcattttatttatcaataaataatcaacaaaacaatatgtcacttagggaaatctttaaaaaatattcatttgagata

SEQ ID NO: 13453 - DNA, 566 bp, Homo sapiens
gaccgaatcatttctattctattttcagtatcatcaggacaagttcaaatgatcctgaaagaaataattcactaacctgtttgtaaggagtatcattcaggtaaatttcagtgtccccaactgaaatcaaaacacttttagaacaaacaatatcgttgtcaaagcatttcttgttctgggcaatgacagatatatctgaatcatctgcactctgaaatgtcacaaatattttattaatacaaatatatacaacctatattatttttagttatttttattaagaaatcttaaatattgacaatggattgcattagaactgaaaaacaacwtacctctaaaataaaaagtcatttttaactaacaatgtgaagaagtctatagaaatatagtaggatagctcaatctttaaacacctataatatctgttaaaattttgttccagccaagtttaccattttatttctatagctcaaatgtaccaaccattatcattttatttatcaataaataatcaacaaaacaatatgtcacttagggaaatctttaaaaaatattcatttgagata

SEQ ID NO: 13454 - DNA, 566 bp, Homo sapiens
gaccgaatcatttctattctattttcagtatcatcaggacaagttcaaatgatcctgaaagaaataattcactaacctgtttgtaaggagtatcattcaggtaaatttcagtgtccccaactgaaatcaaaacacttttagaacaaacaatatcgttgtcaaagcatttcttgttctgggcaatgacagatatatctgaatcatctgcactctgaaatgtcacaaatattttattaatacaaatatatacaacctatattatttttagttatttttattaagaaatcttaaatattgacaatggattgcattagaactgaaaaacaactyacctctaaaataaaaagtcatttttaactaacaatgtgaagaagtctatagaaatatagtaggatagctcaatctttaaacacctataatatctgttaaaattttgttccagccaagtttaccattttatttctatagctcaaatgtaccaaccattatcattttatttatcaataaataatcaacaaaacaatatgtcacttagggaaatctttaaaaaatattcatttgagata

SEQ ID NO: 13455 - DNA, 566 bp, Homo sapiens
gaccgaatcatttctattctattttcagtatcatcaggacaagttcaaatgatcctgaaagaaataattcactaacctgtttgtaaggagtatcattcaggtaaatttcagtgtccccaactgaaatcaaaacacttttagaacaaacaatatcgttgtcaaagcatttcttgttctgggcaatgacagatatatctgaatcatctgcactctgaaatgtcacaaatattttattaatacaaatatatacaacctatattatttttagttatttttattaagaaatcttaaatattgacaatggattgcattagaactgaaaaacaacttacctctaaaataaaaagtcatttttaactaayaatgtgaagaagtctatagaaatatagtaggatagctcaatctttaaacacctataatatctgttaaaattttgttccagccaagtttaccattttatttctatagctcaaatgtaccaaccattatcattttatttatcaataaataatcaacaaaacaatatgtcacttagggaaatctttaaaaaatattcatttgagata

SEQ ID NO: 13456 - DNA, 566 bp, Homo sapiens
gaccgaatcatttctattctattttcagtatcatcaggacaagttcaaatgatcctgaaagaaataattcactaacctgtttgtaaggagtatcattcaggtaaatttcagtgtccccaactgaaatcaaaacacttttagaacaaacaatatcgttgtcaaagcatttcttgttctgggcaatgacagatatatctgaatcatctgcactctgaaatgtcacaaatattttattaatacaaatatatacaacctatattatttttagttatttttattaagaaatcttaaatattgacaatggattgcattagaactgaaaaacaacttacctctaaaataaaaagtcatttttaactaacaatgtgaagaagtctatagaaatatagtaggatagctcaatctttaaacacctataatatctgttaaaattttgttccagccaagtttaccattttatttctatagctcaaatgtaycaaccattatcattttatttatcaataaataatcaacaaaacaatatgtcacttagggaaatctttaaaaaatattcatttgagata

SEQ ID NO: 13457 - DNA, 583 bp, Homo sapiens
tctatgggggtagtgggaactcctgtagctaagattccagaggtctgtggggaaagtgtggcatcctaggattccttcactcacccctttcttcagtgcaatttaggttcggaggtcagttctggagcccaaacaaaattcccagcttcctccctcttcaaccacaacatctacctcaccttttcatccattttcagtgtgttttcccaaaatacctgtttttcctctcttctttaaagatctatgttgaccataaattgatagtagtgagttggggtgtgtgtgtgcctgtgtgcctgtgtaagtaagggaggggcttctttgtatctgaaaattgaaatagtttaaaaaataggtttgaaatatcttgtttgattagttttattctgtgtaaaagttcctgaaaatgttctgcttctcactatagttctctttaaaaggacacattatgaatattataacatatatgcatttttctttgatctagaaaagctttttgtcataaaaagaaaatgaggkttattattaggtacaacagtcaaagaatgaactaaggagcagatcttgttttttgtttcatgta

SEQ ID NO: 13458 - DNA, 540 bp, Homo sapiens
tgtgtgtgacagtatgtgtgtttgactatatatacacacatgtgcctatagtacatgtatatatgcaaatataagtgtgtatatgtgtatacacatacatatataataatacactatatatatatatataaaattcaattttgtatatatacaatcctggatttcctggactttattattttatgtacttatgttcattaagaagttagtgttctccccatatcccttcttcctttttcctcccatggtatctgggctaaacttaccctacactatccacacacatcccacacttccaggtttgaggaggaggaaagttaccatgctttgacattgtatttagttataataacagaattcaggcaggccaaaaaytgatcccaagaaaattacctttttttaatcctagttcttcagcaaccaggttgctgtgtgtgatggtgcctttctggcaatggcactgttatagtgggtagctctgcagatgtgagcagggcaggagagcccccatccccctcattaggaacgtcaggataccat

SEQ ID NO: 13459 - DNA, 540 bp, Homo sapiens
tgtgtgtgacagtatgtgtgtttgactatatatacacacatgtgcctatagtacatgtatatatgcaaatataagtgtgtatatgtgtatacacatacatatataataatacactatatatatatatataaaattcaattttgtatatatacaatcctggatttcctggactttattattttatgtacttatgttcattaagaagttagtgttctccccatatcccttcttcctttttcctcccatggtatctgggctaaacttaccctacactatccacacacatcccacacttccaggtttgaggaggaggaaagttaccatgctttgacattgtatttagttataataacagaattcaggcaggccaaaaactgatcccaagaaaattacctttttttaatcctagttcttcagcaaccaggttgctgtgtgtgatggtgcctttctggcaatggcactgttatagtgggtagctctgcagatgtgwgcagggcaggagagcccccatccccctcattaggaacgtcaggataccat

SEQ ID NO: 13460 - DNA, 1054 bp, Homo sapiens
ttcactgttaaaattcaaacaaatttaacttaaaatctgtaagtatgaaatgttctgacaaagtacagatttcatttttcaataaactcaaacaatacccacatttattaatcaaataaaatttctcacaattctttagtatgatatagttatcatgaaaaatttaaactaccgaaacattgagggagctagagtctttcatgttctcaagtcatatctagaagattaaattatatttttmtctaatataacaagttaagacagtagaaataaaaataagttattagtgatttgatatcctttagacaaaaccaagatttggaatatggaacccatacatgcttcaaatttaagttttgtgattgtataaattccatgtttgaaagagaacttataaattctttcaggtcattcaaaataaataataatggttattttcaaaggctcattcctaataattcctaataattcacatagcaatcatgaattatgcaatttaagcatatatattattacaaccatatttcccaatctggattcatcagtatttcttatgggtttataaaacatatgataaaacacatgttttaaaactttgtttctagtcctaattaaattatccagcagagacagttttcagtttaggaaaaattttcatcctttttctcttggctgtgatccagtttgctagtgaacacccatgaatatgcacatctacataattctttataattaataatttacatgtggaaacacgagaatattagtgcataacagaaactactatggtcagatttggtgaccatagcctcaggcaaagtatgtgtttcattcccttcattagacattttcttttagaattttggacattttaaattacatttacaggattctcattttatagatgaataaattactgcatataatttgaagtgctttacttaaaatcatctcttagaataatgataaattaaaagtatagacttggttttcaggtacctgatattagccctaacttggttacccatttggctgtgttttatagctaagtaat

SEQ ID NO: 13461 - DNA, 1054 bp, Homo sapiens
ttcactgttaaaattcaaacaaatttaacttaaaatctgtaagtatgaaatgttctgacaaagtacagatttcatttttcaataaactcaaacaatacccacatttattaatcaaataaaatttctcacaattctttagtatgatatagttatcatgaaaaatttaaactaccgaaacattgagggagctagagtctttcatgttctcaagtcatatctagaagattaaattatatttttctctaatataacaagttaagacagtagaaataaaaataagttattagtgatttgatatcctttagacaaaaccaagatttggaatatggaacccatacatgcttcaaatttaagttttgtgattgtataaattccatgtttgaaagagaacttataaattctttcaggtcattcaaaataaataataatggttattttcaaaggctcattcctaataattcctaataattcacatagcaatcatgaattatgcaatttaagcatatatattattacaaccatatttcccaatctggattcatcagtatttcttatgggtttataaaacatatgataaaacacatgttttaaaactttgtttctagtcctaattaaattatccagcagagacagttttcagtttaggaaaaattttcatcctttttctcttggctgtgatccagtttgctagtgaacacccatgaatatgcacatctacataattctttataattaataatttacatgtggaaacacgagaatattagtgcataacagaaactactatggtcagatttggtgaccatagcctcaggcaaagtatgtgtttcattcccttcattagacattttcttttagaattttggacattttaaattacatttacaggrttctcattttatagatgaataaattactgcatataatttgaagtgctttacttaaaatcatctcttagaataatgataaattaaaagtatagacttggttttcaggtacctgatattagccctaacttggttacccatttggctgtgttttatagctaagtaat

SEQ ID NO: 13462 - DNA, 483 bp, Homo sapiens
gggagttcactcatgatttggctctcccatttcctcagccctccctctccatstgcccctttcctttacagccccgggctttcatagggttggcttcatggctccatatctcttaaactaaccctgatcccaacacacctttccccaccccagctgagtaacatccacttcagatttaagcaagatgattatcatttcctcttgtccctccctctgaccctgagggcagtggttctcaaactctatggcttcaagacctctatcaaaccttaagtatgtcaactctgatttctttgagcagtagtttgcagttctccttgtagagatctttcacctccctagttagctgtattccaagttattttattctttttgtggcaattgtgaatgggagttttttcatgatttggctctcagcttggctcttgttggtgtgtaggaatgccagtgatttttgcatattgattttgtatcctgagactt

SEQ ID NO: 13463 - DNA, 589 bp, Homo sapiens
tgtagatctccaggaatgaatgtcctgacatttagctcttaaagaaaatgtatatatgttgcttgtcaaaagcaggttatttataggtcctgagattcataggttctagcagctaatcttcaggaatattacttgatggggcatcatagacaagatttacttgatatttgtcctttttctaaatctgcacatttatttaaaatagtattctgggctctcaattgaggaatggtctctagacctagccgttctgtacctgggctattgccaaacattgattgttgaaaagataatagcatccacagaggcaacccagggagagggaggaagaggacctcttgtaagttaaaaatgaacaagaaggcagctagcttgctgccaagaagcatayggagtaaacatagataaagcagatggagaatagaagacagttcaaaaatgtttgcacggtacgtatacaaataaatgagccaggcctggtctctgacaattctcgcccctcttgctagagggtctgcagggctggtggcatggatcctatgtgacaaagaagaaaacagatgatgaagtcggggggcttagaaggcaa

SEQ ID NO: 13464 - DNA, 589 bp, Homo sapiens
tgtagatctccaggaatgaatgtcctgacatttagctcttaaagaaaatgtatatatgttgcttgtcaaaagcaggttatttataggtcctgagattcataggttctagcagctaatcttcaggaatattacttgatggggcatcatagacaagatttacttgatatttgtcctttttctaaatctgcacatttatttaaaatagtattctgggctctcaattgaggaatggtctctagacctagccgttctgtacctgggctattgccaaacattgattgttgaaaagataatagcatccacagaggcaacccagggagagggaggaagaggacctcttgtaagttaaaaatgaacaagaaggcagctagcttgctgccaagaagcatatggagtaaacatagataaagcagatggagaatagaagacagttcaaaaatgtttgcacggtacrtatacaaataaatgagccaggcctggtctctgacaattctcgcccctcttgctagagggtctgcagggctggtggcatggatcctatgtgacaaagaagaaaacagatgatgaagtcggggggcttagaaggcaa

SEQ ID NO: 13465 - DNA, 533 bp, Homo sapiens
gaatgagtatagaacttcaaactccaccctcccaactgtgtgacccttaggcaaattcctttacctccctaatcccaatcatgcagagttgatgtaatagagataaagtcaaagtggtagcaatcattattattacctgagtcctatttgccaaaaattatgtatggcagtgatcatgcagcttagaaaagtagaaagcaaaggccaggatgccccaggttctaaggggggcctgagtattgcatgcagccctaaggctcacaaagaagctggagaaaaaggaggcagagaaaggggaagcagaggacacctctcttcaagggccagcctgcaccactctgtcagctgacttcaggaagttcagctggcctgactggcaaggggtgcaggggccaagaacatggccttcaccttccagctagaagtcatgggcctcttggcatcttcaggcatcagcatcattccccacgatcaactccggggwcttaatttctcactatttgccttttgtactcaggtgttgcttcacattc

SEQ ID NO: 13466 - DNA, 605 bp, Homo sapiens
tctcttcttttattaatatcaacataatatctttgatttttgtctcttggctcaggwaacctaaaacatttacaatctgatcctttatagaaaaagtttgccaacccttggtccaaatgcctcgtgttttcaagtcatgacattctgtgtgcctaggttctcgtggaatgtaacacgctacggggatcagccgtttggtgagtctgaggtaaaccttttattggaagagcagtgtcttagatgaaatgagctttgaacgatttggggaagtagagcaatggggggtggggaaagactttctgctgcagacaaaggttccctacatgtctgccctgatcctgcacctttgtgccctctgaacaatgaagacaagccaggcaaaccccagtgatgctttaacctgcagctcgggacagcctccactctgtctcagactcgcccggctgtgttctggcttctgcctggggttcagccacgggctcacctgtccttgcagcagaacctctgtctttggagttggtgctggtctttgagtcatttctttgcctgtgattcagtcaagcctggttggattcagaccagcatgaagggtccgactgctccta

SEQ ID NO: 13467 - DNA, 605 bp, Homo sapiens
tctcttcttttattaatatcaacataatatctttgatttttgtctcttggctcaggaaacctaaaacatttacaatctgatcctttatagaaaaagtttgccaacccttggtccaaatgcctcgtgttttcaagtcatgacattctgtgtgcctaggttctcgtggaatgtaacacgctacggggatcagcygtttggtgagtctgaggtaaaccttttattggaagagcagtgtcttagatgaaatgagctttgaacgatttggggaagtagagcaatggggggtggggaaagactttctgctgcagacaaaggttccctacatgtctgccctgatcctgcacctttgtgccctctgaacaatgaagacaagccaggcaaaccccagtgatgctttaacctgcagctcgggacagcctccactctgtctcagactcgcccggctgtgttctggcttctgcctggggttcagccacgggctcacctgtccttgcagcagaacctctgtctttggagttggtgctggtctttgagtcatttctttgcctgtgattcagtcaagcctggttggattcagaccagcatgaagggtccgactgctccta

SEQ ID NO: 13468 - DNA, 605 bp, Homo sapiens
tctcttcttttattaatatcaacataatatctttgatttttgtctcttggctcaggaaacctaaaacatttacaatctgatcctttatagaaaaagtttgccaacccttggtccaaatgcctcgtgttttcaagtcatgacattctgtgtgcctaggttctcgtggaatgtaacacgctacggggatcagccgtttggtgagtctgaggtaaaccttttattggaagagcagtgtcttagatgaaatgagctttgaacgatttggggaagtagagcaatggggggtggggaaagactttctgctgcagacaaaggttccctacatgtctgccctgrtcctgcacctttgtgccctctgaacaatgaagacaagccaggcaaaccccagtgatgctttaacctgcagctcgggacagcctccactctgtctcagactcgcccggctgtgttctggcttctgcctggggttcagccacgggctcacctgtccttgcagcagaacctctgtctttggagttggtgctggtctttgagtcatttctttgcctgtgattcagtcaagcctggttggattcagaccagcatgaagggtccgactgctccta

SEQ ID NO: 13469 - DNA, 811 bp, Homo sapiens
ccaggaatcagtgaccctttgatagaggtgtgtgtgccctgcccaggggacccagtgggcagcatgaggctcccctctcccctttctcaaccagcctggagtatgttggaaataaaacagagagctaaagaatgtggagaaactgccggcctgaacccaactagagtggaaaacatccaaggaaggctggtggcgctgggaagtgagctgagtctcttgggttctaaaaagctggaaggattggagcaggaacccagccccacactttccagcttgttttgtcgacaggaatgttttgctggaggaaaggcctgaggagaagtttgattttctgtaactcaagtagatttggaacattgctcttcctttccattgcaaacagttttttcttccaatgctgatattcgttgagatgtttaactcctgtrtatttaaaaaggaagggtataaatacattccgatactaaaaacattatttgcagttaatttaaatatatattagagtaataaaaattcggaaagtgattgtaagcttacttcacatgtggatttaactatgtgaattgatcggaagctgagcttaaatggcaatcacttcctgagttttggttgggtatctcttactccctagagcacggttggttccttgctttcagttcagattgatttgtgcacaagtgaactccttgtcttccccgtcaagtgagcccccacacaactactttattttttcggtgataccatcattctttcagttacctgcactcagaaattggagctgcttgtcatttctttctgtgctctgtcttcc

SEQ ID NO: 13470 - DNA, 811 bp, Homo sapiens
ccaggaatcagtgaccctttgatagaggtgtgtgtgccctgcccaggggacccagtgggcagcatgaggctcccctctcccctttctcaaccagcctggagtatgttggaaataaaacagagagctaaagaatgtggagaaactgccggcctgaacccaactagagtggaaaacatccaaggaaggctggtggcgctgggaagtgagctgagtctcttgggttctaaaaagctggaaggattggagcaggaacccagccccacactttccagcttgttttgtcgacaggaatgttttgctggaggaaaggcctgaggagaagtttgattttctgtaactcaagtagatttggaacattgctcttcctttccattgcaaacagttttttcttccaatgctgatattcgttgagatgtttaactcctgtgtatttaaaaaggaagggtataaatacattccgatactaaaaacattatttgcagttaatttaaatatatattagagtaataaaaattcggaaagtgattgtaagcttacttcacatgtggatttaactatgtgaattgatcggaagctgagcttaaatggcaatcacttcctgagytttggttgggtatctcttactccctagagcacggttggttccttgctttcagttcagattgatttgtgcacaagtgaactccttgtcttccccgtcaagtgagcccccacacaactactttattttttcggtgataccatcattctttcagttacctgcactcagaaattggagctgcttgtcatttctttctgtgctctgtcttcc

SEQ ID NO: 13471 - DNA, 811 bp, Homo sapiens
ccaggaatcagtgaccctttgatagaggtgtgtgtgccctgcccaggggacccagtgggcagcatgaggctcccctctcccctttctcaaccagcctggagtatgttggaaataaaacagagagctaaagaatgtggagaaactgccggcctgaacccaactagagtggaaaacatccaaggaaggctggtggcgctgggaagtgagctgagtctcttgggttctaaaaagctggaaggattggagcaggaacccagccccacactttccagcttgttttgtcgacaggaatgttttgctggaggaaaggcctgaggagaagtttgattttctgtaactcaagtagatttggaacattgctcttcctttccattgcaaacagttttttcttccaatgctgatattcgttgagatgtttaactcctgtgtatttaaaaaggaagggtataaatacattccgatactaaaaacattatttgcagttaatttaaatatatattagagtaataaaaattcggaaagtgattgtaagcttacttcacatgtggatttaactatgtgaattgatcggaagctgagcttaaatggcaatcacttcctgagttttggttgggtatctcttactccctagagcacggttggttccttgctttcagttcagattgatttgtgcamaagtgaactccttgtcttccccgtcaagtgagcccccacacaactactttattttttcggtgataccatcattctttcagttacctgcactcagaaattggagctgcttgtcatttctttctgtgctctgtcttcc

SEQ ID NO: 13472 - DNA, 811 bp, Homo sapiens
ccaggaatcagtgaccctttgatagaggtgtgtgtgccctgcccaggggacccagtgggcagcatgaggctcccctctcccctttctcaaccagcctggagtatgttggaaataaaacagagagctaaagaatgtggagaaactgccggcctgaacccaactagagtggaaaacatccaaggaaggctggtggcgctgggaagtgagctgagtctcttgggttctaaaaagctggaaggattggagcaggaacccagccccacactttccagcttgttttgtcgacaggaatgttttgctggaggaaaggcctgaggagaagtttgattttctgtaactcaagtagatttggaacattgctcttcctttccattgcaaacagttttttcttccaatgctgatattcgttgagatgtttaactcctgtgtatttaaaaaggaagggtataaatacattccgatactaaaaacattatttgcagttaatttaaatatatattagagtaataaaaattcggaaagtgattgtaagcttacttcacatgtggatttaactatgtgaattgatcggaagctgagcttaaatggcaatcacttcctgagttttggttgggtatctcttactccctagagcacggttggttccttgctttcagttcagattgatttgtgcacaastgaactccttgtcttccccgtcaagtgagcccccacacaactactttattttttcggtgataccatcattctttcagttacctgcactcagaaattggagctgcttgtcatttctttctgtgctctgtcttcc

SEQ ID NO: 13473 - DNA, 484 bp, Homo sapiens
caatgacaataaaaaagaattgtacttctattttgtacttttttactcagagtaaatatttattgagatttaatttgtgccctgtaaactgctaaactcctaaatccattacgtctatttctcccatgagrtaaatatttgctcttcattgaggatatagccagcaaggcagaaactagtctaggacttacaaacaatctgattttattatgtggagcaggtaacatcagggtgaaaataactaagaaacaaagcaaggaatagtgatgaaagtattagcactagcagagaactaatcctttcctcatgatagtaaggtcaatgggagaaactaaagttccagagatccagtaatgagccatttcacagtagaattactgctggtgagaaatgggaccagggagaaatatgatctctgatgtaggtgtcattagaagcagagaaaacaaacaaacaaaaacagaagtggcccttctccttgcct

SEQ ID NO: 13474 - DNA, 565 bp, Homo sapiens
tgaaggtaaaatatgcccacatgtcatatgcaaaatgacattgatgtgagagccatttcctctcatttacataagacaaagttccttccatgccaaacttctctagaaacaatatctggaaaagcacaggtgaaggagaggtatgacagaagaatcccaaactggatactgaacgcagaacttgttgcccttgtctagcaagttcagattgccayaaggaagtcaccatgagtggtaggttaaatggccattgctacattaaactttctcttaatatcacttcaaacatttaaaaatatatattagaagaaatgctaccattttcaattaattctattttactggtttctctttctgttaatataaatatgcatagctcttttcttcaaatacaaagctgttggaaatttctaggaactaattatcaagaggaagaagaatattaacaatataccttgaagtttgtatttcttttagtcatagcatttttagatattcatttaaacatgaaaaatattggaacaatcttgttttaccaacaaaacaacagattcctagatataat

SEQ ID NO: 13475 - DNA, 565 bp, Homo sapiens
tgaaggtaaaatatgcccacatgtcatatgcaaaatgacattgatgtgagagccatttcctctcatttacataagacaaagttccttccatgccaaacttctctagaaacaatatctggaaaagcacaggtgaaggagaggtatgacagaagaatcccaaactggatactgaacgcagaacttgttgcccttgtctagcaagttcagattgccataaggaagtcaccatgagtgrtaggttaaatggccattgctacattaaactttctcttaatatcacttcaaacatttaaaaatatatattagaagaaatgctaccattttcaattaattctattttactggtttctctttctgttaatataaatatgcatagctcttttcttcaaatacaaagctgttggaaatttctaggaactaattatcaagaggaagaagaatattaacaatataccttgaagtttgtatttcttttagtcatagcatttttagatattcatttaaacatgaaaaatattggaacaatcttgttttaccaacaaaacaacagattcctagatataat

SEQ ID NO: 13476 - DNA, 565 bp, Homo sapiens
tgaaggtaaaatatgcccacatgtcatatgcaaaatgacattgatgtgagagccatttcctctcatttacataagacaaagttccttccatgccaaacttctctagaaacaatatctggaaaagcacaggtgaaggagaggtatgacagaagaatcccaaactggatactgaacgcagaacttgttgcccttgtctagcaagttcagattgccataaggaagtcaccatgagtggtaggttaaatggccattgctacattaaactttctcttaatatcacttcaaacatttaaaaatatatattagaagaaatgctaccattttcaattaattctattttactggtttctctttctgttaatataaatatgcatagctcttttcttcaaatacaaagctgttggaaatttctaggaactaattatcaagaggaagaagaatattaacaatataccttgaagtttgtatttcttttagtcatagcatttttaratattcatttaaacatgaaaaatattggaacaatcttgttttaccaacaaaacaacagattcctagatataat

SEQ ID NO: 13477 - DNA, 1407 bp, Homo sapiens
atatcccgtttctaaaatcattcctataattccaaggttgagcttcctcttggctcactaactaccacccagggctataccttgaagtttactggcttaactgcccaaaattgttagttatcagcactttggtatgaattgatttcatcaaataaaatttatcctggagtttctgagggagaactaggaggaaatggagaagatgtaactagagaaagccaaaaaaaaaaaaaaaaaaaaaaaagagcctggagagaaaaacgaggaactgaggacacatcttgccaatgacaccaatttacctaagatgtgtgatatcttggtgctgtgtcccagctcatggtagggcaagacaacctgggcaaactggagtgagctgagatctagaaacctctgagatgatggaccttgccagaaaatactggaaggaaggcctggccagcagggagaataaatttatttatttgaatgaattcactaatttgttgaatgcctagtatgaactaggcattctgctggacattggacatgcactttggaaagtgtatgataataaacatctgtccaggctgctagttggcatgaagtagggggagggaagagatggccaaccccagggagcagagggtatcccaatccattcaaaggataacctgaagattctagaagccagtaatatctagtccagcaggagttaagagacagggaaggctgtagacctttagattttgggtaaagaactggcaatgaagacaattctaaacggactagggcattagayagattacccacaaggggcaggacaaggacacagataccaggatgaggatacaaagtagagaccagatattctgctcaagggacaagcccctttatgaaaactggagtgcaaggtcaaggtcacacctggatgagtagcaagactgacttagtgctgatcaggatggggactggagcctacagcagagctgacctacttttgagggtcatgtgggtctggaggttataatttccattcacaggccaccgccgtctttcagctacccctcttccttgacatgccaatcctcatttcttcaatttgggagctactgtggcccattagatcagcagagtgtagcaatctactcccccttgaggctacttctaaggaataacaagttgagcttgaacaagacaatttttgcttctctgtatcacaggaactactaaccaagaagaagagagaattactgtaacctagaatttaagatgcacatataatgcctaaattgactttgaaccactgaaatccaaacagagttcagatacttgtaaaatttagctagacttatctctaaaacttgtaaagccatattcacacaagtgtaccatgtttgataacaaaatactttcttcttttatcac

SEQ ID NO: 13478 - DNA, 1381 bp, Homo sapiens
tatatatatatatacacacacacacacayatatatatatataaattcaccatatatttatatatatataaattcactaaatctttatcacaagcctggtgtgggaactattattacagagtagttctacttgctgatgaaacatctgaggacaagtgaccttgaccaaggtcacaagatagtaagtgacagaactgggattaaaacctaagcagtcaaattttagaattttatatacagtatttgaattaagcctcatgacaggcactgtctttcaacccctgtattccgtccactatgctggagtggctctttagatttctgcctggtaatatggcacttcttcagaaggttttaacaaagcctcagccaagaggacctattaagtatgagacattctgtgacaccactccctgtgtttatcaaccacgttttaggaaagttcagcattcctcagcactgctgcctggcatgtaaagcacacagactatatccagtgaatactgacacaggggagtggtgagggaaagatcacatggcctggaagccaggaggggagggaaaagaaggcagagaagaggctttggaacacaaaagacccagactctcaggggtttggtggccagctgctcacatctttgcataaaacatgggcacaggaatgtcgggggacacagtgaggatggctcctgggggcagccagcaaattggaggatgtgccttggtgaggagggctctcaggaaaaaaaggggaaaggaggcttttctcttgcatgtgtctaagaaatgcatattgcacagagctgaggggaaaatcagaacaattcaagtgctaagatgctgtgtatgttgctttaaattctcctggcaacatctaacatagtcactaacacagaggggaatctagccacctgtcaaccccaagacacactaccgactgttcggggagttattctagacaggaaggagcctgccacaataattacagcacactgcgatggccttaaacagtaccatactcagtgcattatctaaggctttttgtcagcccctctgaaagccatcagcgaaccgggcatgctttactggccaaagaaactgatgtttggctttgggtgatttgtggaatcgaaattctcattattctggaagtattacagtccacaattgaaaacctccaaggaaggaatgccaggtgccagaaatgacagagaaatctagggacactaagattgtttaattacacacacaggatttttaatggattcattccacttgaggaatgtgaaagtattttaaatttttaaactaagaataaaaccttaaatactattattcagtgaaagaaggaagattaagaacttgaaaattatctacaatat

SEQ ID NO: 13479 - DNA, 1170 bp, Homo sapiens
tgagaattgtataattcagagggtggcagatcgccacaaagyggtcataggccatggtccccaagagcaaattgtcaatgacgacaaacacaatagaaaagtacatctgtgtgatgcagctctcataagagatggattgactcttggtttgaatattcaccagcattttggggactgagttggaaatggaggaaatatcagcaaaggatagattggcaaggaagagatacatgggggtatgaaggtacgtatccaagctgatagccacaatgatgagcccgttcccaatcacagtgaccaggtacatacccaagaaaagcacaaagaggaggttttgatgctcatcctgcttgaaaaatcccaggagaatgaattcagtgatggtggtttggtttccttgatgcatatttctgccgatctgaagaaaggaactaaaagtcttcatattcctacaagaaaacctaacatggtatcatttggctgcagccattgcagtaagtcacttgaataaagtttcttctgcttattaagtggaagtgctacttaataaggaagtatttcagcagtgcagagatttggaaaatgccttagaaaaagacaggacatggccgaaacttctcaaaaaaactgttttaaactctaacaggattctgaatgtgatttttccagttggttctaaatgtagtttaaatcccgcaaactgagggtcatagatgaggcataccctatattctaaacatgttatatacacctgcagaattaacttaaaaatgaccaaactggttgccaaaccacctttatcctttaaatctaagaaaacagaaatttcaagtctcgtgaaagtgaagagtttggggaagtaaacacaactgagggttaggaatcactatggcagtgtacaccattgtgttggtgcttcatcccactaacgccgggggagaactccaaaacaagtgcttttggagaatgagtacaagaaggagcaaccagggttttacttcatctgtggctacatattagcctcaagaaaatttagggggcacacatacacttaaagacttctgtttgcctcttgcttttaaaggggctcactggatcaggctacgatggcaggggtaaagagaaaagatggtggggatagagggaaaagatggtggttagtagggcaat

SEQ ID NO: 13480 - DNA, 1170 bp, Homo sapiens
tgagaattgtataattcagagggtggcagatcgccacaaagtggtcataggccatggtccccaagagcaaattgtcartgacgacaaacacaatagaaaagtacatctgtgtgatgcagctctcataagagatggattgactcttggtttgaatattcaccagcattttggggactgagttggaaatggaggaaatatcagcaaaggatagattggcaaggaagagatacatgggggtatgaaggtacgtatccaagctgatagccacaatgatgagcccgttcccaatcacagtgaccaggtacatacccaagaaaagcacaaagaggaggttttgatgctcatcctgcttgaaaaatcccaggagaatgaattcagtgatggtggtttggtttccttgatgcatatttctgccgatctgaagaaaggaactaaaagtcttcatattcctacaagaaaacctaacatggtatcatttggctgcagccattgcagtaagtcacttgaataaagtttcttctgcttattaagtggaagtgctacttaataaggaagtatttcagcagtgcagagatttggaaaatgccttagaaaaagacaggacatggccgaaacttctcaaaaaaactgttttaaactctaacaggattctgaatgtgatttttccagttggttctaaatgtagtttaaatcccgcaaactgagggtcatagatgaggcataccctatattctaaacatgttatatacacctgcagaattaacttaaaaatgaccaaactggttgccaaaccacctttatcctttaaatctaagaaaacagaaatttcaagtctcgtgaaagtgaagagtttggggaagtaaacacaactgagggttaggaatcactatggcagtgtacaccattgtgttggtgcttcatcccactaacgccgggggagaactccaaaacaagtgcttttggagaatgagtacaagaaggagcaaccagggttttacttcatctgtggctacatattagcctcaagaaaatttagggggcacacatacacttaaagacttctgtttgcctcttgcttttaaaggggctcactggatcaggctacgatggcaggggtaaagagaaaagatggtggggatagagggaaaagatggtggttagtagggcaat

SEQ ID NO: 13481 - DNA, 1170 bp, Homo sapiens
tgagaattgtataattcagagggtggcagatcgccacaaagtggtcataggccatggtccccaagagcaaattgtcaatgacgacaaacacaatagaaaagtacatctgtgtgatgcagctctcataagagatggattgactcttggtttgaatattcaccagcattttggggactgagttggaaatggaggaaatatcagcaaaggatagattggcaaggaagagatacatgggggtatgaaggtacgtatccaagctgatagccacaatgatgagcccgttcccaatcacagtgaccaggtacatacccaagaaaagcacaaagaggaggttttgatgctcatcctgcttgaaaaatcccaggagaatgaattcagtgatggtggtttggtttccttgatgcatatttctgccgatctgaagaaaggaacyaaaagtcttcatattcctacaagaaaacctaacatggtatcatttggctgcagccattgcagtaagtcacttgaataaagtttcttctgcttattaagtggaagtgctacttaataaggaagtatttcagcagtgcagagatttggaaaatgccttagaaaaagacaggacatggccgaaacttctcaaaaaaactgttttaaactctaacaggattctgaatgtgatttttccagttggttctaaatgtagtttaaatcccgcaaactgagggtcatagatgaggcataccctatattctaaacatgttatatacacctgcagaattaacttaaaaatgaccaaactggttgccaaaccacctttatcctttaaatctaagaaaacagaaatttcaagtctcgtgaaagtgaagagtttggggaagtaaacacaactgagggttaggaatcactatggcagtgtacaccattgtgttggtgcttcatcccactaacgccgggggagaactccaaaacaagtgcttttggagaatgagtacaagaaggagcaaccagggttttacttcatctgtggctacatattagcctcaagaaaatttagggggcacacatacacttaaagacttctgtttgcctcttgcttttaaaggggctcactggatcaggctacgatggcaggggtaaagagaaaagatggtggggatagagggaaaagatggtggttagtagggcaat

SEQ ID NO: 13482 - DNA, 1170 bp, Homo sapiens
tgagaattgtataattcagagggtggcagatcgccacaaagtggtcataggccatggtccccaagagcaaattgtcaatgacgacaaacacaatagaaaagtacatctgtgtgatgcagctctcataagagatggattgactcttggtttgaatattcaccagcattttggggactgagttggaaatggaggaaatatcagcaaaggatagattggcaaggaagagatacatgggggtatgaaggtacgtatccaagctgatagccacaatgatgagcccgttcccaatcacagtgaccaggtacatacccaagaaaagcacaaagaggaggttttgatgctcatcctgcttgaaaaatcccaggagaatgaattcagtgatggtggtttggtttccttgatgcatatttctgccgatctgaagaaaggaactaaaagtcttcatattcctacaagaaaacctaacatggtatcatttggctgcagccattgcagtaagtcacttgaataaagtttcttctgcttattaagtggaagtgctacttaataaggaagtatttcagcagtgcagagatttggaaaatgccttagaaaaagacaggacatggccgaaacttctcaaaaaaactgttttaaactctaacaggattctgaakgtgatttttccagttggttctaaatgtagtttaaatcccgcaaactgagggtcatagatgaggcataccctatattctaaacatgttatatacacctgcagaattaacttaaaaatgaccaaactggttgccaaaccacctttatcctttaaatctaagaaaacagaaatttcaagtctcgtgaaagtgaagagtttggggaagtaaacacaactgagggttaggaatcactatggcagtgtacaccattgtgttggtgcttcatcccactaacgccgggggagaactccaaaacaagtgcttttggagaatgagtacaagaaggagcaaccagggttttacttcatctgtggctacatattagcctcaagaaaatttagggggcacacatacacttaaagacttctgtttgcctcttgcttttaaaggggctcactggatcaggctacgatggcaggggtaaagagaaaagatggtggggatagagggaaaagatggtggttagtagggcaat

SEQ ID NO: 13483 - DNA, 1170 bp, Homo sapiens
tgagaattgtataattcagagggtggcagatcgccacaaagtggtcataggccatggtccccaagagcaaattgtcaatgacgacaaacacaatagaaaagtacatctgtgtgatgcagctctcataagagatggattgactcttggtttgaatattcaccagcattttggggactgagttggaaatggaggaaatatcagcaaaggatagattggcaaggaagagatacatgggggtatgaaggtacgtatccaagctgatagccacaatgatgagcccgttcccaatcacagtgaccaggtacatacccaagaaaagcacaaagaggaggttttgatgctcatcctgcttgaaaaatcccaggagaatgaattcagtgatggtggtttggtttccttgatgcatatttctgccgatctgaagaaaggaactaaaagtcttcatattcctacaagaaaacctaacatggtatcatttggctgcagccattgcagtaagtcacttgaataaagtttcttctgcttattaagtggaagtgctacttaataaggaagtatttcagcagtgcagagatttggaaaatgccttagaaaaagacaggacatggccgaaacttctcaaaaaaactgttttaaactctaacaggattctgaatgtgatttttccagttggttctaaatgtagtttaaatcccgcaaactgagggtcatagatgaggcataccctatattctaaacatgttatatacacctgcagaattaacttaaaaatgaccaaactggttgccaaaccacctttatcctttaaatctaagaaaacagaaatttcaagtctcgtgaaagtgaagagtttggggaagtaaacacaactgagggttaggaatcactatggcagtgtacaccattgtgttggtgcttcatcccactaacgccgggggagaactccaaaacaagtgcttttggagaatgagtacargaaggagcaaccagggttttacttcatctgtggctacatattagcctcaagaaaatttagggggcacacatacacttaaagacttctgtttgcctcttgcttttaaaggggctcactggatcaggctacgatggcaggggtaaagagaaaagatggtggggatagagggaaaagatggtggttagtagggcaat

SEQ ID NO: 13484 - DNA, 546 bp, Homo sapiens
agtatagacaccttttttttttcctctcatgtttagtctggaaggttaggttatgtgtctgaatctttctgctagggctcttattggtcttgtttccagcttcacgacttacacatatagaacacaattttcttgcacacagtttgtgatcatccgaaagtttatctgcctattttaaggatgtctgtatttgcttcttttaaaaaagagtatatatattttctatcatttatatgattgatgtaagataagaatgaagtatctgccctctcaaccatttatcttgatatcaraagtcctagccatgtatctcaggtgaatctctaaatttctttgagtctcataatctctaaaatggggatacgaacagtcaaagcaatcctaagcaaaaagaacaaaactggagggataatagtacctgaacttatagtacaaggctacagtaaccaaagcagcatggtactggtacaaaaacagacacatagaccaatggaacagaatagataacctagaaataaagccacacaattacaaccatctgatctt

SEQ ID NO: 13485 - DNA, 512 bp, Homo sapiens
attttttagcatagaaagttggggatgtgttaattgtatttttaagaatatattctaagttctgtacttcaaataatagcacagattttacatctgattgacatagtgtatgttaatgtaagttttgctttccagtgattacctgatacgtaagcctatttgaacaaagtgagaatgaacttttgtttctaagaagtctttatcttgaagctatataacatgaaaagtgagctcaaattttttttagttgaagattacatataaagttgtgtctgattaatattcatcttttattgaagaaagtgccttctgatggccacataattcttaatgtcagctagtataatggtttacatttggacaaagtattgcttagtgttatttaagtagatttaagatctyaaagctaaagtgccaatttttactttcttcagccaatttgttacctcttttatggtttttaatttttatcaggactaacattttcagaaatagcaaggtgtgatctagta

SEQ ID NO: 13486 - DNA, 518 bp, Homo sapiens
aagaccagcctggccaacatggtggaaccgtatctctactaaaaatacaaaaattagacaggcgtggttgtgcgtgcctatagtcccagttactcagggggctgaagcaggagaattgcttgaacccgggaggcggaggttgcagtgagctgagatcatgccattgcactgcagcctgggcaacagagcgagactctgtctccaaaaaaaaaaaaaaaagaaatgttctgatgttttgtgtttrtctggtgcttgttggcatttctggaggaagacattcagggagcccagaggcacctcgtgggcatatgggacagcgatgggcacaggacctcgtagaaaaggttagaatcccactgtgttgagagacagcagagggtcctggtcttctggtttgtacagaggcaagtgtgaaagccatttctgagctgtgcgggctgagaggagctccgtgcctgctgcatgcttccctcagcctcttcgcattgctgtaaaggggatcaggctgctactttgca

SEQ ID NO: 13487 - DNA, 518 bp, Homo sapiens
aagaccagcctggccaacatggtggaaccgtatctctactaaaaatacaaaaattagacaggcgtggttgtgcgtgcctatagtcccagttactcagggggctgaagcaggagaattgcttgaacccgggaggcggaggttgcagtgagctgagatcatgccattgcactgcagcctgggcaacagagcgagactctgtctccaaaaaaaaaaaaaaaagaaatgttctgatgttttgtgtttatctggtgcttgttggcatttctggaggaagacattcagggagcccagaggcacctcgtgggcatatgggacagcgatgggcacaggacctcrtagaaaaggttagaatcccactgtgttgagagacagcagagggtcctggtcttctggtttgtacagaggcaagtgtgaaagccatttctgagctgtgcgggctgagaggagctccgtgcctgctgcatgcttccctcagcctcttcgcattgctgtaaaggggatcaggctgctactttgca

SEQ ID NO: 13488 - DNA, 2067 bp, Homo sapiens
atggattcaccgttcactcaccatccatggtgctcattgtgcaatgaggcgtgagactctcaggggcactaattagtcacagttccaatcaggagggctccactgtgctgacctcattaccactggaaggccccacctccaataccatcaccttaggttagaatttcagcaaatgggctttgcrggggacacaaacgttcagactacagcaagcttcaaatttacacctatcttatgatgtgatctgaggtttttctcaaccttaccgctgatctgagctacaggcatggacatcccatgattactgagtgactcctcagggagaaactctgcaaatcctaaggccttgtgctcttcctggctcactgctgcatccatctggggttatgcaagcaccaggtgagactgattctgggggaagtgatgagcccctaagcctcggttcaggtccacactgctctgtgacctttggcctcccatgccctggggtggatatccgtgtccgcaggacacacttgaccttaatccaactgagggctttcatcctgatgattaaactgagtcaaagctttgaaacgccttatgtcttttatcagctttgtggaggactgtgttctctctaagcttgcagttggcctacaactcctgcagaagggaacttacagacccctaaaggaagtggactctgaagggcttctctggtttccatggggatgcatggagctgtgggcatgcctctgcattctgcattctgcatctcatatgtgatccactaacagcacacactgcatagcacggcccatctaggaaccaggcagacacagagaccctcggccagagcttgagaagttgcatgcaccaggggcacacctagccctgaggcaaggctgcctcagtggggagggatgggacaggctcacacccctccagcttcctgctgtcagtgactctttccttctgagacttcccaggaacttgcggcaggcctggctgcccctccagctgcacgtcctctctcagttatgctggcacctcaggatgcagctttggctgcctgccctgtgctattcccttcctcacaccttgagatggcctccccaactcagcccataccctcgtcctcagtttccccacttccccatcggcaacctaactgacttcaactatccactttttgtattccatcttctcagtaaaacctgccagacaactgatccatccaagcagaccaatctgaataccctcactggcaaatcatttcaaatgcaataaaaagaaaatgtctttcctaaggcagcaattggaagaaaaccatcttctgatttgttttctttgtcaaatgatggtgggtgaataacttatctgaattatgttagattattctaatcatatatagaataaggtcagctcaggatctcagaacagtcccgcttggagttggagaatgctaaatatctggtgataggaaaatggtagcaggagagggaaagtaggtaaaagggtgctgacttaattgttaaggtaccaccaacagttagtaatataacaccatcaataaaaatggaaatgttggccggacacagtgggttacgcctgtaattccatcacactgggaggctgaggcgggcatatcatctgaggtcaggagtctgagaccagcctggccaatatggtgaaaccccatctctaataaaaatacaaaaattagccaggcatgatggcatgtgcctgtgatcccagctactcagaaagctgaggcaggagaatcacttgaacccaggaggcagatgttgcagtgagctgagattgtgccactccagcctgggccacagagcaagactccatctcaaaaataaagaaaaaaaaaggaattgtcaaaactgacctcccctatgcattctgccaatggatgaaagggttttggcattcacccatgtcagctccttctgcacaaccccaaaagcaacctcagtgtttcaaaccaaacaaatcataaatcaagctctgtgcacagcctccagcctctacaaagaagagggggccccagatagcaggaaggcctgagct

SEQ ID NO: 13489 - DNA, 2067 bp, Homo sapiens
atggattcaccgttcactcaccatccatggtgctcattgtgcaatgaggcgtgagactctcaggggcactaattagtcacagttccaatcaggagggctccactgtgctgacctcattaccactggaaggccccacctccaataccatcaccttaggttagaatttcagcaaatgggctttgcgggggacacaaacgttcagactacagcaagcttcaaatttacacctatcttatgatgtgatctgaggtttttctcaaccttaccgctgatctgagctacaggcatggacatcccatgattactgagtgactcctcagggagaaactctgcaaatcctaaggccttgtgctcttcctggctcactgctgcatccatctggggttatgcaagcaccaggtgagactgattctgggggaagtgatgagcccctaagcctcggttcaggtccacactgctctgtgacctttggcctcccatgccctggggtggatatccgtgtccgcaggacacacttgaccttaatccaactgagggctttcatcctgatgattaaactgagtcaaagctttgaaacgccttatgtcttttatcagctttgtggaggactgtgttctctctaagcttgcagttggcctacaactcctgcagaagggaacttacagacccctaaaggaagtggactctgaagggcttctctggtttccatggggatgcatggagctgtgggcatgcctctgcattctgcattctgcatctcatatgtgatccactaacagcacacactgcatagcacggcccatctaggaaccaggcagacacagagaccctcggccagagcttgagaagttgcatgcaccaggggcacacctagccctgaggcaaggctgcctcagtggggagggatgggacaggctcacacccctccagcttcctgctgtcagtgactctttccttctgagacttcccaggaacttgcggcaggcctggctgcccctccagctgcacgtcctctctcagttatgctggcacctcaggatgcagctttggctgcctgccctgtgctattcccttcctcacaccttgagatggcctccccaactcagcccataccctcgtcctcagtttccccacttccccatcggcaacctaactgacttcaactatccactttttgtattccatcttctcagtaaaacctgccagacaactgatccatccaagcagaccaatctgaataccctcactggcaaatcatttcaaatgcaataaaaagaaaatgtctttcctaaggcagcaattggaagaaaaccatcttctgatttgttttctttgtcaaatgatggtgggtgaataacttatctgaattatgttagattattctaatcatatatagaataaggtcagctcaggatctcagaacagtcccgcttggagttggagaatgctaaatatctggtgataggaaaatggtagcaggagagggaaagtaggtaaaagggtgctgacttaattgttaaggtaccaccaacagttagtaatataacaccatcaataaaaatggaaatgttggccggacacagtgggttacgcctgtaattccatcacactgggaggctgaggcgggcatatcatctgaggtcaggagtctgagaccagcctggccaatatggtgaaaccccatctctaataaaaatacaaaaattagccaggcatgatggcatgtgcctgtgatcccagctactcagaaagctgaggcaggagaatcrcttgaacccaggaggcagatgttgcagtgagctgagattgtgccactccagcctgggccacagagcaagactccatctcaaaaataaagaaaaaaaaaggaattgtcaaaactgacctcccctatgcattctgccaatggatgaaagggttttggcattcacccatgtcagctccttctgcacaaccccaaaagcaacctcagtgtttcaaaccaaacaaatcataaatcaagctctgtgcacagcctccagcctctacaaagaagagggggccccagatagcaggaaggcctgagct

SEQ ID NO: 13490 - DNA, 537 bp, Homo sapiens
tttttttttttgagatggagtctcactctgtcacccaggctggagtgcagtgatgtgatctcagctcactgcaaccactgctacttaggttcaagtgattctcctgcctcagcctcccaaatagctagaattacagatgtgcaccaccacacctggctaatttttgtatttttggtagagatgaggtttcaccatgttggtcagactggtcttaaactcctgacctcaagtgatctgccagccttggcctcccaaagtgctgggattataggcataagccacagcacccggcctacttacattctttcttgtagtaattggtgcacttaaaaattttattcatttacttatttamttatctataatagcttatgtaaacaaagtaaataagtaagatacataagtggccaggtgcggtggctcacacctgtaatctcagcactttgggaggccaaggtgggcggatcatgaggtcaggagatcgagaccatcctggctaacacggtgaaaccccttctctactgaaaatacaaaaac

SEQ ID NO: 13491 - DNA, 559 bp, Homo sapiens
gttcccatctccacgccatttgatgagaacaatgcatatatacatgggtagagggcgcaaataaacttcctagaggggatttggaaagcctgttgctgagagagaacacaggagctgtgtcaggggatatccaggcaggtacttctgggcatgstgcctttcttgttggagggaagagggctgcagcgtacagagatcagaaaagcacaggacattccaggaaatgcaccttgtttgttgtctttaactggcagccaaaggattgtaaagctggagagagtctgggccctcataggagaggggttggagcctgagccttgtctcactgcccagctgtgcccttgtggttataactgggcatgtgcataatgactatatgcgtccttctgggatgtagccacatggtcttcattatattctcaaaggggctgtagatcccttaaaattgaagacttgctgctgagggcaaggggcacatttggcagggtttgaaccagaaaagctgaatcattgcccttccatgaacaggcttggggcttgtaataaagtttccccttgt

SEQ ID NO: 13492 - DNA, 556 bp, Homo sapiens
gaacccgggaggcagaggttacagtgagccgagatcatgcaactgcactccagcctgggtgacagagacagactctgtctcacaaaaaaagaaagaagtaatatttttacttcatcgtacacaaatgtattttacaccattargttctttctgtttcttaattagaatgttcccaattggaaaacagttgtacaatacttcattctaaaggaagaagagccataaaaagagaaaaaaaaaataagaagaaaccctgcattttagatcttcctagaaatagcaagttgctccaggaaaagaccaaaccaggtgataaaggtttgtgtcaccatttcaaaaagaataaagaaaagggcagtacagacactgcattatcagacgccaccattataatttgtggatctcacacatcaatatgtaaataacagaggccaagctatttcctccgcaggttgcctgtaaattgaagtaaaaactgtattactaaagccaggcaagctagaacaacacagattataagtcaaacaatgatatgagttcatttaacactgagaaa

SEQ ID NO: 13493 - DNA, 556 bp, Homo sapiens
gaacccgggaggcagaggttacagtgagccgagatcatgcaactgcactccagcctgggtgacagagacagactctgtctcacaaaaaaagaaagaagtaatatttttacttcatcgtacacaaatgtattttacaccattaagttctttctgtttcttaattagaatgttcccaattggaaaacagttgtacaatacttcattctaaaggaagaagagccataaaaagagaaaaaaaaaataagaagaaaccctgcattttagatcttcctagaratagcaagttgctccaggaaaagaccaaaccaggtgataaaggtttgtgtcaccatttcaaaaagaataaagaaaagggcagtacagacactgcattatcagacgccaccattataatttgtggatctcacacatcaatatgtaaataacagaggccaagctatttcctccgcaggttgcctgtaaattgaagtaaaaactgtattactaaagccaggcaagctagaacaacacagattataagtcaaacaatgatatgagttcatttaacactgagaaa

SEQ ID NO: 13494 - DNA, 511 bp, Homo sapiens
aaaatacagaatatctttgcaacctgtggttatgcgaagttttcctagagagaactcagaacaaatcatgaaagaaaaaaacaactacatttaatcaaaattaaaacttctttcaaggaacacacaataaaaaagcaagccacaaactgaatataattatacatcaacaacaacaataacarcaaattcccgtagggagagagcggcaatgagctacaacaacagcccgcttaaaaccccaagactaacaacagttaatgctggagagaacgtacagttaactctcattctctcttgtttgggtgtcaactggtacaaccattttgcaaaactattcagtactgtctaataaagctgaataaaaactttccctttaagctagcaattttactccttgctatattcccaaaagaaatgcacaaatatgtgtacctacatacgagaatgtgtgcagcagcattattcatggttgccaacattggaaacacctgaaatgtccatcagcagttga

SEQ ID NO: 13495 - DNA, 511 bp, Homo sapiens
aaaatacagaatatctttgcaacctgtggttatgcgaagttttcctagagagaactcagaacaaatcatgaaagaaaaaaacaactacatttaatcaaaattaaaacttctttcaaggaacacacaataaaaaagcaagccacaaactgaatataattatacatcaacaacaacaataacagcaaattcccgtagggagagagcggcaatgagctacaacaacagcccgcttaaaaccccaagactaacaacagttaatgctggagagaacgtacagttaactctcattctctcttgtttgggtgtcaactggtacaaccattttgcaaaactattcrgtactgtctaataaagctgaataaaaactttccctttaagctagcaattttactccttgctatattcccaaaagaaatgcacaaatatgtgtacctacatacgagaatgtgtgcagcagcattattcatggttgccaacattggaaacacctgaaatgtccatcagcagttga

SEQ ID NO: 13496 - DNA, 511 bp, Homo sapiens
aaaatacagaatatctttgcaacctgtggttatgcgaagttttcctagagagaactcagaacaaatcatgaaagaaaaaaacaactacatttaatcaaaattaaaacttctttcaaggaacacacaataaaaaagcaagccacaaactgaatataattatacatcaacaacaacaataacagcaaattcccgtagggagagagcggcaatgagctacaacaacagcccgcttaaaaccccaagactaacaacagttaatgctggagagaacgtacagttaactctcattctctcttgtttgggtgtcaactggtacaaccattttgcaaaactattcagtactgtctaataaagctgaataaaaactttccctttaagctagcaatttyactccttgctatattcccaaaagaaatgcacaaatatgtgtacctacatacgagaatgtgtgcagcagcattattcatggttgccaacattggaaacacctgaaatgtccatcagcagttga

SEQ ID NO: 13497 - DNA, 506 bp, Homo sapiens
tatttgtttgcatggtcgtttttaattcttttgagaatatacctaagagtgaaatcactggctcatataataattttatgttcagctttttgagacaccaacaaactactttccatagcagctgtattttgcattttcaccagcaatgtttgaggattccaatttcagcacattttcatcaactgcagaaaagaagaaaatatttgcgaatcaaagatctcataaaaatctactatccagaatatataagaactcttaaaacttgacaaccaaagacaaagaaccaaattttttaaacgggaataaaatcttggatagctgtttctccaaagagatgtacaaatggctaaaagttgctcaacatcattagtcactggggaaatacaaatcaaaatctcagtaagataccacttcacacmcactaatatggcaacaataataatgacaacaataaaaagagaatataatgtattttttaaatgatccaccgtagagtcaatggaagg

SEQ ID NO: 13498 - DNA, 506 bp, Homo sapiens
tatttgtttgcatggtcgtttttaattcttttgagaatatacctaagagtgaaatcactggctcatataataattttatgttcagctttttgagacaccaacaaactactttccatagcagctgtattttgcattttcaccagcaatgtttgaggattccaatttcagcacattttcatcaactgcagaaaagaagaaaatatttgcgaatcaaagatctcataaaaatctactatccagaatatataagaactcttaaaacttgacaaccaaagacaaagaaccaaattttttaaacgggaataaaatcttggatagctgtttctccaaagagatgtacaaatggctaaaagttgctcaacatcattagtcactggggaaatacaaatcaaaatctcagtaagataccacttcacacacactaatatggcaayaataataatgacaacaataaaaagagaatataatgtattttttaaatgatccaccgtagagtcaatggaagg

SEQ ID NO: 13499 - DNA, 565 bp, Homo sapiens
tatgggtcaacataatgtgatatacatgcacagatctcttttgtttgggaggagttagtgtgttggtgtctgggcatatcaaaaagaggggatagattgcatatattttcatcaatatttcctcaatattgttcctccaaactgagattttgataaatatttagagattaaaataaatgcaaaattatactccctgacaatactctgcttgaaaattattaaaaggcactcatcagacacatgttgagctgacaaggtattaatacccttccatgaaagctgaacagcgtaaaaggcatctgaattgtagaacattcaacctatrttcagacataagccttgggaggggcctcaggcagagcagccaaaattaacttcagataatggttttcaattcactttactgcacagttgacttgagaattaagctcacaatgttctgtttcacatattatggctgaatttgttttaccttgagcatttctgaatgcaggtataaattgatgcctgcctaaaccaatgtaaagatcttagtaaatcccatagataaattcaagggaaaaaa

SEQ ID NO: 13500 - DNA, 456 bp, Homo sapiens
gcagggaacacaatgcaaattgtcccctaaagatccaaatgagctttgatggagagaagttttggaaccctaacttaacagatgcttggagttcctcccagaaccaaacacctcaggtgggcactttctttcccagatcactttcttcgtcatcaaaaataccctgaaccctggtgcagaggttcacacctgtaatcccatcactttgggaagcccacacgggaagatcgcctgagcccaggagttcgagaccagcctggtgaaatagtaaaaccgcatctctacaaaaaaaaatttwaaaaattagcatggtggcatgcatctgtagtcccagctacttaagaggctgagatgagagaatggcttgagcccaggggttcaaggctgccgtgagctaggatcactccactccagcctgggtgatagagcgggaccctgtcacttaacaagataata

SEQ ID NO: 13501 - DNA, 638 bp, Homo sapiens
ccaccttccagtctaaattcctactcccacctaaattgctgtaacaagcatctaattattcttctccatttctactcctcaacttcagttcatttcccatcctactgccagactgagcttttcaaaatgaacttatcatgttactctgctatgtaatatccattagtgtcttccatttgctttcagtataaattcctatgtaaatccttaccgtataatccttaccatatataacagtgtcgtatagcctctgttttcctaccaggcctcgtattgcaacagtctcctctcttgtttccrcactccacccacattgttgttgttgttgctttctttctttttttaaataattgttcctagaactccccaatttcttattcattttaggacacttgcactcattgcctctctcaagtttcagcttcattgttccctcatcagagtaagctatttctaaccctccctttgaatacaacctggttcaactaatctaaaactttggtttttgaggaggttaataaaattgatgtctttaaccagactgaccaaagaaaaagagaaaagatggcaaaccaacaatatagaaatgaaagagagaactgcagaccatgaagtcagtaaaaggataataaataaat

SEQ ID NO: 13502 - DNA, 532 bp, Homo sapiens
caatctcagctcactgcaaactccgcctcctgggttcacgtcattctcctgcctcagcttcccgagtagctgggaccacaggcacccgccgccatgcccggctaatgttttgtatttttagtagagacggggtttcaccatgttrgccaggatggtctcgatctcctgaccttgtgatccgcccgccttggcctcccaaagtgctgggattacaggcgtgagccaccgcgcctggccgcccgagcacttttacttttccttagttatattcctctaattgttttctcttctctagttgtagataatgagcattttattaataccttgttcttgatcttagtgggaaggtatgtagtttttccctgttaagtaaaatcctgacttttggaccaagaagactgaggcataagagtttatgtgtgtccgtgtgtgtgcacgtacatgtgtctgtgtgtgtatacacacaaactatatatatgcttgtgtgtaattgaaatacatatgtcacatatatatcatatgtactactgca

SEQ ID NO: 13503 - DNA, 517 bp, Homo sapiens
tcagcttcagactttgattcctttcaataatttctatttttttcctttctttttttctctaagctttagtttgtctataataaattcttttwttgagacagggtctcactctgtcacccaggctggagtgcagtggtgcaatcttggctcactgcagccttgacttctcatgctcaggcaattctcccacctcagcctcccaagtggctgggactacaggcgcatgccaccacacttggctgattgtttgcattttttgtagagagggggtttcgccatgttgctgaggctggtcttcaaatcctggccccaggtgatctgcccgcctcagcctcccaaagtgctggaattacaggcatgagccactgcccctcacctgtctataatattttctatttctttattgatgttctgcatttgttgagacattgttctccttgtatcctttaactctttattcatcgtttcttttagctttttgagcagatttcagacagctgatttaaagtctttgtct

SEQ ID NO: 13504 - DNA, 517 bp, Homo sapiens
tcagcttcagactttgattcctttcaataatttctatttttttcctttctttttttctctaagctttagtttgtctataataaattcttttattgagacagggtctcactctgtcacccaggctggagtgcagtggtgcaatcttggctcactgcagccttgacttctcatgctcaggcaattctcccacctcagcctcccaagtggctgggactacaggcgcatgccaccacacttggctgattgtttgcattttttgtagagagggggtttcrccatgttgctgaggctggtcttcaaatcctggccccaggtgatctgcccgcctcagcctcccaaagtgctggaattacaggcatgagccactgcccctcacctgtctataatattttctatttctttattgatgttctgcatttgttgagacattgttctccttgtatcctttaactctttattcatcgtttcttttagctttttgagcagatttcagacagctgatttaaagtctttgtct

SEQ ID NO: 13505 - DNA, 523 bp, Homo sapiens
ctgagaagttgaaaaacataacatttacaaaagatacatctggtgcatatttatatgacttggaataaggaatcatttaaatactgctgagccatctccatattaggagaaaagatattccatgtccatatgtgaaattggtgataaaatacacgtaggtttaaatttctctygcacatttttttccttgacacgttaaaaatatggaaatattgattagggattaaatcatctatttgagttgtgggaattgcttttcctttgaattttatagattacttcattaaatctaagtttatatgctaaaggtggtaagttttcaaagggattaaaagtagcacttcatatttagaaaagctgcttattcaggtgcaagagttcttaacctggagatcagagactccttaaacatccaaaggtgtttaaggggttctatgagccccctgagtttatatgctagcattgtatgtatatgtgtatatgacttttttttcctggaaaatatctaacttacatcagtatc

SEQ ID NO: 13506 - DNA, 545 bp, Homo sapiens
attgtcccacttcagcctcctgagtagctccacaggtgcctgccaccatgcctggccttattatggactttaaacactttaagaggtctttttgttatcaagatattattaacaagctagatgcagtggctcacacctataatcccagcactttgagaggctgagatgggaggatcccttgaggccacaagttcaagaccagcctaggcagcatagagaccccattctataaaaattcaaaaaattagctgggcatggtggctggagcctgtagtcctagctgcttgggagactgagggaggaggatcacttaagctccggagttcaaggttgcagtgacctatgatcacacactgcactccaggctaggtgagtgaggttctgtctaaaaaaaaaaaatgaaagaaaaagacacacccattgcattgagataaaaaaagaaacaaacctaagtattgctattattgttttaggggtagtatgatgtatgattatgcgtaattttytttcctttcttctgtctcttatctatatacagccattcc

SEQ ID NO: 13507 - DNA, 646 bp, Homo sapiens
gaaagatgtccactcaggatcagtaacacacagctttctgaaaaactcaccactctctcctcattttcccttggactggtaaaaattttagccacagaaacaggtctgtgaaccacaggaaaagaatcacagctctagcctatttctctcatctatatataaggacaaggaggcctaggaaggccaggcagccaacgttcacaaagctggttcgtggcgtcctcagaagctgcagggacccgccttgtctggtgtatgccttgccatctctgtgaagtcacatgaacaaaaaaygtcaaataagcttgactttcttttatttaccaaatggtacatctgctcttcctggtctaggtcagaccccaggactggcctggattccagaaagaataagaactgtgacctggattaggttcagggtcactgacctttggtttactccagaagctgctagtaagtggtgcagaggaagtgcacaggaggaaaggatgctgtgggcacatacagctcctatctgacttgtgtcttctcagaggcacatcttgagcccagggatgtaggtggtcctatgcaagagaggctcacaagtctcagaagcacagaactgtgggcttgttacctgttatctctctagtcccatcagacc

SEQ ID NO: 13508 - DNA, 558 bp, Homo sapiens
gattttgcaagttttttttaaagtcataacatatttgaaggggattcaatataaactaataggtatgtgaacacctattacatgtcagacactgttgtaaaagcattgcatgtatttttcattaaattctcgtaacaatcctaagaggtaggttattgctgttattctcattttccggatgaggcaatggagatggaggggctraggagcccgcttgtcacgtagttgttagtggaactagagagctgtcagcctggctggagagttcacacttttaaccagaatgctgcactcactccctttgtaagagcagctgaatgacctgttagttaagttttagtagttcttgttttgtgcttctaagttactttgtttggtacacaaataaaaagtattatattttggctgggcgcagtggctcatgactataatcccagcactttggtaggccaaggtgggcgaatcacctgaggtcaggagttctagaccagcctgaccaacatggagaaaccccgtttctactaaaaatacaaaattagctggacgtggtggcacatg

SEQ ID NO: 13509 - DNA, 624 bp, Homo sapiens
tgctgttaacatgtatactcaaaagaaatcactatatcaaagaaatatctgcactttgatgatttattgtagccctattcacaacagccaagaattggaagccacctaagtcttcctcaagagatgaataaatacagaaaaagtgatatctatacacaatggagtacaattcagccayaaaaaagaaagagatcctgttatttgcaacaacaaggatggaagtagaggtcattatattaagtgaaaataagccagaatgatatctttaaaacttttaaatactggtgaaacatgccagaaagatatctttaaaacttctaaatattttgtaaactaacaaaccattccaatgtatgcatgtgtcaaatataaaataacaaaaacagtagaactcatttggacctaaatgaggataaaaatgcaacttatctaaatttgggaatataaagtgtcttgggaaaaaaatactacaaattaatgtattacagaaaagaaatattaaaatatgtgatacgagaaagataagtgcagacattaataaactagtcaaatgacagagaatatcaatgaaatcaaaattggaatattagaaaggtgaataaaatttaaaatcttcatttagat

SEQ ID NO: 13510 - DNA, 1407 bp, Homo sapiens
tggtacttgactctactaaggacttttactagtagtttgttttattttatagcaatttactcagctatcatcacgactattatatgcttaaccatattgttattaacttgcattgtgttggataaattataaattgaataaagagaacagagtaattgataatataagcactatttattacattgtttcttgagaaatgatattctgcattgtacagaactaggttataaaaagataattaaatgtgagaattaattttgttgcatgagaactaattgccttacgtgaactacataaattattaaacctttgttgttaaaaaatgtgtattcaaaaactttatgaaaatcctctatgaataataagtagatgcatttttagtcaaattacctattatctagaggagtgctaacattgtttatctttacaatggactttcagttccaggtcaagttgtaggcaagcatctgctgtgcccatatgtcatcttagtggaataccatcacgtgaaatttgtaacatattcaaagtctcaaaatgatcacaggagttgccataatatataaggctttcccttgcttagcctctcagtcccaacaggggagataattccacactttagcaaatatttttgttgcagccatgaagttggaaaatattttttgctggatagaatatttccctggcacctatgcagtgagcataagattaaaagtcaatttattcaccataagaaaatattttttgtggactcaagaaaacagtgtaacatttaacactgtattttcttttttttatttcccatgttagtctgaccctaagtttctttctcactcgaagagacccccaaacagtgattagatttttgtgctattgagccacgatagtagatctagctacattctgtgaagcagcagcccccaacatttttggcagcagagacggatttcatggaagacaatttttatgctgggtgaatggttttgggatgaaactgttttactttagatcatcaggcattagattctcatatggagygtgcaacctggatctctggcatgcacaattcacaacagggttcgagctattataagaatctaatgccaccgctgatctgacaggaggtgtagctcagatggtaatgcttgcttgcctgatgctcacctcctgctgtgtggcccagttcctaacagaccactgacaggttatggtccatggcccaagggttgggaacccctgctataaagcacaaacagctttgattcagtaaaatactcccaattccttaaattcttagaagttttaatcagacttaagctgttgtcttgatcttttattagtttagatagactatttgctttttaaactaaatgaagtcttaaactttcaataaattaaataatgtca

SEQ ID NO: 13511 - DNA, 510 bp, Homo sapiens
taactggagtaaaacccacttagatttctatgtccccaaacctctggtgtggtcagggttggcacctgccctctcaaccatttgtctcactgtacatgcatcttgtctatgtcttccactagagaccatgagggcagagatcagacctatgtacgttgcacattgctgtccccagtacctagcacagcaccttgccccagtacgcacttcatatatatttcctggactacggcaggtgagccctttgtgagggttccacctgcccactggcctggcctttaatgtcaggggagcatttctgatatattaatgcccctctaattgtgctgcattcgtttacataggcagtgcagcagcctggctttggtgtttaaagaccggattgcagtcaaagctctgctgtttgctggctatgaactccargtaagttgccaggttcctctgagcactaatgataatattacctgcctcacagggttgttttgagagcagcttctgctgctgccccat

SEQ ID NO: 13512 - DNA, 505 bp, Homo sapiens
gaatgagatcatgtcctttgagggggatggatgaagctggaggccattatccttagcaaaccaatgcaggaacagaaaaccaaatattgcatggtcttgcttataagtggaagataaatgatgagaacacatggacacatagaggggaacaacactttctggggtctaatggaaggcggagggaagaggatcgggaaaaaataactaataggtactaggcttaatacctgggtgatgaaataatctgtacaacaaaccccatgatacaagtttacccacgtaacaaacctgcacatgtacccctgcacttaaaagttagaaaaaaaatagtaaaaaaaaawatatatatacacattaaaaaaaaaagtcacccatctaatactttgctgtaggaatcagttagctttcccctttttgacatatctatatccctgtacataatatgttatgccttcctttctctacttatgcgatgctttatttgctcctactttctacttttcat

SEQ ID NO: 13513 - DNA, 510 bp, Homo sapiens
taaaatattaggttcatatcagagactcttcctatgagacactcttagcaagggtattgggcaacatgaagtggtgatgccatstcactgtgagactcccaccccacccgcaatacagggttgaggcctctgttgcaggtttttcttgattttcgttactggatagcctcagtccttcttaggtgagatcatgctgttcttcttccttcatatatacctaagactactttttccattttggttgaaaccagagagattataaaaacacagaatcacaggctgctgaggcacttgatgtgaggagcacaaagacaaagaggtggcaaggtgagtttaatgcagaggctgaaaatacatttatctttgacattgtgtagtgataagatcacccctgaagagaagcttctgttccttacacaaacacaatccaccaaagagagttcaaaactgcttccctgcaatgtctggaattttggcgttcaacctatacacattcatttattaaagaac

SEQ ID NO: 13514 - DNA, 666 bp, Homo sapiens
taaggttatgtcaaaggacaatgaagccagcttgaaggggctcccactgatcaaataccattgtactccatcctgggtaagaaagtgaaactccgtctcaaaaaaaagaattgccatttttggccaggtgcagtggctcacgccagtaatcccaacactttgggaggccaagacaggaggactgcttgagctcaggagttcaagattagcctgtgaaacacagcaatgcccgtctctactaaaaatacaacaaagtggccaggaatggttgtgtgtgcctgtggtcccagctaggtcccagctcaaggatcacttgagcctagagggcagaggttgcagtgtgcyaagactgcactactgcattctagcctgagtgacaaagcaagaccctgtcttaaaatacgatacgatacgatacgatacgatacgatacgatacgatacgatacgatacgatacgatacgatacgatacgatacgatacttccctctgcttcacaccactcccagaacttcctcaagctcacttcaattgtatctaggaattctgattcaatgtgctctttttggtaaggcaaataaggttaattctggatatagataagcatagccaggacctaatcagaagatttgtggatataactgaataaaaaacagcaaggatctg

SEQ ID NO: 13515 - DNA, 611 bp, Homo sapiens
aacatttacctcagaggactgttatgataatttattttatatttgttaagaattcagaaaaacaagtrgtactatagaagtgtttatttttaaaaatttataagtactcacaaaaatgttcactattttaataaaaatattttgcttgctaattggaaaaaaatctttgaattcttcacctaaaaaatatatagattgctatatttgccagacatagtggctcatatatgtaatcccaccactttgggaggcttgagctcaggagcttgagaccagcctgggcaatatgacaaaaccgatctctacaaaaaacaaaacaaaaattagccaggtgtggtggtgtgcacatgtagtgccagctactcgggaggctgaggtgggaagatcacttgaatccaggaagctcagtttgcagtgagccaaaatcgcaccactacattccagcctgggtgacatagtgagactctgtctcaaaataacaataatagtaataataataataataataataataatcagtgctttcatggtctttatttaataaaaaaaaatactccatttttattacttcaaaaaaaccgagagaccacctggtttgcagttccactgaa

SEQ ID NO: 13516 - DNA, 1103 bp, Homo sapiens
atttttgtgagtttttaaattgaataatataaactgggagttttacataatttatagatttgtagaaatatgtttaagtatacagaaatttcattgagtcattgaattttagggttaaagggacatctgatctagcctttttattttaacagatcaagacactgcagctcaggggttcagctatttacatgaggtcatacagtaagcattaatatttgtagtctcttaatgtagtatcatcttattgtagattgaaacatgacatttaatctgctatcaagatactgggtttgtagggggggatgaggagttgtcagaataacaaaataagtggctttaattttattgaaaacagtggggtttttttgttgtttgagatggagtttgactcttgttgcccaggctggagtacaatggcatgatcttggctcaccgcaacctctgcctcccgggttcaagtgattctcccgcctcagcttcctggatagctgggattacaggcatgcgccaccacgcccagctaattctgtatttttagtagagatgggatttctccatgttggtcaggctggtctcgaactcctgacctcaggtcatcctcctgcctcggcctcccaaagtgctgggattaccggcatgagtcactgcacccggccgatttttgtttcagactataattagggtgctgtacttaytgagaatcacttttgagggctcttatgcctcagttacttgctacctcaaccttttaacttctggtgtgtgtatgctttgtatgaaagcaggcatgtctgtgtcctaatgtctctctcttcatttgttgttttggaagagagccatgacagtacaatctaaaacagaagaatgggttatggaggcttgatctttctcccactcacatatttggtgaggtcatgtcaaagttagcccagctgtattcgcaaatttcaattcataaatgtctcaatagaggttgattgttttgctttgatattctggggggatttgctatttgctaatgacactcgatgtctaattatctttgtgcgaattaaatttaatattaggaccagttggtgaaatactgttttaagacaagatga

SEQ ID NO: 13517 - DNA, 373 bp, Homo sapiens
catggggcattatggggaacgtgctgttgacgacactggcctgcacacatgccattttatgaccctttgtgggtgtgtgcacgttggggaaaccgggcatgtgcagaaaagatatatctcagcggaaaggggctgggagggccttttatttccttgggggaaatactgtgcattgtatgacccsttgtgtgaggtcaggtgtggaattttccaccgaggcaccacattagtgctcaaaattgttcagattttggagcctagggtttcggatcttcagattagggatgctcaacctgtacaacatccttgcaacaatctaggtgtgagctttcctcaagagcaagaagagcttgccacttctgctatatgacca

SEQ ID NO: 13518 - DNA, 534 bp, Homo sapiens
tgaatgaacccaggtggactcagccaagtctgacccatatcaatgaacccccagctgacgaattgattccaaagcactcattgatggttgtaattttaaaccacaaaactttaggatgatttattacacaacaagarataatagactaaggttgactaagaaggtgagagagtggagtgcggatactgtggatcacttacagtgagaagaagggggtacaaaaaaaggtgagatattttgctgagggttaccatggcatagaggcagcaagctattgtaaaagtcagaccaaaaggcgctgttccaaaagtcaggagacctgtccctgacaggtattcactataagtgacccctgcaaagccattatcttctttgactctcagttttctcaattgtaagatgaaaacaataccaagatggccgaataggaacagctccggtctacagctcccagtgtgagcgacgcagaagacggtgatttctgcatttccatctgaggtaccgggttcatctcactagggagtgccagacagt

SEQ ID NO: 13519 - DNA, 578 bp, Homo sapiens
attttccagctaagaagaggagagctgggattggaacctaggtagtctattttcttaactattatactccacagcctcttatttgcattaagaattaaggccactgaatggacagctcagggctgtcacttacattgaagtctatatgagtggcacccctaggagctgtacagagcacaacctgaggccatatgcagcatcctcattggggattaaaggaattgattgttcctggcagaggaccctggggtccttgactggtctcaggttatttttctggccttaagtttcctttagaagagcactctcaaactggtgttccctggaaccagtttcataaggtagatgctccaccaaaaaaggtcccaaggcaaatgtatttgagcagaggtgaaytaaacaaacttaaatcattcttttactggaaaacctctcagatcttaatgtattagcattcaccgtaaatctcccagaggaggatatggttgtcatattttctaaacatatttgaccatttatattgcactgaagtagtgttttgggggaatattttatattttgggaaatacttgatattt

SEQ ID NO: 13520 - DNA, 660 bp, Homo sapiens
ctccttatatgttgttgcaaaatcgtaaactacaggacgattgggtcttggtcctggtagcctcacatgagattcagttccaaaagaccggacacttagcccttttctcctgaggatgctgtgggcctccatgctcctgttgacattgctcacgcacaccacagccaccctgagtgtggaggagagcatgatggcggccactgggaaccagagagacacaggcacctcagctgctgcagggactcggagccgaggagacgaccacctatacccaggtcttccaaacgagctaatgtggaggcacaggaggcaggtttatattgagtcacyttaatgagtgggtggagacttcatgacttctggattgattaggttgtgataatcatctcctaactcatcacaagaacaatcaagatgattaaattacctaaagcagtaactctccacaaaggtggcaccacccagtctggattcatttaaaatctggagtttgctctggtggttctcctagtgaatgggggctgctatggacaacggccaagacaattaagctacctgcaagcatgtcataggactctccagtgacctccagacatgaaattggatgataaacatgttcacgatgtgcaaggctgcaccctatttaattataaattataa

SEQ ID NO: 13521 - DNA, 660 bp, Homo sapiens
ctccttatatgttgttgcaaaatcgtaaactacaggacgattgggtcttggtcctggtagcctcacatgagattcagttccaaaagaccggacacttagcccttttctcctgaggatgctgtgggcctccatgctcctgttgacattgctcacgcacaccacagccaccctgagtgtggaggagagcatgatggcggccactgggaaccagagagacacaggcacctcagctgctgcagggactcggagccgaggagacgaccacctatacccaggtcttccaaacgagctaatgtggaggcacaggaggcaggtttatattgagtcaccttaatgagtgggtggagacttcatgacttctggattgattaggttgtgataatcatctcctaactcatcacaagaacaatcaagatgattaaattacctaaagcagtaactctccacaaaggtggcaccacccagtctggattcatttaaaatctggagtttgctctggtggttctcctagtgaatgggggctgctatggacaayggccaagacaattaagctacctgcaagcatgtcataggactctccagtgacctccagacatgaaattggatgataaacatgttcacgatgtgcaaggctgcaccctatttaattataaattataa

SEQ ID NO: 13522 - DNA, 536 bp, Homo sapiens
acatatagattatatcttttttactaatgctcactttaataggtaaaatccaagttgggtaatgaactacatatgattgtaacatttggaattatctgctcaaatcataggtcatcaaattaaatgaaataaaaaatgtaaataaaaagtatattcttatttctgtttgggggatgcatttcaagccactaagcgacatgcttttgtttaaaccttacgaattacactgaaaaaaaagggatctttcatagtgaaaattttattaggtttaaaatattcattggtatgaacactgagaacatcaggtgataaacctaatgatgttttcaaggagaaacaattgaaactctttttcataatccttggtrgtggcactaaaccatgtttactaataggagaaaaatagatcagaagtagttgttcatagttaaattaattgacatgttatctattgaactagacttattacggcaacctaaaataacagcagagattagctctcaaaatgagtttatttgaatgaaggactggaatca

SEQ ID NO: 13523 - DNA, 1469 bp, Homo sapiens
tggacaatggatagtgaacacgaactcaactctctgttgccaagctgaaagcaaacgccagctttgggtttggagactgtcaagactggtatagaaacccaggttctctgggcttctctctgatgacagaagcctgtcatgatttaatcaaaccaagtcagaaaagggaacatagcataatgacaaaccaatataaacgyagaaatgtctgtggtatcagcccagcaaagttgtgccctgttcttcttaacattgcacagtaaggacatatgcaaagagctatgcaatttagcaacatttctgtgggttgtctgtttttaaaatgtactcattcctagaaaacaatgcagccaaattaactttgaccaaaagcatttgagatgttttccgaacatttgtggtacacaaaccaaagagtttatcataattttccagatgaagaaagagagatatacagaaattaaattacttgccctagagtaagaatataacccaataaattttgctaacatttgaagttgccagaggccatgttaattattggatacctttaaaagggccctatgacatctgattgccaaaagagatgttttctgttgaggttactttcagttgaaagtctacgaattcttttaaagacatgttttacctaaaaactgctagaaaacattggtttgttttgaggactacccttcttaagattttataaaaataataatttagtttgtaatcagctttttatataaaataatgccatgtgttatatgtcatttatccaatgctcattttctaggtgtacgttgcaggaaaaaataatcatatgtcaagttaatatcctactcctggattacaccatttaactctctgtctctctctcacacttgagatatctataagaccactctataactctatcacactttattttgttctggctctggggctggctttcccaggaagccaaagaaatatagaaaggaggaatatacaatgaccactcttccactctgatgccttcaacaagaaactatatttcttcataactggacatttaacacaacacacggcatcctagacttttttttatctgcaaaaaagaatcccatttcttgatatgacttaaagcagggattaaataacccatacacacacacacacacactcacacacacacacacacacacacgttctcacatgtgaaatagatggatgtatatatttatatatgtataagtttggttattcatctcaactcaggaacactctccactctcttctttagtgcccacgagatgagatgctataaaatagttgccctctgggctggagagcctacactagcagtttcagatccttcactgtcactgtagtcattctactgtacatcactttcaatatttttccctgtagggagtatctactcaaataaattgaaaaccactttcttctgcttctgttagtatactgtc

SEQ ID NO: 13524 - DNA, 793 bp, Homo sapiens
cttgagttcaggaggttgaggctgcagtgaggagagcatttataggcagaaaacataagaatgcctataattttttttttcagatggagtctcgctttgtcgccaggctggagtccagtggcacgatctcggctcactgcaacctccgcctcctgggttcaagcgattctcctgcctcagccttctgagtaactgggattacagacacccgccaccacgcccagctaaattttgtattgttagtagggacggggtttcaccatgttggccaggatggtctcaatctcttragtcatgatccacccacctcggcctcccaaagtgctgggattacaagcgtgagccactgcgcccggcctataattttttttttaacccagtagaaaacaatccagcaggaaaatgggcaaaggaaggaaatggcaagttcacagaggaggagacaaacaggtcaatacgcacatgaagagatgcctgaccaccctgtcatcaaagaatgcaaatgaaaacaacaataaaccatcatttctcccaatgagattggtaaaagttagagaaaattgatgacgtcccgtgttgaagagggcatggggaaatgagtggtgtaggcagataaaatggtaccacctttggaggaggcaatttggctataagttttcttttctttttcttttttcttttttttctttttttgtgagacagagtcttgctctgttgcccaggctggagtgcagtggcacgatcttggctcactgcaacctctgcctccctggttcaagcaattctcatgctt

SEQ ID NO: 13525 - DNA, 558 bp, Homo sapiens
cattttatttatttattttttgagacggaatctcactctgtcgcccagactgcagtgcagtggcgcaatctcggctcactgcaagctccgcctcccaggttcacgccattctcctgcctcagcctcctgagtagctgggactacaggtgccygccaccacgcctggctaattttttgtatttttagtagagacgaggtttcacgcattagccaggatggtcttgatctcctgacctcgtgatccacccacctcggcctccaaaagtgctgggattacaggcatgagctaccgcgcctggcccatttattcatttagtaaatatttataaagtccctactatgtgaaagggactattctaaataccgagaaaactcaatgaacaaaacaaagattcctgctttcacggagcgtgtgtgtgggggtggggggcggcaagaggcatctggatagttaaaaaacatacaaaagataattcactaaattatataatatgttgaatggtgaaaggtgctatggaaaaaatagaggctgcaaaaaaagattacgttttgagggag

SEQ ID NO: 13526 - DNA, 520 bp, Homo sapiens
acacaagcctggccaacatggtgaaaccccgtctttactaaaaatacaaaaaataaattagccaggcattgtggagggcacctataatcccagttacttgggaggcttgaacctggaaggtggaagtggcagagagccactgcattccagcctaggcaacagagcgagactctgtctgaaaaaaacaaacaaacaaacaaacaaaaaggcacagaactgtatttccatgcccagggcctttttgcttcaaagcaaaaagtatgtgatgctgcaatttggggatgaggctatatgttggattattctctttacataatgaattttataaggaatataatatctgatcccacttcatgcagtccaggatttgcagcaaatatggttgtgccaaactgggtygcaggtcacagtgggcagcaaagccacaaatgttgcatattgaaatgcttaaaaagatgctgtgtgtacgatgggttattttcctatagccagggaacatcttgtcttctgtaaaaacagt

SEQ ID NO: 13527 - DNA, 1265 bp, Homo sapiens
  misc_feature (1)...(1265): n = A,T,C or G
ttttacattatgttgtttaacaaagtgtagtaaatgtaggcatacatgatcctatcatgtaagtagcatacctcatcagtgaaaaattaaatagttaactcagaattctgtacattgaattttgaagaggtgcaaaccctagagctattctntcattattatggaataatcccgaatggtgccataaaatgctaggtaatgccactttaggagctttagaccaattattttatctttcttggttttagtctgattatcaatagataatgtgcctaaagtagataatttcttattctctgtattttccagctagaaaattttatggctatcgaagaaatgaagaagcacagaagtactcatgtcggattcccagaaaacctgactaatggtgccactgctggcaatggtgatgatggattaattcctccaaggaagagcagaacacctgaaagccagcaatttcctgacactgagaatgaagagtatcacaggtaagcctatggcaacattgaacaggaggtaactttgtgctgccaaactaatcctaatttgagctaatattcatgatgaacaaattttatacttttattaggatattgagccttgcctgttaatcagaaaaatgaaaatcagcaaacaatcagttaccgttttttttccagtcattaatttatttgaaaaataaccagtaatggcaaatgtgagggaaaagacattttcttctcttttcagtgaacttttatcttagcttcggggtacgtgtgcaggtttattatataggtaaactgtatcatggaggcttggggtacagattatttcaccagccacatagtaaacaaaatactcgaaaggtagttttttggtcgtctccctcctgccatgctcctccctcaagtaggccccagtgtatgttattctcctctttgtgtccatgagttctcatgtttagttcccactaatgagtaagaatatgtggcatttgattttctgttcctgcatgagttttcttaggataatggcctccagctccatccgtgttgctgcaggggaaatggtttcattgaaaaagacatttcatatactgttggtaaatacattttgaacattaattgagtagcatattcacacacacatatataacagtaagcmtatataatacatgtaaaggatatttgtatagatatgttatatgtatacttatgtataaggacatttattatagtattatgtaaaaaatttggagctagtctaattccttatcaata

SEQ ID NO: 13528 - DNA, 968 bp, Homo sapiens
tttgaaataaaaagacagttggaattttttgcttccgatagtaagactatactggtcaggcactgtctattctgatggagcagctgttgctgcttggctgtctttcagaagcaagctgctcacactgatattggttggtgagcacagccagtggtcggtcattgatcgattgactagattttgaactggctctggctggcttcttgttaccatggctacaggtcaattctttcctaagtttgagtcaactttaaccagaaattttctgttcaaaagttgccttccattaactatgttcaaaaagaaactttttaatattccagaattgtggatttaaagttttggttatgatgacttggttaataatagctctcacgaagatttttttttttgatacatcatcttaaccagaagtgttctctgtataatttatttcttaaaaataagtgttttgtttttgtttttggtattttwagaagcttttgctcaagtcctaacataatctccagtaggagattttagtctctttgtcagttcatgtatgtatgtgatagtcatattctgtgtttttaaattccttttcttgttcacttttttctctgtacaataatagtgatattgttatacatttttatctcattaaaaagttaacaattttctgctggcaaatctagctttttctatattttgactgaataggttaaaagtgaagaaaatttacgagatcattttattttcaaacaaaatcataagtaataaaaattgctattttgaattataaataatgacatttagatattttaaaaataaggataaccccccccggcccccgcaatagtttggctttgtgtttctatgcaaatctcatgtcaaattgtaattcccaggtgttgaggaaagaccagctgggaggtgattggctcatggggtcggtttcctccatgctgttcttgtgatagtgagtgagt

SEQ ID NO: 13529 - DNA, 529 bp, Homo sapiens
attctaaaaatttgatattatgtctaggtttttggaaacaaaccaaatcaaaacaaataaacaaaaaatctacatttattgtgtggctctggggaaaacacgggaaagatatttagttcagttcaggcagattataccacagggagcctaaatgaaggataatcattaaagttgtcacttatgaaacgtaatggtagattgtgactgaayttagaacagtcttgtgtcgcgcagtgcctttcaaagtccaacaggtactatttcaactacaacaggagtgacattgacctggggtggcctctctacttccaagtcacttttcaaaacgtagttcagatatactcagttctgatggtgtctttcctgacctccttccaggctgggttaagaccattctgtcctctacgcttctgagcattcataccttttctcatccatttttgtattccactgataggaacagagaagctacctaatagagttcattaaattgaaggaattactacctgcattctggtggctcagattc

SEQ ID NO: 13530 - DNA, 574 bp, Homo sapiens
atgatagttaagtacatgtatgtggtacaaattacaatggaaaacagcaatgattttctgataaatgctgtaatttcttaattacaaagagagataaattcttcaaatgaaatatcatacaattagctatcataaaatacacatacttatatatgtgaaatatactaggcttcataatttatggtcaatgttattattcacacacatgcacacatatacacccatacgtattttatatatatatgarttttatatatattatatatatataaaagactatcctaggaatctgttttgaaattactcacatacatacactacaacaaactgacagaaatataaaacgttctagacaccatcagtttcttttctgctaaaagacacaccatgctccccttgtgaatctatggagttgagggtttctgttatttcacccagcacgtcacctgacacaaaactgaaagagaggtctgttttagcttcctacttctcataatcaggatgaatgagtggaatgaaggatacatgattgcaagagtttggtaaagcaggaatacaagattgctctgctgtg

SEQ ID NO: 13531 - DNA, 1139 bp, Homo sapiens
cccctgcaggaaagagagaggctggaggcaccgtagacagggagaggccatattcgtccacatgctagccatgcaaaaacgtcaatttaatagattccattgtaaagcagagcttccagatttcagtagcatcccgaattaggaaagcacatttcatgtaacttcaatgtcttcagcaagtaaagtcctgctagatttttttttttaattttctataaaaaaaaaaaaatcctgctgaggaaaaaacagctatagtagctcacaaaacacatggctgcagaagtgtaattcttcccaggttcacttcagtccactcctgctctgctttcttctagtttcttttgaggtttaaactcaaaactacaaactaaagcagctgcatgctctcctctgggctcacagcatgtccaaagcttcagagacgcaactcagtccctggacagcccgactcctttcgcccacttcagaacaagtgccagtatctccatgaacatttcctatcctcttttctctactcacttccagattttttccttcactttcttcacctttgattccagatttcttccaaacacaagaaggtttcttttttgtgggaagtagttgactagacactaagggctgaagccagaataaaataggaaagaagggaccagatggtgcggaagtaagaattagtcctaggtctagggggaagccagatctgaaaaagcaacagagttggaaggtctgaagtaaaagaccccggtgatgatcctgctgactgatatggtcactgttaccaccaggaaagaagatgaagggtttctgctgcctacctgactttgagtgaagcaaatgctttcaaatgtcaaagggaagcatgcgataaaggaaagatgcaggctgaagacttgacgagaatgcagcctgagtaccactctctctattaccagctatgtaagatctcaaaaatcagttctttttaagttgatagattattggtacttattcctcccagagataaatgttgtctrtaagaagtgagagaaagggtttggagggctcagtgccattcctggtataatgatatttgaggacattaggtaccacagctttcagaatgctacctttccttaggaacctcttcaaataattac

SEQ ID NO: 13532 - DNA, 1139 bp, Homo sapiens
cccctgcaggaaagagagaggctggaggcaccgtagacagggagaggccatattcgtccacatgctagccatgcaaaaacgtcaatttaatagattccattgtaaagcagagcttccagatttcagtagcatcccgaattaggaaagcacatttcatgtaacttcaatgtcttcagcaagtaaagtcctgctagatttttttttttaattttctataaaaaaaaaaaaatcctgctgaggaaaaaacagctatagtagctcacaaaacacatggctgcagaagtgtaattcttcccaggttcacttcagtccactcctgctctgctttcttctagtttcttttgaggtttaaactcaaaactacaaactaaagcagctgcatgctctcctctgggctcacagcatgtccaaagcttcagagacgcaactcagtccctggacagcccgactcctttcgcccacttcagaacaagtgccagtatctccatgaacatttcctatcctcttttctctactcacttccagattttttccttcactttcttcacctttgattccagatttcttccaaacacaagaaggtttcttttttgtgggaagtagttgactagacactaagggctgaagccagaataaaataggaaagaagggaccagatggtgcggaagtaagaattagtcctaggtctagggggaagccagatctgaaaaagcaacagagttggaaggtctgaagtaaaagaccccggtgatgatcctgctgactgatatggtcactgttaccaccaggaaagaagatgaagggtttctgctgcctacctgactttgagtgaagcaaatgctttcaaatgtcaaagggaagcatgcgataaaggaaagatgcaggctgaagacttgacgagaatgcagcctgagtaccactctctctattaccagctatgtaagatctcaaaaatcagttctttttaagttgatagattattggtacttattcctcccagagataaatgttgtctataagaagtgagasaaagggtttggagggctcagtgccattcctggtataatgatatttgaggacattaggtaccacagctttcagaatgctacctttccttaggaacctcttcaaataattac

SEQ ID NO: 13533 - DNA, 1139 bp, Homo sapiens
cccctgcaggaaagagagaggctggaggcaccgtagacagggagaggccatattcgtccacatgctagccatgcaaaaacgtcaatttaatagattccattgtaaagcagagcttccagatttcagtagcatcccgaattaggaaagcacatttcatgtaacttcaatgtcttcagcaagtaaagtcctgctagatttttttttttaattttctataaaaaaaaaaaaatcctgctgaggaaaaaacagctatagtagctcacaaaacacatggctgcagaagtgtaattcttcccaggttcacttcagtccactcctgctctgctttcttctagtttcttttgaggtttaaactcaaaactacaaactaaagcagctgcatgctctcctctgggctcacagcatgtccaaagcttcagagacgcaactcagtccctggacagcccgactcctttcgcccacttcagaacaagtgccagtatctccatgaacatttcctatcctcttttctctactcacttccagattttttccttcactttcttcacctttgattccagatttcttccaaacacaagaaggtttcttttttgtgggaagtagttgactagacactaagggctgaagccagaataaaataggaaagaagggaccagatggtgcggaagtaagaattagtcctaggtctagggggaagccagatctgaaaaagcaacagagttggaaggtctgaagtaaaagaccccggtgatgatcctgctgactgatatggtcactgttaccaccaggaaagaagatgaagggtttctgctgcctacctgactttgagtgaagcaaatgctttcaaatgtcaaagggaagcatgcgataaaggaaagatgcaggctgaagacttgacgagaatgcagcctgagtaccactctctctattaccagctatgtaagatctcaaaaatcagttctttttaagttgatagattattggtacttattcctcccagagataaatgttgtctataagaagtgagagaaagggtttggagggctcagtgccattcctggtataatgatatttgaggacattaggtaccacagctttcagaatgctacctttccttagraacctcttcaaataattac

SEQ ID NO: 13534 - DNA, 605 bp, Homo sapiens
attaggccctgcaagatgtgatcctattaacctctttggccattctcatccgttggtcactatgctccaaccataattttctttcagttcctcaaacataccatgcaagaaccttccccctgcaggaacatcatacattgtggcccctgtgcccagaccaccacgccatcacaaccctttcacacstgttgaatccctttcattcttcgagtctccatttaaatgtcacattctacatgccccaccaaggaccaggttcctgtgttatactacataagggcatcttagatttttccctcatagcacatatcccaattataattaaattatttatttaatgtctctttctttaggctataagtcccatgcaagcaaacacattagttttgtcagtggtatagtctcaaagctcagcctttctagggctacttgttatttaaagggaaatttttctaagtatcaagcagtgattcataacatgaataaacatccctaattcttgaagacagtaactgaagcttttctgttgctcatttttaattattaatcctctgctgctataatcatcgtgaatacatacatggacccatacggcagaggccctc

SEQ ID NO: 13535 - DNA, 605 bp, Homo sapiens
attaggccctgcaagatgtgatcctattaacctctttggccattctcatccgttggtcactatgctccaaccataattttctttcagttcctcaaacataccatgcaagaaccttccccctgcaggaacatcatacattgtggcccctgtgcccagaccaccacgccatcacaaccctttcacacgtgttgaatccctttcattcttcgagtctccatttaaatgtcacattctacatgccccaccaaggaccaggttcctstgttatactacataagggcatcttagatttttccctcatagcacatatcccaattataattaaattatttatttaatgtctctttctttaggctataagtcccatgcaagcaaacacattagttttgtcagtggtatagtctcaaagctcagcctttctagggctacttgttatttaaagggaaatttttctaagtatcaagcagtgattcataacatgaataaacatccctaattcttgaagacagtaactgaagcttttctgttgctcatttttaattattaatcctctgctgctataatcatcgtgaatacatacatggacccatacggcagaggccctc

SEQ ID NO: 13536 - DNA, 1496 bp, Homo sapiens
tttaaatggacactccacaaaggaattgtagtatatttcaaagggtatattgaagatgtgtaaaaccaaggacgcttaccagtttatatattagtaaatacatttttagtcatattgtactagttacagcatttagcacatctaaattgggcttattattttcacaaattaggttcagctgttggatttgcttaatggtcttttcatgaagtactaagtaactcatttcacaatctcmtaatcttttctggcagataagtgtggtgcttggcaagaaaactttgttttttttaaatctgaatgaaccagataacccagctgatcttgaatttcagcaggactttggcaacattgtctgctataattggtatgtctgctataactggtatgtacaaaaagctcattacagaaggacatctgtaggtttttccttactaattgtattcaatttttgtttgtaacattcaattctatacgtcacattttctgattcatggtctgtgatttagtatgcaaaactacctagtatattatctgacacaaagtaggcccttgataaattatattctataattccttaattttaaggtacttgctaatttaccatgttgccactgatagctaatctccttgtttaccatattgttgccttctttgctataggtatggtgatggccgcatcatgattggtttttcatgtggacattttgtggtcatttctactcatactggagagcttggtcaagagatatttcaggctcgtaaccataaagataatctaaccagcattgcagtatcacagactcttaacaaagttgctacatgtggagataactggtaagttattttcacatatttttaggaaagcttatatagtaaatacttaagtgaatcagccaaactttgttagctaatatgaatctggcaatcatgtttacaatttaaaacgtctaagactactttgctcctgattttaatattcagggcaaaaatataaaacaaagtatagttgaaaatcaatcttaaaaataaaataggtagttctgggtaacatggagtaagcacactccaccccatgtctcccactgagtacagctataaaacgtgaacagaatgcatggagcagatatttaaggactctgaaaagtaaatggtagcaggcagattggaaaagaagacggaatttgaagtgccaactaaccagtggggagtctcccacttgtcctctgctgtctcacagccaggactcaaggaagtctgaaacctagaagtaggcaccaaagcacagagagagctttaaggaaactctctggttctggcttaagttgcaggaaagagaacttataatgctcaaaggcagttggggaaatcccctggttttctttttctttttttgttctttgttctctaatgctccagccaccaagcagtctccccatggcagtggcaacaagaacagtggcaccaaggacccacaggcacctaaaactctgatg

SEQ ID NO: 13537 - DNA, 703 bp, Homo sapiens
gaaatggcaacccacagaacaggataaactaatatgcaaatcagataagggtctagtatccagaatatataaaaagaactcttacagttcaataataaaaatgcaaatggcccaatttaaaaattagcaaaggacttgataaatatttctccaaagaagatatactaatagccatcttgaagcttttttaccagctgattctcaataatttttgtctttcctccactcttgctttcgcattgccctggctacaccccaaaaggggacatcacaagaaattgtaccctttgaaatctgaagtactttcatcccagtgtctcatcactaactgtgcctacttcattgctttttcaacctcctgagccctctcatctcttttttccagtctatcaatgcttcttctgcatacacacataaatacacacacaaaggaatgatgctgggtattatatccctagtgatggacaaataaacaaggtgaaaatgatgacaatgatgacaatgattctgataaacgcataccagtaagtgatcaagggcctccctggagtaaaccccatmccgccgggtgagaacgtacttcaccccctttccaaaatcaacagaacctgatcaaagcaaaaggatttgttatccctcaagaaacctcctagtagctgatggctttgccagtgttattgttctaagcccaatcacttcagat

SEQ ID NO: 13538 - DNA, 552 bp, Homo sapiens
gctatatcctaagtgacattttgcctatttggaaaacattttaaagacagattaaatatcgcatttccaactctcaaatggaaaggtatcactttacagctttattattttcaaatattcaagctcaaacagttttatagattaaagagattgcttaactcaataaaatccagaattctaagtttacatctttcttaaattatcattattgtatacrttgcaagtaacataacatcatcagatttataccataattgtaagatgcaaatgtataattactagaatttaacctccccaaaatgatgtaattcaacctgactatcctggctacataaatgcaagctaatcggcaatgaaacatttaaataaaacaagaacgttaacacaacaacaactgcagaataaacaaacttttcaagaaggaaaaaaacaagggcctaattatatctgcaacaaaaaatcataaatgcctactattttaaagtattttcccgtccattcagactttagctgtggccaggactgtttcaatatgtgttttgacctctacgt

SEQ ID NO: 13539 - DNA, 567 bp, Homo sapiens
aaccaccatgtgagtttatagtaataaaaaacatttttcattattctttgctttacattttagaatgcaaaagccattagtaactaaaatttctataaaagttgattaatggggaagccttttggttcataattcacaaaattgtcaaaggcgatcattccaagcttctgagcgaaacttattctctgaaatgtgagatattttgacagaaagatttgcatagttattttcaaatacatttgaatatttagtgcccccaacccagtttgtataaaagatttgaaggcatagaattatgctgagtttaactgtatctcctgatcaccctctatctggcggacctaagccaaagctcctgttgtgtgaggttcttaagagctggtatcacactcttcccagagctcctatgattccatttagagcctaacaaatcttcaccatcaaatacgaggggagctactggtcaggagaaatgagagaaatggtattttcaagactgaatcaaacttaaaaagacagcttccagraaagaaaaaaaaaagaaaaaagaagatgaagggagggagg

SEQ ID NO: 13540 - DNA, 528 bp, Homo sapiens
tgcattacatatatgcacgtatatatgtagtacatgtacactcgggaaatactatatttttggttaaagaagatgcatctttactgtagagtcaaacagatgaacatggcagaaccttgcataatgcttaacacattaaataaatgtcttttaagccaaattgaagtgataaaaatatttgttgttttaatcaaaaaaggtataggagagataacagaaaaaaaagctaaacaagaacaacaataaaaacataattttcagaagttagtaactcagatataactgcaccataatggataggtaaaatgttttctttttgtgmaaggaagctaaagtgaggaaggctatttttaaggttttggaaaaacttgaatgtttctcccttcattttccttttccacattactttatatgcacatatgggtcttctttttgcagcagcagagaaaaaaactaccctacaattgtttggaatgttcatatcaacctttataatatttgttacctttaattatttgaaaatgttga

SEQ ID NO: 13541 - DNA, 528 bp, Homo sapiens
tgcattacatatatgcacgtatatatgtagtacatgtacactcgggaaatactatatttttggttaaagaagatgcatctttactgtagagtcaaacagatgaacatggcagaaccttgcataatgcttaacacattaaataaatgtcttttaagccaaattgaagtgataaaaatatttgttgttttaatcaaaaaaggtataggagagataacagaaaaaaaagctaaacaagaacaacaataaaaacataattttcagaagttagtaactcagatataactgcaccataatggataggtaaaatgttttctttttgtgcaaggaagctaaagtgaggaaggctatttttaaggttttggaaaaacttgaatgtttctcccttcattttycttttccacattactttatatgcacatatgggtcttctttttgcagcagcagagaaaaaaactaccctacaattgtttggaatgttcatatcaacctttataatatttgttacctttaattatttgaaaatgttga

SEQ ID NO: 13542 - DNA, 526 bp, Homo sapiens
ttttttaagataaacaatgcttctatgaacaccttgttcatatttcctggtacttctctagggtatataaacctagaaatgaagtttctctgtttcagggtatgcccatttcaaatttgctgggaaatttcaaaatatttttctgtttgtgctattctgcattcctaccagcagtgcataaaaatggcctttgttttaaatcactgccaatgtttcagatttacagggatttaaaaaatattcttcwtcttagactaggtaataattaacaataaaaaaagaagaaaaatattttccaatctagtgagtgtaaactatcacagtatgactgagaaatttgcattctcctggtaattaatgaggctgagcatcttgggatgagatgtttattggccatttatatttccttataacatgaggtaggaatccccaatagccaggagtcctggacagtgccccagtacaggatggctcatattcctgagagacatttggaaatgtcataagttgctctataaattaccac

SEQ ID NO: 13543 - DNA, 553 bp, Homo sapiens
tttttcacaattgatgaagctatattttcttctcattcacagttttaaaatggcagtcatgagagtcagtttactatttcaagtcttttatgaaatagttttccagcacgatgagaataaggagggacgtaactgtctttaaaaaattgtaaaattttacacaaatgagtgtgatagygcacaactggagttcctgctacttgggatgcggaggtgggagggttgcttgagcccaggagttcatgtccagcctgggcaacacagcgaggtcctggctataaaaaaaatgtaaagtttctacaaacccatcatacctcatgtgaaaagcttgagttaaatatgtttcataattcaaatttttttaaattttatgaaatatggtacatatattgcatattacacaacacgtgttagtagcctgaaacacacattaatattttttgtaattgaacatataaataaccatgctaagattattaaagacccaaaatgttcttgtttatattaatttttactgccaaataaatttatgccaaacatacaaattaatttt

SEQ ID NO: 13544 - DNA, 553 bp, Homo sapiens
tttttcacaattgatgaagctatattttcttctcattcacagttttaaaatggcagtcatgagagtcagtttactatttcaagtcttttatgaaatagttttccagcacgatgagaataaggagggacgtaactgtctttaaaaaattgtaaaattttacacaaatgagtgtgatagcgcacaactggagttcctgctacttgggatgcggagrtgggagggttgcttgagcccaggagttcatgtccagcctgggcaacacagcgaggtcctggctataaaaaaaatgtaaagtttctacaaacccatcatacctcatgtgaaaagcttgagttaaatatgtttcataattcaaatttttttaaattttatgaaatatggtacatatattgcatattacacaacacgtgttagtagcctgaaacacacattaatattttttgtaattgaacatataaataaccatgctaagattattaaagacccaaaatgttcttgtttatattaatttttactgccaaataaatttatgccaaacatacaaattaatttt

SEQ ID NO: 13545 - DNA, 553 bp, Homo sapiens
tttttcacaattgatgaagctatattttcttctcattcacagttttaaaatggcagtcatgagagtcagtttactatttcaagtcttttatgaaatagttttccagcacgatgagaataaggagggacgtaactgtctttaaaaaattgtaaaattttacacaaatgagtgtgatagcgcacaactggagttcctgctacttgggatgcggaggtgggagggttgcttgagcccaggrgttcatgtccagcctgggcaacacagcgaggtcctggctataaaaaaaatgtaaagtttctacaaacccatcatacctcatgtgaaaagcttgagttaaatatgtttcataattcaaatttttttaaattttatgaaatatggtacatatattgcatattacacaacacgtgttagtagcctgaaacacacattaatattttttgtaattgaacatataaataaccatgctaagattattaaagacccaaaatgttcttgtttatattaatttttactgccaaataaatttatgccaaacatacaaattaatttt

SEQ ID NO: 13546 - DNA, 555 bp, Homo sapiens
cccaacaccatttattaaagagaccrttctttcttcactatgggttcttggcactttgtcaaaaatcaactgaccatcaatgcatgggttgatttctggacttcctatcctgttctattattggtcaatgtatctggttttatgccagtaccatgctgttttgattactatagctttgtaatataaattgagattaggtgctgtgatgtctccagctttgttctttttgctccagattgctttggctatgtgaagtcttttgtgatttctcacaaatttcaggatagcttttctatttctgtgaagattgatattggaattttggtagagattgcactaaacctgtagaatgctttggatagtatgtacttttacaatatcaatttttctaatccatgaacatggagtatctttccattcctgtgtgcctttgctgtttgattaggtttagtgcactgaaacctccattttcaaggcttgatggcatggtaagaaataaaacagaaataaactagatgatatacctgtggtctggcaatcagaacaattgctttt

SEQ ID NO: 13547 - DNA, 559 bp, Homo sapiens
aaaaaaaaaaaaaaaaaaagtttggtgtccgctttaaccatcaaagactgaagcactgctcctcagaaaagatggcaagagaatagggtttttccttttcccaagctactgcatgggaaagctactgcaagttgaaagcagtcagtattagtccaattttgcattgctataaagaaatatctgcaacacggtaatttataaagaaagaaggtttagttggctcacagttctacaggctatactggaagcatgatgctggcacatgctcagtttcttgggaggcctcaggaagcttacaatcatggtggaaggtgaaggcrgtgcaggcaggtcacatggccagagcagaagcaagagagaaagtagggaggtgctacacacttttaaacaaccagatctaagaagaagtcactcactatcactaggatagtactgagggggatgatgctaaaccattcatgagaaatctgcctccatgatcaaatcacctcccaccagaccccacctccaacattggggattacattttaatatgaaatttaggtggggacacattcaa

SEQ ID NO: 13548 - DNA, 518 bp, Homo sapiens
aaatttctgggaaaattgtaatcttacacgtgttgatatcaaagtcctgaaaacaaaagaaaattttagaaaaattcaacagtataattcctgtgttatttgatattctttactgaatawataacaagttaagactatagaatcattcaacctaaaaatatacacatatatgtttccttcaacctttaatgtcaacttcacacatgtaggtttggaaatatatttcattccctttcaaataaagaatggcttttctcttctccaaccagattatttgtgttattaataaaagcagcatgcctaagggttgaatcacttcaggagttgtaaatcaagtgtaaaatgaaagttcatttgtgggtggaagaaataatgcagagagaatagcaggtcaccaactattgaacttagtgtattgacatatgacacaacattttgtgattctttagcagttcatctgttcttgactttttgtcctttataataatattacaaaacaagagaataccaaaaaggct

SEQ ID NO: 13549 - DNA, 238 bp, Homo sapiens
aaatacaagttaggtactatgtagagggtatttctattaaaatttgtttgrtgactttcttatggttaaacttgtttgtgttcttggaaggaagaccaaagatgtaaagaataacgtggttttttttggtaagtcacccatatcattggctaattaatgttattataattctctagtctatctattatgtgttcaactccatagtgtttctatgcacctttggacttaaatccaggta

SEQ ID NO: 13550 - DNA, 920 bp, Homo sapiens
ggaccactggatagggaaggaacaaagaggagtgtgggctgaaaaactgcctattgggtactatgcttagtgcctgagagatggaatcactgggacctcaagtttcagtgtcacacaattcaaatgttcaaagatgtatatgaaatacacaaggttcaaacatgtatataaaatgtagcacatgatcagggaaatacaaactgactatagttcagctttattttctccctttgacattaataaaagggatattatgtcagataaagacacttttacatgataattttaggaacatttagaaattctggttaggtgatattgcataaataatttgttcaaatttcacttagcattcaaataaacagaagcatttctttaatcattaaggatagttatgcaaagatgaaagataataaagaaatgtagcaaaactgcatgtgtatcctttaatctataataaaagttgaaattatttaataataaagaataaaaataamtgcagataacaaagtttcaaaaatgtatataaaaagtattacatgatcagggaaatacaagctgactatacttcaactttattttctacctctgacattagtaaaagggatagtatgtgagataatgacactttcacataaaaacttctttaggaatacttgaaaattctggtcaagtgatattgcatgaataatttattcaaatttcaccttgcattcaaataaataaaagtattttttaaatcactaaggatagttatgcagagatgaaagataatacagaaataaagtcatatctattagatagtcttaatatcagatatttctaatgtataattggtatacagtagattacaatcacttcaaaaatatgtttgattagttactgaagaaaaataatctctggtaaattaatttatattt

SEQ ID NO: 13551 - DNA, 571 bp, Homo sapiens
tggctctcagcttgaatgttattggtgtatggaaatactattcatttttaaacattgattttatatcctgaaattttactgaagtcctttatcagttcccagagccttttsgcagagtttttagggttttctaggcatagaatcacatagtttgacttcttcttttcctatttggatgctttttatttatatcttgcctgattgctttggctaggacttccatattttattcttggcaataaaaacattgaacttatttgaaaactttgcttgatagttattaagtttaaaaattgtgtagaacaaaagtggctatttttcatagcttcttcaagtataattttttaatcaattttagaatatattgacataaatcatgttttggaagctgatgagtttattgttagtgtgcacagaaaaagcgttttgtctcaaatctgttatatttcctaaggaaaaaatctggcttttggtgcctgcattgattatttgtacttttgataatttaaatgatttttgatattttttacataataattgttatagtctgggttatcaagtaaaatttttt

SEQ ID NO: 13552 - DNA, 575 bp, Homo sapiens
ttgaagctctttgactttctcctctgccaccagctagagaaaacagtctaaagggatcaggtggtaagataaggctcacccagataatcttagcttaaggtcaattgattagtaaccttaattacagctgcaaaatcctttttctatgtaacataataaaatcacagaagtaacaccagaggcaaagatcatggaccatctagaattctgtctactgtgcatacaaaacagaagaataataaacctcagtgtattaagaacccttaaaactaaattaggaaagtgaaccccaaagtaaaaaatgcaacaaacagtatgagcaggataattcacagaagaaacataaatgatcaataaacctggaaaacacttaatatcacagatactccaagaaaaggaaactaagacactctttttcacctgtcaagctgacagatatttaaatgataatacccagcgttggaagtatgaatcttcctaggggatacccaaaagktttgcataatttaacataataatcacatttctaggatttatcatatataagtagtcataaacatgggaaatatttagct

SEQ ID NO: 13553 - DNA, 586 bp, Homo sapiens
tcccaaagtgctgggattacaggtgtgagccactgcgcccggctctctaaagctttttttttttttttcagacagagttttgcttttgttgcccaggctggagtgcaatggcgcaatcgtggctcactacaaactctgcctcccaggttcaagcgactcttgcaccttattctcccaagtagctgggattacaggcacgcagcaccatgcctggctaattttgtatctttagtagagacagggtttcaccatgttggtcatgctggcctcgaacacccagcctcaggtgatccgcctgcctcrgcctcccaaagtgctgggattacaggcgtgagccactgtgcccgacctaaagatttttaataaactttcactcttgctctaaaagttgccttggtctcaccttctgccttatgcccctcagttgaattctttcttctgaggagggaagaattgaggttgctgcaggcccatacagatttgtggccacttcggtgctgtatgacttggatatgttctctcctgctaacattagctcctgtgctttccaacgtttctgggatttctgctttttactttttgttgg

SEQ ID NO: 13554 - DNA, 586 bp, Homo sapiens
tcccaaagtgctgggattacaggtgtgagccactgcgcccggctctctaaagctttttttttttttttcagacagagttttgcttttgttgcccaggctggagtgcaatggcgcaatcgtggctcactacaaactctgcctcccaggttcaagcgactcttgcaccttattctcccaagtagctgggattacaggcacgcagcaccatgcctggctaattttgtatctttagtagagacagggtttcaccatgttggtcatgctggcctcgaacacccagcctcaggtgatccgcctgcctcggcctcccaaagtgctgggattacaggcgtgagccactgtgcccgacctaaagatttttaataaactttcactcttgctctaaaagttgccttggtctcaccttctgccttatgcccctcagttgaattctttcttctgaggagggaagaattgaggttgctgcaggcccatacagatttgtggccacttcggtgctgtatgacttggatatrttctctcctgctaacattagctcctgtgctttccaacgtttctgggatttctgctttttactttttgttgg

SEQ ID NO: 13555 - DNA, 544 bp, Homo sapiens
atacgaaactattgttgcttttgcagtataaggtcttcatcctctgattattaggtaaccaccttggatgatgagtcagctgctcagtatctttttactcttcatcactctgcatttgttaatttattcctatcctttgtcctcaacttttgtgtgctcttaaaaatcagctttattctaagcaaatttgtgtctactttaaaagactggaaatgaaaaaaatctttgccaaatccatcagattactgtatttacataaggtttaacatcaaatgccataaaagcttcttgatgaaaccaggactgttccccatttggacatttttttctttctacagcatccttgttagaaaggcygcccccttgatatactgtatatacgtgactgtgcatttgtttcatctttccgtactcaattcggttgttaaataaacattttaatttgtttaaaaaaaaaaaacagcaaacacacccacaactttttccattctgaaaagattttcctatgtcgagataagaaaaataaaatgttatggtagactac

SEQ ID NO: 13556 - DNA, 544 bp, Homo sapiens
atacgaaactattgttgcttttgcagtataaggtcttcatcctctgattattaggtaaccaccttggatgatgagtcagctgctcagtatctttttactcttcatcactctgcatttgttaatttattcctatcctttgtcctcaacttttgtgtgctcttaaaaatcagctttattctaagcaaatttgtgtctactttaaaagactggaaatgaaaaaaatctttgccaaatccatcagattactgtatttacataaggtttaacatcaaatgccataaaagcttcttgatgaaaccaggactgttccccatttggacatttttttctttctacagcatccttgttagaaaggccgcccccttgatatactgtatatacgtgactgtgcatttgtttcatctttccgtactcaattcggttgttaaataaacattttaatttgtttaaaaaaaaaaaacagcaaacacacccacarctttttccattctgaaaagattttcctatgtcgagataagaaaaataaaatgttatggtagactac

SEQ ID NO: 13557 - DNA, 556 bp, Homo sapiens
gaagagtaagagttaatggggaggaagaggggagggtaggatggcakaggcattgatatttcatgtcagatacaaagaacaaaacaaggccaggcggggaggctcacgcctgtaatcccagcactttgggaggctgaggcaggaggatcatttgagctcaggagttcaagcccagcctggccaatatggcgaaaccccgtctctactaaaaatacaaaaattagacgcacatggtggtgcacacgtgtattcccagctgctcacgaggctgaggcatgagaatcacttgaacccaggaggggaaggtggcagagagccaagattgcaccactgtactccagcctgggtgacagagtgagactgtctccaaaaaaaaaaaaaaaaaaagacaatgcaagtacaaaggtaagaaagcaagaaactttcaaagaactgtccaaattcagtagccagcttcaggaagctgaagaggatgaggcaggaagggccttacagcagtttggactctatccaaagagccatggtgagccacagaaagattttaaggggaataaca

SEQ ID NO: 13558 - DNA, 553 bp, Homo sapiens
ctccagaagctgctcagaaccacttttgttcaaaatgaatgacaacatctcacagaacatgcagtagcaattgattggcagaattctctaaggtgtacactcatcacaatagtaaaaacagaaaaaactcccagggtattattcaagtgactaccatcattaatcattgtgattaaaccggatttgtgatggaaaaaaattattttactgtaatgacatttacttagactttccaccttgtatggagtatgtagaatggaaccagcattggaaagtccttcaattctsgtactgtaattaaatccttttctacttggtatttatcctgtttggatgcagcagacattttttaaaacctggcaacagtgaccctgtatcccacacttgacctcacaagcctggcagaggatcacactatggatgtgcttggcacatgctgaactattaatagttgaatgttgctgagaggcagttttctcctcgagccagtgtgggtcacacccaagctaaagaagagtcggccccaatagcataatttaaaacatatgaaatc

SEQ ID NO: 13559 - DNA, 553 bp, Homo sapiens
ctccagaagctgctcagaaccacttttgttcaaaatgaatgacaacatctcacagaacatgcagtagcaattgattggcagaattctctaaggtgtacactcatcacaatagtaaaaacagaaaaaactcccagggtattattcaagtgactaccatcattaatcattgtgattaaaccggatttgtgatggaaaaaaattattttactgtaatgacatttacttagactttccaccttgtatggagtatgtagaatggaaccagcattggaaagtccttcaattctcgtactgtaattaaatccttttctacttggtatttatcctgtttggatgcagcagacattttttaaaacctggcaacagtgaccctgtatcccacacttgacctcacaagcctggcagaggatcacactayggatgtgcttggcacatgctgaactattaatagttgaatgttgctgagaggcagttttctcctcgagccagtgtgggtcacacccaagctaaagaagagtcggccccaatagcataatttaaaacatatgaaatc

SEQ ID NO: 13560 - DNA, 577 bp, Homo sapiens
attcagatttattttcaggaaaaaaatagggtcatgtaaaaataatgcatttattcattcttcgaatgattttcttatgacaacatagtactagatatttcctctctaaagtactatgtcagtaaaatacttttaaaattctaagaatttgagaagaaaataaaaatctcatgcaattctgcattgttcctgtgatacgttatataaactttatgttttccttctgagttattttgtttattttcaaatcccacttttggaattgtaagaactccattttcagtcagcaaaaggtaattgaggtaaatcaaactatttcggkattaggatttatatttcccctggattttaaaaatctataagaagtaaaaaaaaaatcaaacattataactaattattcttagccatactcccgtgaaaatagctggtgcagaatgctttctccaccataatactagggagggcaggttcgtgtgagtggtaaaggagagagaaagtttggaaagtgggaagatagcaatttctcaacatgaacaactgttaccatgtataaaactatccccagaccagtcgtttg

SEQ ID NO: 13561 - DNA, 548 bp, Homo sapiens
tgacatgccatccaactagtgaaagggaactccaccccactccagcctcactacagtactcctgtatcacttaaggaacaaaaagaaaaagaaagccttaaactrtgggagagacagcttcaaagacacagagtaggaatggtgcagtcagggatggggggaacagagggggaagttccacccttgaaagagggagagaaacagttgtaaaggccacacccctgagacatagacccactgtgtagggcaaagactgaaatataatctgaagggtagagaacattcccctcctccacgctctgccaccatgttatcaggcctccaattacaataatagtagatcacagctgggagagtggtcacaggcagattctcaatgaggagctgctcaaagagaagggccaaagctagagaggagacaataataatttggttcaacagtgccagtccccccaacaacacagttcaaatactgtatattaacagtgagtaatttcataatgtgcgaacctcactgctggtgcttcagtccacagatcactacgtaa

SEQ ID NO: 13562 - DNA, 554 bp, Homo sapiens
tggaatccaggcagtgtgatttggggctgtggctcccccacccgcatctgcagttcaccgctgccttttgaccttacctttcagaagggccacaggcatatatcagtatctcaaataagaagagagctggggtggtgcaggcctggaaatggtgtcctgaacagttggaggaaagggagatggagcagagaggacgatctgcayggagatgtagccacgacataaccacagaagacacttcatctcctctactgcgtcctcaaccagtgggctaggtttttctcttggcccgggccttcctcctgacttctctgctctcattgaaatgatttaacatcctacgttcactttgaattcatggtctccattctgtaaaggaaaaacaaaaacaaaactgtccacctaaaagtcacaactctaaattgaccttcacctccagtctcttcctgtcccctgctggccctggcatggctgcctctgggctggctctcctctcctaggtggggtggaggttcttgcttgatggttcagttgtagatggtttgtgctctttg

SEQ ID NO: 13563 - DNA, 553 bp, Homo sapiens
gactcaaccccagagcagaacatgccccgacctgtgtgtggcctccttctcactgccacaggctcgtcatgttttctcccacccggggcaagcatgggccctcgggcccttgaccctgggatgcagctgtttcgtgtctaccactggagagcctgagcaggtcctgtcctggctgtggtgttctcctgtgtaccaggtcaggctcagggagagaatttcagagatggctttcagctgcagactgttcctagaatgtatgacctgtgctgtaacaagcaaagctggtaaaaaaaaaaaaaaaaaaaaaaaggaagatgacctggtatagtggagctctgggtatcactggcagcaaaataccctcagtctctcagaaatggcaccaaataaagaggaggtgcttgccagggccacagtgagggcttgcggacagcctggccacacattcacttcccagaggtgagrccaattggaatttagaagatgcttatgaaagggttaattatgcagggttttttttttttttaaactaatattgatggaaggctgttcc

SEQ ID NO: 13564 - DNA, 538 bp, Homo sapiens
aatcccatgaaaatcagggaagaattccagccatattgtgatgctctgtagataggagatagagtttagagtgtgctgggtaaaggaatcctggtaaatcctggttctcaattaacatctgtgtaaggctaggacctaggagccaggagcctttctaaagtactatggcctggccaggagttaatttggtctcttaattggattagtgtggtcagccaacaagctgtgtcatagagagataatatgatccaaagctataaaatataaatgataagtgaacttcatatcagtagcaataattatccaacagaaaacagagagaaaatagaattaataaaaattaacaaaatgtcaatgaattgaacagcttcagatggccattgtatgtgtaactgaagtccccaaaggagggcatctggagaaagaaaaatatwtcaagatattatggccaaaatttttcaaatttcatataaaaataaactgtaaacatgttaaaaactcagcaaaactttggtacaagaaacatgaaaaaaattac

SEQ ID NO: 13565 - DNA, 975 bp, Homo sapiens
aactaatccattgttgctcaaagtagaagtcttaaactcttattttacttgttcagtcctttggtttccaattccagttttgttatttagtatttaatatcaagctttgcccaattcttcgaattttggcatgtttagcttaaatgagatattacccatgcataccttcagatgaactttagtttcattctttgatgtctataagaaggcagacaaaccaattcagaaacacaaggtaagactggctttgcacagttagtactgtctcctagttgctacccaccctaatacaaaactttatttataggttccaaacctcttcaatgtgttttttcttcattactttacgaatgcataaacagtcatataaaaagataccattataatatttgtgccttactatgaaaatttaaactgtactttatatttcttttatgtgtttgataattccaataattatatgaacatataagggttactggatagataattattaattgcctgaggaatatgctgtaggattttgatgtaaaagtctaatatacaagactacatttacccatcataatcttcattgatcccagcaaattgcactggattacagcgtacaaaaataataaacacaagcagtataagtgatatcacagatgtaaccattataaatctcataagggctttacaagacatttctaatgtggaaacaatgacacctcccagaagctggccaagtgcacctcctggaattaaaacaagtcctaaaaaaaaggaggagaaaaacacagttaaaaataatcagctgatagtacagataatacatacattgatacaatttcctttgctctaaacatatagcaaacatgtatttaaactaaaagacagaaaatgtacagttatgctaaatagcttgaygaacccgaaccttaatagaaacaaaaacctgtcagcagggctgaagccataggcctactgacttca

SEQ ID NO: 13566 - DNA, 621 bp, Homo sapiens
gcagacaattttccctacactttctgggaagtgggcagcccttgtggctgggagaaccagaccattagcttccactttcagccccattattctcctttgcctgggtataacagggcaggggacagaggtcaagtcccccactcccccagttataaggcagatgagaagattttgctttttgcaatcctgcaagaagagcactggcctgtgtgacagaaaatgtggcttcaagtcctggctctgatcgtgactactgtgtcatttgccctctctgcacctcagtttctctatcttcaaggtggggataattatcttccctgcctcacagggtgttgggaagatcaaatatatagtcaatgtgagggggatttgcaaaaaaaaaaaaaaagacttcacacagctataatgtatgatgatgttattgtgagatcgttcatctaaccagtcattgatcctccgccgtttttttgttttgttttgtttttgkttttgtttttgttttttgagaaagggtctggctctgtcacccaggctggagtgcagtgacctgatcgcaactcactgcaacctccacctcctaggctcaagccacccctcaccttagcctcctgagtagctggg

SEQ ID NO: 13567 - DNA, 530 bp, Homo sapiens
ttagaattgcctgtgacaaatagaaaagagccccaaaggcaggggagccccggggaaagaggtgagcattggagttttgagggagatagtacagagtgactgggaagtagagagtaagaactacagggtacttctagaaagttgtactccctgttacgtaatgagatcgcytatcatcgaagagcttccaaaattttaaagttggctttcattttactcagtagtcaacgacttagcctcatgtggaaatgtgactgatttgggggtgtcttaatgcctcttggatcctgtttctggggtcctggggtttggcaataggttgggggaagacttagttacagcatccctccctagcctcccaggatgaccccagcccaccttctcagccttttaaagccacccctgccctgacaaccttcatggttgtccatccaagccagggcagggggaccacatggaggcccttcaattacagagtgacttggcagggttttgtggataaataccatgttaacatggagataatgaca

SEQ ID NO: 13568 - DNA, 526 bp, Homo sapiens
ctttgctttcttggaatgctcccaccactatgtaagaaattccagactagactcttgaatgatgagggccatgtggatacagaagaccagccgacaaccaataccaaggscccagacatatgagtggcctccctagacctcctagacctagttgagcgtccagatgactacaacctcatgaatgagcccaggggatggctccagcagaagaaccaacctgatgagccaggaaagccataattcatgaagaataataaagtgatattttaagccactaaattttggggtgatttgttatgtagcaatatagaatgagacagcttccgttctttcttcacagaacttagtcacctgacatatatttgtttattttcttctcacccaattagaatgaaagcttcttgaaaatagaaacattgtttcatattctaaacaccagaacaatcctggcgcatagcaggagctcaacaaatacttgatagatgaagcaatgaagacatctaaataaattgattaatgaaaacac

SEQ ID NO: 13569 - DNA, 526 bp, Homo sapiens
ctttgctttcttggaatgctcccaccactatgtaagaaattccagactagactcttgaatgatgagggccatgtggatacagaagaccagccgacaaccaataccaagggcccagacatatgagtggcctccctagacctcctagacctagttgagcgtccagatgactacaacctcatgaatgagcccaggggatggctccagcagaagaaccaacctgatgagccagsaaagccataattcatgaagaataataaagtgatattttaagccactaaattttggggtgatttgttatgtagcaatatagaatgagacagcttccgttctttcttcacagaacttagtcacctgacatatatttgtttattttcttctcacccaattagaatgaaagcttcttgaaaatagaaacattgtttcatattctaaacaccagaacaatcctggcgcatagcaggagctcaacaaatacttgatagatgaagcaatgaagacatctaaataaattgattaatgaaaacac

SEQ ID NO: 13570 - DNA, 573 bp, Homo sapiens
cccagtgactcactgctaaatcctatcaattctaccttggaaatatatctcatccttgtctcctgctcagccaaagtaaagggcattcgtgttttcrtcctggtttattactagggttctcctcactggtgtttgtccctagcttcacttttgccatgttaccaacatgaagagcaggtcattactgaaaagttaaagaacatataaagaaaaagattttaaaaagtgaaagtgtattttatctatatatctattaccagagataatcatggttctaattttggtataaatctttatagatttaaatataaagtatcaatacagcatacgttacctgtgatatatatgtcttatgtattgcttcagtcagtttggtctactatatcaaattatcataggctgggcaacttaaacatttatgtctcacagttgtggagactgggaagtctaagattaacgtgctggaagatgtggtgtgtggtgtggacacctcattcacatttgcggttggccatctatgtgttatattctcataagggtagaaagaagagagagagagaggtgaggaagtgg

SEQ ID NO: 13571 - DNA, 564 bp, Homo sapiens
ttaatatcccaagaatgtcagacattaagatacaaattcacattcataaaggtcagactaaaaaatcttcttttatatgtgttttaattatcagggtaaacatttttattcaaatacacacagccctaacattacatttctgtcttcagtataaatgcttttccgtgttttatttaacagttcaaagaagacattttatgctttgctagttataaaatatatacaacagtactattagaaatcaatcttcattaggatcatgtgaaaaaaactggcatagaaacttccactagaaagagaaaggggattctcagatttgcaaaggacattattttagttatgatccacctaggttggctttttctcaataccctaacataataatcctaactaaaaatgttgatcactaatcagtgtatttgatggtgagtcttgaatttattaaattaatcatcwaatttcttttccaggtcccaattcacatttacatgtaatcaaaaagcagacttaaagatatcattttaattattcatctgatatggtttggatctgtgttcccaccta

SEQ ID NO: 13572 - DNA, 624 bp, Homo sapiens
catatgccattatgttttgtagtaatgtaaccaagatctaaaacaggaagtaggaaaacaacccatatggtctgcatgaaatatgcttcttccggccaggcgcggtggctgacacctgtaatcccagcacttttggaggccgaggtgtgtggataatgaggtcaggagttcgagascagtttggccaatatggtgaaatcccatctctactaaatacaacaattagcagggcatggtggcacgtgcctgtagtcccagctactcgggagactaaggcagaagaaccacttgaacccgggaggaggaggttacaatgagccaagattgtgccactgtactctagcctgggcaacaaagcgagactccatctcaagaaaaaataaaaaaaaaaataaaagaaatatgttttttccaaaagcctcactgctgatgattatggagaattcttaaacagtgactgacaacccaactgggacttctcactaaccgttgctggaaagtttcatttcacccccaaaagtagactgcagtagcttagcactggattatacataaaagtgcccaggctactcttcaggtgcaagtagttgtgtgctgacaaattggatgtctgcgaaaaaaaat

SEQ ID NO: 13573 - DNA, 459 bp, Homo sapiens
aagtagaatgggagaatgaagggtacaggaggcgagatttgtacaggaggcgagattttaaaaatacacatgtaagatgattttacccacactaaacgactgataattgttgattattccctatagttccctattttcctacttgcatgcacgtcattcacctttatgtagaaccttttacctcctatctctacctatgagaatcctacctgaattttaagagtctgatcaaatgtcacttccacagaaaggccttctttggttctaacwggaactaatttttaaatctcagtttaaggcaaataagcatattagaaagcaataaataagaagtggtcacagttctaccacttctagcataaacttgaacaagtcacttgagctttttaaacatgtaaaatgaagataggaccaaacaacacactacatttctcagaaaattcttctgcctcaaaaaat

SEQ ID NO: 13574 - DNA, 555 bp, Homo sapiens
cttctattattttctccagtttgagaaaataagcatttttatagaaagttgtttgaatagaactgtataaacaggtgccttttctcttaacaataacctgattttatctttttttctttttcagaataaaagaagtaaatttgatttaaaatggcatataataacatacttctttttcatcaagaaaatgtggtacaacgaattgtatatgctcttaactagcaagattattttgtgtaggcttgcattttcataacatatttttactccactttaaacattttctcttaaaatgaggaaaggattttcttttccctctttttctgagggtgtttgataagtggaaakaacattccattttggcttggactctgtcatttccatgcctttctctgttattttcttgccctgtgaccttggatcattagcagcaaacccttttttttttatctataaaatatggacaactgcccagcatttttctctgagtagttttaagaccatataacttagaacagcagttctcaaatgttagatgaaatagtgttggcaggt

SEQ ID NO: 13575 - DNA, 531 bp, Homo sapiens
ggatttcagcattggttacaatatcaatgtgaataggagcattcactctattccatgactatctattcttatttcagagagctctgattattggaaagatttttttccctgaaacattttttcacttcctcacactgtatctagttctgcccgcagaagttacaaagaactactgtatgtacaaataatatagtttggtagctggaatactggctactctagagatatgatactgtactcactgcctctaactctttgtacaatctataactaagacagttgaccagcaaaatggagaaaaagctcatatctcacataacagagattgagacaattaataaacatcatctgtaatttataaaaaaaattctaagctagctagttctcaatccactaaatataagattgctgggtaggagaagaaatgactatcaggtgggtcatagaaagrttagtgaagaaaagtgagaggatgtgtaagaaataaccaagtgaatattacagggagataaaacaagttgcataagcaca

SEQ ID NO: 13576 - DNA, 539 bp, Homo sapiens
ccctggcttcagttaattggtccaggagaagatatgtaggccaatcacctcccatgacctgtcctggctagcagattggttctagggtaagcatagtatccaagctgaccacttagggtccttcaccagggatttggccattgaaaacaaggaaggtcaatctcttcccaggtgactgaaattataaatgaaaaactcagataggttctgttaacagccatgtttccttcccatgtgagcagagtatgccagttgagagagtgagaaagaaagaaatgaagtacaaaataaagataaagacacagaaaggcaaaaggtgaagtcagaggtctgctgaacattggcagcccagccccacttctgctcttgagatctttgagacaccacagcatctctgctccaaccactgttayttggctttctatcatttgcaaccaaaatagttcaaattaaggtaatcaatttctcaaattctttatccaactggagtattaattaaagatttaaaaaagaacatatgtgcaatcatggttcttatg

SEQ ID NO: 13577 - DNA, 538 bp, Homo sapiens
catttctaaaattaaaattagaaacaaagcctctcaaatcttatgattatttatggatataaatgacgttgaattgttctaagtttctcaacaattttcaccctagaagcttcaggctacattagtctattacaggaaagtaacyaaatacaaaccaggtctctgagattgtatgtagctcatggaagtaagtctaatgtgttagcagaacaatattgaaagatattagttttcaggtcttcagtaaaacaatcagtttttttgtttattttacgttattgtgatcacacaatatattgtgtgacaagttaatacataggctggaagcagaggtaggtgaggccagtaacatagatatgctttgttttgtgcagaaatgtgagaatgattctaacttagagcatatacatttattttatttttattttcttccagccactagtccatgtgggaacaattttattttattttactgaagatacttctctttgtttatttggtttgtttaggttttcagagaacaaattccaaacaattt

SEQ ID NO: 13578 - DNA, 538 bp, Homo sapiens
catttctaaaattaaaattagaaacaaagcctctcaaatcttatgattatttatggatataaatgacgttgaattgttctaagtttctcaacaattttcaccctagaagcttcaggctacattagtctattacaggaaagtaaccaaatacaaaccaggtctctgagattgtatgtagctcatggaagtaagtctaatgtgttagcagaacaatattgaaagatattagttttcaggtcttcagtaaaacaatcagtttttttgtttattttacgttattgtgatcacacaatatattgwgtgacaagttaatacataggctggaagcagaggtaggtgaggccagtaacatagatatgctttgttttgtgcagaaatgtgagaatgattctaacttagagcatatacatttattttatttttattttcttccagccactagtccatgtgggaacaattttattttattttactgaagatacttctctttgtttatttggtttgtttaggttttcagagaacaaattccaaacaattt

SEQ ID NO: 13579 - DNA, 573 bp, Homo sapiens
ggaatcttcttccatttgttgtatcctcttttatttcgttgagcagtggtttgtggttctccttgaagaggtccttcacatcccttgtaagttggattcctaggtattttattctctttgaagcaattgtgaatgggagttcactcatgatttsgctctctgtctgttatcggtgtataagaatgcttgtgatttttgcacattgattttttatcctgagactttgctgaagttgcttaccagcttaaggagattttgggctgagatgaaggggttttatagatatacaatcatgtcatctacaaacagggacaatttgattagagcataagctctgaacacagattttttgtatgttaatttactgctgaattttgcgtattttggcatatagtagagtttgatcaacattgtaaacatgaatgattattagtgactcttgagatgctaaaacccttatgagtaacatgaggcattaagcatttattcagaagtttaaaaagggttgctgacttataaaagctataataaaatatttgttatatgtgtaattgaaaagaaaaattgatgttg

SEQ ID NO: 13580 - DNA, 573 bp, Homo sapiens
ggaatcttcttccatttgttgtatcctcttttatttcgttgagcagtggtttgtggttctccttgaagaggtccttcacatcccttgtaagttggattcctaggtattttattctctttgaagcaattgtgaatgggagttcactcatgatttggctctctgtctgttatcggtgtataagaatgcttgtgatttttgcacattgattttttatcctgagactttgctgaagttgcttaccagcttaaggagattttgggctgagatgaaggggttttatagatatacaatcatgtcatctrcaaacagggacaatttgattagagcataagctctgaacacagattttttgtatgttaatttactgctgaattttgcgtattttggcatatagtagagtttgatcaacattgtaaacatgaatgattattagtgactcttgagatgctaaaacccttatgagtaacatgaggcattaagcatttattcagaagtttaaaaagggttgctgacttataaaagctataataaaatatttgttatatgtgtaattgaaaagaaaaattgatgttg

SEQ ID NO: 13581 - DNA, 562 bp, Homo sapiens
ccctttctgaagtttctatggaatttttcaggtaaacattatggaattatttttttaaatattactgtacataaaacaatatcataggaatatgtaaaaaagtcagtatattttgtattacagagtaaatgttgaataaatgataattattgttcattattttaaaggttaccattgaatttcactaaaaataaatattttattagtcaaattggttgcagcaggatactaacttttgatagtaaatacaggaacactggcgtaaaacctgatccagttcactttaaccatcttaaaattcaaaaataaagtgataataagagatcccctgtatgctacatggaaattgaaaattatacataaatatcagtctaaaatatttgatgattctctagctttatttcccgtaagcttatactccttttggttttccatttgctagtgttacgataatcagtgacctgrtgttttgcaatgcataaaattgcattattaagtggacatttggaagataattctagagtcaatatttttaataattagatataagttgtttagtact

SEQ ID NO: 13582 - DNA, 545 bp, Homo sapiens
tgctgtacaagttagtagcctaggagcaattggctataccatatagcctaggtatgtaggaagctatactatccaggtctatgtaagtatactctacaatgttcacgcaatgtcaaattgcctaaaacgcatttcttagaacrtatccccatcgttaagcaacacatgattgtgtatcaaaacatcatgttgtataccttatatttatacaataaaaataaataaaaagcacatatataaaaaacaaaataaatataagagaattctaaaattctaaaatacatatttgttctagcccctacacaccttcagcaagtaaaaacttgagaaattctcagtattccagaataatacagaatttatatttgctaacttacaaaataaatcaacttttaatgtgttataattgtttaatttgttatattatagtaagcctaactggtataagtgacttgactcccacttaatctaaagcaagtctaataacttttaaatttcaattaaacattgaaagaccaaaatagaagggcaggccaatttggtaa

SEQ ID NO: 13583 - DNA, 635 bp, Homo sapiens
gttttaaataagattttaattgcttaatgttatgccaaaccccagttctccttgaagaatttaacatagtggtcaagaacacaaaagttgaagtcagagaaacattggcctgagaactagttytattaccagccagctatgtgacccttttcatgttatttcctttttttcactatgccttaatttgtgcatgtagaaaataaagatgatagtaatatctatctcatgggtttgttctagagattaaatgaagtaaggcacatagcaccatgttgaagacttggtaagcactcagtaaatgacacctgatatgatgattttgtaaattttaagttgaactgtaaataaacttttatagacagaactgtttgagactctttgacatccttgagttagctggagatgccctgagatgttataagagaaaggttaagagcaataaaggattctagttttcttgatccattcataaaccagttttaagtataattttactgtactatagtggtttaaaatgtttaatttagtgatttgcattctgtacatttgcttaaaattgctttatttttgtcctaatgcaaactttaaaaattaatcttttatgaaaatataaatctttatattattcaaaaagt

SEQ ID NO: 13584 - DNA, 636 bp, Homo sapiens
  misc_feature (1)...(636): n = A,T,C or G
tcctcccttatttgtttcatttctttcttcttgaaggatatattttagtactctcttagagcagttctattagtggccaactcttgggtatagaattctaggttttccggccgggcgcggtggttcacacctgtgatcccagcactttcggaggacgaggcgggcggatcacgaggtcmggagatccagaccatcctgactaacacggtgaagccccatttctactaaaaatacaataaataaataaataaataaataaataaataaataaataaataaataaataaattagccgggcgtgctggcgggcgcctgcagtcccagctactcgggaggctgaggcaggagaatggcgtgaactggggaggcggngcttgcagtgagcagatatcgcgccactgcactccagcctgggcggcagagcgagactccatctcaaaaaaaaaaaaaaaaaacggaattctagggttttccctacgcactatgaaggcagtattccattgtttttgggggcctctgaggtttctgttcagaagtctgctttcaattcaattgtaattcattttaaaacatagtctctttctctctaattactttcaaggtccccttttctttggagtatgtggtttcaaagca

SEQ ID NO: 13585 - DNA, 636 bp, Homo sapiens
  misc_feature (1)...(636): n = A,T,C or G
tcctcccttatttgtttcatttctttcttcttgaaggatatattttagtactctcttagagcagttctattagtggccaactcttgggtatagaattctaggttttccggccgggcgcggtggttcacacctgtgatcccagcactttcggaggacgaggcgggcggatcacgaggtccggagatccagaccatcctgactaacacggtgaagccccatttctactaaaaatacaataaataaataaataaataaataaataaataaataaataaataaataaataaattagccgggcgtgctggcgggcgcstgcagtcccagctactcgggaggctgaggcaggagaatggcgtgaactggggaggcggngcttgcagtgagcagatatcgcgccactgcactccagcctgggcggcagagcgagactccatctcaaaaaaaaaaaaaaaaaacggaattctagggttttccctacgcactatgaaggcagtattccattgtttttgggggcctctgaggtttctgttcagaagtctgctttcaattcaattgtaattcattttaaaacatagtctctttctctctaattactttcaaggtccccttttctttggagtatgtggtttcaaagca

SEQ ID NO: 13586 - DNA, 651 bp, Homo sapiens
agatttttccagtcttcttcaagaagggaactaggatcaggccctctgtgtaaactcttcatcacctgtgtgcacataatgatttttagtttccacatctataaaatggaagttcataatacctacttcrtagagttagaagaatttctttttatctaagttgtcttccttgagaacagtgtctgacacatataatgcagtcgttacattttagctatgacaatattattttctatttgaaggacggataaactaatatactttcctgcctgtcttcttcccccagctccccgactgatacttctacatttgtaagtaactagtaatggtagtgttttcaaggcactagatataagaagcccctgctactaagaagttcagtttaggcaccttctccctctctagattgagtgtacatcacaaatccttggaaccaactcttcacaaggctcctgtaacaatctggtctcctccccagtggagaaatctttgtactgagttgaaattacctttattcctccttattagacacaatgcttgacctcacaggctttcactggatagtgtatcaattgatcctattatagcacttggcacatggtagatcatcagtaaatatttgttgaatgaacggttataatactttcattc

SEQ ID NO: 13587 - DNA, 651 bp, Homo sapiens
agatttttccagtcttcttcaagaagggaactaggatcaggccctctgtgtaaactcttcatcacctgtgtgcacataatgatttttagtttccacatctataaaatggaagttcataatacctacttcatagagttagaagaatttctttttatctaagttgtcttccttgagaacagtgtctgacacatataatgcagtcgttacattttagctatgacaatattattttctatttgaaggacggataaactaatatactttcctgcctgtcttcttcccccagctccccgactgatacttctacatttgtaagtaactagtaatggtagtgttttcaaggcactagatataagaagcycctgctactaagaagttcagtttaggcaccttctccctctctagattgagtgtacatcacaaatccttggaaccaactcttcacaaggctcctgtaacaatctggtctcctccccagtggagaaatctttgtactgagttgaaattacctttattcctccttattagacacaatgcttgacctcacaggctttcactggatagtgtatcaattgatcctattatagcacttggcacatggtagatcatcagtaaatatttgttgaatgaacggttataatactttcattc

SEQ ID NO: 13588 - DNA, 651 bp, Homo sapiens
agatttttccagtcttcttcaagaagggaactaggatcaggccctctgtgtaaactcttcatcacctgtgtgcacataatgatttttagtttccacatctataaaatggaagttcataatacctacttcatagagttagaagaatttctttttatctaagttgtcttccttgagaacagtgtctgacacatataatgcagtcgttacattttagctatgacaatattattttctatttgaaggacggataaactaatatactttcctgcctgtcttcttcccccagctccccgactgatacttctacatttgtaagtaactagtaatggtagtgttttcaaggcactagatataagaagcccctgctactaagaagttcagtttaggcaccttctccctctctagattgagtgtacatcacaaatccttggaaccaactcttcacaaggctcctgtaacaatctggtctcctccccagtggagaaatctttgtactgagttgaaattacctttattcctccttattagacacaatgcttgacctcacaggctttyactggatagtgtatcaattgatcctattatagcacttggcacatggtagatcatcagtaaatatttgttgaatgaacggttataatactttcattc

SEQ ID NO: 13589 - DNA, 627 bp, Homo sapiens
tatatttaaaatgtaaatgttgattttgtttaatcctctcatcaactctatgagttaggaatgattttttctctacttaaaaaggcacaattagtcataagagcttaaacaacttgcccaaagacatgtagccacgaagcaacaaaactcagactcaaaccaggcaggtggctttgagccataagcttaacttctcctgtaagctgcctctcctagctggcgaaaagaatgggatttgtgcccatccatctctcctagagtaagaatcataaacatcatgcctcattgcctccctttctccaacatgtaagtccctttaaagcagcatttaggaaatacgaatgcattctgtatacattttcaatattgcagaaaattttggttctagactacatgaactggaagtcactcatattgaaggtaattggtaagaaggaaaagttgagaatagaaaaaggaggttgggccaacagtagaggagtagtgastgaagatttttgcaaagaaaccttaagaaggattaaacatggctgaagaaaagaaaacttggggcttgggcttcacttttttgaggtctgtgatgatagaatgaggtgaggcatgtgtaagagggtccgtgacattgcc

SEQ ID NO: 13590 - DNA, 608 bp, Homo sapiens
taatacactgtgccaaaacttagtggcttaaaatgacaaaaattatttatttttgccccagaatcttctatttaggcaaggctcagtggagaacgctgatctctgctccaattggcattagctaaaaaagctcgactgtcagccagaggatcaggctcctacagggtgcatttggctggcaatttggtcctgactattggctggaagtttagcctgggttgaggcttaatacagctacaaaatgtgtttgtggtcatttacttacaaatccaatggaattgaatatttttatacactttacgtggagcaaattaaaatatgtgctgtggggtgtgtgtttgtgtgtatgagtgtgtgcagcacatatgttttgtggatgccaaagcaactctaccttgagtgctaagtgtccgtgttgacttctgattaaccccaattctgggaaaacctctaagatttccagtttaaatcctgcccttaggtcacacaaccttgatgttattatgcttaccataagtcctgcctttaaatrattgttttacatatcccttctgaatcatgtataccctttccctatggtatataaccccttcatgtggcccggactt

SEQ ID NO: 13591 - DNA, 564 bp, Homo sapiens
tctttatttctcactgtgagagataacagaaacaccagagatgaattccttgtgaagtggaaggcgtttgagcatggtgactgaatatgacaactggtcaatatttgtacccattaatttgagcttcaagaatttgcttacatcctccccaaacctcagaggttttcgatcttttctgtctttaccggcctctagtctctgagtgagatgcctcctcttcctagtggggtgagcccattcactcttttcttggtgcagtttccatctctctctttctgaagccccccaccccggccgggaattatattccttcacttactccttcctgcaaccccaagctttctcttcaaataccaatctgatcttgatttttcccctttcacagccaaattaatagaagacatagaacaacaagaaaagaaaaaagaaaaaacaccctccacctttggctcttatttctatatcactgcctgcttcttaacctatagctrctgtgactcttacccttactgcagccaggatataacaccacttacaaagctggcccatgcccctaagtgtctc

SEQ ID NO: 13592 - DNA, 543 bp, Homo sapiens
ttcggtatagcattgtccatcttcctttgtaaatggctgtctcttcctgagggcaaagtccatgttttatttatttttatatcctcagggcctaactcagtaaatgcttatataaaattaaactgaatacataccctcaatgcagtctgagcttttggtgtttctttctgtcrtaacagtcttattagtgacctaatccagattgatagctttcttgcctccataactcgaggaactcttgccactagtgttggtataaaacactcaactggaatgagaaagtcagctccagttccaccagttcacactaaagcttagcatcccaggccatgggaattttttagcagagggattttaaaggtcttactagctataaaagattatttttgttattagctggtgcatcagataagaggtttattctttccattctaatcttcttatgcttccttctgtaataattctgctttactccatttctcatgtactaaaaactttagttataaactttgtaatgcaactctatattgtatctagtagaaa

SEQ ID NO: 13593 - DNA, 543 bp, Homo sapiens
ttcggtatagcattgtccatcttcctttgtaaatggctgtctcttcctgagggcaaagtccatgttttatttatttttatatcctcagggcctaactcagtaaatgcttatataaaattaaactgaatacataccctcaatgcagtctgagcttttggtgtttctttctgtcgtaacagtcttattagtgacctaatccagattgatagctttcttgcctccataactcgaggaactcttgccactartgttggtataaaacactcaactggaatgagaaagtcagctccagttccaccagttcacactaaagcttagcatcccaggccatgggaattttttagcagagggattttaaaggtcttactagctataaaagattatttttgttattagctggtgcatcagataagaggtttattctttccattctaatcttcttatgcttccttctgtaataattctgctttactccatttctcatgtactaaaaactttagttataaactttgtaatgcaactctatattgtatctagtagaaa

SEQ ID NO: 13594 - DNA, 1255 bp, Homo sapiens
tgcattgggttaaacagttcccaattgcccactatgttaccaggagaaaaaaaccctttatcatagggttaaactttgggaaggattttccataaggatcttaatataaaggttcttgaatggcataatgtataaggtctttgatagcaacgctacccacagtgcaaagatgttttactagtcctgttggtgtctcaaattggctcttggtaagtaatctggacatatcgtgaaattataattctgtgtagacaattcgacttaccaggttagagtgatgcaatccaaatagatggctttcttctgatctggcttaacagaaatcttgaaaaatctggaggagtaaatgtttaatataccctcagttctcaaccattcttcttcccctgaaagacaacatcacaggcaggacatcctcccaagtgtacacgcaatattatgtacagttcccacgtgagaaagcacatcataatcttagtgagaatgatgttctcataaggtcagttatactcagtgtgcatagttgtccaagtgtgagtatgaaaccaagtcattcgcaagtaccactagtctgattattagtaataataatccacttgtgacatagtttttctttgctgaaataaaatattgttttgacaccatggttgaaatgttggtcttaggtcaatgctctctattatctgttgttgttgccaagcctctgagaggtgttttatgtggggcaaaaggtcccttcctgtgtctttggtcaaagcaaaggaggagtacagaygactgagagagtgatcacgctgctgtgcccacctatgcggtagaccttgttcctgggttgggagatgttttatgatcagggtgcagtagaaggagcacactagtagcagtaaagagaggtgaccctggctgcagttctgcctctaacttcctgagtgacctcaggctagtcacacagtgactgctccccacatttctttttgtaagctgcaaggattgaatcagacaatagcctctaagtttcttctgaactctcatactcagggatgccaacgatgttggtaataaaatagtatgaacatgccaaaaaaataaaaataaggaagagaaataggtatgtaactttactctgggactcctgtggtatctcacaacaccatgcttcatgaaccccaaagaaagcaaaaaatccagctagtgttataaatcctgaccagctgaattctttcacatgttgcagcctgactcaagttattcatcg

SEQ ID NO: 13595 - DNA, 529 bp, Homo sapiens
cagtgaaaaaaaaaaatctctcctttaacatggactttggcatatatatataactgcaaatattatactcacattaggtttacttctttacctgccacgcatacctttagaatgccttgtaagcagcaattgtgttcattcatgtttttatctagcatagtgcaatataacatgggtggtgattgtgagtccaaatgggtctgcatgctgtgcatttccagcagtgcatggaggcatggctgtgcggtgggaggcaaggcagggggatctgtgtgcattgcagatctactgtgctctatgaacttacatgtcagaggttgtgggggccaactatccacttaagcacgtaccaggatcaccactgtccatttagctaatttcatgtcttggggttcaatcattaagggaaatacaggatatcctgattcaagaggcttgtggtggagctcgagcatcaaaactgtttttctgttttgtttcattttaatttaagaactccataggtgawtttaataccaaagcaaagttg

SEQ ID NO: 13596 - DNA, 563 bp, Homo sapiens
tcctctgcagtaacaccaattcatttgcattcattgtaagaatttgcccgagaaagtacagccttcctcttaatttatactgataattattactattatttgtaataccgtgcttgaaaaggcacttgagaaaatacgaacttacgagctaatttttttttaataatcttattttgaataacttgatttatagaaaagttgcaaasatagtagtacaaagattatctgttccaatgacgtcaaactccatttcaccaatgagctataaactagaaagaacctaatgccttgtaggaactcgggctatagctactgagcactattgtattttagagtattctataggccaaggcagtctgactaacctgtctctatggataatttataacgcagtagaagccacagttacctctgaactgtggctcagagagtggtgggaaactgtataagaaaagtaagctttatcaagcaatagggtcagcctgaatcaaagcccagtacagcagtttttaatatatagttaatgaagacacctggggtactccctagaaagcagaatcatg

SEQ ID NO: 13597 - DNA, 541 bp, Homo sapiens
agccaagtcacttttatgctttaaaaaaaaatgtattgcctctttaaagtgaggttatttttatagctttagaactcctggaacagtaaacaggaggcaaatgtatcaggctttaaaggtgaaaggggwtatttaagagtgttatcgaactagccagctgcagcatcagaaaaccataaacatttctcttcatagcagggctcagtgattcattaggccacccttctggagagggagggtctttataaacttagtgtcacaaaaccctggaggtatccagtcctctctgccatcctgctgtttaaggagtgaaaattatctttgcatcctcccttgtttccagtgcattagggttttgaaagggacaatgataaaagtaataatgatagttgctgccatttcctgtactttccaagtgccaaggtaagtctgttattctaagggtggatagattatttatgggagctggtacagtaagttagttggcagaggtgggatttgaacccaggtcttttgaagattgcaaatcatggttttcacc

SEQ ID NO: 13598 - DNA, 543 bp, Homo sapiens
tggtatagggaagggaaagaacgtggaaattgaagtcagacaaatccttattcrtactgaggcaaagtgtttaatcactctgaacctcagtatccttttctataaaaataaggaaactagttattttaggggatatttcgaagaaccaataaactaacatgtggaatgtgctgtttattctttcttttcccctccaggtctgttcatcagttttctgcatcccactctatgtcctaggagaccaaccctaaagactactttaaccaatctcccttgccttgggctattagttgggttcagacaaattgtggcataatcagtttagaagttagtaagagaaagaaggggtaggaaaaaatggcggataggaggcaggactaaattgcagatccaactcatatgggcagagcagcatgtggagactcacattgtgaacttttgctccaagaactactgcaggaatatactaggaaagctaagaaaattcatagactctttgaaggaagtggattgttgttgcaggacctgggagacagcccaaat

SEQ ID NO: 13599 - DNA, 543 bp, Homo sapiens
tggtatagggaagggaaagaacgtggaaattgaagtcagacaaatccttattcgtaytgaggcaaagtgtttaatcactctgaacctcagtatccttttctataaaaataaggaaactagttattttaggggatatttcgaagaaccaataaactaacatgtggaatgtgctgtttattctttcttttcccctccaggtctgttcatcagttttctgcatcccactctatgtcctaggagaccaaccctaaagactactttaaccaatctcccttgccttgggctattagttgggttcagacaaattgtggcataatcagtttagaagttagtaagagaaagaaggggtaggaaaaaatggcggataggaggcaggactaaattgcagatccaactcatatgggcagagcagcatgtggagactcacattgtgaacttttgctccaagaactactgcaggaatatactaggaaagctaagaaaattcatagactctttgaaggaagtggattgttgttgcaggacctgggagacagcccaaat

SEQ ID NO: 13600 - DNA, 527 bp, Homo sapiens
gcaataaaagtcccaaagaattaacttgtttaagaaatcaaaaattgactgttttctttggtgagtgttgggctacctcgaggactaaaataaacctagacctttccctggatgttggcctgatatggcagctccagagcattaaccatgataatagaatcatttgaaccagataatgcagacttcagagtcccaactcttactctaagtaacactttattctcttccactcctctctacctgmtggaatatggagactatcccttttgagatccagagaatgtgtttctgtgacctagatgcttctgtgggcaagcttttatgtaaatctgtaacacattaatagtcgaggttcattgtgaccatcctatgtaggttcagtctctgcctggccaccgaattcctacccatccatctaaagagcagtccccaacctttttggcaccagggactggtttcatggaagatgatgtttccacagatggtagagtggagggaatggctttgggatgaaattgttccacctc

SEQ ID NO: 13601 - DNA, 1106 bp, Homo sapiens
aatgccagttccgattcaggttgtctgggggtgcgttctgagattctgcatttcttaaaagctcgcacrtgatgctgatgctgctggtctttaacactttgtgtaggaaggttttatgtcttcagattaagggtcaactgagtatcttttcaagaagaaacatttgttggggtttatatgccaaggcagtatcatccagcctggctaacacccatcttgctataccataaaaaagctttctaccctttctgggtttattattaagtgttgagaaaacattcggcttttactgtttggctggggtttctggctgatagcagcaaggtaggagtttaaatttaacagaattaggaataaacaggatctagagagacagtctatccattactaagggagaagagttggtttttgtctctttacaaggccttatctaatagaggtctctgaatgctgcattaagaatcttggatatgtgattggttgtcttaactatctttttccttcacatattgcacatttacattagcttggacccttcagtttcctaatacaagtatgaacaggaagaagccatgtgagatttccccctcttttcatattttaagttcaatttaacaaacatacactggttagtaggttacaaagtagtggacgaggcactctgagggacatgaggatcaaaaaagaagataggttccaagtactgtcagtttacctatagaggatacggacatgaaaaataaccaaatataaggcagtttgagcttaaaaacactagatttgggggaaaatatgcttagagagctgaaagaaattgaaatcagttctgctggggagttaggaagacattgtaaaggaagaagactttgagtaaggatttagaacatggttatttgcacatagagacagcaaatactgagaccaagtctttgtcatgttgtaggtttgtaaacagagagcaaaagcagagacataggttagagtaatttaagtagtaccatgttgaaatttaaatgtcgttctttggaattcagcttataccctaggtcttgtatgggactgttaccgataatggataacattttaaggcagtgtttttctgcatt

SEQ ID NO: 13602 - DNA, 1106 bp, Homo sapiens
aatgccagttccgattcaggttgtctgggggtgcgttctgagattctgcatttcttaaaagctcgcacgtgatgctgatgctgctggtctttaacactttgtgtaggaaggttttatgtcttcagattaagggtcaactgagtatcttttcaagaagaaacatttgttggggtttatatgccaaggcagtatcatccagcctggctaacacccatcttgctataccataaaaaagctttctaccctttctgggtttattattaagtgttgagaaaacattcggcttttactgtttggctggggtttctggctgatagcagcaaggtaggagtttaaatttaacagaattaggaataaacaggatctagagagacagtctatccattactaagggagaagagttggtttttgtctctttacaaggccttatctaatagaggtctctgaatgctgcattaagaatcttggatatgtgattggttgtcttaactatctttttccttcacatattgcacatttacattagcttggacccttcagtttcctaatacaagtatgaacaggaagaagccatgtgrgatttccccctcttttcatattttaagttcaatttaacaaacatacactggttagtaggttacaaagtagtggacgaggcactctgagggacatgaggatcaaaaaagaagataggttccaagtactgtcagtttacctatagaggatacggacatgaaaaataaccaaatataaggcagtttgagcttaaaaacactagatttgggggaaaatatgcttagagagctgaaagaaattgaaatcagttctgctggggagttaggaagacattgtaaaggaagaagactttgagtaaggatttagaacatggttatttgcacatagagacagcaaatactgagaccaagtctttgtcatgttgtaggtttgtaaacagagagcaaaagcagagacataggttagagtaatttaagtagtaccatgttgaaatttaaatgtcgttctttggaattcagcttataccctaggtcttgtatgggactgttaccgataatggataacattttaaggcagtgtttttctgcatt

SEQ ID NO: 13603 - DNA, 1106 bp, Homo sapiens
aatgccagttccgattcaggttgtctgggggtgcgttctgagattctgcatttcttaaaagctcgcacgtgatgctgatgctgctggtctttaacactttgtgtaggaaggttttatgtcttcagattaagggtcaactgagtatcttttcaagaagaaacatttgttggggtttatatgccaaggcagtatcatccagcctggctaacacccatcttgctataccataaaaaagctttctaccctttctgggtttattattaagtgttgagaaaacattcggcttttactgtttggctggggtttctggctgatagcagcaaggtaggagtttaaatttaacagaattaggaataaacaggatctagagagacagtctatccattactaagggagaagagttggtttttgtctctttacaaggccttatctaatagaggtctctgaatgctgcattaagaatcttggatatgtgattggttgtcttaactatctttttccttcacatattgcacatttacattagcttggacccttcagtttcctaatacaagtatgaacaggaagaagccatgtgagatttccccctcttttcatattttaagttcaatttaacaaacmtacactggttagtaggttacaaagtagtggacgaggcactctgagggacatgaggatcaaaaaagaagataggttccaagtactgtcagtttacctatagaggatacggacatgaaaaataaccaaatataaggcagtttgagcttaaaaacactagatttgggggaaaatatgcttagagagctgaaagaaattgaaatcagttctgctggggagttaggaagacattgtaaaggaagaagactttgagtaaggatttagaacatggttatttgcacatagagacagcaaatactgagaccaagtctttgtcatgttgtaggtttgtaaacagagagcaaaagcagagacataggttagagtaatttaagtagtaccatgttgaaatttaaatgtcgttctttggaattcagcttataccctaggtcttgtatgggactgttaccgataatggataacattttaaggcagtgtttttctgcatt

SEQ ID NO: 13604 - DNA, 1106 bp, Homo sapiens
aatgccagttccgattcaggttgtctgggggtgcgttctgagattctgcatttcttaaaagctcgcacgtgatgctgatgctgctggtctttaacactttgtgtaggaaggttttatgtcttcagattaagggtcaactgagtatcttttcaagaagaaacatttgttggggtttatatgccaaggcagtatcatccagcctggctaacacccatcttgctataccataaaaaagctttctaccctttctgggtttattattaagtgttgagaaaacattcggcttttactgtttggctggggtttctggctgatagcagcaaggtaggagtttaaatttaacagaattaggaataaacaggatctagagagacagtctatccattactaagggagaagagttggtttttgtctctttacaaggccttatctaatagaggtctctgaatgctgcattaagaatcttggatatgtgattggttgtcttaactatctttttccttcacatattgcacatttacattagcttggacccttcagtttcctaatacaagtatgaacaggaagaagccatgtgagatttccccctcttttcatattttaagttcaatttaacaaacatayactggttagtaggttacaaagtagtggacgaggcactctgagggacatgaggatcaaaaaagaagataggttccaagtactgtcagtttacctatagaggatacggacatgaaaaataaccaaatataaggcagtttgagcttaaaaacactagatttgggggaaaatatgcttagagagctgaaagaaattgaaatcagttctgctggggagttaggaagacattgtaaaggaagaagactttgagtaaggatttagaacatggttatttgcacatagagacagcaaatactgagaccaagtctttgtcatgttgtaggtttgtaaacagagagcaaaagcagagacataggttagagtaatttaagtagtaccatgttgaaatttaaatgtcgttctttggaattcagcttataccctaggtcttgtatgggactgttaccgataatggataacattttaaggcagtgtttttctgcatt

SEQ ID NO: 13605 - DNA, 1106 bp, Homo sapiens
aatgccagttccgattcaggttgtctgggggtgcgttctgagattctgcatttcttaaaagctcgcacgtgatgctgatgctgctggtctttaacactttgtgtaggaaggttttatgtcttcagattaagggtcaactgagtatcttttcaagaagaaacatttgttggggtttatatgccaaggcagtatcatccagcctggctaacacccatcttgctataccataaaaaagctttctaccctttctgggtttattattaagtgttgagaaaacattcggcttttactgtttggctggggtttctggctgatagcagcaaggtaggagtttaaatttaacagaattaggaataaacaggatctagagagacagtctatccattactaagggagaagagttggtttttgtctctttacaaggccttatctaatagaggtctctgaatgctgcattaagaatcttggatatgtgattggttgtcttaactatctttttccttcacatattgcacatttacattagcttggacccttcagtttcctaatacaagtatgaacaggaagaagccatgtgagatttccccctcttttcatattttaagttcaatttaacaaacatacactggttagtaggttacaaagtagtggacgaggcactctgagggacatgaggatcaaaaaagaagatagrttccaagtactgtcagtttacctatagaggatacggacatgaaaaataaccaaatataaggcagtttgagcttaaaaacactagatttgggggaaaatatgcttagagagctgaaagaaattgaaatcagttctgctggggagttaggaagacattgtaaaggaagaagactttgagtaaggatttagaacatggttatttgcacatagagacagcaaatactgagaccaagtctttgtcatgttgtaggtttgtaaacagagagcaaaagcagagacataggttagagtaatttaagtagtaccatgttgaaatttaaatgtcgttctttggaattcagcttataccctaggtcttgtatgggactgttaccgataatggataacattttaaggcagtgtttttctgcatt

SEQ ID NO: 13606 - DNA, 551 bp, Homo sapiens
tacagtgtggggtatttgtttttactggatattgattgtgttggctgagatggacttaaagagacaagaaktgatttgcagatatcactcccatctcttttgttgcctacccttggaagatattctcttaagaacaccaatagcgtgaaacctgtgctgccgtacaaattttggatccctttgagttccactgaacaaagcagtgtaccatttgtgctgagtttgttgtcaatatatccgaattaattcaaatccaggaagtgcacagtgttaatttaagtctatgtgactctgaattttttgtaaactcttttcagcggtggctgtttgcagatcactttgcagcccttctcatttgtgctgttgcttatccttctttcacttctctccgttccttctcatgctccaacttcggtggtataggatatcgtgatattattttgatttttgtcaaatcagactgccaaatccaaattccaggcaatactcaaacttcaagggcatagatatttcatacttatcagggttttcacgattatctagcatttatc

SEQ ID NO: 13607 - DNA, 551 bp, Homo sapiens
tacagtgtggggtatttgtttttactggatattgattgtgttggctgagatggacttaaagagacaagaagtgatttgcagatatcactcccatctcttttgttgcctacccttggaagatattctcttaagaacaccaatagcgtgaaacytgtgctgccgtacaaattttggatccctttgagttccactgaacaaagcagtgtaccatttgtgctgagtttgttgtcaatatatccgaattaattcaaatccaggaagtgcacagtgttaatttaagtctatgtgactctgaattttttgtaaactcttttcagcggtggctgtttgcagatcactttgcagcccttctcatttgtgctgttgcttatccttctttcacttctctccgttccttctcatgctccaacttcggtggtataggatatcgtgatattattttgatttttgtcaaatcagactgccaaatccaaattccaggcaatactcaaacttcaagggcatagatatttcatacttatcagggttttcacgattatctagcatttatc

SEQ ID NO: 13608 - DNA, 551 bp, Homo sapiens
tacagtgtggggtatttgtttttactggatattgattgtgttggctgagatggacttaaagagacaagaagtgatttgcagatatcactcccatctcttttgttgcctacccttggaagatattctcttaagaacaccaatagcgtgaaacctgtgctgccgtayaaattttggatccctttgagttccactgaacaaagcagtgtaccatttgtgctgagtttgttgtcaatatatccgaattaattcaaatccaggaagtgcacagtgttaatttaagtctatgtgactctgaattttttgtaaactcttttcagcggtggctgtttgcagatcactttgcagcccttctcatttgtgctgttgcttatccttctttcacttctctccgttccttctcatgctccaacttcggtggtataggatatcgtgatattattttgatttttgtcaaatcagactgccaaatccaaattccaggcaatactcaaacttcaagggcatagatatttcatacttatcagggttttcacgattatctagcatttatc

SEQ ID NO: 13609 - DNA, 505 bp, Homo sapiens
ttggatttgtgcctatgttgactaaaattgacggataattgcagttggatttttcttcatcaacctccttttttttwaatttttattccttttggtatcaagatcatgcgttttctcttgttcttaaccacctggatttccatctggatgttgctgtgatcagtctgaaatacagtgagtgacccttattttcttatttattggtgaagaaaatgtcagttaatttggtgttcttggtctctttatcctctctccccctttggtgtttttttttaaagaactggctattgggggccagaaaataagggaatgggtggcccacgcatttgcttcatcagtctctgctctctgataagccagtttgctataaggatgcaggttgactgcatcctgggcagacgcctttgcaaatgttcaccaggaaaaaaaaaaaaagctccccaagaaagccgctgcagtgtcgggtgccagtgctgtgtgactgacactccagaatgcatttaag

SEQ ID NO: 13610 - DNA, 548 bp, Homo sapiens
gatggggttattacagtctaacagcaatatttggaaataaattatttgtgcaatttttctatttaattttttttttttttgagatggagtcttgctctgtggccaggctggagtgcagtggcgcaatctcggctcactgcaacctccacctccaaggttcaagtgattctcctgcctcactcagcctcccgagtagctgggactgcaggcacccgccaccaygcccagctaatttttgtatttttaatagagacggggtttcaccatgttgtccaggatggtctcgatctcttgaccttgtgatccacctgcctcggcctcccaaagtgctgggattacaggcgtgagccactgcgcccggcccctatttaaatttttttgtcatgatgagagtcatgctttgtgtcattttggttcagttgtattcaccccatgtaattcatgatggaacctgtgctggggccacctgagttttatggtcacttccaaagttttgagatattttgaattttagtcagaggattcatttagaattgcacttaaacaat

SEQ ID NO: 13611 - DNA, 533 bp, Homo sapiens
cacctcagagttatttgaagactagagcagagctccagctggtgtcaggaacgatactgtcatcagactaactcctcctctttgagctaaaagcaccacacttggatcaagccactgttacttgattctctcccccgggtaaattctcctagaacagcccccaggagtctccattctttatcccaatagaccactggcatatcctcctcaattgtcctctgcaggtatttcaaatatttgattctttgagtaaacatggtttagtttccaggtggaatccctgctgagctactatttacacaatagcattctgcagaaaraaaccctatatttaaaacaaaacaaagaccttcacatttttgctgagatattgatagaaagggaaaaaatataagaaaatttctatttggttaacacaagcgtgagccaatgacagggagtgaaggcttctcttgttttcacactgaatgaagttagcctaagaacaataaggtagattccctttccaggagcaggaaattggtttctttatg

SEQ ID NO: 13612 - DNA, 1617 bp, Homo sapiens
gctcagcaaaataggccaatctgaaaaagctacatacttacatactgcttgatttcaactacatgaaattgtggaaaaggcaaaactatagaaatagtaaaaaaaaaaaaagaaaagaaaagttgccaggggtttcagaggagagaggtaaggatgaatggctagagcgtcagagacctttttagggcagtgaaactattctgtatgatactataatgatggatacatgacattacatatttgtcaaaaccacagactgtacaacacagagtgaaccgtcatgtaaactatggcctttcattagtaacattaatgaatcaatattgtttcatcagttgttgcaaatataccacactaatgcaagatggcaataatagagaaaagcgtatggggtttggggaagagggtatatgataactctgtgcaatctgcccaatctttctgtaaactttaaactgcgctaaaaagtaacatacatctaattatgaaaacaagcaaacataggattaattgctttctgagccagctaacacatcttcagacctgaaaaaaaaaatctgacagttaattatgacaaataattctgacaattgatgcccagccccagaatccaggcagagagaaagacaacagtcactgataaattacaacagaggcgtcacaaagggacaagaaacccctcatgtgtaagttcttgacccacaggcccaaggaagaagctaatccctgtcccaagccccagtgaaactctgctgaactcatccactctgaccaccattgccatccctgatctcccagctggtgaagaggatgccatgctctctcacaagagaatcactagtgccccccaaagaaaaccaaccctagaggactcagattccctcagggtccaccttgtcactaacccaagcatctgccacctaaatccccttcccttcaacaccaaggttgaatgggtattcaagtaaaatggcccccagtaaatagcttgagctgccatcacatgtactgtgagctcaccagcaccttccccaggctgtgatrggggcaagaggaaggagaagaagactggggcgacattctcctgggagaatgtcagtgtgctgagctctcttcccttctctggcttgactcagaccatcagagttgggttttgccatcaattaaactcacaggtaaaagcagcatcctgagttgcaatatcatttaatattattttcaattgctttaacgacactatcaagtccaacagcttgagtccagtacacagagatcaatgtctgggtaacacagtgcagttgaaaaagtagggaatctaaagccataagctaaagttaacatcaccagtaaaagaacaaatggacaccaagtgcctccagatatgatgcgctgagaaagacacaacagttctatctcgttcatgatgtccttgccaaaagtgcatagcctgaattttacaatggggaaagttcagacaaacgcaatttgagggacattctacaaaatatcactggcctgttaaagtctccttaaaatgtcaaggtcaaggacatctcagaaaggtgaaggaactgttccacgttaaaggcaactaaaaagatgtgacaactaaatgtg

SEQ ID NO: 13613 - DNA, 589 bp, Homo sapiens
aataggaattaatagaagttgtggtgtttgactgaacagtccaaacagtttacaattaaggctctcaacccaaagccatgattccccacttttatgaatacattctacaagaaattccataagccatctctactagcttctcagtactcttaacattttttaattgtgggaaaatacacgtaaaatctaccatttcaacaattctgaggtatacaatttggtggcattaagaaaatgtataatgctctttaatgattaccaatatatatttccagaatatttttgtcaactcaaattattatctacccattaagcaataactctttttccctctcccagtccctggtaaactctcttctactttattctactatctgttgctatgaatttgcttgctatagattctaaatacatatagcatcmcaacaatatttgttcttttgtgtctgggttatttcacttatcctgtcattttcaatatccattcatatcatagcctgtatcaaaattgcacccatttttcagggtttaataacatttgatggtatgtatatatataccacatttgtttatccatttatctgccgaa

SEQ ID NO: 13614 - DNA, 526 bp, Homo sapiens
tgtcctttgcagyaacatggatggcactggaggccattatcctaagcaaattaacatagaaacagaaaaccaaaaactccatgttctcacttataagtgggagctaaacaatgagtacacatggacataaacatggaaatagacactggagactcctaaagaaaggatggaggaagaggggcaagagttggaaaactattattggatactatgttcattattgggtgatgggatcgatagaagcacaaatctcggcatcatgcaatatacccatgcaacaaacctgcacatgtaacccctgaatctagaatttaaaaatacaaatgtacccagtaattaaaaatgcatgaagtagaaccacatgtatcaatatggatatctcaaaaacatagaatttaagtaaaaaattgaaacatttgataatacgcaatattacaaaggagtgagaaaatgggcacttatttatgtctcagaatataaatttactataacctcaagggagggcaatttggcaagtgattacaat

SEQ ID NO: 13615 - DNA, 1109 bp, Homo sapiens
tacctgctcaagtccacccagctaccaacacctattacctgcagactttacccttctaatcattaaaccaatgagaaaatctgctagtcaacctattagaaaacttgactattcaggtgttggggctttttctgccaacatatgttatagwcagtgttctttgaagtaatagaggtgagcaaaatcacaaaatactgcctagacattaagctacttctgcccaccagccagccttccctctaatgggaattgcattttgcttcactggcttcagcttcttgcctgaggtccctactgggatggatgcccagaatcgggcagtagcctgctaggtgtgggtccctggtacctggccaagctcctgatgtccatattcattgctttcgctatcccttctattgagtaaattactgctagaaatgccacggcccaggaaaaaatatacacattttcctgtaaccacccctcacacccttcttctatgtccaagtgtctccttatccacagagaggcagtatcacttaatggtgaaatgtggggactctggagtcagaaaactctggcctccaatcctggttttgcaacttttatttgtatgtggcactggactaattctttaatttctgaacatatatccttgttaaatgcagatactactagtacctgactcatatgtttgttacgaaaagattgaaaaatcaaatggatgtgaagtaaatgacactatgcccgacacccttgaaacagtctaggaatgttgttgattattattattggctgcgtggcaggaaaaaacactgtgaaaacagcagggaagccttccaaagctgtggtcctttcagcagctgctcaacacttgctcactgctgcatgggttatattatacagcaccgagaagccagctttacatatctggaaatagattccagatacttaaagaatgtgatttttggctgggcacggtagctcacacctgcaatcctagcactctgggaaaccaaggcagtctgattgtttgagcccaggagttagagataagcctggccaacatggcaaaacccagtctctacaaaaaagtacaaaaattatctgggagtggtggtgttatg

SEQ ID NO: 13616 - DNA, 1109 bp, Homo sapiens
tacctgctcaagtccacccagctaccaacacctattacctgcagactttacccttctaatcattaaaccaatgagaaaatctgctagtcaacctattagaaaacttgactattcaggtgttggggctttttctgccaacatatgttatagacagtgttctttgaagtaatagaggtgagcaaaatcacaaaatactgcctagacattaagctacttctgcccaccagccagccttccctctaatgggaattgcattttgcttcactggcttcagcttcttgcctgaggtccctactgggatggatgcccagaatcgggcagtagcctgctaggtgtgggtccctggtacctggccaagctcctgatgtccatattcattgctttcgctatcccttctattgagtaaattactgctagaaatgccacggcccaggaaaaaatatacacattttcctgtaaccacccctcacacccttcttctatgtccaagtgtctccttatccacagagaggcagtatcacttaatggtgaaatgtggggactctggagtcagaaaactctggcctccaatcctggttttgcaacttttatttgtatgtggcactggactaattctttaatttctgaacatatatccttgttaaatgcagatactactagtacctgactcatatgtttgttacgaaaagattgaaaaatcaaatggatgtgaagtaaatgacactatgcccgacacccttgaaacagtctaggaatgttgttgattattattattggctgcgtggcaggaaaaaacactgtgaaaacagcagggaagccttccaaagctgtggtcctttcagcagctgctcaacacttgctcactgctgcatgggttatattatacagcaccgagaagccagctttacatatctggaaatagattccagatacttaaagaatgtgatttttggctgggcacggtagctcacacctgcaatcctagcactctgggaaaccaaggcagtctgattgtttgagcccaggagttagagataagcctggccaacatggcaaaacccagtctctacaaaaaartacaaaaattatctgggagtggtggtgttatg

SEQ ID NO: 13617 - DNA, 1437 bp, Homo sapiens
tgtctctaaataaaattctatacagttacctaaggaaaattcacatatactctacatcagctagaaatgtgtgttgaactgcagataacagaatacccagctataggggcttaaacaaaatgtggtttatttgactgccattacaagaagtctgaaggtaaaaggttgttagcatggtccaggggctcagccacatctaggccaacatttctgaaattctcctggcctttctctcacagctgtcatttcttgagtgtaagaaataagagggaactttggcatcagggtcatctgctctctttcattagaaaggcacaagtttttccagaaccatctcttctccctccctatcatcatttctcacttctgattcgatggccagaggaaggccacatgrccacctctgtagtaagggagtcggacagagatttgtgaactcaacttttgcatacaattttagagaattcaaaaatggacgcgcgttatggtacccaggttcagaatccctgattgaaaaagtgggtcacactatctgaacctacgttttcaggtcctcactcctcaaagaaaaactgaaatctaaacagatttctgataatctggtttgaagcagcaagctgtttaaaggccagagaatcaaatgagataatgaattatgaaacttttgcaaactgttaagttctacttaatatgaagacgtcattctgttgtgagaacttcctttgttatctatgtattacacatcttggttgccatttgcctcgtgtgtgtaaataaaataagatagaagtagggcaaagtaaagaaagacacaagcaaatcagtgccaggaacacacagaaaatattttattagtttccaaattaagaaacaacaaaggaggacatatttcaggagaaatctatgactctcctcagagagcccactctggcattcgtggccccccagtcctggtagcgcctatagtcccctggcatcagcaggtactgccgtcctcggtagttggacagctcgtagaggacccaggagccctccagcacgttgagggagtggatttcattgaagcggaagcggtcctgaagacaggagcagtcctcagtgaactctatcatctggcctctgtagtcctccctctcatagagtctgatcctgtgagagccagactggcggacccagaaataaaaagagaagaaaagcaagtgtgaaatgattccaatgcattgttaggcagtccagcttggtgaggacccgctcaagccattttgaaatacatggtaaaatttaattaattctgaatatttataaactcctcattaccgagcacagagattcagtaccttttcaagattatgaagtgtggtgaagaaattgagaaggaaatctcactctttaatatattcagctatttcttaggatgagctgcctcctgggctcagt

SEQ ID NO: 13618 - DNA, 1437 bp, Homo sapiens
tgtctctaaataaaattctatacagttacctaaggaaaattcacatatactctacatcagctagaaatgtgtgttgaactgcagataacagaatacccagctataggggcttaaacaaaatgtggtttatttgactgccattacaagaagtctgaaggtaaaaggttgttagcatggtccaggggctcagccacatctaggccaacatttctgaaattctcctggcctttctctcacagctgtcatttcttgagtgtaagaaataagagggaactttggcatcagggtcatctgctctctttcattagaaaggcacaagtttttccagaaccatctcttctccctccctatcatcatttctcacttctgattcgatggccagaggaaggccacatgaccacctctgtagtaagggagtcggacagagatttgtgaactcaacttttgcatacaattttagagaattcaaaaatggacgcgcgttatggtacccaggttcagaatccctgattgaaaaagtgggtcacactatctgaacctacgttttcaggtcctcactcctcaaagaaaaactgaaatctaaacagatttctgataatctggtttgaagcagcaagctgtttaaaggccagagaatcaaatgagataatgaattatgaaacttttgcaaactgttaagttctacttaatatgaagacgtcattctgttgtgagaacttcctttgttatctatgtattacacatcttggttgccatttgcctcgtgtgtgtaaataaaataagatagaagtagggcaaagtaaagaaagacacaagcaaatcagtgccaggaacacacagaaaatattttattagtttccaaattaagaaacaacaaaggaggacatatttcaggagaaatctatgactctcctcagagagcccactctggcattcgtggccccccagtcctggtagcgcctatagtcccctggcatcagcaggtactgccgtcctcggtagttggacagctcgtagaggacccaggagccctccagcacgttgagggagtggatttcattgaagcggaagcggtcctgaagacaggagcagtcctcagtgaactctatcatctggcctctgtagtcctccctctcatagagtctgatcctgtgagagccagactggcggacccagaaataaaaagagaagaaaagcaagtgtgaaatgattccaatgcattgttaggcagtccagcttggtgaggacccgctcaagccattttgaaatacatggtaaaatttaattaattctgaatatttataaactcctcattaccgagcacagagattcrgtaccttttcaagattatgaagtgtggtgaagaaattgagaaggaaatctcactctttaatatattcagctatttcttaggatgagctgcctcctgggctcagt

SEQ ID NO: 13619 - DNA, 1949 bp, Homo sapiens
tgggacagttattataaccatagaaatttattttccatgtgctgtcccatcttcttgatgagacagatgtttaacaactggagaactggaccccatctttgtccccatcttgcctagcaacagaaggtggtcactaaccagggattttcgagcccattgcttaaggccgttgttgacccaaaggatagtgggtccctgctcctcttcctacggagaggcccaggtgcccagagggccctcctggctcggctgcctacttgagtggctgatgaagtgtctgctgtgcgcacagggcacccagccccgctcctccccaggcagcccctcgaacagctgttcctctactgcttcagctgtggacctgaggctgagagtctgagccatcgacctgagccacatgcgggggagtggcaggcctggacccggtgcccagacctggctcacgtgaccttactttttccactgtgcctgctgctccctcccgggctctgtgaccttgggcagccatggccgttgtgcacccattcccagctgtaaaatgagaggctgggctggctgatctcaaatgtcccctgccagcctgagattctgcgttgtgtcctggggtgtgaccgtgacatgcctccaaaggcagctgccagtgctcacgagggaggcctttttcctgagttaaggcaggtagggggactgggggtgagttgagggactgggaggtgggggaagcacacagacagtcctccccagctgaaccctcatggtgaattaccttcagtcccaggctcagtgctttggaaatgctctcaggcccagcacccagacctggaaccagcctccaggcccctggccctccctttctctactggaatcttccagaccgaggcaggtcagctgaaagtcactgactctgccttccacaaactcatagctgacagaccattccatgtcccctcccagccccgtcccaggagrggaactcacttcgccttcccaccctccaggccgactcactgtccgtcactctctgggtcccacccactgtcccaccgacttcattggtctaaaaatatgctctggcgtcttgttggaaagcagaaggaatcatgggccctgctgataaggtgaagaaagtgacccgagggggcaaacttacagacgggacatgctttagcaaaataacaaaacagcgggacctgaaggctggcttcccaagcctcctcaaggccttgtgccaggaagaggaccctcgggcttagggaagtgaaaaccaggctcgggtccctcacccagacccttctgcccactttgggagggagcccaagaagtcagctagggagggacctcccggtgggacctgagtcctgattggaactttctgggggctttcttggcattttacgtgtgttgtcacaactccttgatgggggagttaagcatggtctgtgggattccactgggagaggacccctagaagcctgggccgggcctcctcccaatttcaccccatatgcctttccctttgctcattatgctttgtgtcttttgctgtagtaaaccacagccatgacttttgcaagtcctcctagattaacactgaacttgggggtggttttagggaccctgacatacctatggatgtctgcctgctttagcgctatttgttgaaacaataatcttttccacattgaattgatttggcacttttgttcaaatcagttgtaaagatttgctacataaatgtaaacatttattcctggactcttttttttttttttttttcctgagacggagtctcgctctgtcacccaggctggagtgcagtggtgcgatctcagctcactgcaagctccgcctcctaggttcacgccattcttgtgcctcagcctcttgagtagctgagactacaggtgctcaccaccatgcccgccaccacgctctactaaaaatacaaa

SEQ ID NO: 13620 - DNA, 601 bp, Homo sapiens
tccatgatctgcttagccattgatgatgacaacaaaactgataaaacccagaaaatctccaagaagctttccttcctgagttggggcaccaacaagaacagacagaagtcagccagcaccttgtgcctcccatcggtcggggctgcacggcctcaggtcaagaagaagctgccctcccctttcagccttctcaactcagacagttcttcatactaatgtgaggaaacaaacacgttcaggccccgaacatttctggtgctgactcggccttaaacatttgtgccataatggaaaatatctatctattttcaaatcctgtttttctcatagtgtaaactcacatttgatgtgtktttatgaaggaaagtaaccaagaaacctctaggaattagtgaaaaaagaacttttttgaggcgtgttactatactgctgtaagttatttattatataaagtattgtaaatagaatagttttgaagatatgaaatatggctatttttaatggtgacagttatgacttttagtcactattaaattggggttacctataataatacaatttgtagttgtttccaggtttggctaataatcattccttaacc

SEQ ID NO: 13621 - DNA, 527 bp, Homo sapiens
tatatcttaaagttattgcaaagattttccaggaaaatgttcccaagtgtccatgagatcttttcagatgtgatctcatatctaaagctagaagcattgggagagctgtaaatagcaatataaatccacggctaatgcatacaggttattattttagaaacaagtaactaacaagatatgtktcttattctttgttactaagaataagttattgatcatacttttgattcaattcaaaataactcaaaaatcctttttttaaaaacccaagtaggtaaattgccattaagatgtatgggaaatttaaaaaaaagaaaatagttccttccttctctgggattacagttagaaagagagacagacataaacacaaatacacacatgggatgtgcatgggcacagtggtgaatgtttacagttaaatgtcctttgtatggtgggaattgtatggtgggaaaaaaccctcagttctgcctattgggatgtgggaaggctatatttattaggaaatttttagtagaggacac

SEQ ID NO: 13622 - DNA, 516 bp, Homo sapiens
ctcttctcttcactttcttctcttggcatggaggataacagaaaaagtgattatataattaaattgttttgcaacacatttttatataattcacatactgaacttgtcagtcagagaaccacccccaaaaatattttgaatgtttaacatatttgattttttaaatgagcaaagtgagtaactgaagatgattttgcttcttttttggactcaagaaatctagtctccaaaagaaaatcggcagaatgactccatagggattctctccccatgcaaaattcataaacatttttwaaaaaatctctgccctttgttatttgcaaataagatatctcaataccttgccaaaataaaagattatgagtgttttatacttgttacacagacaaaaaagacaactatgaatcatttttcctcaagggaaataaagtgttttcatcaaacaaggtttgtaccttcggctaagagataggatgaacactcttgacagctggtgattgacaagtcttggatatg

SEQ ID NO: 13623 - DNA, 548 bp, Homo sapiens
actcagggccctggtggggtaggcaccagagggaatctcctggtctgcaggttgtgaagaccatgggaaaagtgcagtatctgggctggagtgcacagttcctcaggctcagtccctcatggcttcccttgggtagaggagaaaattccccaacctcttgcccttcctgggtgaggcgacgccctgccctgtttcggcttgccctctgtgggctgcacccactgtccaaccaatcccaatgagatgaactgggtacctcagttggaaatgcagaaatcacccraccttctgcgtcaatctcactgggagctgcacaccagagctgttcctattcagccatcttgccagcaatccctattaaatcgtgtttcctaagttttttgctttggtaagtttcttgtacaatctgcatgaatgttatttcatacactggctcctctaattgtgggataaaaaacctgtgagtaagactttaggatcaggtacagtttttaaagatattaccaattgccttcatcaagggtgtgcctttttatccttggaaaata

SEQ ID NO: 13624 - DNA, 508 bp, Homo sapiens
tgtgacatttacttttaccaatctgatattatatgtatttcatattatatatataaaatatatcatatagcaacataatgcatgtcacaacattgaaaaagatatgtatagaattgagataggttaagagattttttaaaaccaaagaaattagccaggcctggtggcttatatctgtaatcctagcactttgggaggctgaggtgggcagatcacttgaggttaggagtacaagacaagcctggccaacacggtgaaaccccatctctactgaaaatgcaaaaatcagctgggtgtggctgtgggtgcctgtagtctcagctacttgggacgctgaggcaagagaatcgcttgaacccyggaggcggaggttgcagtgagcagagatggcatcactgcactccagcctgagcgacagtgagattttgtctcaaagaaaaaaagttaaaaagctaaagaaatttatgaggagatagttgcaagtaacttttttttttttttttttttt

SEQ ID NO: 13625 - DNA, 1111 bp, Homo sapiens
tgcatatcaattattaaatacacatccagtccagttgtgtttcttgttttttaatgtagtttgaaaatgtgaggaatgcacaaaactgttcatttgcttccaacaactcaaaaatacattagtgaattcaaaaataaagcttctgatatgatgtatcacatttattattttagtggcaagtttttcacacttcattattgaaccaagaattctgtcatcttgtgaaaagatagcaaaattgcctacactggtgagatttgtaaattggagcagagtgtgaaggtaacatgatgagaaaagcacattaaccaacccggagttcaatacaagattaacacttcagccaagacgtgtgtgaaaggttgctaacacaaactgaagattcaaaatttaagataagggagttgtggttactcagtacatgagtaagagcaatttctgaaaatgagaagcataacatatcttgtatctgaatttaagataatctaaaaatgtatctcaaagtaaaataaaagttacttcatcctaaaccagatttaacaagctactctaaaatctgatatttttatgtctcccctcaaacaaagaaaagatataggagttgtttaagttgaggcacaggaagcttgtttaacaaatggaagagtaagagaaaaccagagaacgtggttttagctctcaaccacccaaattatgccttcattactgagtacttatagacctttcaactgtagtgaacttctccaaattaccttatccccaagttacctataatggcccccagctgtaggttctttacttacctgacacatctttctctttttgaaaaataaaaaagaatatcaatctatatagttgtatcctttgttaaaaatagaccttatgttttagagaagtcttgatttctcagcaaaattcagcagaagatactgagaytttccataaatcctctgcccctacacatgccaaaccttgcccattattaacattcccctccagtgtgatgcatttgttacatttgataaacctatattgacatattgttatcacccaaagttcattctttgcactatggttcactctttgtgttttactttctaaggtactgatt

SEQ ID NO: 13626 - DNA, 569 bp, Homo sapiens
tcgaggtaacgaagaactgaatatgtctctctgaatcccatgtggctctcaataattggattaagaaaaggatggttgctgatattttatttagattctcttaatttcatccctggaaacaaaagatctaataatgtactttataaagatataaactctcactcctatttgaataatgctaactacaatcaaataatttgttttattttttgataatgtaatgttcttattcccatttttcctataacayctttgcctcaaaaattagctcaatcaagaaagatatcaatgagtatctaattcccatgtagttggactacatttttgagccaggcagtgatcatcggttaatgagactgattttatagcttaatttatttggctttggactacaatattttctttatacttagtgaagtagagaatgaaatgaagaagcaatatgagttttgaaattatgcttacatctttatggcaatttattttagatttgcctcatttgaccctcttttctattacaaatacccagtcctggctttctaatttccttctcaaaatgcttatattgc

SEQ ID NO: 13627 - DNA, 569 bp, Homo sapiens
tcgaggtaacgaagaactgaatatgtctctctgaatcccatgtggctctcaataattggattaagaaaaggatggttgctgatattttatttagattctcttaatttcatccctggaaacaaaagatctaataatgtactttataaagatataaactctcactcctatttgaataatgctaactacaatcaaataatttgttttattttttgataatgtaatgttcttattcccatttttcctataacatctttgcctcaaaaattagctcaatcaagaaagatatcaatgagtatctaattcccmtgtagttggactacatttttgagccaggcagtgatcatcggttaatgagactgattttatagcttaatttatttggctttggactacaatattttctttatacttagtgaagtagagaatgaaatgaagaagcaatatgagttttgaaattatgcttacatctttatggcaatttattttagatttgcctcatttgaccctcttttctattacaaatacccagtcctggctttctaatttccttctcaaaatgcttatattgc

SEQ ID NO: 13628 - DNA, 568 bp, Homo sapiens
ccctgtcacttgtttttgttttggttttttttgtgcatgtcatatgttgtagtagaattaaagaccttgttttacttgcaaaatccagtcagcagttttgccactgcctgttcaaactccagcttcatgacccaggctagatacttgtgacaatggatctatgggaatgaatgatggatctgtgtagcaacgatagctttaacctctaactagctttcatttttcatctttacaatttccatttcctctttctattgaaacaagttcagttgaaataaatggatattcctgcacatgttgatgatcctgagagctcttctgagaatagcattggcctgttaatgatactgttaataatttttttcatacttttctctttttttttttagtctmgacctattccttcccaccttacttcagcagttgcagagagtatcttggcttcagcttgtgagagtgagagtagaaatgccgccaagaggatgcgtctggagagacagcaggtactgaggcatcttgaagtctggtgaacaccagctatagcaaatgtagttcatttaatttgatt

SEQ ID NO: 13629 - DNA, 524 bp, Homo sapiens
actcaagttttagaaaattgtcatttaggacttttgactagtaagcacaatatgtaacacaggtrtgggttttttgttttttttttaagtagtcttttgtcatgttattatttcaggtcagtatttggagggttagctactgattgtttggttgcccaggactgatatcctttgcatcttcttctcatttttataattggcttattatattgcatgaggcctcttcaagttttctttcttttttttgaaactctaaagagtaatgtctgtctttcgaggatttgatgagattcattttgtaaagcattccaaaccttacactggattattacattaactacctttatgatctcagagaagtcatttaagttctctgattttagcttttctcatctgtaaaatgggcataatacaaacacaagataataatgtaaaggtacctataagcaacctctgtataatcacatgagaaatggtgtgcctttccatctctcccttccctccatttatctgttggtatctat

SEQ ID NO: 13630 - DNA, 524 bp, Homo sapiens
actcaagttttagaaaattgtcatttaggacttttgactagtaagcacaatatgtaacacaggtgtgggttttttkttttttttttaagtagtcttttgtcatgttattatttcaggtcagtatttggagggttagctactgattgtttggttgcccaggactgatatcctttgcatcttcttctcatttttataattggcttattatattgcatgaggcctcttcaagttttctttcttttttttgaaactctaaagagtaatgtctgtctttcgaggatttgatgagattcattttgtaaagcattccaaaccttacactggattattacattaactacctttatgatctcagagaagtcatttaagttctctgattttagcttttctcatctgtaaaatgggcataatacaaacacaagataataatgtaaaggtacctataagcaacctctgtataatcacatgagaaatggtgtgcctttccatctctcccttccctccatttatctgttggtatctat

SEQ ID NO: 13631 - DNA, 585 bp, Homo sapiens
catctattggcagaatatgcacatgttccttggagactaaagacagtgaacaacaaaacagcatgtaaaaaaacagatgaaaaatctgctgaggtgaaagcataaataggaggaaatataaaattccccttttatgccaagtgcttcccacttgagaataaatcactaaggtcatttactagctctaacttgagaaccacaaactatactgggttcacctgcctttcactcctcctcagagtcaaacaaaaactctcacaattttaatatttagcaaatacagtcatgcactgcataacaatgttttggtcaacaacaaactgcatrtatgatactgttcccataagattataataccgtatttttactatgtcttttcaatgtttagatatgtttggatacacagtatttaccattgtgttacaactgcctacagtattcagtacagtgctatacaggtttgtagactagaagcaatagattataccacataacccacgtgtgtagtaggctatactatctaagtttgtataaatatactctgcaacattcacacaatgtaaagtggcctaattgcatttatta

SEQ ID NO: 13632 - DNA, 537 bp, Homo sapiens
tccaaccttcctggaggacattttgacaaacagggacttcagtgatcttagttgtacacaacagaatacactcagctacttttagcagaaagagatttattaggagactagatagcttgcagactcattgggaggtagaagtaatgcatcctaggctgggcttccaggaatgagttccaaaaacacaatgccggcctggctgccaacagaactgctgcctctgccttgatcacaaagttccagaatacgaatgatcaccataactcttggctccagagccatgcccctcagttctgatctgtgctagcaaaatgggggccccacccccctgccattcccctgaatcactagctttgactcacacttgcaraagttcatctcattagcggagcctaaatcatatctagaatccatgctggagggaggtctcagttgttagctgtctaatatctagacatcctaagaggaggtggaatatgttttgaactagccaagccaacaaatcaacagccataaaaatgttacaccctttgatct

SEQ ID NO: 13633 - DNA, 553 bp, Homo sapiens
gcagttggtggaagttctgcaatgtaaatagaacactaattaaaaaacaacttgtaaaaatgcaatttaaattttaatacagtacatttttcttctaatatgatggagacattctgaatcttagactttctgagggggtttaatgaccactagagcttgtcctcatattcagtccagtttaatactgtatgtctagtaagatgggctatatattgcctctattctttgagatgtgattaagcttagaactttgaccaaaaattttacagtaaaaattgttagaaatgggtaaaaaaaaaaaaaaaaaaaaaamccctgatttattactatgtcttatttatcagaccctgcactaagattaaaagttgtgcatgggcttatacaatttcaaatgtaaaaacagcctatttatatatgttgaaacaataagattttatggtttcactggcccttaataattggatccttcattaaacacatccatgaataccactgtttctactgttacttgttccattagaagctgatttgctttttattaaactgcaggaaa

SEQ ID NO: 13634 - DNA, 705 bp, Homo sapiens
acaagaaccttgattctaataatagtcatcatgggcttgctccttagattattttggggttcaaattcacataaatggcatggcatgagagctgtcacacaagctattgatatttctgagacatgtgacagaaacaaaataaactctcgggataaccacacaacaagccttgaagacaagcaaggtaaaatagcaaaacaccataagaaacactcaatatgaccaatagttatcaaatgcaaaagacagcaagttgggctctagaaattacagaaaagttaataattatcataggggttgtataaagtgaaaaagatttaaagtgattaaagcataaagaggaagtgctacatgattccatgttttaaaagcaaacattaaaaaaagtgaaatacaatggttctaatttttaagaactgaaatatggagtaattttaataaaaaatattggtcagtaggtaaaacagcctacatagatggagctaaaaagaaagttaactgaaaaataaatcagaaaattacttggaatgcaacaagacaggaaaagaaataagtttttttaaaaaatggtagtgaagctaagaggcatggaaaatcaaactatggttccaatayacatttaataggatttttactataaaagaatagagaaaatggaaagatgcatattaaataaaaccttaaaattttatgaatagttgaaaa

SEQ ID NO: 13635 - DNA, 520 bp, Homo sapiens
catctctgccaatgatatactttattacatttagtgtgttttgtcaagttttatatatattttaaaagggtgcgggttaaaacatcattttgtaaccttattccgatagatcatgaaactttaagcaattatagaacttttaagttgaaatcctagcataataattttcctaaaataaacacctaactgttcttcccaaagwtatcaggttacattacactgttttttttttctaatccttatttttgaagggtaaaaagcaaaacattacacaacaaaacaaaataccaaaataaaaacctagcgcctgagtttaacttgttatacatggttctgtgctgtagcagaatgtgtttctgggccacatgacagagagatagaggtaaccttgcagtattttttggcatatcccttctgcaccagtctcacttgaggggctggttacttattaccttctaaatcgaaacatttaactgctgggaattcttgactataagggagtgagatattttatatgtta

SEQ ID NO: 13636 - DNA, 552 bp, Homo sapiens
taacagtgacataaatgagataaggatccactctctcatcggcataaggaatcacaagcataaggactgacataatgctctgaggrgtcaaggcccaggttcctccatctggttgcatatgcgtagtccaagatgcctcactaccacctacacaccagccagaagaaagggtgcactgggcaagggagaccaagctccttccctttgggggcataatgctaagacatgcacacattgctgctgctcacatcccagaaactggtcagaagcgtgcatctagctgaaagggaggcagggcagtgtagtcattattccaggcagccacatacatggtttatttcatcgctatgaaagaagaggagaaggggtggttaggaatctctgccatacacccctcagaatggattatggacccctgttagcacaatatttttgagcacataaaccccaatatatttatatttgttcataattaatatctatgccaatatgtatattaaatccttgtaaagcttattttttccttactttttagataaaaataaatgtgat

SEQ ID NO: 13637 - DNA, 533 bp, Homo sapiens
aggcctgcacgtaggcagtctccagtgctcattagaacagcctcactcagttcatctcattcgatccctaaaactgtgggatggaaggaggacaaagaaaactgagtcctcttgtctccattcttggtccactccattccatcctcaacactatcctcatagtgatttaaaaaaaaattccaaaggacaactctagacccgttgtgccctgcttattagcattccctccaagctcccagctgcttagagcaagrctcaaaaaattttctgcaaagggccatatggtaaatattgtagacgtaatagtccaagagacaaagttgaggctactaggtaggtgcagcacttatataacaagagagaagacaaatttccacaaatttcttctgatgaaattcaagatataataataagcacatttttgggggcaatatagttctatatagttctactaacaagaaaaatagattcattttggggggaggataacctttcacttacttgaagttcaaagttagtgttccctatcatca

SEQ ID NO: 13638 - DNA, 507 bp, Homo sapiens
acgcttctgtcttgcagataaatcagacttccagaaggagtggtggactgcgtttcgactctgctcatcacgtctccggctatatttttgttgcagcattaatcaaagatttgctgtgtggctgttatatttaaaagtttacattaacttaaggtcatgtgtagttgtcagcactttgtaattagcgacaaactacttacaggtccttgaatatttactgtaataatattattcataatagagtcattcagtattcatgtggatataatatgtaattccattgtaatttagcattaattaatgtccacttattgcagcatattatagtatatgaaacaatttctgataagaaacaccagtgtaatttaaggatgaatctgacataatttgaataatgatatacattgcttcatgtctggatgcttctgtccccacccccatctccctgcatgcgtgtgagcccggaggacscttggaaataccacatacacacgcatgcactccccc

SEQ ID NO: 13639 - DNA, 564 bp, Homo sapiens
aatatattatatattatawataaatatataatatatttatatattataaactaatatatttatatattataaataatatatattaatatataattatgtattataaatatattaatatataataaatatgttatataaatatatgttaaattaattaaataatatataaataatatataatatgctataatattttgtatattatataatatgttataatattttatatattatataatatgttatatattaatcaaggatatatacctattgtaccctcaaaaagtacatatggaaagtaatgctctattagtcctttatttaatttttcttatctgaatcctcaagacaagtttggatctagttttggtttcatatcatgaagatttccttgactacccctccccaggatgatctttgtatttataataatgaggattaataatactaaggcatcaatactgccttagtattattaatccttcattgatgccttagtgttgttaatcctcattagttattattaatgatgcatatatgtgtctgtgttttctgcccaacttg

SEQ ID NO: 13640 - DNA, 564 bp, Homo sapiens
aatatattatatattatatataaatatataayatatttatatattataaactaatatatttatatattataaataatatatattaatatataattatgtattataaatatattaatatataataaatatgttatataaatatatgttaaattaattaaataatatataaataatatataatatgctataatattttgtatattatataatatgttataatattttatatattatataatatgttatatattaatcaaggatatatacctattgtaccctcaaaaagtacatatggaaagtaatgctctattagtcctttatttaatttttcttatctgaatcctcaagacaagtttggatctagttttggtttcatatcatgaagatttccttgactacccctccccaggatgatctttgtatttataataatgaggattaataatactaaggcatcaatactgccttagtattattaatccttcattgatgccttagtgttgttaatcctcattagttattattaatgatgcatatatgtgtctgtgttttctgcccaacttg

SEQ ID NO: 13641 - DNA, 564 bp, Homo sapiens
aatatattatatattatatataaatatataatatatttatatattataaactaatatatttatatattataaataatatatattaatatataattatgtattataaatatattaatatataataaatatgttatataaatatatgttaaattaattaaataatatataaataatatataatatgctrtaatattttgtatattatataatatgttataatattttatatattatataatatgttatatattaatcaaggatatatacctattgtaccctcaaaaagtacatatggaaagtaatgctctattagtcctttatttaatttttcttatctgaatcctcaagacaagtttggatctagttttggtttcatatcatgaagatttccttgactacccctccccaggatgatctttgtatttataataatgaggattaataatactaaggcatcaatactgccttagtattattaatccttcattgatgccttagtgttgttaatcctcattagttattattaatgatgcatatatgtgtctgtgttttctgcccaacttg

SEQ ID NO: 13642 - DNA, 564 bp, Homo sapiens
aatatattatatattatatataaatatataatatatttatatattataaactaatatatttatatattataaataatatatattaatatataattatgtattataaatatattaatatataataaatatgttatataaatatatgttaaattaattaaataatatataaataatatataatatgctataatattttgtatattatataatatgttataatattttatatattatataatatgttatatattaatcaaggatatatacctattgtaccctcaaaaagtacatatggaaagtaatgctctattagtcctttatttaatttttcttatctgaatcctcaagacaagtttggatctagttttggtttcatatcatgaagatttccttgactacccctccccaggatgatctttgtatttataataatgaggattaataatactaaggcatcaatactgccttagtattattaatccttcattgatgccttagtgttrttaatcctcattagttattattaatgatgcatatatgtgtctgtgttttctgcccaacttg

SEQ ID NO: 13643 - DNA, 541 bp, Homo sapiens
taaaaacgtgggtatgtttaacagctccccaatgaatctgagcaaaaacctgaagtgttggagctctgccctaatttggtggacagatttttcacaaatctttattgctaagaagatggaacatttgacaatttaaagtcatgtcccccataagttgagagtaaacgcattagtaatagtgtcacttgaatttatctgttttttttttttttgtgtgtgtgaacagcttataatgctttatggagcttatcaaagccacatggtgatgactgtcaggcctggagttgtgcaaaaatgaactttggctcttgcagcgaaggaaaattagacgctaaaaaccagggattttttttagaattacctaagacagggtttgtaagatttacaaccaaattcacggatgtgatgattgcagtgctccctcaccaaggaagccagccaactgtgaggatgtctcactggttgtgtgtgaagacaactaagatgccatctaagaaaatctaaccttccagccttggcttgtacaagtgtgtctrccctc

SEQ ID NO: 13644 - DNA, 503 bp, Homo sapiens
tttgtatctgcttactgtattgattactgagtgagtagtagtaaaatttttgattaccattgttgatttatttcttcttttggctctataagtttttgctacatgaatttttaagctctgtagttagtacttacacatttaaggttgttcggtgttaatgagttgatccttttaacatcaagaaatgttactctttgtccctagtaatattcgatgttttgaaatctaccttgcctgatataaataactttagctttctcttgattagtattagcatggtaatctttttctcaccttttaatttttctaccttttatttacagtgggtttttttttaaaaggcagcatatagttgtgtctcccacattcatccaacctgactctctcttttctagttggagttcttatatatacatatatttttaagagaaaaattgacagaagactgcaatttcagagataaaatagatggatcccaatgcagggatgytttgcctgcagtg

SEQ ID NO: 13645 - DNA, 1077 bp, Homo sapiens
tgaattatgatataactaaataaagggcaaatagatcctccatcagctgtaatctgccaggtgtaatctggcagttcaaaggtgtaccagaaactggaaaaatgtaggaaacactaattaagacagctgagagtaacctattggcagatttgctatctccgaccactgatttatttcatatgagtaggatttaagtcaattcactgaaaatgcaggattggaccagttgggttgattaggcagcagttggcaactagtcccaatatgttcacttttagtaagcatttatgatccttaagtttatgctacctctgagaataatattaatcaacttaaatacttttataaaaattcaatatctacaaagtgttttggtgaccttactatttctgtaagtcatccaagattccttttaaaagtttatagtctttggttttctaaatattgtcaaaagatgggggaaaaacccttaaactcaagggtgttcttgtggaatttggctcccatgtcccatttctgtctgtatagcttaattttttttctagcaatgaaaatatgttctcatcacctctgcaatacaaagctgaatgttggctcacagccttttgtgattgtgagtaagccgtcaaggcattaatattttagggctccaaagttgatttgagggaattttaatcttattttctttgttttccaatgtgactaccctaaacctctcttttcatgttggaaaataaaaaatgacagatatgactaaaactgacaataaaaacatacacaattataccttgctgaatgcacattttgttctagatggagttctcctggaaaagacatgagcakaatgtaacaaacatatcagcttagttaaaactttgtggctacaagaggagggaactgatatttatccagcctcaacaggcagtggctaaattatttatattatttcatttagttcttataactcccacccctcacccctatcttttaatggatgaggaaatggaagcgcaaaggattcaatattttatctaagttctcacagctaggacagacccagtgacttttgtattacaa

SEQ ID NO: 13646 - DNA, 580 bp, Homo sapiens
ataagtctcaggaaatctgatggctttataaatgggagttcccctgcacaagctctcttgcctgtcaccatgtaatttgtgactttgctcctcattcgccttccgccatgattgtgaggcctccccaatcatgtggaactgtgagtccattaaacctctttctttataaattacccagtctcgggtatgcctaataaactagtactccagatgcaatctggtccaagatgatagttaggagaagatgaccagactatttacaggtttttttgttttttgttttttgtttttcatttccctggggacactaagtgatgcctcttcggattatctgaaaatgtgggcactctgtatggcaagatggaactggctgtctttaaggaaatagtttcaactgttcatgcctctgtttctcccttcataaagttggttactgagcctgcattctaaagtgcctgttgtggccrggcatggtccctgtaatcccagcactttgagaggccaaagtgggcagatcacttgaggtcaggagttcgagaccagcctggccaacatagtgaaaccccgtctctactaaaaa

SEQ ID NO: 13647 - DNA, 528 bp, Homo sapiens
agttaagtaacatttaaattttgtctttaaaaggtgttagtctggaagagagataagaaagacatggacataaaaagctataatgtgggataaatataacttccaaargagttgtaagttggcatggaagaatagatttttatgctctatggctcactattatttgccaattgcttagaaatgatagaaaaccaaattgaaatacataggttcaaatttcagatttatggcaaacagtcttcaaatacaatacagacatttcttaaaagttaccataaaggttaaaaaaatgatagaaaactatcaatattacctttactcatttctctttctcctgaatttcacttaacacctgaaatgtggttcttacattattgacgtgttgttagtcttgaaaactagattgtaagctctttgagggtaagtactgtgtcttacattttttttcctctcatcataggacatgcagtgggcactaaaggtttatattaaagatttatgttactaattagttgtacttgttccttt

SEQ ID NO: 13648 - DNA, 576 bp, Homo sapiens
tgtgttcagtgagacctaaggtcagacttcttgatctcccagtggctgggtttttgtgtgtgtgtgtgtgtgcrcggttttaaactttagaaaaaaattatgatatcaaatgttctctttagattgcaccctccacttgggaagaggtgccatcacagaagtaaggacacaatatccttactgaagtgaagaaatacagccttggtgaacaccaaacacaagagactaatatctgaagatagaaactgtgcgggacttaaatgatccaattcagaggcattcaagtgctatggatgaggggtcatcaagactaaaagaatttataaaattaactatttttaatttctccattttgttcatgtgttaacttctatttcttctcagtaatcagcaacaaaaccttaaaaggaaatgggcctacggaaagtgaggagtcagaaaaactgcattccattccacagacagccttgtgaggagatgcatttcaattactagaggtagtctctccagctactaaaggtaaggaaaatatgctaagaatctgagatctgcagtcaaattaaataggagaacacg

SEQ ID NO: 13649 - DNA, 670 bp, Homo sapiens
gaaattatcatttctttctttagaattattcagtaacaatttatcatttcaagataaagctttaaattatttttataatgtgcaagatgatatacaagttagttcctgcttatttctttttccttcttgacagataccttttgtgccactaaattttatgtggtttctttagaagataccatgtctctcttgccacatgtcatcttgygtttgttgtttcctgcaagtgaactgaccttctctatttcttggcctgcctaaaccttttccttaagattcagctcagtcatctcttatgtgaaatcttgcagttgcattaagtgcttccagagcaaccagtctgtttagcaagctttttattattatctgcttgattttctcatgctagactttgggttcaagaaggcatactctcctgatttataaatttccggtgtctaacatgagatccaacatacttcaggtgctcaataacattggttgattgaatgcattcatgaatgaatgatagaatttcatactcattagcttactgaaaatttacaagatgttctatggggtgtgatttctgtattattataataacagttttgtataaattaagaatgcattcacatatagtagctcatccaatgctaataggagactttgattatggataaactaggta

SEQ ID NO: 13650 - DNA, 670 bp, Homo sapiens
gaaattatcatttctttctttagaattattcagtaacaatttatcatttcaagataaagctttaaattatttttataatgtgcaagatgatatacaagttagttcctgcttatttctttttccttcttgacagataccttttgtgccactaaattttatgtggtttctttagaagataccatgtctctcttgccacatgtcatcttgtgtttgttgtttcctgcaagtgaactgaccttctctatttcttggcctgcctaaaccttttccttaagattcagctcagtcatctcttatgtgaaatctygcagttgcattaagtgcttccagagcaaccagtctgtttagcaagctttttattattatctgcttgattttctcatgctagactttgggttcaagaaggcatactctcctgatttataaatttccggtgtctaacatgagatccaacatacttcaggtgctcaataacattggttgattgaatgcattcatgaatgaatgatagaatttcatactcattagcttactgaaaatttacaagatgttctatggggtgtgatttctgtattattataataacagttttgtataaattaagaatgcattcacatatagtagctcatccaatgctaataggagactttgattatggataaactaggta

SEQ ID NO: 13651 - DNA, 549 bp, Homo sapiens
catttatatatgagaatcatctttctaaaatttaatttttactttggaaactaatcacgaccatgtgaaatatctgtttgttgttgttgttgttgtttgtgtagcaagccactaactgaaaataggctagaattatgattatttccaaaaggtttaatggtcacaataatctatcaacctctttcaaattcttatcacatctcagactctgctaggagagcttttccaaactagagattaccctgccctgcctccagagattatggcttaataagtatagcatcctgagtsattctgatgtatccttagttttggtatccactgtggtagactgcttgcttatcaacatatcagtaagtattcagtatctgtcggaagccaaatggtttgcaaagaagacttacttttttcctaaagaagcttatatactccttagtgaaataaaatgtgttttggtttaattttgcttgttattttgaacaaatacttattcaatacagttcaaatatctcttatccaaaatgctctaaaggctttgtattttgggtt

SEQ ID NO: 13652 - DNA, 549 bp, Homo sapiens
catttatatatgagaatcatctttctaaaatttaatttttactttggaaactaatcacgaccatgtgaaatatctgtttgttgttgttgttgttgtttgtgtagcaagccactaactgaaaataggctagaattatgattatttccaaaaggtttaatggtcacaataatctatcaacctctttcaaattcttatcacatctcagactctgctaggagagcttttccaaactagagattaccctgccctgcctccagagattatggcttaataagtatagcatcctgagtgattctgatgtrtccttagttttggtatccactgtggtagactgcttgcttatcaacatatcagtaagtattcagtatctgtcggaagccaaatggtttgcaaagaagacttacttttttcctaaagaagcttatatactccttagtgaaataaaatgtgttttggtttaattttgcttgttattttgaacaaatacttattcaatacagttcaaatatctcttatccaaaatgctctaaaggctttgtattttgggtt

SEQ ID NO: 13653 - DNA, 498 bp, Homo sapiens
gtcctaaaggctgagaaccaagtcattctgctatttctgctgcatcaggcacaggtgggggcttyacaaaatgctgtggaaagtaactgaccgacatatctaccaagccagcccagttatggtttagcactgtctgagacatcaggcgaggggttgggggcaagacacccagaggagggtcctgccctcaggagatctcccagaggagaggtcagggaaccctgaggacagggacctttgggctttgctcaccctcaatccccagcatttaaacagctcctggcacatgataggcactcaacagccattggctgaataaatgaattaacactcattgacccaaagtgctgagctcaccatataaggcagggtggtgctgaacgctgacctggctgcatggtgagtcaaagctttggagcccacaggcgagaacaaagcgagagaactggggaagggccagagtttgtggtgacaaaaccaacaagggcagctggctgg

SEQ ID NO: 13654 - DNA, 498 bp, Homo sapiens
gtcctaaaggctgagaaccaagtcattctgctatttctgctgcatcaggcacaggtgggggctttacaaaatgctgtggaaagtaactgaccgacatatctaccaagccagcccagttatggtttagcactgtctgagacatcaggcgaggggttgggggcaagacacccagaggagggtcctgccctcaggagatctcccagaggagaggtcagggaaccctgaggacagggacctttgggctttgctcaccctcaatccccagcatttaaacagctcctggcacatgrtaggcactcaacagccattggctgaataaatgaattaacactcattgacccaaagtgctgagctcaccatataaggcagggtggtgctgaacgctgacctggctgcatggtgagtcaaagctttggagcccacaggcgagaacaaagcgagagaactggggaagggccagagtttgtggtgacaaaaccaacaagggcagctggctgg

SEQ ID NO: 13655 - DNA, 1327 bp, Homo sapiens
tttctctgcggcaccctcattgtcccggggaccctggggaacagctgtcctagtcgggcttccgaagctgaccttcttccttgttcctccttcttcgatccttgctgcacctgctcctgcctagctttgccacagcctgcagccttctccttgttcagacgacagcctcaccacccactgacttcacttatccaggttcacttatccagggaaacctcggtggctctccactgctggtctccttcttgagtggcttggtctgaatatctaggatatctttgggactttacttgccaacaatgctccctggatgtctatcaaataaggctacactccttctctgtgcctttgcccacacgctgtcctctcctgggaatgcccttcttcccttctctgcctgcttaaagcttccatgtttgaagacacctcctccaggagccctcccttcactgctccatagaaacactgtctcctcactctgggctccaaagcctgtggtctgccccttatcatttatctcggtgcctggctgtcctggacacaatggacagggcaggatcctggatggacacgtgaacctgggttcaaatgctagctttccttcctatcggcttagtaaccttgggcaagtagcttaacctctctgagccccattccttcatctgtaaagaggaataataaaattgccttcttgggttggtttaatgatcagagacaaagcccctacctctgagcaaatggtgcagcaaatggtgactcttaggtaattatttctcatttgactctagttgccttgtttgcaagagctttaccttccacctcctccaggaagccctccctggatttccaggcttcattcctccttcctgttatcaccaaatgacttcattaataagcacttttccctgcttagaatcgttatttgaatgatttttatcttctgtgctcgaaaaggcttataaggatgaatgacataattttatctcaaaaartccatctgcggtggctaaatgtcactatggatcactgttaacccagaatgatggctgggcaggggagagggacccaggagcaggcaggtcaccccaccgagcagagaagatgccggcaactgcagcctgtatgtagacaccaggtctgatagacaccccacctgggccttgattcttctttcttaaaagtcacctggtgggtctctgggatctgggacttgctggggataaagacaccctccccatctaatcacttgcaattagatgctcacccccacccagtagaggaatctgctttgtccataacctgcctgcccaaagagagcctgctgggc

SEQ ID NO: 13656 - DNA, 632 bp, Homo sapiens
aaaaaaaaaaaaaaaagagaaaagcttccatttttggacataagaattttttagacttaacccaaaatatttctatgtgttgatttggggaatgtatgaataaacgtccctggtcaggtttttctttttgtagaaaacgggaaaggtaagcaggtccatgcctgttgcatgaaagagatgctgggttaggattatgaagacagtggagctaggtttgtacacagccggagagaaatagtgattcagagctgttattattcctacaaggtcaaaagaaatggaaaaggtttgtaacccatgtactctattaccagcatgaacatacccataaatacatttgattcctttctagaacatctcaaagagtttggaaatatatgtacacagacaccatacaaagataaattttaaaatgtgagcttttagctttaactttctaaagcctacattaaagtgttcaaayacaaattttgttttgcgtatgtgttcttaacagacacaaatgacaggattctcataaaatgcttaaaggcagaaaaagaatataaaagataaataacttcaaagaaagatatttccttaacatatgtatattcatctgagtatctaataagtaaacaactgttcatgca

SEQ ID NO: 13657 - DNA, 626 bp, Homo sapiens
caatatctgccttaagtgtggtaacagagcatcacagttgggatgatgcattattggtaccatattgttgtatgtataggctgttttggcagcacagaagaggcatctgcctcaccctaagatcagaaaaaacttcccaaagaggccaggcacaatgtctctcacctgtaatcccagcaccttgggaggcctaggcagrcggattgtttgatctcaggagtttgagaccagcctggccaacatggcgaaaccctgtctctacaaacaatacaaaagttagctgggcgtggtgccgcatgcctgtagtcccagctattcgagagactgaggtgggaggaacgcttgagcctggaagggcggaggttgcagtgagccgaaattgccccattgcactccagcctggatgacagagccagaccctgtctcaaaaaaaagaaaagaaaaaagaagtcccaaacagagtgagctagacattgaaaaggttctaagcaaaggaacagcatgtgtgaaatggcaaggcttttggtgtgttaggttatttgggatcgggggaatcttaaagcttaaaaatggagttaagtttcttagaatgaacatgcattttatgattttttaaaattggtttc

SEQ ID NO: 13658 - DNA, 626 bp, Homo sapiens
caatatctgccttaagtgtggtaacagagcatcacagttgggatgatgcattattggtaccatattgttgtatgtataggctgttttggcagcacagaagaggcatctgcctcaccctaagatcagaaaaaacttcccaaagaggccaggcacaatgtctctcacctgtaatcccagcaccttgggaggcctaggcaggcggattgtttgatctcaggagtttgagaccagcctggccaacatggcgaaaccctgtctctacaaacaatacaaaagttagctgggcgtggtgccgcatgcctgtagtcccagctattcgagagactgaggtgggaggaacgcttgagcctggaagggcggaggttgcagtgagccgaaattgccccattgcactccagcctggatgacagagccagaccctgtctcaaaaaaaagaaaagaaaaaagaagtcccaaasagagtgagctagacattgaaaaggttctaagcaaaggaacagcatgtgtgaaatggcaaggcttttggtgtgttaggttatttgggatcgggggaatcttaaagcttaaaaatggagttaagtttcttagaatgaacatgcattttatgattttttaaaattggtttc

SEQ ID NO: 13659 - DNA, 525 bp, Homo sapiens
tagatccttgaggaatygccacactgtattccacaatggtggaactaatttacactcccactatgatgttttgaaataagtatacactgtaaaatgactaaatcaagctaattaacatattcattttctcacatacttatttgtctgtggtgagaacgctaaaaatttactctgttaatgatttccaagtatacaataaattgttattaattacagtcacgattttgtacaatagaactatgggagagcgtacaatattcaaaaatcaagcagtgatgtaagtgttaggaatggagggacacatagtaaggatattctataaagatattttaaataaccaaagagaaaaaacagaacagacaagattataaatattttcaaatgctcagattcagttttctgaacaatttggtcaagtatggatcaatcgaatgtgagtacttccagaaattttgaaatagaatacttgacctttagttttttaattatttgcacctaggtctgaaagacttagtcaaaatgttt

SEQ ID NO: 13660 - DNA, 525 bp, Homo sapiens
tagatccttgaggaattgccacactgtmttccacaatggtggaactaatttacactcccactatgatgttttgaaataagtatacactgtaaaatgactaaatcaagctaattaacatattcattttctcacatacttatttgtctgtggtgagaacgctaaaaatttactctgttaatgatttccaagtatacaataaattgttattaattacagtcacgattttgtacaatagaactatgggagagcgtacaatattcaaaaatcaagcagtgatgtaagtgttaggaatggagggacacatagtaaggatattctataaagatattttaaataaccaaagagaaaaaacagaacagacaagattataaatattttcaaatgctcagattcagttttctgaacaatttggtcaagtatggatcaatcgaatgtgagtacttccagaaattttgaaatagaatacttgacctttagttttttaattatttgcacctaggtctgaaagacttagtcaaaatgttt

SEQ ID NO: 13661 - DNA, 525 bp, Homo sapiens
tagatccttgaggaattgccacactgtattccacaatggtggaactaatttacactcccactatgatgttttgaaataagtatacaytgtaaaatgactaaatcaagctaattaacatattcattttctcacatacttatttgtctgtggtgagaacgctaaaaatttactctgttaatgatttccaagtatacaataaattgttattaattacagtcacgattttgtacaatagaactatgggagagcgtacaatattcaaaaatcaagcagtgatgtaagtgttaggaatggagggacacatagtaaggatattctataaagatattttaaataaccaaagagaaaaaacagaacagacaagattataaatattttcaaatgctcagattcagttttctgaacaatttggtcaagtatggatcaatcgaatgtgagtacttccagaaattttgaaatagaatacttgacctttagttttttaattatttgcacctaggtctgaaagacttagtcaaaatgttt

SEQ ID NO: 13662 - DNA, 525 bp, Homo sapiens
tagatccttgaggaattgccacactgtattccacaatggtggaactaatttacactcccactatgatgttttgaaataagtatacactgtaaaatgactaaatcaagctaattaacatattcattttctcacatacttatttgtctgtggtgagaacgctaaaaatttactctgttaatgatttccaagtatacaataaattgttattaattacagtcacgattttgtacaatagaactatgggagagcgtacaatattcaaaaatcaagcagtgatgtaagtgttaggaatggagggacacatagtaaggatattctataaagatattttaaataaccaaagagaaaaaacagaacagacaagattataaatattttcaaatgctcagattcagttttctgaacaatttggtcaagtatggatcaatcgaatgtgagtactyccagaaattttgaaatagaatacttgacctttagttttttaattatttgcacctaggtctgaaagacttagtcaaaatgttt

SEQ ID NO: 13663 - DNA, 564 bp, Homo sapiens
gaggtagttttacacattggagcagcaaagtgtccacctgttaggctcctaactcctacgatrttgagagataagggctttatcttttttcatgagtacatttcaaaggatagctcccaggtgcttgagaaagacattcatgggttgcaaaactgaccagaggcttttaaagtttgttttatttttggatttaaaatagacatttatttgtctttcagacagcattctgaggtaagcagggatggcagatgagcagatggctttacctgttttgtcctttaggcacccagcttcttgctatctgactgctctaccattgcttaaagcagtactgcccatgagaagtttctgtgatgatgggaatattctataatttgcattgtcttatatggttgagccacatgtggctattgagtacttgaaatgtggctagtgaggctgaagaactgaatatgtgatttatttaattttaaccaattacttaaatttaaatagccacatgtggctagtagctgtcgtattgcttagaatagctctagagcattgtttcttggttttgtgtgg

SEQ ID NO: 13664 - DNA, 633 bp, Homo sapiens
gcaatcccagcactttgggaggccgaggcaggcggatcacttgaggtcaggagttcgagaccagcctggccaacgtggtgaaaccccgtctcaactaaarattggaaaaaattagctgggcgtggtagcgcatgcctgtatcccagctactcttgggaggctaaggcacgagaatccctagaacctgggaggcagaggttgcagtgagctgagattgtgccactgcactccagcctgggcaacagagtgagagactctgtcttcaaataataataataatgataataataagattccctttagctcaaaccatgagcagagtggggagacttgtttgggtgggagctggggtccagatgctttggctagtgaatgtggtcatctcccctccattaccaatggcttctacagatttaatatttaattaatattaaattccctcttttgaaataaacagttagattgttgcctcctaactggactctgactaatacaaggagaaattttgttttatagattacttttacctaataaggttctgcttcatctttggggaagatactcactgccagaaagaagaggaaatataggaggaaggtgcagtccatgattggagccaggctggcagaggtc

SEQ ID NO: 13665 - DNA, 807 bp, Homo sapiens
atcccagatagctcattagattagctccagtgatctccatcctgtaacatcccacacttgtcatcagcaagcaatgaccccagaagaagtcgacctctcagccctcaggagctcacagcctagatagggaaataagactcactcaaagcacgggtgtctggggctcaagtgccatagaaaccagaagaggcagtgtggagcgctrcaagtggagagaaaattttcgaatttcagaccctaacaaccctattattggatttattttttatttttatttttttgttccatcgcccatgctggagtgcaatggcgtgatctcactgcaacctctgccttccaggttcaagcaattctcgtgcctcagcctcctgagtagctgggattacaggcgtgtgccaccatgcctaatttttgtatatttagttaagtagagacggggtttcaccatgttggccaggctggtctcgggttcctgacctcaggtaatccacccccatcgacctcccaaagtgctgggattacaggcatgagccaccgcgcccagcctggagtaatttattaagctgaacaatgctttattctttcctcaattctaagtcataacccatggtgggcaatggccatatacactcatttgatttcttatcaagatggagacaaagagaaccagcattctttaagcacctactatgcgtcacataccaggttgggcaccttcacatccatgtcctgcttcagtgttcctgcctaggcagtcagacagtgaggtgaaacatggaagtcttggcaggttcacgaggcagcttg

SEQ ID NO: 13666 - DNA, 807 bp, Homo sapiens
atcccagatagctcattagattagctccagtgatctccatcctgtaacatcccacacttgtcatcagcaagcaatgaccccagaagaagtcgacctctcagccctcaggagctcacagcctagatagggaaataagactcactcaaagcacgggtgtctggggctcaagtgccatagaaaccagaagaggcagtgtggagcgctgcaagtggagagaaaattttcgaatttcagaccctaacaaccctattattggatttattttttatttttatttttttgttccatcgcccatgctggagtgcaatggcgtgatctcastgcaacctctgccttccaggttcaagcaattctcgtgcctcagcctcctgagtagctgggattacaggcgtgtgccaccatgcctaatttttgtatatttagttaagtagagacggggtttcaccatgttggccaggctggtctcgggttcctgacctcaggtaatccacccccatcgacctcccaaagtgctgggattacaggcatgagccaccgcgcccagcctggagtaatttattaagctgaacaatgctttattctttcctcaattctaagtcataacccatggtgggcaatggccatatacactcatttgatttcttatcaagatggagacaaagagaaccagcattctttaagcacctactatgcgtcacataccaggttgggcaccttcacatccatgtcctgcttcagtgttcctgcctaggcagtcagacagtgaggtgaaacatggaagtcttggcaggttcacgaggcagcttg

SEQ ID NO: 13667 - DNA, 635 bp, Homo sapiens
tttatttcaagtggcttcaggtttcagccttgccaaaaattagaattaaaattttaaaatgaattaaaatcacaggaattatctaggtcctggctacctgcttgaaatggcagaaggaacaaatatagaaaaataagcacaattaatattttaactcatcacacagcaattgaaccttattcctttcaacctcattaattccragtagcaataatttagacacatgtcacaaataagtaaatattgcaaaagaaaaccacattctttagcaaatcctatttgtattcaatttatttcctggttacaaatgagtcctctagtaaggttggttcaagtaatctatatgatagtatgtagttagctcagatgatgttgtaggtgaaggttttatgtcaattttattttagagattcaccaacaatggcctatttttgtagtatatatattactcacaactaataagcttcaacccttttatctacctagtaaagattaatctcacacaactagctatatgaaaatcaaatataaatacagtaaaattcaattcaaagtttaaaatatatatatatatatatatacatatatatatactgggcaactattatattaagagccctatgcaataccctgag

SEQ ID NO: 13668 - DNA, 519 bp, Homo sapiens
gcaggaatgaatgaatgcttatattttctcagtccatttcaaattaatgtggtgtggaatggtcagaagagattktactgatggttgtcctcctgttcaatgagttctgttaaatgatccctgtaagagacatccttcattcctggctcacaaaaattgagttttgagtagcattgtttttagtgtacagaattcaacagatggtaccaaatagccaatattttaaacaacttcctgagggtagatctccagctgagcatccctatcaccctcattttcatctactttcactgtgttcattcattttaaaattatcgtgtgagcagcactcacatttccctagaagaagatgtaactgtgcatattagcaaatctggagctgaagtatgagtttaatattggccactttttttctcgtgttgtctttaaacaatgccatttttaaaaatgattgttttccattttacattcaaagggtggctacttactgttttgcaactcaactcagcaaagaaaaaa

SEQ ID NO: 13669 - DNA, 634 bp, Homo sapiens
actgagtttcaggttgaaaatgttgttataaagatacatagggcacacctgggcgtcgatctttctatgtggttcctatgacggtgcctgtggcccttagcatctggccatcacctgcactctgagcctgatctgcaggtcccctcaccacagccctgcacccctgttacatgaaggaattcctgggtcccccaaataggtcttatgtcttttaaaaagtcccctctgtcagaattcttcaccttttttctaggcctgttaaatttctatatatcatgtaggaactggtcaaactataaccccaagccttgacagtccattgccgagtttgtatttcactccctgggctccctgtggctcggagcctggcccctttgtcagcacttgtcacagttttagtcatccagaagatgctgtctgtgtgtgaagaagcatctctgtaacccacatgtccaagatgaccctcttctgacatgttccctcacagtcatggtttccactgaaatcacagatggcraaggctccaaggtccagccgtgcactgtggtggtgactgtgctgccccgctaccatggaaatgactgtctgggcgaggacctgtgagtaacacaatgccacacagacatcctagcca

SEQ ID NO: 13670 - DNA, 548 bp, Homo sapiens
ggtggattgatgggtgagcctggccccgcacagaatggaaaatacattcacacaaacatctcagtcaaaactgtcaagacagaaaagctagaaaagactcattgaaaaggaattcaatttggacatggtggctcacaactgtaaccccagcactttgggaggctgaagcgtgaggattgcttgggcccaggagtttgaaaccagcctgggcaacatagtgagaccctctctctgctaaaaagaatttaaaaattagcctggcatggtggcacacacctgtagtcccagctacttgggaggctgaggtgggaggattagawtgagcccgggacgtagaggctgcagtgagcagtgattgtaccactgcactccagcatgggcaacagagtgagattctgtcaaaaaaaaaaaaaaaaaaaaaaaagcattaatctttagcaaaattaaaaagcttctgaccacaagaagaaacgtctatgtcgccggagctgggaattaggagaaataaaaataagacagagggaatcaaagacaggagagaggatgat

SEQ ID NO: 13671 - DNA, 548 bp, Homo sapiens
ggtggattgatgggtgagcctggccccgcacagaatggaaaatacattcacacaaacatctcagtcaaaactgtcaagacagaaaagctagaaaagactcattgaaaaggaattcaatttggacatggtggctcacaactgtaaccccagcactttgggaggctgaagcgtgaggattgcttgggcccaggagtttgaaaccagcctgggcaacatagtgagaccctctctctgctaaaaagaatttaaaaattagcctggcatggtggcacacacctgtagtcccagctacttgggaggctgaggtgggaggattagaaygagcccgggacgtagaggctgcagtgagcagtgattgtaccactgcactccagcatgggcaacagagtgagattctgtcaaaaaaaaaaaaaaaaaaaaaaaagcattaatctttagcaaaattaaaaagcttctgaccacaagaagaaacgtctatgtcgccggagctgggaattaggagaaataaaaataagacagagggaatcaaagacaggagagaggatgat

SEQ ID NO: 13672 - DNA, 556 bp, Homo sapiens
tgttttgaaagagtaaattgagggtaacaactraaagcctttaaaatgtgttatattttgatgaggcaagtgcatttctagcaatttatttttctgaagtaattcaataatgtgaaaagggtatgaaaaaatagttttttatcaaagcattgtttatgacagaaaactgtaaataatctaactgttcaataatctgtgatttttgaacaaattatgatacatccatggaacagaatagtatgtccttctaaaattgccatagaaagatgtttagaatacattgtgaattttaaaaagatggtcttactataatatgtactatcatcctactttggctaaagagttcatttctatgtattgaacaaagcctggaagaatatacacaaaaatgttgctgttattttaatcaggtactggaattttaaaagttttttatttcttttcctttacttgtgtttttcttcctttagaccatgaaacattatgttttaggtagtaaaacataaatttaaaaagaaaagtatttgaacaccatgctgttacaaatttaatgaga

SEQ ID NO: 13673 - DNA, 547 bp, Homo sapiens
atagaaaaattagccgggcatggtggcgggtgcctgtaatcccagctactcaggaggctgtgacaggagaatcccttgtacccaggaggcagaggttgtagtgagccaagattgcaagactgcactccagcctgcgcaacagagaaaactctgcctgaaaaaaaaaaaaaaaaaaaaagtgatctcttcatatcacgtaaccaaaaaattcatacctgaccttgagttttcccaggacgggattctgtgacataaacccttccatgcttctaccttaaaatgtctactcctgtgtttatttatggtttagtgttgagagcatgggctcgggagtcagattgcctgggtccaaatcctagcgttactttttaacgctgtaacctctctgagcctcattttctcctctcaaaaygagagtgggatggtcctacccttacaatgtgctgagaggattaagtaagatcacacaggtgagctgtttagcataggacttggaacatatgttagctagtatgataataaaggggcatgtatatccattcaggca

SEQ ID NO: 13674 - DNA, 531 bp, Homo sapiens
ggggcttaccggcatagcaatgaggttatgcaatttttcacagtgatagagaakttagtgagaacttgaggttgagttttgcttatttaagatgtttgattttcccatagaaccaacaaataaccaagaggaaaaagaaaaaaaaacaagattatttgcaaggggcaccgtattacttgaaagacggagatactattggtgttaaggtaagttgtttaacagcaaatttaccactttgagaagacacgagggtcacatgattttatagagacgttttattgaatcttcaagacacagattatcccattttatacaaattgtttcagagaatggataaaaaagagggaaaactggacaactgactttacaaggccactgaaacctcagtatccaaactgccaaggacactaaaataaaatacagaccagtttcacttctgaccatacatggaaaattctaagtaaaatactagcaagttcagcccagcaagtatgtttttaaaaacactactgtgtgacatgacgtcacagt

SEQ ID NO: 13675 - DNA, 1249 bp, Homo sapiens
cccctttttcattcctagcactcactgataatatctcaagtagatgacttttaaagtttgtttaatatgctgttttaaagatgtgaggtcttctttcatttattcattcatccttaataaatgatttgttataattcctgctagggacctgggtcgagtactttaattatattgatctatgactattgtatgaatttactagggctgccatgacaaaatgmcacagactgcatggcttagatgatagaaatgtattttctgacagttttgaaggctggaagtccaagattaaggtgttggcagttttggtttcttctgaggcctctctccttggcttgcagatggccgtcttcttcctgtgtcctcacatggtgtttcttctgtgtgtgtgcttccctggtgtcactttgtccaaacttcgtcttcttatgataatgccaatcagatttacttagggcctactctaaaatggaaaacagcctcgttttaccttaatcacctctttaaaggtctaatctccaaatgtggtcacattctgaaatattgtaggttaggaattcaacatatgaattttggggagatacaattcagtctgtcaccgctacatctcacccccttttagaacttgtttatacttcaaaacatttagataagacattaatcatctttgtttttgtacttacgtatctcttccaaaattcttgtttaatatcagtaatttacacatttaaatggaaaattcctttttaatgttgggaatttacgaaaccttgagctacttttgatattgctcttcaaatggaagatggcacatggaaaatggcaaaaatccaagttttctcaactgaggcttaaccagtttttaaaaaactttttataataaaataattatgatggaatcaacttacgtgtttgctgttctaggcatatttaattaggtataatcctgttggtctctttgaatttgttaagtatgcaattatttctcatcagattttcttgagtgactgtgtttctctcataaggaggagaataatctaattcctgttgatcagctgggccagaaacttttgaaaaagataggaatatcttggaacaagaagtacagaaaacagcatggaccactgcggaaggtaatacatggcatcgttttgggaagtcctagtcccaagaaatttcattatgatcgcaacaacatgaattcctttgcagaaggatatttaaaataggtgaaaataaaatcaccgta

SEQ ID NO: 13676 - DNA, 560 bp, Homo sapiens
tttacaaaagctctaaaaattagaaagtttttttttaattagaaagttttgcatatttattactccattccaggtgtaaaatcctgttaattctctcaaaatcatatttaacttcaattgtttcatgatactatatagcattaagttttccactcgattttaggttctgcttacatcaaccaatcaacagattaattgagcatttactgtagagatttcagaataaatatagaagcctaaacaatgggattaaatacaaattctrtgtacagataaaaaacatcttaactagaaaaaaatgaatttatactattcattctcgtgtgtgtgcatatatgtgtgtgcatatacctatatccacacctttgaatgaatagcttactttataggctacgtattctaaagacagccctagataagatctctctagacctctccgtatcaacacatcatatggctgagcctggatttaaaggagtgtcttcctgttctttgttgctctttactgtttccaaatcaagaccctccctcccttctgggcctccttaactttgcatctc

SEQ ID NO: 13677 - DNA, 547 bp, Homo sapiens
taaaaacagaaaattaaaaaaaagaaaacctatggtattcttggaagaagcacagtggtgaagtggagtagacacagatgtggaagtgatgtgaactttggtaagttgctgagcctctgaggatgatttccctcatctgtcaatcagggaacaaaatcccttacttgtacaatgagtattataaagatcaattcagatgacgcatgtaaagatgcaatgtgggactggtaggtagtaagcatcccataaatggcagctattaataagtaataatcacckagtggtgggctgcctttcatgaaaacattcccagcaagctgctcttctgtcggctcaaagtcacttctcagagtaaatgagattggccagttctttctttccaaggcttttctggatattcatttgtcccagatttctcctgtatacaaagctcaggagtgaggacccccacagtggggcttgcacaaggatagccttggggggctttttctaagagctatgactttgaatgctctcttcatcgatgctgacagatgagggctgatgg

SEQ ID NO: 13678 - DNA, 551 bp, Homo sapiens
attgactcaaaagacagtccttttatgaaaattatttacttaaatccttacaaagcttctattcattcacccaacacatatttattgagttcctactatgagccaggcattattctaggtgcttaatttagatcaagggacaagacagacaaaatccctgttctggtggcagggctactacatgcaattaacagcacacaactctagggggagccacatacatgggccaccttatgaatggtgtgccctgaggttaagcatcctggcagcccctttctgtgacatttgcattytagtgaagggagtctaataccaatgaagtagatgtcattatcccctgactacagtttaggaaacagagacacataggaattaagtaacttgctgagtttttcagccaaaaatgactgacccatgatttatactgaagtcagtccttgcaattcacctgtgccacgtacttgcctttctctccctggtgggcacagggaagagggagtagccaggctggccagatgagtgctgggctggctggcccagtagaggcacca

SEQ ID NO: 13679 - DNA, 561 bp, Homo sapiens
caacttcctcctgatggcagaccctgaccacggactgctgctggctgttctagagaggctgggcactctgcrgcattcacagctcctcctggaacctgctgaggacgcgtgctccgcacaagctcctgccctacccttcctcctctgaggtgcttccgggcctgtcagggctggccagcctgcaggctgcaaccctataaggataaggaatagtctcctttctaaatgtgcagatcttatgattcaccaattgagcacccgaggttaaaaccacacagtgtccttattacaagcatcagccctgtggtccttgttaagcagtttctagcctgtcctacccgaatttgcatgtcccgtctcaaagcctcatgcaagccacgtgctctcttcccatctgatgagactgcagcgcccttccttccatttctctctgctcaaggatggaacacagacccccaaaatgacaactggtcttgtttgttcagtggcccctaagatcatttctacttcccaaattgagctcctgagaaaaagtgtttccttgtttaaaattctatttcc

SEQ ID NO: 13680 - DNA, 568 bp, Homo sapiens
tttgttagctcaatgactatccttagtgttagtgtattttatgtgtggcccaagacaattcttcttctttcagtgtggcccagggaagccaaaagattggacatttctagggtatatggggagctttagctgattctgtaatatttccatcctctaaaacagcatcaaatattactgggtgggtttttattgtattagtctctgtgcttgttacattttctctgtactgtaaaatatttcattattaaaagattctgtacacaagaattatgctcactcagaatgtattaaatgactacgtctttgccttctctcatacttagaaaygtcatatgacttgttctttacaccatcattccaaccatccttttctaagcattataattaattttcctgttttcctgtcattgtattcatgcttttagggctaaaattgccattggaagtgtatcagatattgtatgcatatatagttctaaatccactatgttctatttcacagatttaactttgattttgttttttagtgctttggtcataggctccattaacagctagcccatattgt

SEQ ID NO: 13681 - DNA, 569 bp, Homo sapiens
aggtgaatttccccttctctattaccctgcttggtgtcagttttctgctgcaggctctactacacgtctcataacaaaacacgagactgagtaacagaacttccacagggatgaggtagaatccatcacttattactaaatccatatctattaacaatagagtaaaatgtctttagtttctttatctgacaatggggactaaaatacctaattcttaaggttgttaggggaattcratgagaagaaaaaattaaattaaattaacatgaacaggaatgggtcctagttggctaagaaggctcattctactttttttcttttttaaaaaactttttttgttttcataggtttttgaggaataggtgttatttggttacatgagtaagttctttagtggtaatttgtgagactttggtgcacccatcacccaagcagtatacactgaacccaatttgtagtcttttatccctcacacccttcccatcctttccctgagtccccaaaatctattgtgtcattcttatgcctttgcatccgcatagcttccacttataagttagaacatacga

SEQ ID NO: 13682 - DNA, 524 bp, Homo sapiens
ctcttttatctattctattaccctttcttctttcctcattctattgctgaccttattatcaatgtaactaagtcagactcatcccaaatcattacctttgaggcttgccttgttatgccttgtgaagaggacgaacaatggcaaaggtatgtctctcctttagaaaaacacctctgccccttcagagaaaccactgacctcacrccttgctcatggtgggggtaccaaggcaccttaagttaggagatacgttctcaatgagcagatgtcatcctgactgccaatgaacacggcgagacctccccagaaggctgtaccaacctaaaatcttacctcctccttaccaaatgaaccaccccctctaattgccaactttaccattgtaacccagtaactatctctattaatgctgctacctctaccaaccatacgcttcctttagaaggcttttacggcttaggggcagaggccaatggatacgaccctgtaggcctctttaaaatacgctttattgaccctccttc

SEQ ID NO: 13683 - DNA, 524 bp, Homo sapiens
ctcttttatctattctattaccctttcttctttcctcattctattgctgaccttattatcaatgtaactaagtcagactcatcccaaatcattacctttgaggcttgccttgttatgccttgtgaagaggacgaacaatggcaaaggtatgtctctcctttagaaaaacacctctgccccttcagagaaaccactgacctcacaccttgctcatggtgggggtaccaaggcaccttaagttaggagatacgttctcaatgagcagatgtcatcctgactgccaatgaacacggcgagacctccccagaaggctgtaccaacctaaaatcttacctcctccttaccaaakgaaccaccccctctaattgccaactttaccattgtaacccagtaactatctctattaatgctgctacctctaccaaccatacgcttcctttagaaggcttttacggcttaggggcagaggccaatggatacgaccctgtaggcctctttaaaatacgctttattgaccctccttc

SEQ ID NO: 13684 - DNA, 522 bp, Homo sapiens
tttcctgttcccccttgtccctagttactgtaaaacagcctacctgcttcccatcagctctaatcaataactcacgtctgttcccttagttatctgcacccactgttcccccgaaactgcacatctcacaggcctcaccactgtacctcaagtcccccttcccttccatatttagaaagatatctgcaagtaacaaatcaggttagctcagactgtgcggtctgaccccggcccatgggggagtgacacagaagtagaaactaccattagagagagaacytcgctgctctcctttgttccctgtgctcttgtgatcttgattgatgtgagtggcacccttctgcagaagtaaattgccttgctaagataacttttgcctgagtgcgggtttcactttgtggcaccgagcatttattcccagaatatttttatacccaacaacaagctatatctatagttttttttaatttaagggaaagcacatttgtcattaatttgaaagagacagaactcagggaaaga

SEQ ID NO: 13685 - DNA, 522 bp, Homo sapiens
tttcctgttcccccttgtccctagttactgtaaaacagcctacctgcttcccatcagctctaatcaataactcacgtctgttcccttagttatctgcacccactgttcccccgaaactgcacatctcacaggcctcaccactgtacctcaagtcccccttcccttccatatttagaaagatatctgcaagtaacaaatcaggttagctcagactgtgcggtctgaccccggcccatgggggagtgacacagaagtagaaactaccattagagagagaacttcgctgctctcctttgttccctgtgctcttgygatcttgattgatgtgagtggcacccttctgcagaagtaaattgccttgctaagataacttttgcctgagtgcgggtttcactttgtggcaccgagcatttattcccagaatatttttatacccaacaacaagctatatctatagttttttttaatttaagggaaagcacatttgtcattaatttgaaagagacagaactcagggaaaga

SEQ ID NO: 13686 - DNA, 364 bp, Homo sapiens
attttaaaaattacccaagcatggtggcattcamgtgtggtcccagctactcaggaggccacttaagtccagaaggtccaggctgcagtgagtcatgttcatggcactgcaccccagcctgggtgacagagagagaacctatctcaaaaaaaaaaaatcatcatcatcatttcttaaaacaacattaatcataggtcacctttttagaggcaagcaggcattctgttaaacacagtccccatatcaattctatgggtcaagaagcccttgatgcccattacaggtaagtaaactttcacagagtgacaggactaagatttgaacctgggcaatctgaatcccaaggctgagtaaccacagcaca

SEQ ID NO: 13687 - DNA, 574 bp, Homo sapiens
aagaagtttctttgtaattctcctcacccttgagaatgtactttatgagatccacctcctgcccccaaaacactgctcttaactccaccgcytatccccaaacctataagaaccagtgataatcacaccaccctttgctgactcctttttcggactcagcccgcctgcacccaggtgaaataaacagccatgttgctcacacaaagcatgtttggtggtctcttcacacagacatgtgagacaggagttcgagaccagcctggccaatctggtgaaactctgtctctactaaaaatacaaaaattagctgggcatggtggcgggcacctgtaatcccagctacttgggaagctgaggcacaaaaattgcttgaacccaggaggcagagtttgcagtgagccaagatcacactgtcaggcctctgagcccaagccaagccactgcatcccctgtgacttgcacgtatacatccagatggcctgaagtaactgaagatccacacaagaagtaaaaatagccttaactgatgacattccaccattgtgattagtttctgccccaccctaactcttca

SEQ ID NO: 13688 - DNA, 619 bp, Homo sapiens
tgtgcctcacataaaattttgttcctctccttttcaaccagagatgtttcataggaaatttctcgacaacactaaaaaccgcgtgacatctgcttttcctaataaaagtaatatttccattgcactggtaaagaatgatcatggaaaagatgaaaataactgacaagatattttgaaaaagtgattatgaatgtatttttaaatacaaaaacgaaagttgttaatacagaatgcgaacatgcgaagttggttttagatgatgtttatgtgaaattataaaaaagaaaactgcatacaagtattaaagatatttggaccttaaaacaaaaacacaaaagcaagaatgaatattaccaggaaagcctgaagctgttaagtgytcttgatcagcaagcagaatgactggagagaaaagcctttcttatgcaaaagaactgcattcctcaaacagctccagagggaagacagggggcggctggccttgccactgcagaccccacagaaggctctgagctcagctgcagtggatgtggccccgcccttggtgggcgtggtctgcagcaggacgaccgcattcatggtacaactgcgcttgcgcaagaaggatgtctgcaggggt

SEQ ID NO: 13689 - DNA, 659 bp, Homo sapiens
ctctgttgcccaggctggagtgcaatggtgcaatcttggctcactgcaacctcctcctcctgagttcaagcaattctcctgcctcagcttcctgagtagctgggattacaggtgcccgccagcatgcctggataatttttttgtatttttagtagagacggtattttgccacattggccaggctggtctcaaacttctgacctcasgtgatctgcctgcctcaacctcccaaaatgctggtattacaggcatgagccactgcgcctggccctagagtaacatttcttaatccggtcctagaatgtgttttccatacaaaaaaagatattctaaaacacgtgatgtaagtaaagacttcaaagatagactcagtcaaaatcaagtttcatccattcctttcttgtagggctttagatcaaattcactaggtgattgggagtaaaactagtgccgacctcttgagatgctgtgaggatgaaatgaactaataatccataaaacctgtagattaatatcatctatacaaatgaatgtagtatttgctgatactgacataaatagtaattgcaaaataaattattcacatcaattataggttgcatcattactttacatttcacaatggagaataaaaccactgacaaatcagataattatgt

SEQ ID NO: 13690 - DNA, 563 bp, Homo sapiens
ggggaccctggggtgaaagttccccatcaggcattaccccactgcctacatccagccagataacccaaccacctgaattaccatcctcatatttagttggtgatccagagaagagatttcctctagtattccctaaaggtatagcaagaaaaaaagagattccttgatcactcctgcctagtcaatgcactggaagactggttcacagggctactgtgctttgtaattggagacatgagaatccacaatgattagaragctcgggccccaggtactgtcagagtccacagtctacctcagagaggaggaggcagattaaaggaaaagcaaatttcattttcctactcagaaatgattttctactaattgaaaagcaattgaatgctgtcaataaagacatttcctgtactaaccttggactcagagtattgatgaccaactatacaaagcttatttcttccatgcaatggatgatacctgcctgcctttgcaggtattaaggggtatgatgctgagagtccaggtgtagaagatgggatcacgggttttgggcaaagcatttt

SEQ ID NO: 13691 - DNA, 548 bp, Homo sapiens
agctgggactacaggcacatgcaaccacgcccggctaatttttgtatttttagtagagacggggtttcaccatgttggcccggatggtcttgatcacctgacctggtaatctgcccgcctcggcctcccaaagtgctgggattacaggcgtgagccactgcacccggccaagtatataaacttttgatggacctttttggtggttgagaaacaggcacacccagttcccgtctcttgtctttcccccratgccctaatacaggtggaaaaggctggatactcccagccaccccccatcagcgagggctgatgaggaagacacagctctgaagaccagatacaggatgaagtatgcagggtgtggggaggttggggaaacacgcctccctgaccgaaatgcgataatcccccaaggagatggctgtttctgcaacaatgatgggaaggctgaaaaatcagagctgccgtccagctcccaaaccctaaatggacgtgctcacctggccctgaatctgtcccctgcatccttcacaagtgaacaatctcca

SEQ ID NO: 13692 - DNA, 548 bp, Homo sapiens
agctgggactacaggcacatgcaaccacgcccggctaatttttgtatttttagtagagacggggtttcaccatgttggcccggatggtcttgatcacctgacctggtaatctgcccgcctcggcctcccaaagtgctgggattacaggcgtgagccactgcacccggccaagtatataaacttttgatggacctttttggtggttgagaaacaggcacacccagttcccgtctcttgtctttcccccaatgccctaatacaggtggaaaaggctggatactcccagccaccccccatcagcgagggctgatgaggaagacacagctctgaagaccagatacaggatgaagtatgcagggtgtggggaggttggggaaacacgcctccctgaccgaaatgmgataatcccccaaggagatggctgtttctgcaacaatgatgggaaggctgaaaaatcagagctgccgtccagctcccaaaccctaaatggacgtgctcacctggccctgaatctgtcccctgcatccttcacaagtgaacaatctcca

SEQ ID NO: 13693 - DNA, 548 bp, Homo sapiens
agctgggactacaggcacatgcaaccacgcccggctaatttttgtatttttagtagagacggggtttcaccatgttggcccggatggtcttgatcacctgacctggtaatctgcccgcctcggcctcccaaagtgctgggattacaggcgtgagccactgcacccggccaagtatataaacttttgatggacctttttggtggttgagaaacaggcacacccagttcccgtctcttgtctttcccccaatgccctaatacaggtggaaaaggctggatactcccagccaccccccatcagcgagggctgatgaggaagacacagctctgaagaccagatacaggatgaagtatgcagggtgtggggaggttggggaaacacgcctccctgaccgaaatgcgataatcccccaaggagatggctgtttctgcaacaatgatgggaaggctgaaaaatcagagctgccgtccagctcccaaaccctaaayggacgtgctcacctggccctgaatctgtcccctgcatccttcacaagtgaacaatctcca

SEQ ID NO: 13694 - DNA, 548 bp, Homo sapiens
agctgggactacaggcacatgcaaccacgcccggctaatttttgtatttttagtagagacggggtttcaccatgttggcccggatggtcttgatcacctgacctggtaatctgcccgcctcggcctcccaaagtgctgggattacaggcgtgagccactgcacccggccaagtatataaacttttgatggacctttttggtggttgagaaacaggcacacccagttcccgtctcttgtctttcccccaatgccctaatacaggtggaaaaggctggatactcccagccaccccccatcagcgagggctgatgaggaagacacagctctgaagaccagatacaggatgaagtatgcagggtgtggggaggttggggaaacacgcctccctgaccgaaatgcgataatcccccaaggagatggctgtttctgcaacaatgatgggaaggctgaaaaatcagagctgccgtccagctcccaaaccctaaatggaygtgctcacctggccctgaatctgtcccctgcatccttcacaagtgaacaatctcca

SEQ ID NO: 13695 - DNA, 548 bp, Homo sapiens
agctgggactacaggcacatgcaaccacgcccggctaatttttgtatttttagtagagacggggtttcaccatgttggcccggatggtcttgatcacctgacctggtaatctgcccgcctcggcctcccaaagtgctgggattacaggcgtgagccactgcacccggccaagtatataaacttttgatggacctttttggtggttgagaaacaggcacacccagttcccgtctcttgtctttcccccaatgccctaatacaggtggaaaaggctggatactcccagccaccccccatcagcgagggctgatgaggaagacacagctctgaagaccagatacaggatgaagtatgcagggtgtggggaggttggggaaacacgcctccctgaccgaaatgcgataatcccccaaggagatggctgtttctgcaacaatgatgggaaggctgaaaaatcagagctgccgtccagctcccaaaccctaaatggacgtgctcaccyggccctgaatctgtcccctgcatccttcacaagtgaacaatctcca

SEQ ID NO: 13696 - DNA, 532 bp, Homo sapiens
aatcgatcccacagttagagggcatgcattaggattcagatgctgttgtagaaaaataccaacaactgcgtggcttgaaacagcagacgtctgttctctcgaacttctggaggccaacagctgagatcaaggtatcagtaggcttggttccttctggaggctcagaggagacatcaggaaacttacaaacatggcagaaggcaaagtgagaacaagtgtcttacctagccagagcaggaggaagagagaagacagaaaaagtgttacacagttttaaacaaccagatctcatgagaactcggttactgtagtaccaagggggtaatggtgcgaaaccattcatgaaaaccattcacgagaactctgcccccgtcatccaatcacctttcaccagcccccctgctcatatcaattatatrgttggctctgtgtccccacccaaatctcatcaggaattgtaatctcacccaaatcgggagagatccattatacgtaattgaagtcacaattgatatacacaactaaagtctta

SEQ ID NO: 13697 - DNA, 565 bp, Homo sapiens
gctggaattacagtccaagtctcctgactttcagatcaaaataccttacaaactgtatgctacccctcagctagtggtttatgacattggctgtctagagaaacgtgcacggtctctgtgaccttcctcagttcaacaacaaaaccccagagggagcakcaacggtgcatcattaagataagagatctcacaacactgagctaggagatgatttctggaaatccctacaaaggaatctctgggataatgcttagatgctcacttctagcaaataaaagatgggatggtccttctatttttttaactttattaaaatactgagttttatttcacatgtatatttttgtctccccaccatttccgtgtctgaccaccactaccactatgtcctaccataacattccatacatacttaaaaccaagcaaagggtggagttccatctttaaaaactaaacaggcattttggacaacacattcttggccatggaacctggacaacatttatcaaacatggcagggaaagctgtcactctccattataaaaaggacagccagacatcagct

SEQ ID NO: 13698 - DNA, 538 bp, Homo sapiens
ataaaaattctagctttgttttaaccttacatcctaatgggctagagacttttgttaggtacgtggcaggcaatttttatttgtaaagcagaatatacacacactcactggagtgtgattcccgtagagtttaaattgctcagcagctagggcaaaattgtcattttagataaaattattgtattctgattctgggaaatacaaactcctgaacatctcaaatgtttttgggcaagttcatcaaatgcctacccacatatcgaattattgaatttaataacaatttaaattaataggttaagaaatcttaggaatttctgagttcatcctctsatttcagatgttttattattatattggtagtttccagctgtgagatcctgcacatacaagcacttaagaaatgtttgcttttgatttaatagctggcattccttccttctggaagatgcacagtatgcttataataatgtatgaccaagagttaactgaagattatgtattttattaactgtaaataatatggatcagttactac

SEQ ID NO: 13699 - DNA, 545 bp, Homo sapiens
tctagggtaacagtgatcaaactgagaatgcaaaagaactttcaggaaaatgtactaacatgtatatttatggttccctactcattcagagggtgtggttggggatgtgtgcaaaaacctgcaatttaaagaacacattttcaggtaattatgatatagatggttcgtggaacacattttgagaaacactgatttaaaaaagattgcttggaataaatatattcaaataaaggcttaaatgatgaatagaagatggttacatgtttcaggcacaaaacaaaacctttacaaagtaaagagagaagtagtgygtcacgtttaagacactgaaaaatgaagttaactctgtctgaaataaggcaaaagatgacactgaagagataggtaggagttaaagcaagttaagaacttccatattcttagccaggtgcggtggcttatgcctgtaatcccagaattttgggaggccgaagcgtgtggatcacctgaagtcatgagttcgagaccagcctggccaacacggtgaaaccccgtctctactaaaa

SEQ ID NO: 13700 - DNA, 576 bp, Homo sapiens
taattttaattgaaattatatctaagtacttggtattcattggtattgaaatttacattaaaagtccaagtcatctaactccagaatgcagagcaatttattggattttggaatctctactrtgcctctttcaatgccctgcaaccattctcattttaatatttttctcacgttttaccttttccaaaatcactcttttttctttttctataataatgttctaaattaaaatgtgaaagtcatgtgatctaatacactgtactaataaaaagaaaagtttgaccttagttatacagcacatatattcactggtagtttgcactactggctatactcatttataaaacagactattcaaatgtagaagtgggaaaattatattcataactaagcttatggtatctttcaggtaggctaacagcactttcttaattgggaaagtgacagaatcttaaatatatttaaataatttgcaaaaattctttgagcttaagagatgagaatatgcaaaaatatgaacaagtagtttttcaatgaataataaacagatatatgtttgcaaataaacaggatcaa

SEQ ID NO: 13701 - DNA, 656 bp, Homo sapiens
aataaggtgaaaggcatgaggggaggaaagacttctatgggaagacatttcgttaggaaaggttaatgggcttttaggagaacaaaatgggagataggaaagtttgtgacaatgtctgtttatgcaggtgcaagtggtcttctccttcttctttctggtcggtataaactcctctggagagaggacttacagtagtttcttcttttttaacttttcagttcaggggtacatgtgctggtttgctatataggtaaacttgtgtcatggggctttgttgcatggattcttttgtcacccaggtattgagcctagtacccgttagttatttctcctgttcctctttctcctcccaccttcttccctcaaatagaccccagtgtctrttgttcccctttttgtgtccatgtgttcttatcatttagctcctacttataagtgagaacatgcagtacttggttttctgtttctgtggtagtttgctaagtatgatggcctccagctccatccatgtccctgcaaaggacatgatctcattcttttttatggctgcatagtattccatgtaccacattttctttatccagtctgttactgatgggcatttagatagattccatgtctttcctattgtgaataatgctgcaatgaacatacac

SEQ ID NO: 13702 - DNA, 550 bp, Homo sapiens
ttgacccagcataaaccctagcacattgcacacccaccctgtctcttgagtcaaaagacgctgtaccgcccagatgcactggcccgcagaggagcaaaggcggctccctggagggagagaggatggtccatgtcctgggggctccaggcatccccctcccttctaaggggacatagaacatctgaggaaagttgataactttctcaagaatcagctcatttcagcacaaatcttgatgtatagatttgcttaataaaatgaatttatgaatgaggaatgagggacatcacgcttgaaaagtttcattcaaaaaacaccgaagaagaatcccatccactgaggaggcagaaagtggtcagaaagtgttactttcacacaactggtaagaaaacgttaatatagttacagaattataacctgtccsagtcccccgaggaagtgaaaaaacccacagacgagagaagggactcagaaccccgttcacatttggcagagttgggaggtgaaggtgacggacataaaggcactgaagaagactgtggacatttct

SEQ ID NO: 13703 - DNA, 549 bp, Homo sapiens
gtgcagtattttttgagaacacagccactttccaccagagaaggttgatttttttttttttttttttttgagacagagttgcacttttgttgcccaggctggagtgcaatgacgcgatctcggttcaccgcaacatctgcctcccaagttcaagtgattctcctgcctcagcttcccgagtagctgggattacaggcatgtatcaccacgccccaactaattttgtatttttattggagacagggtttcttcatgttggttaggctggtctcaaactcccgacctcaggtgatccaccagcctcggcctcccaaagtgctgggattacaggtgtgagccaccgcacccagcctggtgatgatttttctgcagagaaaaaaattattttagttttcttttgctcactttgcctgccatggaaaaatactccctgaagtctctcttaaactttatayttgaatcccaaaatattaattgagaataagcaaaaaaaaaaaaaaacaaacctagtttagtctatttttctttcagatcagtaacagcacaaaa

SEQ ID NO: 13704 - DNA, 866 bp, Homo sapiens
tgaaatagatgagtcaacaataatattggagatttcaatactctgctttcaattgtagattaaataactagttagaagatcaacaaggaagtagaagacaaaactacaaagcaattataagtaacagttatgtacagaatacttcactcaacagtaacacaaaatacatacttctcaactgtgcatagaacattgttcaggatgaacaatatgttacaacataaaatgaatgtaaaggaatagaaataatttaaaatatgtccttcaatcataatggaatgcacttagaaaaaaatatgggaaaattgcaaatattttaaaattaaacaacatggtaataaataactaaggtggtaaagaagaaatcaaaatggaaatcagaacacatattgaaatgtggacacaaaatacctctacttatggtatggagttaaagaagtgttcagagagaaacaggagctaaaaagtgttcagagagaaacagtatatgcttatattaagaaagataagggaaagcaagatggcccactagtcagagacaggtggagcagctgccatcgaggggacaagacaactggtgcacggctaacatcttcagagcaaaggcactgagagtgaatggagggaagacacagaagctgggctataggaggaggaagcttggaaccatgcaagggcctatcacagactgggacttgttcctggtccccaacaactctggaagaatggataaattgaactagcaagaagcaacctgttctcaccataggcctgtgtcatcccagcagaaggagacctctcaaacactmtggacactcaagttagcaaggattgctgcttagtgaagtggtaggggcagaaagcca

SEQ ID NO: 13705 - DNA, 866 bp, Homo sapiens
tgaaatagatgagtcaacaataatattggagatttcaatactctgctttcaattgtagattaaataactagttagaagatcaacaaggaagtagaagacaaaactacaaagcaattataagtaacagttatgtacagaatacttcactcaacagtaacacaaaatacatacttctcaactgtgcatagaacattgttcaggatgaacaatatgttacaacataaaatgaatgtaaaggaatagaaataatttaaaatatgtccttcaatcataatggaatgcacttagaaaaaaatatgggaaaattgcaaatattttaaaattaaacaacatggtaataaataactaaggtggtaaagaagaaatcaaaatggaaatcagaacacatattgaaatgtggacacaaaatacctctacttatggtatggagttaaagaagtgttcagagagaaacaggagctaaaaagtgttcagagagaaacagtatatgcttatattaagaaagataagggaaagcaagatggcccactagtcagagacaggtggagcagctgccatcgaggggacaagacaactggtgcacggctaacatcttcagagcaaaggcactgagagtgaatggagggaagacacagaagctgggctataggaggaggaagcttggaaccatgcaagggcctatcacagactgggacttgttcctggtccccaacaactctggaagaatggataaattgaactagcaagaagcaacctgttctcaccataggcctgtgtcatcccagcagaaggagacctctcaaacactctggacactcaagttagcaargattgctgcttagtgaagtggtaggggcagaaagcca

SEQ ID NO: 13706 - DNA, 558 bp, Homo sapiens
tgctgtccaataccattaagtggcccaggtgggagggaaggtaacagccaagccagcagtgcccaatctgctgccagctcccagtggccagctggacaccctgccgggatgactccaccaccagctcccttcctgctggcagctgccacggggcagttggtgacaaaggagcccgctgaggcacagtggcagcttctgcacttcacagccagatggaaaaatgcaaccacagtggggcgtgaagggcaccatgttcagggaactttaaaaragaaaacctgaccagggtgggcatagcgatggccaagaagcacatgagaagacgctcgacatcatcaccgatggccaagaagcacaaggtgccaacatcatcaccgatggccaagaagcacacaagaagatgcttgacatcatcaccaatggccaacaagcacgagaaggtgctcaacataatcaccgatggccagcaagcacacaagaagatgcttgacatcatcaccaatggccaacaagcacacgagaaggtgctcgacataatcaccgatggccaacaagcac

SEQ ID NO: 13707 - DNA, 569 bp, Homo sapiens
ccatgcttgcctgtcagaaagcgttcccaggaagcatagaaacatgattctgttcctggaagtattccataggtcccaacataaagaacttgtacatctgcagatttgatcaaagggagcctggggactgaacggtgtgattctcggagtttcctttttyatacttcttgcacgtgtggaaagctgtcacgtgctttactgtggctttgcaagcaggaagaaattaaccacattgccaagtctgtgtgttgtaaacgatttgtaagctggggaaataattcattatattctcttttaaaagggtttctcaaagttcaactggtaagcaatgacataatcaccatcattggatagatacatatctttcttaaggcttctccttcttcagtacagtaataaacttgagttttaggaagcatttggaatcttagtctgagcacaagcttccacgccatctgaaatctctgtcttccagccgtcgatggctgctgcctggtgtgtggtgtggagtcaggggcctgaaatctctgtcttccagccgtcagtgggtgtggagtcggaggcctgaa

SEQ ID NO: 13708 - DNA, 569 bp, Homo sapiens
ccatgcttgcctgtcagaaagcgttcccaggaagcatagaaacatgattctgttcctggaagtattccataggtcccaacataaagaacttgtacatctgcagatttgatcaaagggagcctggggactgaacggtgtgattctcggagtttccttttttatacttcttgcacgtgtggaaagctgtcacgtgctttactgtggctttgcaagcaggaagaaattaaccacattgccaagtctgtgtgttgtaaacgatttgtaagctggggaaataattcattatattctcttttaaaagggtttctcaaagttcaactggtaagcaatgacataatcaccatcattggatagatacatatctttcttaaggcttctccttcttcagtacagtaataaacttgagttttaggaagcatttggaatcttagtctgagcacaagcttccacgccatctgaaatctctgtcttccagccrtcgatggctgctgcctggtgtgtggtgtggagtcaggggcctgaaatctctgtcttccagccgtcagtgggtgtggagtcggaggcctgaa

SEQ ID NO: 13709 - DNA, 569 bp, Homo sapiens
ccatgcttgcctgtcagaaagcgttcccaggaagcatagaaacatgattctgttcctggaagtattccataggtcccaacataaagaacttgtacatctgcagatttgatcaaagggagcctggggactgaacggtgtgattctcggagtttccttttttatacttcttgcacgtgtggaaagctgtcacgtgctttactgtggctttgcaagcaggaagaaattaaccacattgccaagtctgtgtgttgtaaacgatttgtaagctggggaaataattcattatattctcttttaaaagggtttctcaaagttcaactggtaagcaatgacataatcaccatcattggatagatacatatctttcttaaggcttctccttcttcagtacagtaataaacttgagttttaggaagcatttggaatcttagtctgagcacaagcttccacgccatctgaaatctctgtcttccagccgtcgatggctgctgcctggtgtgtggtgtggagtcaggggcctgaaatctctgtcttccrgccgtcagtgggtgtggagtcggaggcctgaa

SEQ ID NO: 13710 - DNA, 553 bp, Homo sapiens
ctccagcgcttagttgaaacaagctattattgatttttttgctggtttctccttgtttgtaagaccttgaaaatacaatcggcagactctctgatgtggactctgggggrctctggggaaggctttgatgtcatgttggggccaagtgttcctgacttgctcctgtgcaggctgacaggtgcctgagtagaggctgcagcttggatggtgctgggggaacgcctgagggaggggctctttgccgacatctggacagggcagtgtgggcaggagagtgagcgagtctgtggagagatgggctagaagctcggcctcaaggaggggccctggctgctcaaggtccgttgcgtttagggctctggaaaagaatttgggaaatggtaacagttactggtcctgtccaaggagcagggtgcctcgagggctgtttggctgtgggggccaagagggtgtgtcctgggcagtcaggggtcccgggcacaggggaagctgggcactgactggaaggaagtgaggtcccctgggctgggctgggtggggtcctcctgtgggc

SEQ ID NO: 13711 - DNA, 553 bp, Homo sapiens
ctccagcgcttagttgaaacaagctattattgatttttttgctggtttctccttgtttgtaagaccttgaaaatacaatcggcagactctctgatgtggactctggggggctctggggaaggctttgatgtcatgttggggccaagtgttcctgacttgctcctgtgcaggctgacaggtgcctgagtagaggctgcagcttggatggtgctgggggaacgcctgagggaggggctctttgcygacatctggacagggcagtgtgggcaggagagtgagcgagtctgtggagagatgggctagaagctcggcctcaaggaggggccctggctgctcaaggtccgttgcgtttagggctctggaaaagaatttgggaaatggtaacagttactggtcctgtccaaggagcagggtgcctcgagggctgtttggctgtgggggccaagagggtgtgtcctgggcagtcaggggtcccgggcacaggggaagctgggcactgactggaaggaagtgaggtcccctgggctgggctgggtggggtcctcctgtgggc

SEQ ID NO: 13712 - DNA, 523 bp, Homo sapiens
aggtcctccgttcagcagaaattggggtgtcagtgggctgggttccttctgggagctccggggaagagtctgctcccatactcacttgggttgttggccaaatgcagttgcttgcaggtgttgggcgaatgtccgtttcctgctggctgtcagccaggggctgctcttagggactagaggccacccacattccttgccatagggtcccctccatcttcaaagtcagcaacaaagaagctgcctcacattgactcccactcaccctttgaatctctaggaaaagcctgtgtggtttacagtttcacctgattaggtcagacccaccaggacaactgcccatccttaaaagtcctgtgtgccacctaacatatcccaattccgggagtkacttattcacgggaggagattatgtaagggtaaggatcactggggtcatcttggaattctggccaccacagtttttctatcttcatggtcaaaaagaattgatattgtaaaaatgtcagccttctccaatttcatc

SEQ ID NO: 13713 - DNA, 520 bp, Homo sapiens
cggcacactggcctcagtttgcatggtggagagggaggagagctgacatagcctctgcctcaggcacttgcttgtccaagaaagtgtgccttgctcaccgggtcaaagtacaaagtctggggaaaaggcagctcactccagagaatcagcaataaaccaggagagcagcggccaggcgctgggaggccggggcagcacgtagagggcctggcgcccgcctcaccttcacagagaggtcggccgcaaagaccagcaggcagagcacctcgacactctcggtcaggccgcagggcggctcccagggrgcacggcggtagcgcacgtccgccgtgctggtgagtgaggatggggtctcgataaaagccaaaaacaggatcaagaagatggtgaagctcaaagtcctggaaaggggacagaaacatgaaaacacaggagccagcagccctcagggcccagaggctggtcaggagcttccccagtccgaagcacgggagttggcgctgcctgagcgtggacactc

SEQ ID NO: 13714 - DNA, 435 bp, Homo sapiens
gaactgtgtcttatatgccttcataactcacagtgctaggttcaccctgaaaatgtcacaagatttataaaaggattcataccactaaaatatatgaacagaattacaagaaatttttcttttcaggggtatttttaaagttctaaaattaagattgtgrtaattgttcaattttttcaatttactaaaaaccactcagctgtacactctaaatgggtaaatttaaagtgtgtaggctgtgccaggcgtggtggctcagacctgtaatctcagcactttgggaggccaaggtgggtggatcacctgaggtcaagttcaagaccagcctgacaaacacagtgaaaccctgtctctactaaaaatacaaaattagggctgggtgcagtggctcatgactgtaatcccagcactctgggaggccaaggtgggtggatc

SEQ ID NO: 13715 - DNA, 604 bp, Homo sapiens
attaaatggtgcaaaaatatatagaggattaaaatgtcttatccttcaatcctgcctaggattatgctcaagactctagccttcttgtgctgagcttccctttcaggcatttttttgggggggttggggaaacagcatcttccactccaaacttaaatctacayaagaaactgggaatggtattcaaaactaatcactgattacatagctctccaagatggaatcatccaggtaggcaaaaaatgagctgagaaaagcagagagaaaaacataagaaatataaaagaaaagtacagtcaggaatatgaattaaattagaacaaacccagaattccctaaaagcttgtatcctacttgatttattctacaatatcttgcaggaaaataatttttgctctttaaaaatatggtgttttgaccagcctggccaacatggtgaaaccctttctctattaaaaatacaaaaaattagctgggcgtggtgctgggcgcctgtaatcccagctactcgagaggctgaggcgggagaatcgcttgaactcaagaggcggaggttgcagtgagccgagattacaccgttgcactccagcctcggcgacagagc

SEQ ID NO: 13716 - DNA, 604 bp, Homo sapiens
attaaatggtgcaaaaatatatagaggattaaaatgtcttatccttcaatcctgcctaggattatgctcaagactctagccttcttgtgctgagcttccctttcaggcatttttttgggggggttggggaaacagcatcttccactccaaacttaaatctacacaagaaactgggaatggtattcaaaactaatcactgattacatagctctccaagatggaatcatccaggtaggcaaaaaatgagctgagaaaagcagagagaaaaacataagaaatataaaagaaaagtacagtcaggaatatgaattaaattagaacaaacccagaattccctaaaagcttgtatcctacttgatttattctacaatatcttgcaggaaaataatttttgctctttaaaaatatggtgttttgaccagcctggccaacatggtgaaaccctttctctattaaaaatacaaaaaattagctgggcrtggtgctgggcgcctgtaatcccagctactcgagaggctgaggcgggagaatcgcttgaactcaagaggcggaggttgcagtgagccgagattacaccgttgcactccagcctcggcgacagagc

SEQ ID NO: 13717 - DNA, 604 bp, Homo sapiens
attaaatggtgcaaaaatatatagaggattaaaatgtcttatccttcaatcctgcctaggattatgctcaagactctagccttcttgtgctgagcttccctttcaggcatttttttgggggggttggggaaacagcatcttccactccaaacttaaatctacacaagaaactgggaatggtattcaaaactaatcactgattacatagctctccaagatggaatcatccaggtaggcaaaaaatgagctgagaaaagcagagagaaaaacataagaaatataaaagaaaagtacagtcaggaatatgaattaaattagaacaaacccagaattccctaaaagcttgtatcctacttgatttattctacaatatcttgcaggaaaataatttttgctctttaaaaatatggtgttttgaccagcctggccaacatggtgaaaccctttctctattaaaaatacaaaaaattagctgggcgtggtgcygggcgcctgtaatcccagctactcgagaggctgaggcgggagaatcgcttgaactcaagaggcggaggttgcagtgagccgagattacaccgttgcactccagcctcggcgacagagc

SEQ ID NO: 13718 - DNA, 534 bp, Homo sapiens
tttgatttctttaaaaatatattacagcctatattacaaagatatattgacatatattacacctagttcatcttgtatgatgcaggaggaattagattacatatagtagagattttatttattttctgatctcattattacagcttatagtaaaactcttttaggaaacgagaaaatctgatttcatacttttttttttttttttttttttttttgagacggagtcttgttctctggcccaggctagagtgcagtggcgcgatctaggctcactccaagctccaccttccaggttcacaccattctcctgccttagcctcccgagtagctgggactacaggcgcccgccaccacgcctggctaattttttgtatttttagtagagacgggttttcactgwgttagccaggatggtctcaaatctcctgacctcgtgatccgcccatctcggcctcccaaagtgctgtgattacatccgtgagccaccgcgccctgccgatttcataatatttttgattgtagttcctacagcca

SEQ ID NO: 13719 - DNA, 536 bp, Homo sapiens
agtttccttatggttattaattgattatgggtgtgtgcatgaaacaaaaagtcaattgatcagaaacactgatgagatattattttatttgaagtcaaagagagagaaagtctctcaattccttgccagtgatggagatgtgagcttttgtagctgtcagtrgccattctcctgccatgggagaatgttctgcagcataagagaatgagccaagaagagaaaccgaggcaaatgtgaagagagaacactctgacagcctttgagaacttgactttaattgccccataaacccaggtgaccctctatttgtctcatgtattatataaaccagtacatttttcccctagtcttgttttaattgagatcctataatttacgtagaaagaagtcctaatatcctgagaagaccgtatgtatgtgtgtaatgattacatgaatatacaaagagaaaaagatggtagagagaatagtgtagctgactcatagagggaagcaaaaagaagcagcaaatagagcctgaaagacagagaacaccc

SEQ ID NO: 13720 - DNA, 554 bp, Homo sapiens
tgcacattgcttttataatcagagttttctttcaaaagctatataattcatgtttcttttcaaaaaaacatgtaatggcactgcttgggcratgggtgcaccagaatctcagaaatcaccactaaagaacttatccatgtgaccaaacaccacctgttccccgaaaacctattgaaataaaaataagaagactggaaaaaatgtaatggaaattaaatcataataataattatagctactattgataaagggtatcagagactttatgcacaagggctaggtcttctatgcccattatgaaagagacagaaaaaaacaagttttatagtcaggtcctacttagtttctttaagcctctatttgctcatctgtgaactagcctaacaatacccccagagaatttctctgcagattaaatgaggttaggcatataaaatatttggtccagtgcctagcacattataagcccttgataatttgtaggtgctattcctatttttgttttggttgccatcattatctcccatatgtttaacaacctttaattataatat

SEQ ID NO: 13721 - DNA, 1393 bp, Homo sapiens
gattgcatccgtggtgatgtgaatgaaccagattgcttaagggactttttgtttttttttttttttttagacagactygctctgtcacccaggctggagtgtggtgatgcaatcttgcctcactgcaacctccgcctcctggcttcaagtgattctcctgcctcagcctctcaagtagttgggattacaggcatgtgccaccacgcctggctgatttttgtatttttagtagagacagggttttgccatattggccagcctggtcttgaactcctgacctcaagtcatccacatgcctcggcctcccaaagtgctgggataacaggcatgagccaccatgtccagccttagattgctttaggaaccaattcttagaaggcagagttgatagaagattatggtgaagggcacagcgactatacaactcaacccatatccatgtacctagaagaagtgagaccacccaatgctaatttagagacgggattgtcaacaacttcctcatagaattgacgtgaattataatcatgtatttaaaccacagctaggtgcctggcacttggcacgtacttcctaaatattacttctgctaccatggacttattttggaactctggattatcatcccttctggccgaaaataacgaattattatttcttttttgcttcaggagctgtaggggaggaagggatgagggaaatgggttgtgctcattagtgggcttctaaatgcttcttgcccagtggtgtgaatgtcccaggactccagctgacagatcactagagtggtttccagccattcttagcagttgaaaaccttcttcaaagtcttacatggaacctcagaacagaacaaaatcagaactgttctgggcagcctttaacacctcaaagtggcctctaagggtttcatcaaccaatttgaaaaacagtccctagaaggaacctggttcttctgccttcaaagcctctgacaatgagtaatggattcagtatcagggggaaaaagctctgacaaaagaaagggaagagttggctcttctccttataaatctatggagtgtttatctttaatatggtctaacgacaataacgactttcttttattgagtgtttaccatgagccacaaactgtactagaactatagatattttatatcatttaatcttcacaataatcttgtgagacattattattctcattcttgaaaggcaaacaccgaggcttcaagagggtccataaattagccagtagtacacattgaatgagagtcaaactactatacttcgctgatgctataattaactctattgatttatatgaggagctgagaaataagaatctcagaaattaaactcaagatcactttttatgcagccacttgaatctttc

SEQ ID NO: 13722 - DNA, 543 bp, Homo sapiens
gcccttgtagtgttaaagtctcaaaggctgacaccagggaagttttcctcttaccttcatttcttttcaattttgaactgaaggaatgaaaagtagaactgatctttcaaaatctttacctaatttgtaaattttacctaatttgtagggaaattgtttttccttagtacttcacgagcacacaccataaggctattgccattagacagtttgtttttcaatatcaattcaaccaaccttctctttttctcattcatggtgttctgttcagctcacacccacagtccctcctctgccttcattcctgcccttatagtctcccatctgccccagccacatgcttcttctccatgcattgtcgaccagccagcccacaactttcagaaaatattccttcactagtaaatgttctgaatttctcaggaaacaacargaaaataaaaagctgtcttttaagttaccttccaaaatcccagtcattcctctctgaaattcttaagcaaatgcttatcattattccagaccccacttgctgggtcttgt

SEQ ID NO: 13723 - DNA, 641 bp, Homo sapiens
ttttctttttcacatgcactctccctgaacaatttcatccatattcatatttgtaactaaagcctttaagttaatgatttcagaatctaaattctatagctactatttatggaatgcctactatgtgcccataatgctagggactttgcataaattatctcatttaattctcaacaccccagcttattttacaatccatatgtccaggaaataagttcatgccaaaccattttagcacccagcaaaacctttttcacttaaactaagattttaagaaaatcttaaacttcacacttcaaaagccattttgacaattattattttttaaaaaagaattcaggcaaactgaaatcacaaaggggactcaagtaatttacccctaacataaatgcatgtaaactccttttccttaaagagaatctaaatacccaaatccctctttaattatacttttacttgacggaagggatawaaaactataataggaagagctaatggacccaaaggactactataatttccaaaagaggtataaagtatccaacattttcaaatttattttctctagaaaattatatttttatggaacattttgtaagaacactgttgctcagactagattctgggagacagtgatacca

SEQ ID NO: 13724 - DNA, 543 bp, Homo sapiens
agtgacggcagctggtggtacaaaattgggcggtgtctccgcctaggcaggaaaaacaccagctccaggcagtcagccgttgccttacctggagggctgatcaaccgtcacaaatgtgtttaaaatttctaccccctccccacacccagccatgagaaaataaatktattattgttaataaatgcaatttggaagtctaaatctttcaaagggctgagtcttgaagataataaaacacattctgggatgaaaaggcagagggctggagcccaaggctggtgtgagcagagcagtggccggctattatacttgtccttcttgggtttaatttcatctttcccatgaatcatcccatgaattcacaccttaagctcactgggccttagcttgtttattgggaagaggacttctagaggtacttctagatcagatatcctaagttccagctcatggggtcagaagtccagtgtaaggcacttgagtgctcaaatgccacctcctcagagaggccttcctggaccacccatctcctttaacgcagcc

SEQ ID NO: 13725 - DNA, 543 bp, Homo sapiens
agtgacggcagctggtggtacaaaattgggcggtgtctccgcctaggcaggaaaaacaccagctccaggcagtcagccgttgccttacctggagggctgatcaaccgtcacaaatgtgtttaaaatttctaccccctccccacacccagccatgagaaaataaatgtattattgttaataaatgcaatttggmagtctaaatctttcaaagggctgagtcttgaagataataaaacacattctgggatgaaaaggcagagggctggagcccaaggctggtgtgagcagagcagtggccggctattatacttgtccttcttgggtttaatttcatctttcccatgaatcatcccatgaattcacaccttaagctcactgggccttagcttgtttattgggaagaggacttctagaggtacttctagatcagatatcctaagttccagctcatggggtcagaagtccagtgtaaggcacttgagtgctcaaatgccacctcctcagagaggccttcctggaccacccatctcctttaacgcagcc

SEQ ID NO: 13726 - DNA, 543 bp, Homo sapiens
agtgacggcagctggtggtacaaaattgggcggtgtctccgcctaggcaggaaaaacaccagctccaggcagtcagccgttgccttacctggagggctgatcaaccgtcacaaatgtgtttaaaatttctaccccctccccacacccagccatgagaaaataaatgtattattgttaataaatgcaatttggaagtctaaatctttcaaagggctgagtcttgaagataataaaacacattctgggatgaaaaggcagagggctggagcccaaggctggtgtgagcagagcagtggccggctattatacttgtccttcttgggtttaatttcatctttcccatgaatcaycccatgaattcacaccttaagctcactgggccttagcttgtttattgggaagaggacttctagaggtacttctagatcagatatcctaagttccagctcatggggtcagaagtccagtgtaaggcacttgagtgctcaaatgccacctcctcagagaggccttcctggaccacccatctcctttaacgcagcc

SEQ ID NO: 13727 - DNA, 532 bp, Homo sapiens
agatgactgtattatactggagtagacagttcccctcccaaggagaaaaaaatctagaatcaaattaaatacaggaagactggtttctctctttccaacatgagagataagtgacattagaaaaaaaccaagagttttctttagctcaccaccggtggcaaagtgaaaggagagagctcctgttaatctcctagagtgacgcttctgccaccactgggagtccakgcttgcttcaaaagctgggggcaaggagtagaagcagtaggggagccatcagtgtgaatctgctggaatctaggggggttctcttgaccagatattcccttctcatcctcaagttcccgaaatccctttagcatggaagtatctttttttcttcctgtctctgatgacttacattacattaataatctcttttggaccatggttttgaacaccactgggccctatcttcaatttcttattcaaaaggggaagccaaggtgcttaactgcatctcagcacagcagcagctatctttcctaccaccatg

SEQ ID NO: 13728 - DNA, 561 bp, Homo sapiens
tgagtggcaaagcaggagataagacactagttttgcaactgtaaatcaccagccctttctctctatgcctgtttgccccagagcttggggctgtataggctggtgggcaggytcacccccacatcagcctaggccctggcattgcttaccagctccttccccactggtgaggggacccagggaatatctgctgctgtccccagggactgacgtgatggggctaggttgtgagccctggtcggtctgcaagtgtcagataggatgatacattaaaagcacaaagcacagcacttggcttctctaaactcctccagagatgtcaacgtctgtgagtcctaccatcttaaaatctctcaggccaggccttgtgtcttatggccctacaatctgtgaacactgctaggtgagaaaacacacacagtaccctgggggaagagcagggagttaggactgtggccaagaaagaatgcatgaaagagacagagaagaacggtcagggaagtaggagaaccaaggcggtattttagcctagaaactaagggaggagagaatgttcaggaa

SEQ ID NO: 13729 - DNA, 522 bp, Homo sapiens
ttttttttttttggatttttagtagagacgaggttcattcatgttggccaagctggtctcgaactcttgacctcatgtgatcctcctgcctcggcctcccaaagtgctgggattacaggtktgagcccccatgcccggccagccttgctcatctttattgcacatttatctgtatacccatatgcctccacccaagtgaaaaacccatgcccttgagacgcttatgagtctggcatactctctacatctctgtattgttgtcatccttgaacactcagatgccatttgttgaagtcttcaccagtaaactcacagatgtcatgtctatgtcctgtcctgtcatcatcctggctccaactgtctggccattcagtcctagaatatcaatgactttgactacctctgcctcatgtctgtcagtgttcagtccacgttcagtccacatatgctttacaacggttttagacttttgggctcccctcactctgaaatcctctcttcttggcacctgtggcactttct

SEQ ID NO: 13730 - DNA, 1156 bp, Homo sapiens
caacccataatcaaaacctcaacttactttaatatctcaaaaagatggaactggtcaggcgcggtggctcatgcctgtaatcccagcactttgggagcccgaggcaggcagatcacgagctcaggaaatcgagaccagcctggccaacacagtgaaacgctgtctctactaaaaatacaaaaaattagctgggcatggtgtgtgcctgtaatcccagctactcgggaggctgaggcaggagaattgcttgaacccaggaggcggaggttgcagtgagccgagattgcaccactgcactccagcctgggcgacagagcaagattctttaaaaaaaaaaaaaaaaaaaaaaaaaaargatgtaacctttccttatttgtgatttctactttgggggatggagttttagcaggggtgacaggaggtattttactgtgtataatttacagagaaagaaaatcctcaaaagcaccaatttcaacaggaaatgaaatcacccacatttgtgatgagcaaacatcatgcatattcctccaccacctcgaacctgcatgacatgcatctatccttcctccccctcccagcaggcggcccatccccacgctgccatgcaagcagccacgcaagcagcctcgatgccacgggcccatagcaaagactggctcccagcaccctctctcgtgccgccactcctccgaggttaggacaccgagggtgcaggtgctgaccgtaagcacacaggacaagatgtgagcacagacattagagcaaagactggctccagcaccctccctgctgccatcactcctctgagactaagacaccaaggagtaccagtaccgacagtgagcacacaggacaggacgtgagcacagacactacaacaaagcgtccacgggagaaccaaagagctcaaaagtgtcggagtgtcgggctggggggaaaaggccctctcaaatggaagaaacctaccaccaccctacttctccagccgactggtgtcctctttcacaaggagaaggtggaatggacggaaagctctaggaggatgccaattttttcaatgtttatgttcaggctacttttctcccattgccactactagcaagacaacaggaccagacagaaagacacccaggaaaatgtttggttttttttt

SEQ ID NO: 13731 - DNA, 513 bp, Homo sapiens
gatgaaaacttgcctaaaattctacagccctaacacaaccatttttatttttatgtgtcctacaatatatttgcaatcatagtcaaccatcttaaagasgacagaggaattgaatgcatcttcttctccctcaaactattttgttactatcatctgatttctattctttcaggtgatttgccactttaaaaggcagtaagtttataaaagaaattctcaattaacaatctagttaaaggaacctagacattggcacataaagcaattttatgtcattgtttcaagatgctaaagaattcccttggctgggcatagtggctcactgaggcctataatcccagcacttctgagaggctgaggtgggcggatcacctgaggtcaggagttcgagaccagcctggccaacatggtgaaaccctgtctctactaaaaatacaaaaattagctgggtgtgttggcacacacctgtaatcccagctactcaggagcctaagacagaagaattgcttgaac

SEQ ID NO: 13732 - DNA, 645 bp, Homo sapiens
gcacagtctcagtgctgcaccctctgggaggaggacccctgggatgccctgtgagcggccctccmcactgccctccttgcacttctctcgtggggaaaggtttctgtccctccccagaaccttgtaggactgttctcagttgtacctccagcctgtttcctctgaagtataccccaccttgggccccctctggagcagccccccatcaggtgcacagacgcccctcagagctcagtgcctctgaggctgggccgaaaggtggagaggagcttcctcccgagctgcccctcctttcccaggccctgcccgtggaccggaagcgaacgcaggagcccagccgcccgtcccctacgccccagggcccacctttcgggggtagccgcacccccagcacttcggacatggccgaggaaggcagagtggccagcggggccccccagggctggagacctcggagtctctcagtgactcactctacgactcgctgtcctcttgtgggagtcagggctgaggggctgcgccacgccacggccccgctggagctggggaccacagactggaccggctctcttcatgcccagcccccggagacggggacccctccctgaagggaccaaggaggcaggtggataagaaggtgaaaag

SEQ ID NO: 13733 - DNA, 564 bp, Homo sapiens
gaagaaattaacaagacggagagtgtcaagtcagatgtctgggtttttttttttttttttaagtcagtatcccattttcttacctcttgtcttctacttccagattcctatcccactgtcctatcttttctgcttttatgggcttaagcataatattaccaagctgtaaatctgcttcttgccaggtgggcttcaagaggtctacctccttcccactttttatttcttggtttttcaagccctcttctctgcttgaacttggtagattacctcatttcctagttagaacagaattgtttgcctgcaggatatttctcctatttccttytggggaaggagtttggcatagtaggtttgatgcaggactccacctctttcaagctgagaccagagggtccatccgcattcttaccaccagggtctgatccatctgcctaggctttattctctggtgtttgcaaatacaaggcgtcaccttggtttccagggcaatgtgggctgactgaccaaggcagggcaggtggcatcagtcacacctgacgcctggaggcagccattgcctac

SEQ ID NO: 13734 - DNA, 564 bp, Homo sapiens
gaagaaattaacaagacggagagtgtcaagtcagatgtctgggtttttttttttttttttaagtcagtatcccattttcttacctcttgtcttctacttccagattcctatcccactgtcctatcttttctgcttttatgggcttaagcataatattaccaagctgtaaatctgcttcttgccaggtgggcttcaagaggtctacctccttcccactttttatttcttggtttttcaagccctcttctctgcttgaacttggtagattacctcatttcctagttagaacagaattgtttgcctgcaggatatttctcctatttccttctggggaaggagtttggcatagtaggtttgatgcaggactccacctctttcaagctgagaccagagggtccatccgcattcttaccaccagggtctgatccatctgcctaggctttattctctggtgtttgcaaatrcaaggcgtcaccttggtttccagggcaatgtgggctgactgaccaaggcagggcaggtggcatcagtcacacctgacgcctggaggcagccattgcctac

SEQ ID NO: 13735 - DNA, 707 bp, Homo sapiens
caactatttacatagcatttacattgtattagatatgtaatacctagatgtaatctagagatggtgtaacacatacgggagaatgtgtacaggttgtatgcaaatactatgtcattttacataagagacttgggcatccttggatttttgtaccgggggtgtcctggaattaacctcccacagataccaaaagatgactgtactattcttctatttttaccttctagttgctattttttgcatatctgaaggccaytgatttctgtcttgttgtttctaagtgatttccaaaagataagagggaaatggtagcattattctatcaatttctagccagaattcacttatactgtggtaaattatctcggttaaggttataattgtgcataaagtcttatgaatatcttcagtttgttggaatttttaatcataatagtattaatgtgtttcatggaaataaccatatattctttcatagaaagacaaatgtagccttctcaagacaactatggtgctttacccttctcttctctagttaattgccacaaagaaaagagtatataattttctttaacttcagaaaactccattaagaaatggtatctttcttatgctgaaagttaccacaaattatacagaaaaactactttcaagatggaaatctacaatatagcttccagaatatttattatacaaataattccaaa

SEQ ID NO: 13736 - DNA, 658 bp, Homo sapiens
actttttatcataaagtaatatggtaaaaatagtctcataattgtcttctttacaagttgtttctgaagcttaagaaaaatgatacaagaaatcattaggtcagattcagtggtttatgcctgtaatctcagcactttcggagatcaaggcaggaggagcacttgaggccaggagttcaagaccagtctgggtaacatagtgggatcacatctctaaaaaaaaaaaaaaawtttttttttttagattagctgggcatggtgggatgcacctgtagtcccagctacttgcaaggctgaggcaggaggatcacttgagcccaggaggttgaggctgcagtgagccatgatcaaaccattgcactctagccagggtgagagtgaaacattgtctcttaaaaaaatcattaaaccaagatgcacctaaaacttcactgtttctttctgagaaggtaacttttgatgatgtgcttggtatttcagttcttctgtattcccacctggtggaaatttaacataatacacagctcctcacaacatccaacaccaactggggtctattatctcaaaataggtgtggaagacaatgcagcattggtattgtaggacagcaaatttcaaaacatggttcccagatcagtgccattaacattgcctggga

SEQ ID NO: 13737 - DNA, 658 bp, Homo sapiens
actttttatcataaagtaatatggtaaaaatagtctcataattgtcttctttacaagttgtttctgaagcttaagaaaaatgatacaagaaatcattaggtcagattcagtggtttatgcctgtaatctcagcactttcggagatcaaggcaggaggagcacttgaggccaggagttcaagaccagtctgggtaacatagtgggatcacatctctaaaaaaaaaaaaaaaatttttttttttagattagctgggcrtggtgggatgcacctgtagtcccagctacttgcaaggctgaggcaggaggatcacttgagcccaggaggttgaggctgcagtgagccatgatcaaaccattgcactctagccagggtgagagtgaaacattgtctcttaaaaaaatcattaaaccaagatgcacctaaaacttcactgtttctttctgagaaggtaacttttgatgatgtgcttggtatttcagttcttctgtattcccacctggtggaaatttaacataatacacagctcctcacaacatccaacaccaactggggtctattatctcaaaataggtgtggaagacaatgcagcattggtattgtaggacagcaaatttcaaaacatggttcccagatcagtgccattaacattgcctggga

SEQ ID NO: 13738 - DNA, 595 bp, Homo sapiens
ttcatttcttttatttatcttttgaatgcttaccattcatgtaaaataaaaaattatttagcttctttcacttacataatacattttaatccattttctagtatagcttaatccctctggttttaatcgtatcccttttgtaaaatatgaattgtacctcaaattatttgtcaaacttaagtgcaaataagtacaaatctgggaattaactagataatttctaagggttctgttgaatttaacatttccttttttttctgatttttaatgatttctcatattttcttcatagctttgatatttctcttattttttcttcccaaatctgtatttctgacttcataaattaaatatataaatatgacttgttaattagaattaacaagtgaagtagaattgataagcagcgaaactgaaaacatttctattttaaatactttaatgtagtactaattgtttagtgtgatgtactagggaatattttaaagtaaggccaggcagcatttttccagctttttttttctagagagactgaggccattatgcctttttcactgwagcatctattataacagatcctgatatttacttccag

SEQ ID NO: 13739 - DNA, 629 bp, Homo sapiens
tccacaaaattctttctcaaacatgatctcctgatgaatttcaatatggtcaacaaccaaaactttttctacagtttttccccctcatcattagagataacattactttgctacttgactctcaaatccctacgctaaggtttccaccatgttcactagttgctctgcttcccccaatcaaaacagctaggttattttcaaacagaaataaccaggttatttcaaacagaagctgtagttatttttttctgctgaccttctgtctctgttttcctcactataaaaccattatttgatattttactgcacaatacttcaaaattttaggaactcagagtatacctacattagtgttcagaatatagattggaagkgataatccaatcctttttccttatgtgcctattttgattgacatgacattttatttgacaaggtcaatgaaatttgtatttattacataaaaaagttatttatgtaaagaccaccccacccccaaccaccacagtaaaacactgttataatcaggatgtctgttcatgtgataattctccctttaatgcagccatttaaaaagctacaagaaacaataagctcctcaacaaggatttataaacaatcagtcttga

SEQ ID NO: 13740 - DNA, 664 bp, Homo sapiens
taattcacctaaatttaaatttttctttccacaaagctttccctttagtgagcaaactacatcaatagactaataattgggttttgtaaaaaaataaaaataataataatgaccagtatctatacataaaaaatctatgcattccaatggaagtgtatctatagtcagagcttacctatatcctatttcaagaaaaaaaaattactgacaatatcttcatagtacgcacgtttgcccagaaatgaacaagccatttatattattggcagttcaaaccaaggaagtaatttatttattttttttgagctcacatctgtaccagatccttttacttaattattaacacatataattaaaaaattacaacatattctattcatgaaaacaatcaccttatatgagtcaatgtaacatggtagaaaatatactctatttagagtcaagaaacctaattcttgacttgttctggaattaactcgtaatagaacttctgggaaatcatataatcttcaggggccttgggatttgtctacaaagtgaaggcttggrcatctcttctagcattagagatctatagctccattttgtacattactgttaaaatatttgagggataaagttggctgacaccacagtgaagtctgaataaagtaaggttaaacca

SEQ ID NO: 13741 - DNA, 579 bp, Homo sapiens
gggatccaccgggcagcctcctccctctctgctcgtctycctctgggatccacctggcagcctcctcactctctgcccctacaccctccatgttatgctccttcagccaccctggtccccagccagtccatgtgcttcccggggcctctgctgcacaacgagggtctctgctcgagcccccacagcctctccacctccagggcacatgtacactgcccttccaaggcccagcgctgggaagccacccctaagctgacatcagaatcgatcatcgcccccgccggcactaagccaaattcatttggtgtccttcctactgcctacttcacacccacccaggaaactcccagcatagacaccatggtgcgggccctacctgcaccccatcccccagaaggtcgggggcctgaacctgtcaatagggcctccttccacacctaacgctgctaatccacaccctcccctccaagctgcagccccctctcccttcccaacccagacccaacttagcacagaagaggttccagcagctcagcatctgagtccactgccaacaaggagttcaggtggggcaaacgt

SEQ ID NO: 13742 - DNA, 579 bp, Homo sapiens
gggatccaccgggcagcctcctccctctctgctcgtcttcctcygggatccacctggcagcctcctcactctctgcccctacaccctccatgttatgctccttcagccaccctggtccccagccagtccatgtgcttcccggggcctctgctgcacaacgagggtctctgctcgagcccccacagcctctccacctccagggcacatgtacactgcccttccaaggcccagcgctgggaagccacccctaagctgacatcagaatcgatcatcgcccccgccggcactaagccaaattcatttggtgtccttcctactgcctacttcacacccacccaggaaactcccagcatagacaccatggtgcgggccctacctgcaccccatcccccagaaggtcgggggcctgaacctgtcaatagggcctccttccacacctaacgctgctaatccacaccctcccctccaagctgcagccccctctcccttcccaacccagacccaacttagcacagaagaggttccagcagctcagcatctgagtccactgccaacaaggagttcaggtggggcaaacgt

SEQ ID NO: 13743 - DNA, 579 bp, Homo sapiens
gggatccaccgggcagcctcctccctctctgctcgtcttcctctgggatccacctggcagcctcctcmctctctgcccctacaccctccatgttatgctccttcagccaccctggtccccagccagtccatgtgcttcccggggcctctgctgcacaacgagggtctctgctcgagcccccacagcctctccacctccagggcacatgtacactgcccttccaaggcccagcgctgggaagccacccctaagctgacatcagaatcgatcatcgcccccgccggcactaagccaaattcatttggtgtccttcctactgcctacttcacacccacccaggaaactcccagcatagacaccatggtgcgggccctacctgcaccccatcccccagaaggtcgggggcctgaacctgtcaatagggcctccttccacacctaacgctgctaatccacaccctcccctccaagctgcagccccctctcccttcccaacccagacccaacttagcacagaagaggttccagcagctcagcatctgagtccactgccaacaaggagttcaggtggggcaaacgt

SEQ ID NO: 13744 - DNA, 579 bp, Homo sapiens
gggatccaccgggcagcctcctccctctctgctcgtcttcctctgggatccacctggcagcctcctcactctctgcccctacaccctccatgttatgctccttcagccaccctggyccccagccagtccatgtgcttcccggggcctctgctgcacaacgagggtctctgctcgagcccccacagcctctccacctccagggcacatgtacactgcccttccaaggcccagcgctgggaagccacccctaagctgacatcagaatcgatcatcgcccccgccggcactaagccaaattcatttggtgtccttcctactgcctacttcacacccacccaggaaactcccagcatagacaccatggtgcgggccctacctgcaccccatcccccagaaggtcgggggcctgaacctgtcaatagggcctccttccacacctaacgctgctaatccacaccctcccctccaagctgcagccccctctcccttcccaacccagacccaacttagcacagaagaggttccagcagctcagcatctgagtccactgccaacaaggagttcaggtggggcaaacgt

SEQ ID NO: 13745 - DNA, 493 bp, Homo sapiens
ggatggattcagaagcctcccaagggtcactgcatttttatattccaaacatagattttcttttcccttccatcaactatacatcaattctggccgcaagaactctagtttgagaaaatttattttggctgaaaaggaagatgaggttaggaattaaaatgcaagggattcagtaaatggaagtttagggagctaaagttgccacctggcataaccttccagggacactatttagtttcacctgggtccyttgtcactgcatgtatgtttttcccaccaaccacaggggttggcttgtctgctccttagccactgtctctacattctgcattcaatttaagcaacccacatttttgacctgctgaaaagttaatgtgatataacttttcctctaccctccagtgcataaagcaagcagacagccctcagaaaattaatgtattcattcaacaaatattaatgccaaccacttttcaggaagagacactgtgtc

SEQ ID NO: 13746 - DNA, 341 bp, Homo sapiens
cggtgaaaccccgtctctactaaaaatacaaaaaaagtcagccgggcatggtggcgggcacctgtggtcccagctactggggaggctgaggcaggagaatggcgtgaacccgggaggcagagcttgcagtgagccgagatcccgccactgcactccagcctgggtgacagatcgagactccgtctcaaaaaaaaaaaaaaaaaaaraaaaaagactgcagggactgcagataaactcacacaagttctttgctatgaacctccagagttgctatttctattaccatctatttaaatggttttctctctaactgtagaatgtccaacatgattatgtctgca

SEQ ID NO: 13747 - DNA, 552 bp, Homo sapiens
aatctgatgtgtcagaagggaactctgccatgcggacttcacagcaccaggatcacaagaagctctaagactttccgggggtttagtataccgctgcctgcatgtggtgagaagatatcaatatttattcaggtatttgttttatgtttttttctattactatgtgtgctaaataataatgttgttctatgttccaagggttagcaacagagttttctttgttttctaagtcttatatctacaatcttaagaagtgtacagaagaatcacctgtaacacttaaatatatatatatatcttccctgcttacatatatatatatatatatatatatatatatatrtatatatatatatatcttccctgcttaccccagtgatattctgatttcagagacatcgaaggttttcaagaaaccatgtttttacaatggtgcatatataacaaacataaccccaactgagaaaactaccttactgaattcatgaataaataaacccttgtatcattttgactaggataataactgcacaaacacatataatacttgga

SEQ ID NO: 13748 - DNA, 551 bp, Homo sapiens
tctctggctctccagtcatgctttacattttcacttcttacgctctctttcatatgaaatcaatttacagacttccttcaagcccttagagacctttttgtactatccatgacaagttcttgatgtagctctgcacttttgacaaattcttagcagttaactttcaaggcagttaagatttctgttcaagcacgatatagctagaatagggtcatatactcaataaaacaaatatttaccaagcatttactgactggaagataaaaagcacaaagcataattataaaatattttcccctgccaccataaaaaaaaaattaaaaaggcctacagaatatagcataacatgaccaaagcaaaaayagtgaggaccaaagaggggaggaagggaaaatatcagcatgaactgaatacgacccaggagagccttgatggtcagacatgtaaagacaaattgggtagggtgaaggggtggaggtcagggacgcatcctacaggggaaaaacagctcacacagaagcctgaaaggaaaagcgcgaagacacctgtac

SEQ ID NO: 13749 - DNA, 551 bp, Homo sapiens
tctctggctctccagtcatgctttacattttcacttcttacgctctctttcatatgaaatcaatttacagacttccttcaagcccttagagacctttttgtactatccatgacaagttcttgatgtagctctgcacttttgacaaattcttagcagttaactttcaaggcagttaagatttctgttcaagcacgatatagctagaatagggtcatatactcaataaaacaaatatttaccaagcatttactgactggaagataaaaagcacaaagcataattataaaatattttcccctgccaccataaaaaaaaaattaaaaaggcctacagaatatagcataacatgaccaaagcaaaaacagtgaggaccaaagaggggaggaagggaaaatatcagcatgaactgaataygacccaggagagccttgatggtcagacatgtaaagacaaattgggtagggtgaaggggtggaggtcagggacgcatcctacaggggaaaaacagctcacacagaagcctgaaaggaaaagcgcgaagacacctgtac

SEQ ID NO: 13750 - DNA, 545 bp, Homo sapiens
tatcaaggggaaacaataaaagcataamagttaatttttcattaaacaaatgcattcctgcctgcaatgagctgcacgttcgtttcctcctcaaattcgtatgttgaaatcccagctcccacagtgatgatattaagtggggcctctgtgcttgtggtctatgctactcagaaggctgagtcaggaggatccctggagcccaggagttggaggctgcagtgagctatgatggcaccactgcgctccagcctgggtgacagagtaagaccctgtctcaaaacaaaaaaaaagtggggcctttgtgaggtgattaggttataggggcagacccctcaagaatgggattagtaccattgtgaaagggactcgaaaaagccctctaaccctctctctgccttgtgaggatacagtgagaaggtggctatctgtttgcaccctggaagagggcctagccgtgctggtaccctggtctcagactgccagcctccagaactgagaaaccaatgtctgttgcttctaagctacccggtctatggtactttgtt

SEQ ID NO: 13751 - DNA, 545 bp, Homo sapiens
tatcaaggggaaacaataaaagcataaaagttaatttttcattaaacaaatgcattcctgcctgcaatgagctgcacgttcgtttcctcctcaaattcgtatgttgaaatcccagctcccacagtgatgatattaagtggggcctctgtgcttgtggtctatgctactcagaaggctgagtcaggaggatccctggagcccaggagttggaggctgcagtgagctatgatggcaccactgcgctccagcctgggtgacagagtaagaccctgtctcaaaacaaaaaaaaagtggggcctttktgaggtgattaggttataggggcagacccctcaagaatgggattagtaccattgtgaaagggactcgaaaaagccctctaaccctctctctgccttgtgaggatacagtgagaaggtggctatctgtttgcaccctggaagagggcctagccgtgctggtaccctggtctcagactgccagcctccagaactgagaaaccaatgtctgttgcttctaagctacccggtctatggtactttgtt

SEQ ID NO: 13752 - DNA, 515 bp, Homo sapiens
aaaggctgcaacattcctttcagtgccatggtggtttcgcccaaagcgatttgttgcagtcacactttaaacagtttaagaaagatctgtttttcaaaactgatcttaaattgttcaaacctgtaaatctttaggaatatctgattactaaactatatattgaggttgagtgaaagccaaaaaaacaaaatttcagcctaaactaactttgtgkacagctgcagttttccagtcttcatcagattcgtcagtgaagtgggcttgaatcatcacccagaaagattaagagccactttttggaaagttatttttaaggagctccgcatattttatgatgtttatcttcgtgccttcctaggttgcagatatcaagaaagtcaacaacttcatcagagaacaagacttatatgctttgaaatctgttaagattccagtgagaaaccatgggatcctgatggagacccacaaagaactgaaaccccttctgagcccgtcttccgagaccacagtgaccg

SEQ ID NO: 13753 - DNA, 645 bp, Homo sapiens
aataagtatggtttatattaaaatgtaattttttgatctgaaatttgcagtatggttcatatatgaaggtgctttgacaggttatgacagttttggcttttatgagtcagaatagaattcctctaatgacataagtaatgcaatacaattatgagcattattatagggtcttttaaaaatgaacactgtttaaatgctctacataaakttacatttgaaataaggtgcattattatgtgtatctattaatattactttcagttcctaattgtctttttcagttaataatacccttttttaaccaaaatagttgattacttctgtttaagaggcacaatactgtaattctgatgtttcagatagattgacacaaaataaaccagagatggcatttagaattttatatgccttaagtgcaatttttaattaaggttttctcttctcattgctggattttctaattatattcaaataataatgaggaagacctttctaaggaagccaaaacaatatgcacatctatactcttaaaggtactaatcaaagactatggggcataataatttggctcggctctgacattcagaattagttcccttgttcctcaattcctctgtgagcttgatttttctcccccaaaacata

SEQ ID NO: 13754 - DNA, 645 bp, Homo sapiens
aataagtatggtttatattaaaatgtaattttttgatctgaaatttgcagtatggttcatatatgaaggtgctttgacaggttatgacagttttggcttttatgagtcagaatagaattcctctaatgacataagtaatgcaatacaattatgagcattattatagggtcttttaaaaatgaacactgtttaaatgctctacataaatttacatttgaaataaggtgcattattatgtgtatctattaatattactttcagttcctaattgtctttttcagttaataatacccttttttaaccaaaatagttgattacttctgtttaagaggcacaatactgtaattctgatrtttcagatagattgacacaaaataaaccagagatggcatttagaattttatatgccttaagtgcaatttttaattaaggttttctcttctcattgctggattttctaattatattcaaataataatgaggaagacctttctaaggaagccaaaacaatatgcacatctatactcttaaaggtactaatcaaagactatggggcataataatttggctcggctctgacattcagaattagttcccttgttcctcaattcctctgtgagcttgatttttctcccccaaaacata

SEQ ID NO: 13755 - DNA, 645 bp, Homo sapiens
aataagtatggtttatattaaaatgtaattttttgatctgaaatttgcagtatggttcatatatgaaggtgctttgacaggttatgacagttttggcttttatgagtcagaatagaattcctctaatgacataagtaatgcaatacaattatgagcattattatagggtcttttaaaaatgaacactgtttaaatgctctacataaatttacatttgaaataaggtgcattattatgtgtatctattaatattactttcagttcctaattgtctttttcagttaataatacccttttttaaccaaaatagttgattacttctgtttaagaggcacaatactgtaattctgatgtttcagatagattgacacaaaataaaccagagatggcatttagaattttatatgccttaagtgcaatttttaattaaggttttctcttctcattgctggattttctaattatattcaaataataatgaggaagacctttctaaggaagccaaaacaatatgcacatctatactcttaaaggtactaatcaaagactatggrgcataataatttggctcggctctgacattcagaattagttcccttgttcctcaattcctctgtgagcttgatttttctcccccaaaacata

SEQ ID NO: 13756 - DNA, 610 bp, Homo sapiens
aacaattgaagagaataatttatcaaggattgaaataatcaactactcagaattcagaataactttgaaataatctggtgccccaaagatttcaagtawgaaattgttaatgagaacagtttagactaatagaagtcagaaaaagtatttttcagctaaatacattttttaatggctgaaacatatttaatatccttaattatgtccaaagttaagtcacagataaaaatgtagtgaagagtgattcttttttcagagaaaaatgtgggaacctacttgacaccaatttgagaattcaattccatattctgtttctgaggccttagatttccaagtttaaatagcatctcactttttaaataggcttaggaaaattaaatctgtgtccctgtctcagtgacgttcctacgataagggttaattaagtacccaaatttatatcagctaattttgtacctttaaacttatcttccattctgttattacctttgtctaacaaatgttcaaatattcttgctaaaataaaacaatacaaaatttccaaatggtggcatctaaaacagttacagagcatgtttccatgcatactactatgaaaaacagaaaacac

SEQ ID NO: 13757 - DNA, 741 bp, Homo sapiens
ttctacctcagcctctggagtagccaggactacaggcacacaccaccacacccggctaatttttttattttttgtagaaatggggttttgccatgttgctcaggcaggtctcaaattcctgccctcaagcaatccayccactctggcctcccaaagtgctgggattacagatgtgagccaccacacctggccttttttaaaaaaaaatctataagattgatagtcttctgtgatgaaaggattcccttgtgctcctctagccctttgaagcattggatttccaacagaatttttctgagggccttctcctgtttgggcacagtgtcacccacagcctttctccaggccggggcttctaccctttggcccacattctctgggccccgtttcctgaccaccagctgggcactggctctccaggaaccccatctgtcttcaagcaatactaaaggcaaaaacatcacctggcagaagaaacaaatgggaagacggtatttgatttactacctgtctgatatggtttggctcttgtgtccccacccaaatctcatgtcaaattgtcatctccagtgctggtggaggggcctggcgggaggtgattggatcgtggcggtagatttcccccttgctgttctcatgatagtgagtgagttctcaggagagctgatggcttaaaagtgtgtggcagttcccccttctctctcacctgtcatgctgtgaagaaggtgctttattcccctt

SEQ ID NO: 13758 - DNA, 741 bp, Homo sapiens
ttctacctcagcctctggagtagccaggactacaggcacacaccaccacacccggctaatttttttattttttgtagaaatggggttttgccatgttgctcaggcaggtctcaaattcctgccctcaagcaatccacccactctggcctcccaaagtgctgggattacagatgtgagccaccacacctggccttttttaaaaaaaaatctataagattgatagycttctgtgatgaaaggattcccttgtgctcctctagccctttgaagcattggatttccaacagaatttttctgagggccttctcctgtttgggcacagtgtcacccacagcctttctccaggccggggcttctaccctttggcccacattctctgggccccgtttcctgaccaccagctgggcactggctctccaggaaccccatctgtcttcaagcaatactaaaggcaaaaacatcacctggcagaagaaacaaatgggaagacggtatttgatttactacctgtctgatatggtttggctcttgtgtccccacccaaatctcatgtcaaattgtcatctccagtgctggtggaggggcctggcgggaggtgattggatcgtggcggtagatttcccccttgctgttctcatgatagtgagtgagttctcaggagagctgatggcttaaaagtgtgtggcagttcccccttctctctcacctgtcatgctgtgaagaaggtgctttattcccctt

SEQ ID NO: 13759 - DNA, 741 bp, Homo sapiens
ttctacctcagcctctggagtagccaggactacaggcacacaccaccacacccggctaatttttttattttttgtagaaatggggttttgccatgttgctcaggcaggtctcaaattcctgccctcaagcaatccacccactctggcctcccaaagtgctgggattacagatgtgagccaccacacctggccttttttaaaaaaaaatctataagattgatagtcttctgtgatgaaaggattcccttgtgctcctctagccctttgaagcattggatttccaacagaatttttctgagggccttctcctgtttgggcacagtgtcacccacagcctttctccagsccggggcttctaccctttggcccacattctctgggccccgtttcctgaccaccagctgggcactggctctccaggaaccccatctgtcttcaagcaatactaaaggcaaaaacatcacctggcagaagaaacaaatgggaagacggtatttgatttactacctgtctgatatggtttggctcttgtgtccccacccaaatctcatgtcaaattgtcatctccagtgctggtggaggggcctggcgggaggtgattggatcgtggcggtagatttcccccttgctgttctcatgatagtgagtgagttctcaggagagctgatggcttaaaagtgtgtggcagttcccccttctctctcacctgtcatgctgtgaagaaggtgctttattcccctt

SEQ ID NO: 13760 - DNA, 497 bp, Homo sapiens
taaaatgtattattagtaatttatttacccatttttattacttactgccagagtaataaaagtattatcgttctacatttatttttytttttctattttatgtgtttagagtaactttgttcaaatttctagatgaatagtcatagatttttagtagtgtcactcaatttttccaactattaaaaaacaagacagaatcaatcagtgatctatctttaaaatgttaaaagatatcaaagattattttattattcttaaatttgctaaaagctaaaaattataatgaacctgtgttgttgaaatagtctcttggaattcattaaactaattcgtttttcattttctcctcacccacactaacatttcaaattaccttataatttgaacttctagtgattttctgaccccagaaaaatggactacagtaagattagtgatgcattgtatgtgtgtttatgtgtgtgtgtagtaacagaaaggcggaatgtgaaacggaa

SEQ ID NO: 13761 - DNA, 542 bp, Homo sapiens
caccaactttcaggatcattattagtcattgctgcattttatgtgtgtagttcaaatgataatatgtgtaaaagaaaatagaattttaacagtaagtttttacagattttaacttcaagttacatatttgaagttgaatatttggatattaagaatctcaatgaaacccttgcttttactgtgaacattgttttactttaaacctcataataactccygtcaaaaataaaattaggtcaaattagataatttttaaagtttattgtgcatacaaaagaacagtttgctaaccaggaaaccataaagtgaaaatggtaagaagcaccacttatagcaataataacataatatatcaagcaaaaaacaggaagtattttgccctgttttgcaaggtagtagtatgctgttcagaaagcattgcagatagtgtcattaatcatgtaggaaacaatataaaatcaaattctggtgtgttggcaaaggtttaacaaccaattctacaaaaacaaaaaccaaacggaaacagaagactgctttgtaga

SEQ ID NO: 13762 - DNA, 538 bp, Homo sapiens
atttatcatcctggctgataccagaactcaataggaaaatcgttcaaattctttgcaaattctgcatcacatataaagtgctaaagcatattatatgattttaatatcatggctctgtycaaataaaatattttgacattgcccaaattctaacataaatgattataaaagaccaaatattaaacaaacacacttgatttgttactatttattttcatgagttgtgtatgactgtctagataaatgtactttgggaacattgtatagagctaaaaaattgaaaaaatacttagtaaattatgatttattcaattagttaattcattcgtgagtttccttagttctgtgtttccttatgtcatcacatttgtcacagtgagtggtgattatccatgtaactgtatgtttttctacctattccaaggcctttaaccagagccgcacatcagaatgaattagatgatttgaagcacacacatgcacatttgcgtacacttctaggcctaccctcagaaacacagtcagtggatccaggata

SEQ ID NO: 13763 - DNA, 538 bp, Homo sapiens
atttatcatcctggctgataccagaactcaataggaaaatcgttcaaattctttgcaaattctgcatcacatataaagtgctaaagcatattatatgattttaatatcatggctctgtccaaataaaatattttgacattgcccaaattctaacataaatgattwtaaaagaccaaatattaaacaaacacacttgatttgttactatttattttcatgagttgtgtatgactgtctagataaatgtactttgggaacattgtatagagctaaaaaattgaaaaaatacttagtaaattatgatttattcaattagttaattcattcgtgagtttccttagttctgtgtttccttatgtcatcacatttgtcacagtgagtggtgattatccatgtaactgtatgtttttctacctattccaaggcctttaaccagagccgcacatcagaatgaattagatgatttgaagcacacacatgcacatttgcgtacacttctaggcctaccctcagaaacacagtcagtggatccaggata

SEQ ID NO: 13764 - DNA, 538 bp, Homo sapiens
atttatcatcctggctgataccagaactcaataggaaaatcgttcaaattctttgcaaattctgcatcacatataaagtgctaaagcatattatatgattttaatatcatggctctgtccaaataaaatattttgacattgcccaaattctaacataaatgattataaaagaccaaatattaaacaaacacacttgatttgttactatttattttcatgagttgtgtatgactgtctagataaatgtactttgggaacattgtatagagctaaaaaattgaaaaaatactyagtaaattatgatttattcaattagttaattcattcgtgagtttccttagttctgtgtttccttatgtcatcacatttgtcacagtgagtggtgattatccatgtaactgtatgtttttctacctattccaaggcctttaaccagagccgcacatcagaatgaattagatgatttgaagcacacacatgcacatttgcgtacacttctaggcctaccctcagaaacacagtcagtggatccaggata

SEQ ID NO: 13765 - DNA, 538 bp, Homo sapiens
atttatcatcctggctgataccagaactcaataggaaaatcgttcaaattctttgcaaattctgcatcacatataaagtgctaaagcatattatatgattttaatatcatggctctgtccaaataaaatattttgacattgcccaaattctaacataaatgattataaaagaccaaatattaaacaaacacacttgatttgttactatttattttcatgagttgtgtatgactgtctagataaatgtactttgggaacattgtatagagctaaaaaattgaaaaaatacttagtaaattatgatttattcaattagttaattcattcgtgagtttccttagttctgtgtttccttatgtcatcacatttgtcacagtgagtggtgattatccatgtaactgtatgtttttctacctattccaaggcctttaaccagagcygcacatcagaatgaattagatgatttgaagcacacacatgcacatttgcgtacacttctaggcctaccctcagaaacacagtcagtggatccaggata

SEQ ID NO: 13766 - DNA, 538 bp, Homo sapiens
atttatcatcctggctgataccagaactcaataggaaaatcgttcaaattctttgcaaattctgcatcacatataaagtgctaaagcatattatatgattttaatatcatggctctgtccaaataaaatattttgacattgcccaaattctaacataaatgattataaaagaccaaatattaaacaaacacacttgatttgttactatttattttcatgagttgtgtatgactgtctagataaatgtactttgggaacattgtatagagctaaaaaattgaaaaaatacttagtaaattatgatttattcaattagttaattcattcgtgagtttccttagttctgtgtttccttatgtcatcacatttgtcacagtgagtggtgattatccatgtaactgtatgtttttctacctattccaaggcctttaaccagagccgcacatcagaatgaattagatgatttgaagcacacacatgcacatttgcgtacacttctaggcctaccctcagaaayacagtcagtggatccaggata

SEQ ID NO: 13767 - DNA, 232 bp, Homo sapiens
ctccccccaagattcaagaagcagctttgttcactaaaattcacacaggtagwcagcatcaagtaacatttttaagcagtaacagtaacaacaacaaaaaatggttgaaacaatgataaagtgtttccagatgaggaagtttggaaacatgaaagttggtaggcttttttttttttttttttttttttttgagatggggtctcaatctattgcccaggctggagtgcagtgg

SEQ ID NO: 13768 - DNA, 945 bp, Homo sapiens
tgttgcttaaatttatatgatgagtagtatattagtccattctcacactgctaataaggatatacccaagactgggtaaaggaaagaggtttaattgactcacagttcagcatggctggggaggcctcaggaaacttacaatcatggcggaaggggaagcaaacatacccatcttcacgtggcagcagcaaggagaagtgccgagcaaaaggaggaaaagctccttataaaaccatcagatcttgtgagaactcactcagtatcatgagaacagcatgagggtaatctcccatgtgattaaattacctcctactgagttcctcccacaacatgtgggcattatggcatctacaactcaagatgagatttgggtggggacacagtcaaaccatatcaggtagtgtgacttgaagccatcccaaatttctgtgataattaagaaagacaacataggaatgtgtccccagcattagggaagtaatgagatgactaaataataaaaattacactactgctgttaaggaggtatttaattgtgttacactgaaatttaagctactacaaaatgtataaaacatatgtgtatgatttaaagactagtgtaccaatatatccatcacccaaatgaaaaaatagaatattactaktatcttggaagcctccatgtgcctttctccaagcacattctcccatcagccagttgagtaatggtttagatgagaatcacctggggagccttttgaactgtattgatacactgatgccaatcctattacacattagaatgaggggagtccaggaacatgtgtgtgtataggtgtgtgtgtgtgtataaagtttttattataatatgcagctaaggataaaaccactgcactaaaagagttcttctcaaactataatgtgcatacaaatcacctaaaaatcctgttaaaatgcagccca

SEQ ID NO: 13769 - DNA, 1404 bp, Homo sapiens
taccccattatatgttctatttatgaataccttccttggtccatgaatctgccttcactctccgtattcttcttcagacctagacagtatgcttttaagaactgagtaacttcattcaggatatggccactactatgaagatgacttttggacaaaggactggttttaggaatcctgaaagtttctgggagactttaccagtcttatttctgcaagtcatgattaccacatattttgtagctaaacaattgctgttcctacacagtaagatcatcatcttggtaagtgacattttcatcagtatgggttattctttcattccataatatcctatcacccagacttggccttcgggttctggttcacccttagatatttatgttttaygttctcctgtgacagttaatttatcttgagcatatctcagtccccaaaaaaaatgctctaatttttttatatttttaaatgactgtcacagcagcattattcagaatagttaaaaagtagaagcaacccaagtatccatcagcgaattcggattaaaaaattctgcaggcaaccaaacttttattcaagtgagaggaaatcagaaaatgcaagtatccatttaccattcatgggggaaataattctttgatacttaagaaaataccacagctgactaaaagaataaataaaactattaaatctcaagaggtaatatgatattaaaaattgattatgtatactgcacccattaaaattaacattaataaataattactaatttttaacataaatatgttacataattcttgtatcaaatatatttcttgggaaagaaaatacacaaaataaaaaaataatattttttataccaggaatgtgacctaaaaaactaattaattaatacatgttgagcaggagtagagaagaggaaagtaaaagtgtgataattctcttacataggagaatcagtaacagtcttccattcttataattggttgaaaattacatatatatgctaatctctgtgtatatgtatattttatatacatataatatgcatatgtgaatataatatatgtatatataactgtagaacaaaaatgtgcattctataaatgggaatatagaataaaatttgtaggaaaaaataactaataggaaaaaagaagagctacaatgacatataaagtatagggaagaagaaaacggtaagtataaaccacagagaataaaataaaatggcaaaataagaccatacctgacttagcacagtgaatataaatggcttaaaaggtaccaataaaaggcaaatacaatcagattatatcaaaaggtaaaaatctaaatttactaattataagatacacatatataaacaaattgacaaagaaatgttgaaaataaaggggttcaaaa

SEQ ID NO: 13770 - DNA, 618 bp, Homo sapiens
atccatgtgtttcctagttgtctaactcaaaaaagacaatatggaccacctggacagttgtaatttattcctgttgttttcatgtcattatgaataacccctgcttttattctcaaaagcatgaaatgtgattctaaatgatatgcacactatagctaaggctccaagatgcttttttgttgttatgcactatcacatcaatgaatggagtacacctataaatattattccgaatgtggagaaatctccccatctatttgcaaggatatctttgttcctttgctccattatttgtagggtctcatggaaagaggcttgcaggaagagagttctcattttcattcagattatccaattctattacctcaacattgaaacatcaaagtctattttgcttctaaattataataacacttattaacatagaaaaaatgtcactgttggtgggactgtaaactagtccaaccagtgtggaagtcagtgtggcgattcctcagggatctagaactagaaataccatctgacccagcgatcccattactgggtatatacctcaaggattatacatcatgctgctatatagacacatgcacacgtatgtttattgyggcactattc

SEQ ID NO: 13771 - DNA, 618 bp, Homo sapiens
atccatgtgtttcctagttgtctaactcaaaaaagacaatatggaccacctggacagttgtaatttattcctgttgttttcatgtcattatgaataacccctgcttttattctcaaaagcatgaaatgtgattctaaatgatatgcacactatagctaaggctccaagatgcttttttgttgttatgcactatcacatcaatgaatggagtacacctataaatattattccgaatgtggagaaatctccccatctatttgcaaggatatctttgttcctttgctccattatttgtagggtctcatggaaagaggcttgcaggaagagagttctcattttcattcagattatccaattctattacctcaacattgaaacatcaaagtctattttgcttctaaattataataacacttattaacatagaaaaaatgtcactgttggtgggactgtaaactagtccaaccagtgtggaagtcagtgtggcgattcctcagggatctagaactagaaataccatctgacccagcgatcccattactgggtatatacctcaaggattatacatcatgctgctatatagacacatgcacacgtatgtttattgcggcactrttc

SEQ ID NO: 13772 - DNA, 1217 bp, Homo sapiens
tagctctgactttaggatcagaggaaattagattcaagtctgatacttcctacttatgattactcaggaccctctacccttcatttaatttaacataaaaatatataaaaatgcttatttcacagggttgtagtgtggagtaagtgtgaaacaactatgaattgctcagaacagtgttggaatgttaccagtgttacaagcttttaccattacataacaactgtaagtctttcttgctgtagaataataatggtaatgttatctcttggagggaagcttaacatacagctacccaagttgaagttgaggagcagtttactgccatgcagtgccatgtaagaccatactggagcctgagcaaagtgaaaattaaatgtatatgcgtgtgcgtgtgcgtgtgcgtgtgtgtgtgtgtgtgtgtttatgctggtgttttaaaaaatatattaacccattacaggctcacgcctgtaatcccagcattttaggaggctgaggtgggcagatcacttaaggtcaggagtttgagaccaacctggccaacatggtgaaaccccgtctctagtaaaaattcaaaaattagctggacgtcgtggcacccacccataattccagctactcgggaggctgaggcaggagtatttcttgaatcctggaggcagaggttgcagtgagccgagattttgccactgcactccagcctgggcaacatagcaagaatccatctaaaaaataaaataaataaatatattatattaaaatgcgttttatcttattatttatgagatttttttcatcccagttatatgacttttaacaaaaagacaagtaacaatggatgctggcaatgatgtaaaggaagggaartattcctgttcgcaggaatgtaaagtagtactgctgctatggaaaggagtatggaggttcctcaaaaaaataaaaatagaattaccatgtgatccagcaatccagaagcttggtatatatccaaagaaaggaaatcagtatattgaaaagatacttgcacccctatgcttattacagcactactcacaaacagcaaacatgtggagtcaacctaagttttcatcaaaagatgaatagataaataaattatggtatgtacacacagtggaatatgattaacccataaaaagaatgaactcctgtcatttgcactaacatgatggaactagaaaacattatgctaagtgaaa

SEQ ID NO: 13773 - DNA, 546 bp, Homo sapiens
tgcacttttccagaaatttgcctgtaatggtactgtgattgaacatcctgaatacggagaggttattcagcttcaaggtgaccaaagaaaaaacatctgccagtttctcttggaggtgagtgattgggtgctttatgtgtaaccttgagattgcttttaaaattgtatttaaaggcaacatgatttgttttctactaagtaaaaaatcatacgaatgaaggaaattaggtgaaataaagacatggtagttatttggaaagcaaagacctttatctggtttattttgtcattagagtattctgatcatttctktatatacacacacaggctatttcttggcatgtaaagtattcaaatacgtgttgaattgttggctatcagcagtgcatgccacagacaacagtgttgcagtaagctgttgatagtgattctttttaattactcttccatgttttcttaatgaatttttatatttctcagagttattttgctaaattagattttattttacaggttggcattgtaaaggaggaacagcttaaggtt

SEQ ID NO: 13774 - DNA, 1719 bp, Homo sapiens
taatggtaataggtcacttataagacctcctaccaaagacacctggaaagaaaccaataatgaaaagtgattaaggttgggcctggtggctcacacatgtaatcccaggactttgggaggccgaggtgggaagtttgcttgagcccaagagttcgagaccagcctgggcaagatggcaaaactccactacaaaacacacagagacacacacacacacacacacacacacacacaaattggccagacatggtggtgcacatttttagtcccagctactcacgaggctgaggtgggaggatcacctgagccgaggaggtcaagtgtgtggtgagctgtgatcgcaccactgcattccagccagactgggcaaaagagtgagaccctgtgtcttaaaaaaaaaaaaaaaaaggactaaaagtgttttttaataggcacaagtttctttcattggaaagtttaaaatgttactgaattcccgaagattcattaagttcattttgcacgttgtatttgcatttgcatgagtatagcattgttatggcttatttttgagtaaagttaataagttactaaacctttgagttttatactcatattgttaaatagtaaaataatacccacagagatacctgtctgactttcaatatgtctttattttggtagaatttttataagaaatgacggagaaaactcagaatatttgggagatgttacgcagaaaaatagctactcatcatttctcctgtgtcaaataatattagccatttaataatgcaattgctagcttttgtaacacgtcttcatcatgtatttacatatactgtaaaacaaacataattatttcttagtgataaacactcagatatagactttaacagaaaatccctttacgggaaactgtcctttgactaagtacaactatagtaagcgatttcaaaagaagcagagaaaaaaaaaaaatcccaattatataattccataaaggctacagtgttatagctatttttaactgtaacacctttcagtgtttgtatttcgttaccaaggaattaaactatatataataaatgtgtatatatgcaacatacagtgctatgtgtgtatatgtataaaacataacttgtgtatacatataaaccatatggggtgtgtgtatatatatatgtatataacatatggtgtgtgtgtgtatatagcttaattcatattaaatctgactatagtattatgcataaaagtgatttgtaatttataccgtgcaaataaaataactgcagctgggtgtgtatatatatacacacacatacacatcccacagcaaagattaaattaagaaatacagagcttagctttagttcagcaagcttcaaaagggtttggatgtcagggttagttccctttaactaagcccataagtttttccctttaacacattccttttttctccccatttctgcttaaatgccttactggcagcctggcagcactgactttccttgtattcttttttttttttttyttttttttgagactgagtctggctctgtcgcccaggctggagtgcagtggcacaatctcggctcactgcaagctccgcctcccaggttcacgccattctcctgcctcagcctccggagtagctgggactacaggcgcccgccaccgcgcccggctcattttttctatttttagtagagacggggtttcaccgtgttagcc

SEQ ID NO: 13775 - DNA, 1719 bp, Homo sapiens
taatggtaataggtcacttataagacctcctaccaaagacacctggaaagaaaccaataatgaaaagtgattaaggttgggcctggtggctcacacatgtaatcccaggactttgggaggccgaggtgggaagtttgcttgagcccaagagttcgagaccagcctgggcaagatggcaaaactccactacaaaacacacagagacacacacacacacacacacacacacacacaaattggccagacatggtggtgcacatttttagtcccagctactcacgaggctgaggtgggaggatcacctgagccgaggaggtcaagtgtgtggtgagctgtgatcgcaccactgcattccagccagactgggcaaaagagtgagaccctgtgtcttaaaaaaaaaaaaaaaaaggactaaaagtgttttttaataggcacaagtttctttcattggaaagtttaaaatgttactgaattcccgaagattcattaagttcattttgcacgttgtatttgcatttgcatgagtatagcattgttatggcttatttttgagtaaagttaataagttactaaacctttgagttttatactcatattgttaaatagtaaaataatacccacagagatacctgtctgactttcaatatgtctttattttggtagaatttttataagaaatgacggagaaaactcagaatatttgggagatgttacgcagaaaaatagctactcatcatttctcctgtgtcaaataatattagccatttaataatgcaattgctagcttttgtaacacgtcttcatcatgtatttacatatactgtaaaacaaacataattatttcttagtgataaacactcagatatagactttaacagaaaatccctttacgggaaactgtcctttgactaagtacaactatagtaagcgatttcaaaagaagcagagaaaaaaaaaaaatcccaattatataattccataaaggctacagtgttatagctatttttaactgtaacacctttcagtgtttgtatttcgttaccaaggaattaaactatatataataaatgtgtatatatgcaacatacagtgctatgtgtgtatatgtataaaacataacttgtgtatacatataaaccatatggggtgtgtgtatatatatatgtatataacatatggtgtgtgtgtgtatatagcttaattcatattaaatctgactatagtattatgcataaaagtgatttgtaatttataccgtgcaaataaaataactgcagctgggtgtgtatatatatacacacacatacacatcccacagcaaagattaaattaagaaatacagagcttagctttagttcagcaagcttcaaaagggtttggatgtcagggttagttccctttaactaagcccataagtttttccctttaacacattccttttttctccccatttctgcttaaatgccttactggcagcctggcagcactgactttccttgtattctttttttttttttttttttttttgagactgagtctggctctgtcgcccaggctggagtgcagtggcacaatctcggctcactgcaagctccgcctcccrggttcacgccattctcctgcctcagcctccggagtagctgggactacaggcgcccgccaccgcgcccggctcattttttctatttttagtagagacggggtttcaccgtgttagcc

SEQ ID NO: 13776 - DNA, 477 bp, Homo sapiens
tatatatatatatatatatacttttttttttttttttttttttttttttttgagatggagtttcactctgtcacccaggctggagtgcagtgtcaacatctcggctcactgcaacctccgcctcccaggttcaagcaattctcgtgcctccgcctccctagctggaattacagatgtgtgccaccacacctggctattttttgtgtgtgtgtttttagtagagacgaggtttcactatgttggccgggctggtctctaactcctgacctcamgtgatccacccacctcagcctcccaaagtgttgggattaaagatgtgagccaccgtgcctggcctccatataattttatgtagatttatactggtggacaatattatacacctatagtttaaaaggaattcacaagaaaaccacaagtgaagatcagcaagaaataaataaatgataatttcaggccgggctcagtggcttacgc

SEQ ID NO: 13777 - DNA, 858 bp, Homo sapiens
cagtgagcaattcttttgctttatggcttattcacagggtggttctgaggctgtttcaggaccaggctgggtgatcaatacttaatmaacccacagactacaattcatgacatcacttttttggagtcatccgttcaatcctgttctcagtcctccactactacattaaaacctacagaaacactgccaaaagtgtcctagtttttgccctagaagcagactcagaggcccctgaaattagttctctgagatattttctatgtttctgcaccctccctccccaccgcacccttttcttttggtggtcatgaagttttgttctgttttaaaatcagccagaaaaggaaagtactagtgccttatagcacatgtaattcatcaagaacgtgaatacatcccacttcacattcaatcaacaaacacctcttgatatcctcataaagatgctggatttagtgcaggggatttgggagtgaggacgatagtaacaacattatgaagagagagaagttacaactcttggcctcaataaaccaaaatcatttttgggaagaactacttgggctcatgtgaaaggtccgtgatgaatcaaggcaaatgtccaaggagaagtgaaatgagtaataccaaatccatgctattcctacaactgcaaacacactcctggtctcatgacttcttcattcaatgctcccttggcctggaaactttatccctcagctttccatactttatgcatctctctgctcaaatgccatcttagtggaggaggctttcccctatcagaaatttcttaccctgttttatttcctttacaggagctaccactgcctgacacattatatattttttgtttgt

SEQ ID NO: 13778 - DNA, 709 bp, Homo sapiens
tgggctggaggacattagcaatggggacctattctctgtgaaatagtcgttcaatgacaacaacacttcttgacataatctgcagtctctcaaatatctaataccagcctcctaagcagtcccaccaggaacagatctgtcctatgagcagacttggaccatctaacccaatttcttcaattttcaaatgaaacaaaaccaaacgcaagcatttttcctctctgaggccatcaggtagttagtggcaaagcggtgattagcacccaatcatctgacgcctgctgtagtgctttttctgctctaccgtgctgactatttaaagaagtacaactcccaaagtataatrcacctttgagcactaaattcaatttactatccatctctccttaattgagtttggtttccattctctccttagaaaacactttaaccttcaaatattgggctctgtccaaggcagggctacccacacgttactttgagctttgattttaaaagctcctatgggtactttcggtaggggcattaatctcttaggtgtaagaatcttatgtagcattaactctggtccaagctgatgttttcttttctgttcagaattggcagtgagttctgcagtgtagctaaccaatgagagtttttattttattattattatttttaatctctcaccttccatagttaagagagagaaagcttcagacacaca

SEQ ID NO: 13779 - DNA, 578 bp, Homo sapiens
cactccagcctgggtgacagagtgagactccatttccaaaaaaaaagaaagaaagatggctaggacatgtcaccaaggggagaagggcagcatgtagaacaagacagagacatggacacaacctccagtgatgtaaacacaggcggtacaattataaggcaaggcaaggcagtgacttctggaaaagtcaatgtgggggcaagagggagccttgactaggaagggtgcataagacctccggagggcatcaaagttctatttctatgcccggcaggaaggctgcaaggatgctctacaagaatctgttaaactgtacattcatattcagtgcatttttgcaaaagggagtgtttaataataaagaagttttttagccccataaaacaraactctgtgtgagttggcctggccctggagccttgacccctgccccgtctccaggcctggaatgctgccgtgagggctggaggtgttgcagccaacaaaaaaaaccacaaggcagcaggcacaggaccaacagccaacagcaaggatgtgggaagtggacccagcctggacccaagccacactaaacccaa

SEQ ID NO: 13780 - DNA, 462 bp, Homo sapiens
ttttgggagaaaatcaactgctgagggttaaggactgaatccagattgaagactttatctaatcatcagcaccttggattaccaaatttgtrtgcatcctttggagttgaaagtaccatgaataaaggcaagaaaaaagagggcagtcaaataaatagaaattggagatcatgtagccaaagctcctcaaacctatgtacatttggactttgaattgtcaatgggcacaccaagatttttgaagctttgactgtctataaggcttggtggcctcaccagcatgcctagttgcactgcatgttattgatatacagcagctggggccattctcctaagcatgatacagaagcatacatttgtgtgaagtggttttttaagcaaagcccacacgtgggacatctctccttgtggctttaagcactgatttccctgccacagtcttagtcacagggcacgtcagtg

SEQ ID NO: 13781 - DNA, 666 bp, Homo sapiens
ttgtagctcccataattcccacatgttgtggaagggacctggtgggagataatttaatcatggggataggtctttctcatgctgttctcatgatagtgaataagtctcacaagatctgatggtttcaaaaatgggagcacatgctctctttttgcctactgccatccatgtaagacaagacttgcttctccttaccttctgatatgattgtgaggcctccccagccacgtggaactgtaagtccattaaacctccttttcttcccagtctcgggtatgccttcatcagcagtgtgaaaatggactaatacaagcaacatcttcgaaaaaacacataaccaggraaaggaattacattgaaatggtaacagtcatctaggttactatacactggtggggttatttttaaagttatcctatagcttgataatcacacctgttacttagtttttgtgtgtttagaattgatgtgccaactaagtaccttaattaagcattgcttgatcccacagtcctcatgggttcttaccctagttatcagagagtttaaagtcaacatttaagcctatgatttattaagcatctactacaggcacaaaagggttctgtgtactctgaaacagattattgagatgaagtccctcttatgtataacagtttaatggca

SEQ ID NO: 13782 - DNA, 510 bp, Homo sapiens
acccaggctggagtgcagtggcgcaatcatggctcacctcagcctcaacctcccaggctcaggtgatcatccacctcagcctccctagtagctgggacgacgggtacccaccaccacacctggctaatttttgtactttaaattttttttttttttttttgagacagggttctgcatgttgcycaggctggtctccaacttccgggctcaagtgatccgcccacctcagcctcccaaagcaagaggattacatgcatgagccaccatgcctggccaagtgagcctcttcaagcctcagtttccaccttataacgtggagattaagatttccttattgggagggttaactgatacataaaggcaaagtacctggcacaatatctattacataatgggtgcccggatcatggtagctcttattattcatattttatcaacagaatgtccaccatccacagtgtgctcttctgtggtggtcatcaggctccccagccattaggctgttcacaa

SEQ ID NO: 13783 - DNA, 528 bp, Homo sapiens
ttcctcagacaatttctgcttcccactggtgtggcaggtgccccaacctcagaatcgtcgccctggttttaccacttggagctgttgtagactaattcactgagggagagaaaaattggattccttcaggctaatcccttcatggaaattaaaacttggcactcagaaagaggatttatatttttctaccagcttcaagrttcactaccaaagggatttccctctccttccttcattttcctcaaaatctctagccttgtctgtcacttatttctgtttcataagtagcatgagacaaagggccagtgacaagtttttccttccctgctcatcctcctagagctacagagtccacacagggaggcagagagagagaacccaaacacgcacagacctaccaaccaatctccactcaccacatctgcctccaggccatttatttcattatagcacaggatgctcaagagaactcagggagggggacaatttcatttttcctacactttggaaattaaaattatttccaaa

SEQ ID NO: 13784 - DNA, 524 bp, Homo sapiens
gaaaaataacatattgccccaatgtattacctaagtgtctcagtgtcagcattatttataacayttaaaacacaaaaattgaaaacataaagtcacagggaatttatcaatggcaattacaaataactacagaataaaattaagcatatacatacactttttcagcattttatgggtacaaaaacattatttgacataactaaaaaatcagggtattcatatgctacaacttccattatccaaatataaagtggaagaaaacacatcaaaattttaacaattattatctgtacatcatcgggttatgggtttcattttttatgctctgtattttataaaatacatttgataagcacgcattacttaaacagcttttaggcatttaaaaaatcaattacctaataacagtccaaaggaaataaacctgggcagaaactcatgtgaaaaagattctgggaatgtttgttgatcacaagatgattataaaacaatgataaacatgaactagctatccaggaatctac

SEQ ID NO: 13785 - DNA, 524 bp, Homo sapiens
gaaaaataacatattgccccaatgtattacctaagtgtctcagtgtcagcattatttataacatttaaaacacaaaaattgaaaacataaagtcacagggaatttatcaatggcaattacaaataactacagaataaaattaagcatatacatacactttttcagcattttatgggtacaaaaacattatttgacataactaaaaaatcagggtattcataygctacaacttccattatccaaatataaagtggaagaaaacacatcaaaattttaacaattattatctgtacatcatcgggttatgggtttcattttttatgctctgtattttataaaatacatttgataagcacgcattacttaaacagcttttaggcatttaaaaaatcaattacctaataacagtccaaaggaaataaacctgggcagaaactcatgtgaaaaagattctgggaatgtttgttgatcacaagatgattataaaacaatgataaacatgaactagctatccaggaatctac

SEQ ID NO: 13786 - DNA, 524 bp, Homo sapiens
gaaaaataacatattgccccaatgtattacctaagtgtctcagtgtcagcattatttataacatttaaaacacaaaaattgaaaacataaagtcacagggaatttatcaatggcaattacaaataactacagaataaaattaagcatatacatacactttttcagcattttatgggtacaaaaacattatttgacataactaaaaaatcagggtattcatatgctacaacttccattatccaaatataaagtggaagaaaacacatcaaaattttaacaattattatctgtacatcatcgggttatgkgtttcattttttatgctctgtattttataaaatacatttgataagcacgcattacttaaacagcttttaggcatttaaaaaatcaattacctaataacagtccaaaggaaataaacctgggcagaaactcatgtgaaaaagattctgggaatgtttgttgatcacaagatgattataaaacaatgataaacatgaactagctatccaggaatctac

SEQ ID NO: 13787 - DNA, 524 bp, Homo sapiens
gaaaaataacatattgccccaatgtattacctaagtgtctcagtgtcagcattatttataacatttaaaacacaaaaattgaaaacataaagtcacagggaatttatcaatggcaattacaaataactacagaataaaattaagcatatacatacactttttcagcattttatgggtacaaaaacattatttgacataactaaaaaatcagggtattcatatgctacaacttccattatccaaatataaagtggaagaaaacacatcaaaattttaacaattattatctgtacatcatcgggttatgggtttcattttttatgctctgtattttataaaatacatttgataagcacgcattacttaaacagcttttaggcatttaaraaatcaattacctaataacagtccaaaggaaataaacctgggcagaaactcatgtgaaaaagattctgggaatgtttgttgatcacaagatgattataaaacaatgataaacatgaactagctatccaggaatctac

SEQ ID NO: 13788 - DNA, 541 bp, Homo sapiens
ttaatcattaactaagtttctcataattgtcatctaaacctcaaaggtgatagaaagatatatgttatccctgccattaagttgtttacaatttaatcaacattataaggtttgtgcacaaataaataattcaggacacaaggtgataaacaccmtaaaagaggggaaattaagatgtacttggagttcaaaggagataaatattgcttttggatagggagaatatgaacaaaatagtatttaagtaaagccataaacaaatatttagaatttggacttggagggatattcggacaagagagtaagatattacaggaaagaggtgattgtaacaacaacaacaaaactgctgagatgtaaaaaacattgggtaatcatgagcagtgctgaataaataaagtgagtgatatgaggtaatgtactgacagataagactggaaagataagttaggagcagaggaatatggggagtgcattgctaaacaacttaaaatttgtttggtgtggaggagtttctaagggttgggcaattagtgacttt

SEQ ID NO: 13789 - DNA, 541 bp, Homo sapiens
ttaatcattaactaagtttctcataattgtcatctaaacctcaaaggtgatagaaagatatatgttatccctgccattaagttgtttacaatttaatcaacattataaggtttgtgcacaaataaataattcaggacacaaggtgataaacaccctaaaagaggggaaattaagatgtacttggagttcaaaggagataaatattgcttttggatagggagaatatgaacaaaatagtatttaagtaaagccataaacaaatatttagaatttggacttggagrgatattcggacaagagagtaagatattacaggaaagaggtgattgtaacaacaacaacaaaactgctgagatgtaaaaaacattgggtaatcatgagcagtgctgaataaataaagtgagtgatatgaggtaatgtactgacagataagactggaaagataagttaggagcagaggaatatggggagtgcattgctaaacaacttaaaatttgtttggtgtggaggagtttctaagggttgggcaattagtgacttt

SEQ ID NO: 13790 - DNA, 541 bp, Homo sapiens
ttaatcattaactaagtttctcataattgtcatctaaacctcaaaggtgatagaaagatatatgttatccctgccattaagttgtttacaatttaatcaacattataaggtttgtgcacaaataaataattcaggacacaaggtgataaacaccctaaaagaggggaaattaagatgtacttggagttcaaaggagataaatattgcttttggatagggagaatatgaacaaaatagtatttaagtaaagccataaacaaatatttagaatttggacttggagggatattcggacaagagagtaagatattacaggaaagaggtgattgtaacaacaacaacaaaactgctgagatgtaaaaaacattgggtaatcatgarcagtgctgaataaataaagtgagtgatatgaggtaatgtactgacagataagactggaaagataagttaggagcagaggaatatggggagtgcattgctaaacaacttaaaatttgtttggtgtggaggagtttctaagggttgggcaattagtgacttt

SEQ ID NO: 13791 - DNA, 541 bp, Homo sapiens
ttaatcattaactaagtttctcataattgtcatctaaacctcaaaggtgatagaaagatatatgttatccctgccattaagttgtttacaatttaatcaacattataaggtttgtgcacaaataaataattcaggacacaaggtgataaacaccctaaaagaggggaaattaagatgtacttggagttcaaaggagataaatattgcttttggatagggagaatatgaacaaaatagtatttaagtaaagccataaacaaatatttagaatttggacttggagggatattcggacaagagagtaagatattacaggaaagaggtgattgtaacaacaacaacaaaactgctgagatgtaaaaaacattgggtaatcatgagcagtgctgaataaataaagtgagtgayatgaggtaatgtactgacagataagactggaaagataagttaggagcagaggaatatggggagtgcattgctaaacaacttaaaatttgtttggtgtggaggagtttctaagggttgggcaattagtgacttt

SEQ ID NO: 13792 - DNA, 555 bp, Homo sapiens
gtaatactgttattatgtctgggaagaaggaaagaaggagaaggtgagaagaagagttaatttagaccttgtttccattcagcgtttggaagctgaagcgtttagtcgttcatactggacctggtgtgatgggatcatcttgagattctgtgtctcgcagacagcagcggtggcagattcttgcttctttttttctttcatttctgtttcctatcagttatgtgataaatgagacgtcaggatgaggaatgtatgcttccctaggaagcagtcactgaacttacagttgtttgatgtgtttaagtggatacagttgggagagacagtgttgtctgaccgtgggccctaacgcccaccggccggaggagcaaacttgcccagcagcctgcctygccccacgcccagcatccacggctgccttagctggagggagccgcgcgggggcgcagtgcgtcatcactgcagctatttcacattattagggaggccaccgcgggaggccctggaggatattgtggagttacatagatctggatgagaatcttattaaattat

SEQ ID NO: 13793 - DNA, 529 bp, Homo sapiens
gaatacttctgctatgtcctcttatagagaagtgattccctttctacccaaaattcaaagaaattcaagtccattgcaaaagggaagtcaggaatagataatgagtgttctagatagaatccaaaatagcagggtgtagagtaatataaaaatggtgacaataataatacaactcttagaaaaakgaatcaagtttttctccattaatattatgaatgatgtgtgtttgggcttaggatctagaaatgtctctgttgcaggagagaaaagccatgaagaggaggtgtgtagatgtctgataattgatttttgtgtgtgtgccttatgtctttaaaatacgaacgttggtgttggtgtggagcttgaccgtgccagtttgtttagtagagtccctcaacagctggtcgtgtggccctgtttgttcgactcagaaatcatagccagacagatggagaggaaaagttctattgaaagatagtaagtgaagtaagccctgcacagaaatattaatactgcctgatgtcactca

SEQ ID NO: 13794 - DNA, 531 bp, Homo sapiens
gtagatttctcattaatgaaaataggaatataatatacatattgttctatgatttaactcttttcttatctatttacattttcatttaaaagcatagaattctatagcatgaccacacccagaggtaggctagtaaatgtctaataactggttctccagaaaaaaaaaggtcctaattggtaccattttcttatttttgtgttgtaaatactcccatggctgaacgcaagcaaccactgtaacattgataactacagaattagaaagaaaagttaatacccagctcttgcaaagcagtataaaagcactcttgcacaccactggctgtgccattatttcaaaaaataaaagtaatgtttttataaggaacttttaataaatacaggggtatcatcttagggtagaccaaaaagattgtrgtataaaatagtatgaggatttctatatgaaaatctaagcaaatacataaataacaagactatattttctcaaacactacattttaaatgatataaaaagtataaaacctca

SEQ ID NO: 13795 - DNA, 534 bp, Homo sapiens
aactttaatacgcatagtatgaaagcaatacacatatatttttacaatggttaccttttaagagttgtgtgatagacactgattgttcacagttattgccttcaatccatgacaaggtcttccctatgagcagaatatactcctccaccccattgattttgggcttgaccgtgagactaacaagtccataacaacctatggaataagagtggaagttacagtataatagctcaaagtagaagcattaagagtaattttttgtttatgatcaccctcatgtgcacatcctcaaaatactgcatttttaaaagagaagaataaggcttagcattagagactagtttgtaatcatatagatcatgaatcttcaagtccgtaagggttaaatgtagcattcttctgctgggcgcagtggctcacrcctgtaatcccagcactttgggagtccgaggcgggtggatcacctgaggtcaggagtacaagaccagcctggccaacatggtgaagccccgtctctactaaaaatacaaaaaa

SEQ ID NO: 13796 - DNA, 569 bp, Homo sapiens
tccagagtagaccttgaatgtctccatctgtgccatgttgagatccaacttccattatagacatgagagccatgaaggatagtgaaggtgggtaacaaagagaattggcatttctttgtgagacaattcacaccaatagcagtcattaagtttcatcttgaatgaattcttattcactcagctgaggttgggaggtaagattcttctatgccccggrgattaagctttgaattgatactgtaactctgcaacccttacagtcagatcctaggcgtggttttcagccatatctgtcatgtgactacaggaaatgagaggcttcctcaaagatgcccttgaacatttctgatttcctctttgtgttctggattgtgttttcattatctaaaacttgtcccttttaccatgtatgatctctagagcctatggaaatagccaggtgatccacaatcattataatcaatattgttactatagaaccaaatgccacagcactggattttccagtccctcaccttctaactgctctttagcctgtgccacacaagtgaaaatttgaggaattataa

SEQ ID NO: 13797 - DNA, 1076 bp, Homo sapiens
cctattttatttttgtagtttttgccatttagagttaagtcttcatttcacctgaaattgattttggtgtatggtgtgaggtaaggatccagtttcacgttttctaaagaggtagtcaattgtccaagcatcttttatgaaacaatttatcatttcctctttgatccataatcagtaatctcatgccactccatacttgttagtgtgttttgggacttttgatctagtttattatttttgaactcttatcacatcattttaattgctataatttccctcgttttgaataagtcttgatgtctcatgtacactttgtttttcttcaaaaatgtctcagatatttttgggcctttgctcttctatgaattttaaaggaagcttaccaagtttcaaaaaaggttgctaaagacgtttattaaaggaatctctaaatattgtatatattgttgctattttaagtgttatttaaaaattgtgtaatttgtttgctgttagactatagaaacatatattacttttatatttgtatttattcctatgcccagccactttgttatgccttcttatctgtgctcatgttttgtctagcagatatttaagttttaggggttaacaattattccatsaaactctatttctttttttctaatccatatatttatttttgcttcttgacttattgccctgagtataatatttagtgcaagcagctttattgcagccttgactttaataagaatgcatttaaacattttacaattaaatacaatatttgctgtagggtttttatagatatcctttatcatctttagtagggactcttccacttttagctttttaagctggtttaatcatgaatagatattgaatcttattgactatcttctgcatttattgacataatcatatattttcccacgtttaatctatttatatggaatataatatattttccatatgtaaatatattaatatatttttatatttctgtctttctgggataaaactaacttgagcatgatgtattttttattgttgtaatagttttgttaatatttttcatttaaaatgtttac

SEQ ID NO: 13798 - DNA, 577 bp, Homo sapiens
ccaaggcaggtagatcacttgaggtcaggagttcaagaccagcctggccaacatggtgaaatcccatctctcctaaaaattagctgggcgtggtggtgcgtgcctgtaatcccagctactctggaggctaaggcaggagaatcacttgaacccaggaggcggaggttgcagtgagctgagattgcaccactgcactccagcctgggtgaygaagcgagattccatcttaatataaagaaataaaaataaaataaaataacgatcctaagcgttcatatactgtccacataaatctgagagacattcttgatcagtagaatttcagtgaatagcaagtgaattggcatgcagatacaagaagaaaacatgttacctattattttaggttttcgggcctgaattcatttagtatttaatttacagtaatagtattcataattaattatattacttattataagattttcaggagttagtcacaaagcatttagagggttactttcttgacactgatgttcaggaatatttctataaagcaaatttgtaaaatgaacaagtaagtttctgcaaagataca

SEQ ID NO: 13799 - DNA, 503 bp, Homo sapiens
tcatgggctaagccccactttggggctcacttgtcctgcatcaagaacacaatgacatctcagagccagcccccagctatggacaccagaaaagctgtcatgacagttagggaacctgtgtgccctgctatccactgcatcccggtatctagcacagtgcctggcactttgtccttgctcaacaagtacttgttgaatggatgaatgaactcatgctcatgtgacacaagcacagggttgtcaggtgttcctaactcatctctcttacctactcttgtaagctctgtgaaggacagagccatgtctctaagtcttggtgttccttacggtgcctgtataatgccatgcacttcacacagtyggtgcttagtagccatctattgttgacttgacagcctcccttgctgggcagcctagagctctgtctcaattaataaatgtcactgggcagaaatgggacagctggggatgattctgaagtattctttaatttctctttagca

SEQ ID NO: 13800 - DNA, 600 bp, Homo sapiens
ccgattcccagtgcccccatggtaacactgatttctgtgcttagcacaaagtacttgataaatacttgtgcttaattaagttctacaaagtaagatacacagataagtctttaccatctctgggtgaccaaaaaggagtttataatctgwatgttgcttttctttttcctagttaaaagaccattaagctattagagtaatggattacacactgtcgattacaagtagatgaatgtcttcacatacatttttcctttaaaaatcaatactgaatgcaattcagccaacattaaaaatatcctgcagttatattatcaaaaacattgaagttttaaccacactgccaaataaaaattttatctttttatttatggaaaatgtctaccattgcttagaatttgatgcattaaaaagcattgattctatcaggaaggaaaacctgctatgacctgagagggctaatccaatataggaaaattcttctggactttgagattttcataattttttaaaattctttttagcattcttttaaaaagcatgctaattatggaaaataaaataagtaatctttactacaattaaaaataatttttatta

SEQ ID NO: 13801 - DNA, 600 bp, Homo sapiens
ccgattcccagtgcccccatggtaacactgatttctgtgcttagcacaaagtacttgataaatacttgtgcttaattaagttctacaaagtaagatacacagataagtctttaccatctctgggtgaccaaaaaggagtttataatctgtatgttgcttttctttttcctagttaaaagaccattaagctattagagtaatggattacacactgtcgattacaagtagatgaatgtcttcacatacatttttcctttaaaaatcaatactgaatgcaattcagccaacattaaaaatatcctgcagttatattatcaaaaacattgaagttttaaccacactgccaaataaaaattttatctttttatttatggaaaatgtctaccattgcttagaatttgatgcattaaaaagcattgattctatcaggaaggaaarcctgctatgacctgagagggctaatccaatataggaaaattcttctggactttgagattttcataattttttaaaattctttttagcattcttttaaaaagcatgctaattatggaaaataaaataagtaatctttactacaattaaaaataatttttatta

SEQ ID NO: 13802 - DNA, 662 bp, Homo sapiens
aactatctttactatgttcatagcttttctttaaatctctacgtggtgaatttttccagaaagtttttcttgtctattagttcatttactccgcacaagaattctatagtgtagacatttttcatttacctttgggtagaaaactaaacttataatttttttgcatcttgcttaacatcactcaaatattgtatggtagaaataggaattgaatttatgatggcaaattcttttctgcagcaacccaaaccatgaaataccactagcactgagacacttgatattaggcaatatctttgyataattaaatcaagtttctaagtgatatgtacagcattatacattgtaatgagccttaaactatgtgttgatgggtatctaaagatgaaaatgcggtcaagtatttgggttctgggagcaaattgcctagactcaaatcccacggtaacattttgtagctggatgacctggccaaatttgtctgtggcttgtttattctgttctatacaacaagaacaatgctatggcaatatttaaaaggtttgttgagagaattaaaattagtatatgtaaagtgttcacaacaattccaagccacaaaaagtgtccaaaaatttttatctattacttctaaaaatgtcttaattaaaacaccaaagaca

SEQ ID NO: 13803 - DNA, 624 bp, Homo sapiens
ttttatttctgtgaaatagactcccaaagtgggatttatgaagcaaaggtaatatgaatttataatttggtaacagcgtgccagggtactttagaaaacatgatagttattctcactttcacyacaatatgcaagcgacatcattttttctttttaatgatatttttctatttcctctgctcccaatccacaacccaaatatcagctaaaaatgataatttacttctatttgaatctgcacgctatgggttactgataaggttagtacgttttcttagtttatggaccattagaattgtctgatttctgattgccaattaatattctgtacttcctttttccttattttattaaattttccttccttcttttctttcttccttctttccatctttcctttttttcctccttctttctgccttattcttatctgcatgataaagtttccatatatactgtaaattgtaaaccctttgtctaccaatttttctttcaatattttcacagtctgaatttaacattcaattttaaacatgtatctaaatatatatttaacatttatatccataaatttattcatattgttcttacaaattatgggataattatgaattattcctttca

SEQ ID NO: 13804 - DNA, 614 bp, Homo sapiens
cagtcatgaactggaaaaaattttcagacttgttaaatatgcctaagtgtatatgtgtgtaaatgcaattttttaatgaatgagtggtgaatgatttaatgttgaaatgatataagtgtaaacagatgttaattcatttgttttacaacagaatttctagttgctattggtgatgagtcacaatgtaatttaggaaggggcaacatttgatatgaagaatactgattttaacctttattaactcttacgaaaccctttgaagccacccccttagtatattagtgttcattggatgcataggtgatcagcttgagatccaaaaagaatatccttgtatcctcagttacagtaggaacttcctaagccttatagatgacttagcctgctytcacataaatttaacaagagaggaataagttagagtatatacattttctactaatctttttccatcagtccacatcaacagccaaaacttaggctgttttagcacctggagggagagatgatttggatggttttgcaccacagacctctaccttgggaaaacacatgcaggcataatcataggttacctgcggaaggtcttaggttactggcttaagaccggaggg

SEQ ID NO: 13805 - DNA, 478 bp, Homo sapiens
cagctcctgaggaatgatgtcacattcctaccttgagacaacatatcaaaatttacaaaacaaggaaaggtggccaattcattggttgtaaaaaggagctttcaaaaggattctaataagttcaaaaggatttagacygaagcataaggatgttgaatttggcttatagtctttttgctcatctatattttctagtttttttctatagtgaacatgtattacttttaattattaaaaagttccttgaaaatttcaaaagtggcctattttcttgacttttctattggaccgtgagttcctagagggtgatgcagggagggggaggtaccacgatgttcactgtgttcttagcactttacaccatgccagcagcacaacaggcctcaatactgtaaaagctggttgaactgaattgaatggaaatttaatctaacccctctcagagagatgagattcggtgctattttaaaagatctag

SEQ ID NO: 13806 - DNA, 1017 bp, Homo sapiens
tgttctcactaacatgtgggtgctaaataactgatacacaggatataaagacagagagaatagactatggggactccaaaaagggattgatttggatgagggtgagggttgaaaaattacttattaggtacaatgttgggtgataggtacactagaagcccaacctccaccattgcatttgtaatatccgtgtaataaataagcacatgtacccctttaatctaaaaaatgcaagtctgcaccagaaatgtgtccgcttagcatttctctatatttaaaaaaattaagcaaaactttgtgtgcattttgttaataaaataagcttactatattataagttgaagaaaattatgagaagtattaattttaccataaaaatgagaactgtgtaggggtatacattatttttatttatgaaacttatcattgactctgttactctggctaaccaagtctgtctttggagtatgatggtattctgagaagggtgccgttatacactcactgctataatcttagcatgatctgctgagatcatttcaataagacccagacttaatttttttccttctcagttgtaattttactggaataaaaattgattatatttcaaaaaaatcacagtaatgatgctcacaatgcagaacttttcaacaataaagtatcataaatattaacgtgacaatgatgtaatttctatcattataaaagatgagagagtacacagtagtttttctttcacttggttatgagcagaaattactgttgcctggtacttaggctacttaaaaacaatatttttrttaagtcatttgcctactaatagttccctctttcctctttctctgaaggtaaaaataagcagaactatagataaaaaactgagtaccaattcacatttattgctatatctattagacctatttcaaatattgatattaaaaccaagagttggaaaatatagaaagtttcatttaaaaaaatactgattaatgttacttgaatgacctgtacaca

SEQ ID NO: 13807 - DNA, 634 bp, Homo sapiens
ttatatgtatgtgtatatatacacatacatacatatatatacgtatttccctggaatacataatatttatatatataatcatctttatacatatatatacacatgtatatatgtatacacacaattatataaragattattcatataatttcttatttctggcctattctcttggaataacatttatttgttagttatgcacattgttgtttattttacttcttcaattattatagtaaacttctttttctgtctggctttcccaccaccttgcctttttttttacttttatctttatttcagttttattttatatattattttcttacaattctttaatgcttgctactagatgttcatttaagtttgttattctattctgccttcggaagtttataatttattctttatttcttatatggtttggtattttaagtttcttttctctgtttggttgagattcttcctgattttttttttgtctttttcccctatgtgtttgaatttattatcttatttttatatctccaaatgtttgtctgaatatatttcattcacttttgagtgtttagtgaaactcagttttcttttgattcttgtttttgtgtgtgtgtgggtggagggaagcttcata

SEQ ID NO: 13808 - DNA, 707 bp, Homo sapiens
ccctttcttttgataggtgtgaatcttgcttggtaagagctctgttgtagtttggtgtttgtaatattctctgcctgcagccatgttaaaaagaaggttatgtatgtttgtctcccagtcactctctctctcttctctttctctctctctctctctctcctgcttcatttatctctatttatttctctttctttcagaagatatatggacagagtttctggttatcctccagactcacargtgtaaaaatatcagtttatgattttatttctaacaccattatttattaataacttaaaataactaaatgtactttaactaaatatatttatttataacttatatatacttaaaatatatttgaaatatgttcgtaatttgcaaacaaatattcacaattgtttataattttatatagatttacatttttcaaaatgttttctcacaaattaaattgtctcaaaattacattttattaataagaaaattataactagccagtgacttggccaagtgccaaaaatagcagagagagagactttaatcaagccttttaatgttatgctaaggttctctgagtgtggacacctaactgaacaaataattttgtgagtgaatactaacatttaaaatgcaaattatagcctcattaataatggcatcccccctagtttaccttggtaatgatgctgttgttgactttgcca

SEQ ID NO: 13809 - DNA, 707 bp, Homo sapiens
ccctttcttttgataggtgtgaatcttgcttggtaagagctctgttgtagtttggtgtttgtaatattctctgcctgcagccatgttaaaaagaaggttatgtatgtttgtctcccagtcactctctctctcttctctttctctctctctctctctctcctgcttcatttatctctatttatttctctttctttcagaagatatatggacagagtttctggttatcctccagactcacaggtgtaaaaatatcagtttatgattttatttctaacaccattatttattaataacttaaaataactaaatgtactttaactaaatatatttatttataacttatatatacttaaaatatattwgaaatatgttcgtaatttgcaaacaaatattcacaattgtttataattttatatagatttacatttttcaaaatgttttctcacaaattaaattgtctcaaaattacattttattaataagaaaattataactagccagtgacttggccaagtgccaaaaatagcagagagagagactttaatcaagccttttaatgttatgctaaggttctctgagtgtggacacctaactgaacaaataattttgtgagtgaatactaacatttaaaatgcaaattatagcctcattaataatggcatcccccctagtttaccttggtaatgatgctgttgttgactttgcca

SEQ ID NO: 13810 - DNA, 510 bp, Homo sapiens
gcagaatacatatatggtataactagwtcgacatatttttgctccttgtcttcatcaccactcctcaaaaagcctaagatttaatcatcactttgggattccagtttcactgctcagtgaacacatgatcctttgtatgtctttctcctctcctttttctgtcttgaaggcataaacctagaacaacagcatagcataataatgaataggttagaacttgaaagcccatatccgagattcaaatctcaaaaaggtttcttaacttttttgtgtctcactttcttgccaagaccagcttggtcgtggagaccctaacacagtggcacgagaggaattaaagacacacacagagaaatacagcatgtggagtgggaaatcagtggtcttacggctttcagagctgatagccttgaacagagattttcccacatatttattgacagcaagccagtgataagcattgtttctataggttatagattaactaaaagtattccttacgggaaacaa

SEQ ID NO: 13811 - DNA, 510 bp, Homo sapiens
gcagaatacatatatggtataactagatcgacatatttttgctccttgtcttcatcaccactcctcaaaaagcctaagatttaatcatcactttgggattccagtttcactgctcagtgaacacatgatcctttgtatgtctttctcctctcctttttctgtcttgaaggcataaacctagaacaacagcatagcataataatgaataggttagaacttgaaagcccatatccragattcaaatctcaaaaaggtttcttaacttttttgtgtctcactttcttgccaagaccagcttggtcgtggagaccctaacacagtggcacgagaggaattaaagacacacacagagaaatacagcatgtggagtgggaaatcagtggtcttacggctttcagagctgatagccttgaacagagattttcccacatatttattgacagcaagccagtgataagcattgtttctataggttatagattaactaaaagtattccttacgggaaacaa

SEQ ID NO: 13812 - DNA, 510 bp, Homo sapiens
gcagaatacatatatggtataactagatcgacatatttttgctccttgtcttcatcaccactcctcaaaaagcctaagatttaatcatcactttgggattccagtttcactgctcagtgaacacatgatcctttgtatgtctttctcctctcctttttctgtcttgaaggcataaacctagaacaacagcatagcataataatgaataggttagaacttgaaagcccatatccgagattcaaatctcaaaaaggtttcttaacttttttgtgtctcactttcttgccaagaccagcttggtcgtggagaccctaacacagtggcacsagaggaattaaagacacacacagagaaatacagcatgtggagtgggaaatcagtggtcttacggctttcagagctgatagccttgaacagagattttcccacatatttattgacagcaagccagtgataagcattgtttctataggttatagattaactaaaagtattccttacgggaaacaa

SEQ ID NO: 13813 - DNA, 510 bp, Homo sapiens
gcagaatacatatatggtataactagatcgacatatttttgctccttgtcttcatcaccactcctcaaaaagcctaagatttaatcatcactttgggattccagtttcactgctcagtgaacacatgatcctttgtatgtctttctcctctcctttttctgtcttgaaggcataaacctagaacaacagcatagcataataatgaataggttagaacttgaaagcccatatccgagattcaaatctcaaaaaggtttcttaacttttttgtgtctcactttcttgccaagaccagcttggtcgtggagaccctaacacagtggcacgagaggaattaaagacacacacagagaaatacagcatgtggagtgggaaatcagtggtcttacggctttcagagctgatagcctygaacagagattttcccacatatttattgacagcaagccagtgataagcattgtttctataggttatagattaactaaaagtattccttacgggaaacaa

SEQ ID NO: 13814 - DNA, 531 bp, Homo sapiens
gctttatctcaccactaaatcttaggtacttccctcttctcattcgtctacamgatgaaatcacaggaagatcttattcattcccttagcttcagtgcatggatatgacatgtcttccaaatcaagacctccatttcagttctctcttatgggcatcaagtctccacttgctatttagcacctcctgtgtaaaacagatgctgcaacataatacatctacaaattatttcaactcttcaagcaccccatcaccaaatctgattccttatctgaacaatctatcttaatgcttggcaacatcataaatcttgctttataattatcatgaaatattagatataccagagaagcaacaagaaataacataaaatgtgtcttatacccagactcagtttaaataataagtattgtaaactgtgccttctgaatactccttcctgtatcgtattacccttcctagtcagaaataatcattatccaaaaattcatacttatgcttgttatgaatgtcttggtatttcagtcaatgga

SEQ ID NO: 13815 - DNA, 531 bp, Homo sapiens
gctttatctcaccactaaatcttaggtacttccctcttctcattcgtctacacgatgaaatcacaggaagatcttattcattcccttagcttcagtgcatggatatgacatgtcttccaaatcaagacctccatttcagttctctcttatgggcatcaagtctccacttgctatttagcacctcctgtgtaaaacagatrctgcaacataatacatctacaaattatttcaactcttcaagcaccccatcaccaaatctgattccttatctgaacaatctatcttaatgcttggcaacatcataaatcttgctttataattatcatgaaatattagatataccagagaagcaacaagaaataacataaaatgtgtcttatacccagactcagtttaaataataagtattgtaaactgtgccttctgaatactccttcctgtatcgtattacccttcctagtcagaaataatcattatccaaaaattcatacttatgcttgttatgaatgtcttggtatttcagtcaatgga

SEQ ID NO: 13816 - DNA, 531 bp, Homo sapiens
gctttatctcaccactaaatcttaggtacttccctcttctcattcgtctacacgatgaaatcacaggaagatcttattcattcccttagcttcagtgcatggatatgacatgtcttccaaatcaagacctccatttcagttctctcttatgggcatcaagtctccacttgctatttagcacctcctgtgtaaaacagatgctgcaacataatacatctacaaattatttcaactcttcaagcaccccatcaccaaatctgattccttatctgaacaatctatcttaatgcttggcaacatcataaatcttgctttataattatcatgaaatattagatataccagagaagcaacaagaaataacataaaatgtgtcttatacccagactcagtttaaataataagtattgtaaactgtgccttctgaatactccttcctgtatcrtattacccttcctagtcagaaataatcattatccaaaaattcatacttatgcttgttatgaatgtcttggtatttcagtcaatgga

SEQ ID NO: 13817 - DNA, 531 bp, Homo sapiens
gctttatctcaccactaaatcttaggtacttccctcttctcattcgtctacacgatgaaatcacaggaagatcttattcattcccttagcttcagtgcatggatatgacatgtcttccaaatcaagacctccatttcagttctctcttatgggcatcaagtctccacttgctatttagcacctcctgtgtaaaacagatgctgcaacataatacatctacaaattatttcaactcttcaagcaccccatcaccaaatctgattccttatctgaacaatctatcttaatgcttggcaacatcataaatcttgctttataattatcatgaaatattagatataccagagaagcaacaagaaataacataaaatgtgtcttatacccagactcagtttaaataataagtattgtaaactgtgccttctgaatactccttcctgtatcgtattacccttcctagtcagaaataatcattatccaaaaattcatacttatgcttrttatgaatgtcttggtatttcagtcaatgga

SEQ ID NO: 13818 - DNA, 580 bp, Homo sapiens
tttgatttcctattgactgatatgtgtactttactacaaatttatttaagaatttcctggctgggtgtggtggctcatgtctgtaaccccagcactttgrgaggctgaggcaggtggattacgaggtcaggagatcgagaccatcctggctaacatggtgaaaccctgtctctactaaaaatacaaaaaaaattagccaggcgtggtggcgggtgcctgtagtcccagctactcggaaggctgaggcaggagaatggcatgaaccccagaggcagagcttgcagtgagccaagattgcaccactgcactccagccagggtgacagagcgagactccatctcaaaaaaaaaaaaaaaaaaaagaatttcctaatttcacttttccagctctagatgttcattctattctttttttccattatttgtcaggtttattgaagtataacttacatccaaaatccatctgacagagtacaattctgtgacttttaaccacacaagatataaaacatctccccccaaaatttgttcctctttgtagtcaacccttccaccttcccccagcaactactgttttctgt

SEQ ID NO: 13819 - DNA, 540 bp, Homo sapiens
tgctctttctctctttcccttttctttcctttcctttcctttcctttctctctctcctttctttcttttgcttccttcctctctctttccctttcccttcctctctctcttttctttttttctttcttttttttcttttcttttctttcttttctctctctctctttctttagcagtttattactcatttgtgagaatcagggaagcactgggctcaagaaagccaataccccttctagggcttaccccccattttaaaatttaatatattggaatttatattgtttcttttgatccgagatcttcaggctgaagctggagagaaatcttttgacctctctagaacaaagaaagcctttatcaaagacartgtaactttttgagtttgccaaattaggtgttgctgcaaatggagaaacctagagttctcttctgtgcttaaagacacaaacatggaaagttttaagttccaatatggtcacttaatatatacaaaattttctgtctttgctgtctttgtcattccagcaacaactggat

SEQ ID NO: 13820 - DNA, 519 bp, Homo sapiens
tcccaaaactggagtttcagatgcgagtgtggatcagaaggagtcaccgcggctctagaggaaccctgaggtatctttgctttgggtccaggtgcttttgtggtagtgtaccagaccatatcacctcagrgagggccagtggctgtgctgaggctgcattctggccttcctagcagggatgagcactgccttactcctataaagaccttcgtggcatttaacatcaatccatattgccccaagaggccctgtatcaggattaagaccatgcataaatgtctaaaatacatcatttgagcagaatgattgtgaaatactcaagccatagtcttccagagcgagtctctctgttacctcttgtactcaggctttcaggatagagaatctggtctgtgattctgagtgctgggcacacagctgatggagcacccaagcacagataaggtgagctgccttgcatagcatgagctgagctttcaggctatggcagactgaagtccctatcacacattggaccct

SEQ ID NO: 13821 - DNA, 519 bp, Homo sapiens
tcccaaaactggagtttcagatgcgagtgtggatcagaaggagtcaccgcggctctagaggaaccctgaggtatctttgctttgggtccaggtgcttttgtggtagtgtaccagaccatatcacctcagagagggccagtggctgtgctgaggctgcattctggccttcctagcagggatgagcactgccttrctcctataaagaccttcgtggcatttaacatcaatccatattgccccaagaggccctgtatcaggattaagaccatgcataaatgtctaaaatacatcatttgagcagaatgattgtgaaatactcaagccatagtcttccagagcgagtctctctgttacctcttgtactcaggctttcaggatagagaatctggtctgtgattctgagtgctgggcacacagctgatggagcacccaagcacagataaggtgagctgccttgcatagcatgagctgagctttcaggctatggcagactgaagtccctatcacacattggaccct

SEQ ID NO: 13822 - DNA, 519 bp, Homo sapiens
tcccaaaactggagtttcagatgcgagtgtggatcagaaggagtcaccgcggctctagaggaaccctgaggtatctttgctttgggtccaggtgcttttgtggtagtgtaccagaccatatcacctcagagagggccagtggctgtgctgaggctgcattctggccttcctagcagggatgagcactgccttactcctatraagaccttcgtggcatttaacatcaatccatattgccccaagaggccctgtatcaggattaagaccatgcataaatgtctaaaatacatcatttgagcagaatgattgtgaaatactcaagccatagtcttccagagcgagtctctctgttacctcttgtactcaggctttcaggatagagaatctggtctgtgattctgagtgctgggcacacagctgatggagcacccaagcacagataaggtgagctgccttgcatagcatgagctgagctttcaggctatggcagactgaagtccctatcacacattggaccct

SEQ ID NO: 13823 - DNA, 519 bp, Homo sapiens
tcccaaaactggagtttcagatgcgagtgtggatcagaaggagtcaccgcggctctagaggaaccctgaggtatctttgctttgggtccaggtgcttttgtggtagtgtaccagaccatatcacctcagagagggccagtggctgtgctgaggctgcattctggccttcctagcagggatgagcactgccttactcctataaagascttcgtggcatttaacatcaatccatattgccccaagaggccctgtatcaggattaagaccatgcataaatgtctaaaatacatcatttgagcagaatgattgtgaaatactcaagccatagtcttccagagcgagtctctctgttacctcttgtactcaggctttcaggatagagaatctggtctgtgattctgagtgctgggcacacagctgatggagcacccaagcacagataaggtgagctgccttgcatagcatgagctgagctttcaggctatggcagactgaagtccctatcacacattggaccct

SEQ ID NO: 13824 - DNA, 519 bp, Homo sapiens
tcccaaaactggagtttcagatgcgagtgtggatcagaaggagtcaccgcggctctagaggaaccctgaggtatctttgctttgggtccaggtgcttttgtggtagtgtaccagaccatatcacctcagagagggccagtggctgtgctgaggctgcattctggccttcctagcagggatgagcactgccttactcctataaagaccttcgtggcatttaacatcaatccawattgccccaagaggccctgtatcaggattaagaccatgcataaatgtctaaaatacatcatttgagcagaatgattgtgaaatactcaagccatagtcttccagagcgagtctctctgttacctcttgtactcaggctttcaggatagagaatctggtctgtgattctgagtgctgggcacacagctgatggagcacccaagcacagataaggtgagctgccttgcatagcatgagctgagctttcaggctatggcagactgaagtccctatcacacattggaccct

SEQ ID NO: 13825 - DNA, 523 bp, Homo sapiens
ggtggccacagggaggccagataaaattcagaacaccaattaaatttgaatttcaaataaatgwtgaataatgtcttaatatatatctatcccaaatattgtgtggcatatacttataccaaatatgtatttgttatctgaagttcaaatttaactgggtatcctgtattttcatcttctaagtctggtaaccctcactgagggatatggtcagggaaggctgatggatgggtgcagcctccaactaaacaaaaataatagagatgctacaggtttctggtgccctcacatcagaggggactcttcttgcaggactttcgaggagatgctttttgcttttcttcataatactggctcattcggttcaaatctctgagagtgaggcaggtctggatacttacccaactctgatgctgtagttgcctactctacagatttcaaggactcttgccaatcaatcagggctatgagaaagtcccagtggtgtccacacagtgtgggcttccagactatagccaggcca

SEQ ID NO: 13826 - DNA, 523 bp, Homo sapiens
ggtggccacagggaggccagataaaattcagaacaccaattaaatttgaatttcaaataaatgatgaataatgtcttaatatawatctatcccaaatattgtgtggcatatacttataccaaatatgtatttgttatctgaagttcaaatttaactgggtatcctgtattttcatcttctaagtctggtaaccctcactgagggatatggtcagggaaggctgatggatgggtgcagcctccaactaaacaaaaataatagagatgctacaggtttctggtgccctcacatcagaggggactcttcttgcaggactttcgaggagatgctttttgcttttcttcataatactggctcattcggttcaaatctctgagagtgaggcaggtctggatacttacccaactctgatgctgtagttgcctactctacagatttcaaggactcttgccaatcaatcagggctatgagaaagtcccagtggtgtccacacagtgtgggcttccagactatagccaggcca

SEQ ID NO: 13827 - DNA, 523 bp, Homo sapiens
ggtggccacagggaggccagataaaattcagaacaccaattaaatttgaatttcaaataaatgatgaataatgtcttaatatatatctatcccaaatattgtgtggcatatacttataccaaatatgtatttgttatctgaagttcaaatttaactgggyatcctgtattttcatcttctaagtctggtaaccctcactgagggatatggtcagggaaggctgatggatgggtgcagcctccaactaaacaaaaataatagagatgctacaggtttctggtgccctcacatcagaggggactcttcttgcaggactttcgaggagatgctttttgcttttcttcataatactggctcattcggttcaaatctctgagagtgaggcaggtctggatacttacccaactctgatgctgtagttgcctactctacagatttcaaggactcttgccaatcaatcagggctatgagaaagtcccagtggtgtccacacagtgtgggcttccagactatagccaggcca

SEQ ID NO: 13828 - DNA, 523 bp, Homo sapiens
ggtggccacagggaggccagataaaattcagaacaccaattaaatttgaatttcaaataaatgatgaataatgtcttaatatatatctatcccaaatattgtgtggcatatacttataccaaatatgtatttgttatctgaagttcaaatttaactgggtatcctgtattttcatcttctaagtctggtaaccctcactgagggatatggtcagggaaggctgatggrtgggtgcagcctccaactaaacaaaaataatagagatgctacaggtttctggtgccctcacatcagaggggactcttcttgcaggactttcgaggagatgctttttgcttttcttcataatactggctcattcggttcaaatctctgagagtgaggcaggtctggatacttacccaactctgatgctgtagttgcctactctacagatttcaaggactcttgccaatcaatcagggctatgagaaagtcccagtggtgtccacacagtgtgggcttccagactatagccaggcca

SEQ ID NO: 13829 - DNA, 1867 bp, Homo sapiens
atctgccaatcttgacaaaattcaacattctttagtgggagataaactttaaaatctatcacccacaatgtccagtaagtaatgtaaaactaccatacatgtgtaaagtaaagggaagtcatacccatggtccaaagaaggagcagttgatagaaacagaaacacatccatagacaacccagatgttaagaaccagcagacaaagattttaaataactacaataaatgtccttaaaatacatattttgtcaattatacaaatcataacctaacctacccccagaatcctagtgaacttgagttgtccatgatctttaatcaaattgggatttagaatggtttatatttgaaagtctgaagcaaacaacttgaaagtgattaatgacatcaaatttaattacatatttacacctcccagtaggacaagggaaagaataaaatatcttatctccctgtagtgagasagctttattaagatttgacagtagttatttaacagcaataattgagttttatgcaagattatacacgttctcctaatctggcatcaaaatctaatcacagactgatagggtacttaggctcctaacagtgagaaaaaacagtggagctgagtacaaaactaatcttcaaaagtagttatcttcatctgtcaatgtgatcttatcaaggatttttataatttctataaacaatcattatattttagctgaatcagtagcattatgctgtctaaacagatagtcagattccttctattttaaaacactttctaccagttcccatcccaccactcaccactcacccctacgctggccctgtaaaaggaatttggcttcaactttcttttcttaatccactaagcaatcgcatgaataaaaagataatcacatgccctgcatgcctgatagaatttttataaatcttctaagtgttttaatatttattttctattttgtgaaaataatatttactgaacaagctagatcatcttctttctccacagaaaaaaaggtaaggttggtgaaaatacactgaaagctctgctaggtacacattatttttgcataaaattttgcttaaaattctgtggaggctggcaaagcactgtagaatgattgacatggctgccttgatattgttcttgctttttctttgtccacttatgttgaccctgccactcctaaatatgctaatattacttttgctgaggtagggaatcactctctttatacaagttttgttgttcatcttggtctcccaaaaggatggcctcaccaaattttttcttactctctctcaaggagtttgtttccctcaaaacaggaaagacatctgagggacatacccagaactgtatccataagcattccatcctatcaacaattaacaagtagccagggacagaatttaggcagctccattttcttttttttttttttttttggagacacagtctcgctctgtcgctcaggctggagtgcagtggtgcaatcttggctcactgcaagctccgcctcctgggttcaggccattctcctgcctcagcctcccgagtaactgggattacaggtgcgtgccaccacgcccagctaatttttttgcatttttagtagagatgggatttcaccgtgttagccaggatggtctccaaccttggttggagagtatgagactagcagcccaacagtccaacaaagaactattggacttcttcccaacagtgacccttaggtgtcctctcctggtaagtgctcagagattagtctcccctagaaaccttctttccccatgtcagaccaaaaatatataggcgaacacttagaacatatttgaaattctccatatataagtcaccaagttgaat

SEQ ID NO: 13830 - DNA, 1867 bp, Homo sapiens
atctgccaatcttgacaaaattcaacattctttagtgggagataaactttaaaatctatcacccacaatgtccagtaagtaatgtaaaactaccatacatgtgtaaagtaaagggaagtcatacccatggtccaaagaaggagcagttgatagaaacagaaacacatccatagacaacccagatgttaagaaccagcagacaaagattttaaataactacaataaatgtccttaaaatacatattttgtcaattatacaaatcataacctaacctacccccagaatcctagtgaacttgagttgtccatgatctttaatcaaattgggatttagaatggtttatatttgaaagtctgaagcaaacaacttgaaagtgattaatgacatcaaatttaattacatatttacacctcccagtaggacaagggaaagaataaaatatcttatctccctgtagtgagacrgctttattaagatttgacagtagttatttaacagcaataattgagttttatgcaagattatacacgttctcctaatctggcatcaaaatctaatcacagactgatagggtacttaggctcctaacagtgagaaaaaacagtggagctgagtacaaaactaatcttcaaaagtagttatcttcatctgtcaatgtgatcttatcaaggatttttataatttctataaacaatcattatattttagctgaatcagtagcattatgctgtctaaacagatagtcagattccttctattttaaaacactttctaccagttcccatcccaccactcaccactcacccctacgctggccctgtaaaaggaatttggcttcaactttcttttcttaatccactaagcaatcgcatgaataaaaagataatcacatgccctgcatgcctgatagaatttttataaatcttctaagtgttttaatatttattttctattttgtgaaaataatatttactgaacaagctagatcatcttctttctccacagaaaaaaaggtaaggttggtgaaaatacactgaaagctctgctaggtacacattatttttgcataaaattttgcttaaaattctgtggaggctggcaaagcactgtagaatgattgacatggctgccttgatattgttcttgctttttctttgtccacttatgttgaccctgccactcctaaatatgctaatattacttttgctgaggtagggaatcactctctttatacaagttttgttgttcatcttggtctcccaaaaggatggcctcaccaaattttttcttactctctctcaaggagtttgtttccctcaaaacaggaaagacatctgagggacatacccagaactgtatccataagcattccatcctatcaacaattaacaagtagccagggacagaatttaggcagctccattttcttttttttttttttttttggagacacagtctcgctctgtcgctcaggctggagtgcagtggtgcaatcttggctcactgcaagctccgcctcctgggttcaggccattctcctgcctcagcctcccgagtaactgggattacaggtgcgtgccaccacgcccagctaatttttttgcatttttagtagagatgggatttcaccgtgttagccaggatggtctccaaccttggttggagagtatgagactagcagcccaacagtccaacaaagaactattggacttcttcccaacagtgacccttaggtgtcctctcctggtaagtgctcagagattagtctcccctagaaaccttctttccccatgtcagaccaaaaatatataggcgaacacttagaacatatttgaaattctccatatataagtcaccaagttgaat

SEQ ID NO: 13831 - DNA, 521 bp, Homo sapiens
caaacaaaacgtcttggctagagtagatggttggagaaaaaggaaaaaaaaatgctcttaagccaagaactagcctacattttccttcatccttactcttttatccccatataataatacacacccaaagcccctgctccccctcaatctacacacatgcacacatcttcctctctcactgtctcactttcagaattagattttttacactagaaaaaaatatgaatataatattcacatatactgggccgaatattaaagttgatatctatttggttttacttaaaaacaagataataggtaacatgttaaggggagactctaagagtatgccttaatctgaaaaacacaagggaatctaatatatatttttttatatttttttttatttctttttgagayggagtcttgctctgtcacccaggctagagtgcaatgatgtggtgtcagctcactgcaacctccgcctcctgggttcaagtcactctcctgcctcagcctcccgagtagctgggactcca

SEQ ID NO: 13832 - DNA, 521 bp, Homo sapiens
caaacaaaacgtcttggctagagtagatggttggagaaaaaggaaaaaaaaatgctcttaagccaagaactagcctacattttccttcatccttactcttttatccccatataataatacacacccaaagcccctgctccccctcaatctacacacatgcacacatcttcctctctcactgtctcactttcagaattagattttttacactagaaaaaaatatgaatataatattcacatatactgggccgaatattaaagttgatatctatttggttttacttaaaaacaagataataggtaacatgttaaggggagactctaagagtatgccttaatctgaaaaacacaagggaatctaatatatatttttttatatttttttttatttctttttgagatggagtcttgctctgtcacccaggctagagtgcaatgatgtggtstcagctcactgcaacctccgcctcctgggttcaagtcactctcctgcctcagcctcccgagtagctgggactcca

SEQ ID NO: 13833 - DNA, 521 bp, Homo sapiens
caaacaaaacgtcttggctagagtagatggttggagaaaaaggaaaaaaaaatgctcttaagccaagaactagcctacattttccttcatccttactcttttatccccatataataatacacacccaaagcccctgctccccctcaatctacacacatgcacacatcttcctctctcactgtctcactttcagaattagattttttacactagaaaaaaatatgaatataatattcacatatactgggccgaatattaaagttgatatctatttggttttacttaaaaacaagataataggtaacatgttaaggggagactctaagagtatgccttaatctgaaaaacacaagggaatctaatatatatttttttatatttttttttatttctttttgagatggagtcttgctctgtcacccaggctagagtgcaatgatgtggtgtcagctcactgcaacctccgcctcctgggttcaagtcaytctcctgcctcagcctcccgagtagctgggactcca

SEQ ID NO: 13834 - DNA, 524 bp, Homo sapiens
cagtatttcattaaatcttcataaagtacaactttatttaaaatgtaataattgactgtcagtggaaaataagtgataggcatagtggggagtaagagaaacttctgccagtgactattctacctgctgtttttttctcacagtcagaacatctctttggtatgggagagacagaaactgaaatgtactgacctctttgtagagcttgggggtatggacctaaaggcttcagagaaacacagcacatgctgagcagcccacaaagcccccattattgctgtgtgggcaactccgtttgcatctcattgaaaatgttgtcttgcacatcaacrtacgcaattaaaaaataaaagaggaaaaacatccgcctgcttgtttaagatgctcagcaaaagaagggaagcttgagatttgagagaaaagggaaggtttgtagtatcaaacttccatcctcacccccctactgaaacttgcctgtaaagctactttttaaaaagccttgaaaagaagaggagggaaaagcc

SEQ ID NO: 13835 - DNA, 578 bp, Homo sapiens
acgacttccagcttgcttctctttaaggcggaaccagaatttaaagactcgtgtgacgcgagcaacctgaggctcccctgggactgggcttccccggacttgcacagctgtcttgccgccatctgatctgacaatgatttttgtaaaatgactcagcttgagaaaggtttccaaggcattcacttatatgtcttagaaacaccaattcattcttattaccctcatatctcattggtttacactaaatttaattagatgacatcactattatagcaagtgcaacgggcaagagcaagcttaggagtaaacccacggaccgtcgggggtggctcggcgtgctctgcaggtgagctggtgaagaagtgtttgtcacggcctgtgcacagctgyacaggttaccaaacgaggattgctctcaataacaactttcgataaatttaaatcttaccattgttctttgtttgtttgtttttcttttttgagacggagtctcactctgtctcccaggctggagtgcagtggcgtgatctcagctcactgcaacctccgcctcttgggttcaaacgattctcctgcct

SEQ ID NO: 13836 - DNA, 578 bp, Homo sapiens
acgacttccagcttgcttctctttaaggcggaaccagaatttaaagactcgtgtgacgcgagcaacctgaggctcccctgggactgggcttccccggacttgcacagctgtcttgccgccatctgatctgacaatgatttttgtaaaatgactcagcttgagaaaggtttccaaggcattcacttatatgtcttagaaacaccaattcattcttattaccctcatatctcattggtttacactaaatttaattagatgacatcactattatagcaagtgcaacgggcaagagcaagcttaggagtaaacccacggaccgtcgggggtggctcggcgtgctctgcaggtgagctggtgaagaagtgtttgtcacggcctgtgcacagctgtacaggttaccaaacgaggattgctctcaataacaactttcgataaatttaaatcttaccattgttytttgtttgtttgtttttcttttttgagacggagtctcactctgtctcccaggctggagtgcagtggcgtgatctcagctcactgcaacctccgcctcttgggttcaaacgattctcctgcct

SEQ ID NO: 13837 - DNA, 578 bp, Homo sapiens
acgacttccagcttgcttctctttaaggcggaaccagaatttaaagactcgtgtgacgcgagcaacctgaggctcccctgggactgggcttccccggacttgcacagctgtcttgccgccatctgatctgacaatgatttttgtaaaatgactcagcttgagaaaggtttccaaggcattcacttatatgtcttagaaacaccaattcattcttattaccctcatatctcattggtttacactaaatttaattagatgacatcactattatagcaagtgcaacgggcaagagcaagcttaggagtaaacccacggaccgtcgggggtggctcggcgtgctctgcaggtgagctggtgaagaagtgtttgtcacggcctgtgcacagctgtacaggttaccaaacgaggattgctctcaataacaactttcgataaatttaaatcttaccattgttctttgtttgtttgtttttcttttttgagacggagtctcrctctgtctcccaggctggagtgcagtggcgtgatctcagctcactgcaacctccgcctcttgggttcaaacgattctcctgcct

SEQ ID NO: 13838 - DNA, 635 bp, Homo sapiens
aagggctcaggcacggggactccccagcgccaagtgtggcccagtgcctggcgctgcgagggctcaggctgaggcccccaggccttatgaccctgctctccaccagccagggagagaggaaggccctgaggtgacccagactggaaaatgcagcattgatccagccccgagtgcgaggctctctccccaacgatcccattcatttttcccaactataaagcatagctctttccatttcacagctggggaaactgaggctcagagaaaagcgcttgttcaagactccccacataygaccaggtctgccgagagtgcacgctcctccccaccccgcaaaatgccactggacgtgaaatgaacaaagtcaagttcacagttggcaggcatccgcacccgcctgggaccaggcctctgggaccgggccgttctgctgcttggaactattcctcccattgttcagcctcgtccccactgctggaacccactgagcctcactcagtcctctgaccctcacccagaaaatggggacgcagttgttgagatgagatgaagcaatactgtgaaagcgcttagagtagtgcctgattccgaccaagccctctctaaggtgagctgttgattcggcatcagcttca

SEQ ID NO: 13839 - DNA, 572 bp, Homo sapiens
gcaaggtgtgtctcctctctaaggtcgctaggccacagcagcagtggttttcgtttgggcctgacaaggagccggtgctgtagtcacccatgactctggaggccctgttcatccatcaggcctggaaacaccagcaggactggccaatccgccccagagctcagccagcayggacagtcagtcttggccagcagcaccttcctcaggcctgagaagaagaggccaggtctgccttgcacaagctgcaaactttggttccctgcacaccaggcagagggggctgccctgccagaggcagctcccacatcccctgagcctgagtcattacctgctaaagaggggacagctcttcaaaagacctgtggcctcctgggtcccggcagcatccgtgaaagtgaaaagagcagaatgttggttggcacagttttctgaatctctccctgggccatctgttccagttactgctgttttctaacaaagcaccccaaaacttagcggcttaccacagccatcttcccatactcctggttctgcaggtctggaagttgcacagagcacaggagggctgactt

SEQ ID NO: 13840 - DNA, 594 bp, Homo sapiens
tgaccatctgtagaatcaccagataataagaaattatagacaagggaattttaatgctgggtgatcaattaacaaggctggcactagatgtaatacatgcgtggtaagatgacttcaagttgtgtgtgtgcctgcatctaccaagtagccatcagggataaatgttatcagaagatcaacatttagtcattgtctcaactgaggctggcagtgcagttgccaggggatgccagcttgctctttcactcttctcctggtttggcattcaacttggccagcaccctgtggccgggacttaaggccaagggtctttaccgtccttattctgtctgctcctcctgagtgccctgcaaggctggtcctgtgtcctcactgtggacatctaaatgtgagttggagcccaaatccagacctgtttctctcttggactcttcatctgctgtttacagcctctacaatgttactgaatcaaggtctgagaaggctgatgctaaggagaagtcaacyttgctacaagcagacagacacaggcccctgcacccttctggttcaagccagaacctccctcattgagcaagggagagtgagaaaaat

SEQ ID NO: 13841 - DNA, 699 bp, Homo sapiens
ctttctaaaaattctgaacctaaaccagtgtattcaatattatacttmtttttttaaaattaagaggttattttgttttatattaagatattttggctacttacagaaagctgaaatatttgtagtacattgtagtaccttgggtattattattcagaattatttgttcccaaaacctttggatgtgacttacaatagttccctataggaagagtagctttgctgaccaatgactgggtttagccacatgacttgcttggtcaacacaatgcaaacagacttgatgagcttttcaatgcatttcccagtgctgccagttctcttgctttagtgccctctgccactacaagggcatagcccaggtaggaccttctctttcagcccagggcctgaatagagtaaacctgaacctgaatcacatcctgaagtgcagccagagcaattaacccacagtagccaacaagccacacaatgaaaaatatatgttgttgaaagctactgaaacagttgaggtagtttgttacccattgtactctaataaaagctaatacatatatgctcccaaatctggattaaaagtctggtacctgaaacagaaagattatcaaaagtaaaaattctgaggtttttctgaccaagaatctttgttataaaaatgggtaaatatcttattaatgtgcctgcaaatacattagtgat

SEQ ID NO: 13842 - DNA, 1850 bp, Homo sapiens
gtgaataatagattttatctatgtaggaatcacacttgatcatccataactaccatgctttccactcataaaatacccgtctcaattagtgaattagcatcccatcaagttgatgtcaaagatgtgaaaccttgagaatgttcattgcagctaatgaaaatatgtttagaaattgcttctgcaaatgaatcactagcaagaaattggcttattattgtagactgtatttggttctgaaaaatcaatcttcccttcagttctgtcatctactggctcatcagatatttaaagcatcaaatgagctgtctgcctttaaccattcttagaaattggggcattttcacagcttatcaagtgacattacagccattattataccgattaaaaacacagctactgcaaactaaatgatcattatacttccttaaatataatctttctgttcacgttttgtcagcatcggttaaaaaaatagttgacattttctgaagggtggtacaattccagggaaaacatattaagcatcatgcattattccaaatgtctgtaagtgtttatattgtacattatgaaaaccttgatataaaatgccacaattcaaagaaaaagtgttaaaaatgtcagccctattctatcatttttggagaccaatttgcttttttttttggtaaggttgtaatgagcctggttcattttgcttcctaccatttatctttccagtagtaatggaaaatttcccccttaggcacagcgtgctattcttgtcttagacgattaggcagaaatgaaggagatcataaaggtgagagatttctccacaaacaatatgatgctcagtacggtaacctgcgcaatgtaggctgaggaattctaattggacccagggatgtggttttgcgatgtagcagggcatatagaaagcaaataaggtttgtatttctgattgcactggaaggtctgtggaaagacaaagctcaaatttcgcctcagcctttcttcaaatgctcagtaagctgccaaacaatacaatttaactcaagaatgtgaagtgatgatctaaaacatattgaaaagcagggatagaataactgtagggtattttatttaaaatagtagaaaaaaatttttttcagcaagttttctttgcaagaattagagtttgtgtttcagatgattttagaacaaagaagtttcactgctatgcctcctctggaagcaaagatgttaactgtgcttttgaaaacagacatggaaagaagatgtcaaagctgaaaggtactcctgcctcagccaccctctattaatggcaaggcatagaggccacataaattcactcagcctatttctttacctgcaaggagttacagattggtttgaataacataaaactgctatttcaccattttttacttaataaaatggcaaatagtttgttcacagtgtcgctgtaataatcaatgaagaaaaacaaacaaacaaacaactcagagagcacatagtgtggtacaatacattctgtctcctctttggtaccagacctcttgccaatataaggaattatctcatgatgatgtgtgtgactactttaatcaataagtaagcatagaattttgcatgttctacctgatttagttaatccttacagtatgaggtgggtcttataattatttccatgatgtgaaagagcaaactgagatctgatatattgggacctggactcaggaaggatacctggaaaaaccatggttttwgccagcactgtataaagtctcaaagaagtcaggaaactattttcaaaattattattataatagaacttcctgttatatgcctttttataagctcttatc

SEQ ID NO: 13843 - DNA, 547 bp, Homo sapiens
ataaaatataaggtaaaaaaacaaaaaatgttatgctttttccccagtctactatatgtagatagaccctggactacagagttgaaatgtcatgggggagggaatttaaataaaaagcacttagcaaatacataacagtagcaatttatctaaatttcctgagctatccccaaaccttcttgtactcagtaaaatttttaaaaattaacagtgtttcctacttgcccttcaaagcagcgaacaggacgcaatattcaattaagtctcatgtcttcatttctggaggttcattttcctgacaagtctggttttcaggaaagataatctataaaaaaggattctttgacccagctcccattcggacacagaaataatggtccttgtttgtcaggraaccatgaagaaacgaatcaataactttcataaggttattttagagtgcaattctttccccaagtgcccttcttcagacagcttagataaacaataccttttctattggttctcaatttaaagttcatgtaaagctcctcatcctgtcccaaat

SEQ ID NO: 13844 - DNA, 558 bp, Homo sapiens
tggcacttttgttgtaaagctttctttatcatcttgctgctactatgtggaaataatgtattgtttccaaaacctgactgtgtttcttaagttttttggactacttaaatgatatccaacactgagacttcaatttttacttaggttttgactggctgtataaactttctatccctcagtttgtccatttgtaagaggatgataataatttgtgttgaaagaacacactaaagacagggggtcacaggaaaatttctctgccttctgtttttttcctaggcatttgaaaaatcaaattcattatatttagaaaagctaactccttcatccttaaatatttcttttgaagccatgaaatgtagcatggtatggtaggtaggtgtgcagactcttgaaccagattgccaagatttttacccaagctacactgtggactggttcatgagcttggacctgcaaccttgcrttcctttggcttatttatatgaaagaagagcgtaaaaacagtaacgtcataagattgttttgaagattatatcaattaatacatataaagtt

SEQ ID NO: 13845 - DNA, 560 bp, Homo sapiens
atttttctctgaatatttccatttgctttgccataactccctaagaaaaatctggagaatactgactcccattaagcatgcaaaattttaccatatggaaaggtaatattaaaacctggcaccraaatgatagcttccttgcagacatcattgtgagtcaaggaagcttaaaaagcatagaggaatagggaaggaagaggcttatacagctcaccacatcaatgccccaaagtcccacccatctcctttcacacactgaacacaggtacaggtgtacaagcatcattctcgaggaaatggttccacccaaattaatatttcagaatctcatctaatttccattttgcgtttggcttatgtatccaagattttgttgctaaaaacaaaaacatggagaatgccaaataactgtgaaagaattatatttctgctaattctttgatttacaaaatctttgttccattttaattctacaaaagtttatttcatgtaagggagacatgtagtctacagttttgcccgttttgccacaatttcaatttcaatttgggaagttttca

SEQ ID NO: 13846 - DNA, 560 bp, Homo sapiens
atttttctctgaatatttccatttgctttgccataactccctaagaaaaatctggagaatactgactcccattaagcatgcaaaattttaccatatggaaaggtaatattaaaacctggcaccaaaatgatagcttccttgcagacatcattgtgagtcaaggaagcttaaaaagcatagaggaatagggaaggaagaggcttatacagctcaccacatcaatgccccaaagtcccacccatctcctttcacacactgaacacaggtacaggtgtacaagcatcattctcraggaaatggttccacccaaattaatatttcagaatctcatctaatttccattttgcgtttggcttatgtatccaagattttgttgctaaaaacaaaaacatggagaatgccaaataactgtgaaagaattatatttctgctaattctttgatttacaaaatctttgttccattttaattctacaaaagtttatttcatgtaagggagacatgtagtctacagttttgcccgttttgccacaatttcaatttcaatttgggaagttttca

SEQ ID NO: 13847 - DNA, 560 bp, Homo sapiens
atttttctctgaatatttccatttgctttgccataactccctaagaaaaatctggagaatactgactcccattaagcatgcaaaattttaccatatggaaaggtaatattaaaacctggcaccaaaatgatagcttccttgcagacatcattgtgagtcaaggaagcttaaaaagcatagaggaatagggaaggaagaggcttatacagctcaccacatcaatgccccaaagtcccacccatctcctttcacacactgaacacaggtacaggtgtacaagcatcattctcgaggaaatggttccacccaaattaatatttcagaatctcatctaatttccattttgcgtttggyttatgtatccaagattttgttgctaaaaacaaaaacatggagaatgccaaataactgtgaaagaattatatttctgctaattctttgatttacaaaatctttgttccattttaattctacaaaagtttatttcatgtaagggagacatgtagtctacagttttgcccgttttgccacaatttcaatttcaatttgggaagttttca

SEQ ID NO: 13848 - DNA, 520 bp, Homo sapiens
tgaaaagtccagttgtagggctggcttcaggtgtggctgaaatcagggctcagctaatgtcaccaaaacatgctcctttttgttctgtcactaagctctgcttttcttttggctacgttcttaggttttctttctggggtggcaagatgtgtacagcatcccaagcctcatattcttgttgctctaaatccaatgcaagggagacagcctctcacgcagtttctggtgttcaaaccctcattggactagcttaggacgagtggatccctgccttccctactccccaccacaacacagccacacagtcacacttacacatgrtcctggccaagggaactgcagtgtttaatggctctgatgtgggtgacgtactctattcttgagggtagccctgccacaccatacgaactaagtattattgggggaaatcctcaaatggaaatttgggttgttttcagatcaaggaaaaatggatgacaaaggtaagcaccatcattttcctagttgctcaatctttctg

SEQ ID NO: 13849 - DNA, 509 bp, Homo sapiens
attattcatctactagaattggaataacaggcatttaagatcagcacatataacaaggagaaaaagcatttgtagttacattattcttcatactcgctctgaaaaagttgtctaaattcagacaactaattaattgcgaactgtaacttattttctttgtaaggacatatttttaaaagtataaagccaaacatataaattaggtaatataatgctttatatttctttctattcagtaatgttttcaaaattcctaaaggttttccaacaccattttattgacaattatcctcctagcaaccataatttaaatattgagtgttttctgaaaagtttgcatggactgtgtaatttaatgccccgcaaagcatcatgatgtaagataattattatctctgtttcatagatgagaaaatggatcactcggttgcaagtaatttgccgtatttatgktcacagaataagggggtggcagaagagaaacggaaatcctttatgtttgctataga

SEQ ID NO: 13850 - DNA, 486 bp, Homo sapiens
cagaagctttcagacagtgactccaggcagaaagggtggccttctcttcttatgcagtggaattggttctcattgtaaaattaaataggagccaagaattgtccccataactgttcctgcagggtggaggtcggtctaggagaaacctcttgaagctgcagcacacggctctctggcagtccggcaagactgcctttctcctttccgcattacatgcactcctctccttccttctttcatctctaccactgtctcctctaagtaagaccccacagtgttttcatgaaagcaagaaaaacggacattcctgayggtatcgtgggacctgtcgaggcagaatcgctcacatatgccttttttctcactgttagcttgagatgatcttaaagaaagaaaagaaagagcacgaaaaggacacacaaaacacaaacaaaaatgtctcttcctagatggccgacaggaaataaagctgtctgtctctggaga

SEQ ID NO: 13851 - DNA, 520 bp, Homo sapiens
cagcgcaagaagtcatgtagccaaccccatggcgaccaasaagggccactgtccctcaaaggcggccccaccagcacaaaagatggaaagtggaagctggctgggggggcttcacctggggaggacctgtccagcaaagagctgcgagtcactgatgagcatacgcacaagctctcccaacttcctgcagcaacccctcatcctgcccagtccctgcggccccgcccacccagctctcctggactcacccccaggaatacggctctcagaggcttcccaaagacgtgctggcatgctggtttctctcatgcttcttttctaccccaaactgcccctggccagctttcacggtccctcaaacatctgctaacacaacagttgctgcctgttctgaggcctgctcagggaggttcggggactcagtgtgtgggcagccgcaatcaatcaaacctctgtttcgacatcccgacccctccccacaaacatcttgcttctgtttgaagcactgttgagaagtaca

SEQ ID NO: 13852 - DNA, 544 bp, Homo sapiens
tcacctgtccctgttcaggcttcacgccctgttagtgctgttgtccactgttgttatttgtgcaccatggtctgagttggcctgtttcttgtgagtcgtcttatccttaagtgtggtataaaacccttcgtagggagagtgtgtggcctcttgtgtcctgcctgctgcagggaagctctcatgagtaggggtgtaagctatgtttttttttgttgttgttgttgtttttsagacagggtctctctcttttgcctaggctggagtgcagtggcgcgatcttggcttactgtaacctccacctcctgggttcaagcaattctcacgcctcagcctgggacaaatagctgggactataactgcacgccaccatgcccagctaacttttgtatttttagtagagacagggttttaccatgttggccaggctggtctcaaactcctggcctcaggtgatctgcccgcctaggcctcccaaagtgctggtattacaggcgtgagccatcgtgcccggccctggtgatgctatttttttcctggtcttttt

SEQ ID NO: 13853 - DNA, 538 bp, Homo sapiens
ctttcaacttgggacagagaatcaggtaagattttactcccaggggagtggggagtggttggaaatcacattttattcaccaggtgtttttggtttatagcagactcaggaaaaaagtcaggggccatccataaaatagggccagagcmtttttacttgcagtttcattgaaatttagtgaaaggtaaacccagcaggtacctgttttactggcagtaaaagaaaattgggcaacaattatttaaaatgagtcagagctgtttaaatctaaaatttaggggtatgtgtatgttttaaaagaaagtttacaaggcttggagatttggactgaactgtttttgatgaaaatgacatggaaaatattttcctttcttattttaaaccttcttctttgctgtttgtttcctaaatttagcaggaagcaataagcaaatctagctggaaaaaaaaactgaagcaagttagggaagtttcaaggtctaatcgaaatgatagactgaaaataaagctgtccaaggtgagacagtaattcttccca

SEQ ID NO: 13854 - DNA, 553 bp, Homo sapiens
ccatcaattgtgtactttaaacctgtgattttatatctcagcacaaaaaaaagtctataaaaaggatgaggtgaggccctccacagagcactgaaaaaccatcaaaggtctctgytgatcagccccatcccgggcttccgttatcctgatctagggtgggaactgaggggcagagctggattccaagttccagacaagaggattttgggggtgaaagcagagtggggaaggagaagaaagaagaggctctgttccgtgtcccccatggagggcgaaagatgagaaggctcatgaagggtgatgaagttttacatgtggtatatgacataatctaccaccccaaaaaagaggccagcaaaatcaacattattcatcaaggttttggatttggatttgtgttctgggaggtgatgcggggagtggcgagtctgaccttgtaacagtggatgtggtatgagagggatagcacccagattacatggggacctcggagcccctgccctccagctgctagtagtcccattgggaagactcaaacaactataatacaaag

SEQ ID NO: 13855 - DNA, 418 bp, Homo sapiens
  misc_feature (1)...(418): n = A,T,C or G
gggcaatataatgagacgcccatctctacaaaaaggaaaaaattaattatccagggatggtggtgcatgcctgtagttcctgctactcarggaggctgaggtgggaggttcctttgagcctgggaagttgaggctgcagtgagccatggttgcaccactgcactccaggctgggtgacagagcaagactgtctcaagaaaaaaagcaaaacaccaaagtctagacaaataataacatgatatttttctaattatatctagcttctgtttttacttccagcatcttgctatctttagaaatattttctgttctttttcnnnnnnnnnnnnnnnnnnnnnnnnnnnnnnnnnnnnnnnnnnnnnnnnnnnnnnnnnnnnnnnnnnnnnnnnnnnnnnnnnnnnnnnnnnnnnnnnnnnnt

SEQ ID NO: 13856 - DNA, 383 bp, Homo sapiens
atggaatattttaagtccataaattagggatgatcttgaggaaaaaagacaagttaaatagaatggattatgcttatgagaatgagactgaattggctggagttcatctgattgtgcctatgcctgttagaacttcctcaaagttgccgtggcaatgggmctctctctcatgcagagaggagaaaagcagtggatactaagtaatgtgggcttgagtaatgcatgttgcagttaattgcactatgtcagaaatttacgggaaaggtttgggagaggtttatttagtggacaaaatatggcctcaggaataaatgacaatggattttcaataaaaaggagtttactgagcctatgccttcagaaacaactgaagtgttataaat

SEQ ID NO: 13857 - DNA, 720 bp, Homo sapiens
ataatttacattttcactcatagcctacaagggttcccttttctccacatccttgcaaacacttgttatcttttttctttttgctaatagctttcctaacatatataatataatataatataataaaaatatacatattttgataaatatatatatatatatatatatatatatatttttttttttttttgagatagagtctcactctgttgcccaggctggagtgcagtggtgtgatctctgctcactgcaacctccacctcccggrtttaagtgattctcctgcctcagcctcccgagtagatgggactacaggtgcccgccaccacgcctggctaatttttagtagagatggggtttcactgtgttagccaggatggtctcaaactcctgaccttgtgatccacccgcctcggcctccctaagtgctgggattacaagcatgagccactgtgcccggcttgagtttcttatatattttgggaaataaaccacttatcagatataaattgtggcattgcacctatgtgaatgcagggacatttgcttcttcacaaaaaggcttcatttattcactgaggcatgctccctgcaggtttgtatccattgagaaggactgcccttttcatatttgcttaaattctataggctgatattgtgtgtgtgcatatttgtatatgcacatatgtaagtgtacatatccatgtgcacataaacata

SEQ ID NO: 13858 - DNA, 720 bp, Homo sapiens
ataatttacattttcactcatagcctacaagggttcccttttctccacatccttgcaaacacttgttatcttttttctttttgctaatagctttcctaacatatataatataatataatataataaaaatatacatattttgataaatatatatatatatatatatatatatatatttttttttttttttgagatagagtctcactctgttgcccaggctggagtgcagtggtgtgatctctgctcactgcaacctccacctcccggatttaagtgattctcctgcctcagcctcccgagtagatgggactacaggtgcccgccaccaygcctggctaatttttagtagagatggggtttcactgtgttagccaggatggtctcaaactcctgaccttgtgatccacccgcctcggcctccctaagtgctgggattacaagcatgagccactgtgcccggcttgagtttcttatatattttgggaaataaaccacttatcagatataaattgtggcattgcacctatgtgaatgcagggacatttgcttcttcacaaaaaggcttcatttattcactgaggcatgctccctgcaggtttgtatccattgagaaggactgcccttttcatatttgcttaaattctataggctgatattgtgtgtgtgcatatttgtatatgcacatatgtaagtgtacatatccatgtgcacataaacata

SEQ ID NO: 13859 - DNA, 563 bp, Homo sapiens
ctattgtaatctacaagtcctgaccacctctaggctacttcaaaaagtcaaggattacatattgcaactaaaattctagttaatcaccaaataaattttcccttgaaaagcatttaagttttgagactaacttatatcctaagcttctcagatcttacctcatatttgaacataatttgacagtttacaaataattttcacataatgtacyattccattttacctgtataacatgagtatgtttgactttttcaggtaacaaggaatggaaacatattctggttactttaaattactgcaaggccttacaggaaagagaggaaaacaagcatctgtaacacaagcctaatgaacattagagatcattcagggatgcaaagattgttcagagggctgagtcctcatagcctgcttaccctgttgtcacttttgcagaaaggacatgtctctgcctttgctatggcttcaccatcattctcacccattttcttattttagtacattattagtaatattaaaagctatcgaataaaattttaaaaatatttttaaacattttcttt

SEQ ID NO: 13860 - DNA, 523 bp, Homo sapiens
agaaacagagatggaaagaggcagagagagcagaggaacattttgtaatgaataagaaggtattacatctgggaatgatgaaaagaatgctatagaaaacattcttggaaattaaaaatataatagtaaaaagttaatasatgggctgaaagaggaaagttgtagcaaactggaaatataagaaaattaggtaatcaatccaggaagtatttgatgaataaaagttccagaaaaagaaaacagtggtgaagaatgattaccaaagttcctcataactgaaggatctgaatctcaattgaaatagcccagggagtacccataaaatgggtaaaaaggaaccatttcacagctcagtattttaaaatttcagaatactagacgtaagaagattctaaaaagttcaaaatagggaaaacaaaacacatagcaatgtaaaagttattccacatgccaaggatgagaattttgaatagcatttgatttatttttttctcttgtttgagacaggttctcactctgtcat

SEQ ID NO: 13861 - DNA, 523 bp, Homo sapiens
agaaacagagatggaaagaggcagagagagcagaggaacattttgtaatgaataagaaggtattacatctgggaatgatgaaaagaatgctatagaaaacattcttggaaattaaaaatataatagtaaaaagttaatagatgggctgaaagaggaaagttgtagcaaactggaaatataagaaaattaggtaatcaatccaggaagtatttgatgaataaaagttccagaaaaagaaaacagtggtgaagaatgattaccaaagttcckcataactgaaggatctgaatctcaattgaaatagcccagggagtacccataaaatgggtaaaaaggaaccatttcacagctcagtattttaaaatttcagaatactagacgtaagaagattctaaaaagttcaaaatagggaaaacaaaacacatagcaatgtaaaagttattccacatgccaaggatgagaattttgaatagcatttgatttatttttttctcttgtttgagacaggttctcactctgtcat

SEQ ID NO: 13862 - DNA, 523 bp, Homo sapiens
agaaacagagatggaaagaggcagagagagcagaggaacattttgtaatgaataagaaggtattacatctgggaatgatgaaaagaatgctatagaaaacattcttggaaattaaaaatataatagtaaaaagttaatagatgggctgaaagaggaaagttgtagcaaactggaaatataagaaaattaggtaatcaatccaggaagtatttgatgaataaaagttccagaaaaagaaaacagtggtgaagaatgattaccaaagttcctcataactgaaggatctgaatctcaattgaaatagcccagggagtacccataaaatgggtaaaaaggaaccatttcacagctcagtattttaaaatttcagaatacyagacgtaagaagattctaaaaagttcaaaatagggaaaacaaaacacatagcaatgtaaaagttattccacatgccaaggatgagaattttgaatagcatttgatttatttttttctcttgtttgagacaggttctcactctgtcat

SEQ ID NO: 13863 - DNA, 523 bp, Homo sapiens
agaaacagagatggaaagaggcagagagagcagaggaacattttgtaatgaataagaaggtattacatctgggaatgatgaaaagaatgctatagaaaacattcttggaaattaaaaatataatagtaaaaagttaatagatgggctgaaagaggaaagttgtagcaaactggaaatataagaaaattaggtaatcaatccaggaagtatttgatgaataaaagttccagaaaaagaaaacagtggtgaagaatgattaccaaagttcctcataactgaaggatctgaatctcaattgaaatagcccagggagtacccataaaatgggtaaaaaggaaccatttcacagctcagtattttaaaatttcagaatactagacgtaagaagattctaaaaagttcaaaatagggaaaacaaaacacatagcaatgtaaaagttattccacatgccaaggatgagaattttgartagcatttgatttatttttttctcttgtttgagacaggttctcactctgtcat

SEQ ID NO: 13864 - DNA, 472 bp, Homo sapiens
ataatatttccagttagatttaaactttgaagataaggaaggggtcattcatcatcgattatgttatctccatccacggtacctcttcaaaccaaactgtgtatggctgaagaaaaccaaggatctggtaagctacagacatgagcaaatacttttagtactgaaaaagaattgagaaattaactcattacctttaactttagaaatgagcaaagaracccaaagaggttaactataattagttcctaggtaagaagttctctatatttgctatttgctttgatgtttgcatccttatcctattacatattaatttttaatatataatatcctattttttgaaagctaacatttaaaatctgaatcatgttaaatagaaaaggaaataaaattttatgtacatctaataatgcctgctctggtcagacataggtactgccctggtgaaagaatttcaggcctgcaatagaga

SEQ ID NO: 13865 - DNA, 2691 bp, Homo sapiens
ggtacaggttataaacgtgtatcagaggtagaacaaagacaagatggaatcactcaccctgtaccagaccctcagatgcctaaccttagtccctacccgctcaactgcatgtacactttatgcatatatatcacctatggatagtgtcactgagcaccagtcagaatcataggaatgtaactgctgcttcatggccctgcttctcccaccttctgtaccacatgcatccttctattaggaaattatatactgtgcctcatggaacctactttggagactcattctcagtctgcactgagtctgtgtttccaggcttaagaccccaaacttggctcaaaataaacctaaccataatttctctaagttttagtgcctgttatttcacttttcagttgatagctttaaatgacttattggtgttaaaaaatataagggctaaaacccttatattttcatttctataaatttgtatatttataattatatacaaatatcaattatatgccatttcaatgattggtattttaaatacatattttgatagatttgaataatatttacatattttattattttttgtgtagtgattattttactacaaatttgtaaatttataatttctacaaattttactagttactttcaatgtacaacactatgtgattctatgtttatgtaaaggtggattggtctaggcagtatgagttttggttatgagcctgaagagcttgaaaactacttgactacaaagcaattgttaacaacttcacagcaactttacaagaacaaagtagttgctaagaagccattgcaagtatttgagaaaattcatgtgataaaaacaatgtgttagtaagaagcagattaattggattaaaaaataagtgattagaaaggtaaataatacatgaacttgagaaactgaaagaatggcattgcccatagaaaagtaggatccagctggagatgttcatgaaattttagaacatgaaaaacttttccaatatggccaggatgaaaagaggaaggagtacagaatattcttgtcctgtaacttgtatccacttttaacgaccactgccacctggtggcttgtgaccctgtttccactgaaggaagaaaccctgtttattcttgattttgcatacctaagcagggataaaaacaggataaaaagaacactggcctggaacaccagggatctaagttcctggagcgcaggggttaaagaccatagtatgtcttgttcgttgagatcgtttaactacaaatacctatacttcaacgatttcttatgaaatttgcagccaaatctggaatccagaaagaattctgacatgaattaaaatcttcaaatcccatcatgtatgttgaattactccttttttttttttcaacaagcctcatgtstcccatcctgttagaccttggtaatgtaagcccgtatctctctcctgagttactgagtaatagaagacatggcaagcacaatagctaaggaaagaggaagtgataggtggacagtcacagtgagaaacccaggaaaaataagcagcctgcaatatttcaaggaataagtttacagttgtatttttctgaagcaacattgtgagatgagtacctagctgctactgattttgattctgagaacgaaacttcctctcacgaccaacattcccacacctataactttgtatcatttgccaagaacaacctattttatgacttcttgatgcttttctgcatgcgttctgctgcttggaaattctaccctgtacacatttatttcagaaacccctagttcaaaggttacccctgctataaagccttccaacactctctccaagcagaggcaacatttcttccctctgttccacaattgattgcattttgttttcaccttactgtattcttactaaatcctcattatactcctgtctaaacaacatgtactctcttagtctgtttgggcccctgtaataaaatactataaactaggtatcttataaacaatagaaatttatttcttatagttctaaaggctggggagtccaagatcaagatattggcaggttccgtgtctggtgatggtttgctttttcatagacggaggcttttaaatatgtctttgcatggtggaaggggcaaggaaggtctcttttacaagaacagtaatctcattcatgaggttcctcccatgtgatctaatcatctcctaagggccaccacctcctaatattatcaccttggggctaaggtttcaacatgtgaattttggagtgacacaaacatttgaatcatagcatgtacaacatctgcttaaatgtgtatcagtattactgcacttaagcctttttggcatcaaacactgtgtcttttaaatctgtattccagatattattttggttgatggctactagaacaaacagtgcctctgtctcaccctccaggatgacaattctggggagaaattgaataaccctgtgacagacattgagaacatatgattttatgaggggtaggacataaatgcagagtttctgttagagtttgcatacttgtaacatttatgaaccctgagctcttaatcagtttcttagggctcagaaaacataggtggtattagagctcagaaacctaacaagtgagtttcatcatgaaggataacaaagggcttggctcttttattga

SEQ ID NO: 13866 - DNA, 2482 bp, Homo sapiens
attcattcatttctctcctgtacctgctttgccaactttgtacagcaggagtatggaaagtagatgtttaatgaaagtggggtgttctgaaccatcccggataataccaaaagcctaagtgtggagactaaattaaaactaagaccttaatttgccagaacaataaggactgaaaggggcttcagatgtcactgtgtccaaacctccatcttatgcccaacttccctgacagcaacctgtaagtggcttgtcagtctttgctgcttgttactgtatagtaaggggcaacgtcctcatcttggttgttagctgcaattttagacagctccagttgtcaaaaagactttttgtacattgagtcctaatctaaccctcagaaactattagaattgcttgaatccttttattcttacacctgcaggaaggctcatggacatagacttgtgacaactccaaggctcggaaaccaatttgtgagcctctgagtgttagtgattctgatcttcaaggaactattttagggcttaatttcccaacctatccagttgcaagtaaacaagttggctccttcatttttatacaatctcccattatgaaatatttgtttaaaatgatagtttttcaaccttactagtgaaatcacctatcaaggtttgacaaggttactgcatgccgaaatttgagctgcttccctaacaatgcggggatttttttctaatctataaaaacaaggcaccatcaattgtgatttgtatttgtttttttttttttttttttttttgtccaggattattctgttaatgtttataagcccttgtaacaagagatggaaattwtactcccgtcattttctcatttcagatatgactgaataatcgtccaagattaagtgagtcaagtggaaataattaggaaagggaaaaaggcccagattcttcaattttcagttccattacattttattctaggagcaaaggcattctgttagtctgaagcaagacacacttccaaagaaaacgaggcacaatcaaaggccttttgttttccctgtctccaatgagcacagtccatctgggccacgcatgtttatgcatcaccttgtagggatccctttgttctccagaaatcaaatgccaccaaaatatgttccagaagaaacgaagccagaaggaaagacagtaggattttttccccagagggttaaggtttattactagaacattctcatcaagtgttctctgtgacacttcaagcaatgtggatcttgtggaattaactcattgccaaaaggcttaaaaataattacaatgaattaacctattatattaattacaattaattttcagttgaacctaggaattccatctctaggggattccttagcactgacatgtaggaagtggctttggcatatgataggtaattaatctctaacaatctgctatcaaattcatttcctttaggaatgaccaatttgcaaagaggaccaatttgcaaagagaaatgagagtaaagacttagagaaacggcattggaaggaatctctttgggaacagaagtgtccagttgggtgttctgaacatctgtataggggatacctatttagttagcagtgactccaaaggcccaaaattgtatccatagctgattaatgagcactccaaaatacgtgaatgggtacacatgctggggtatagctcaataagatcatgaaaaatcagtgtcagtatggacacaacaaaactaatgattatttagtaagaaatgatgatttatggaaattgttcaaagaaacatagaatttcagagcaaaaaggaactagggtccaaaagcctttcctgtcaactctgtagcaacactatccagttgaaatttctgtgacgatggaaaggttctgcactgcactaattgatagccactagccatgtgtgactaatgagcatttgaagtgtggctaatgcaactgaggaacttttaattttatttaattttaattaaatttaaacttatagtaatgaagtgcacagcactactgcataccatggtagcagtccagcctttgtctaaatccttttgatgacagggaacatccttccttaccattaagcaccctccatttagaaagagtgcttcagagctcatcatttaaaaagttttgcttcaagttgaactataatctgccaactacagatccacccccctgtggtttactcctcacctcctctcctagaccacacagaataactgctcacagtctcttactgttttttagtatttgagaagcttcaaaatgctgtagtatcatagaatttcagccatggaaggggcatggtttagcttctttgttgaacctcccctcttagtgggtttttctctaggctgaaaaaattttgttttgttatttatttatttatttattttgagacagtcttgttctgtcacccaggatggagtgctgtggcacaaacatgactcactgca

SEQ ID NO: 13867 - DNA, 2482 bp, Homo sapiens
attcattcatttctctcctgtacctgctttgccaactttgtacagcaggagtatggaaagtagatgtttaatgaaagtggggtgttctgaaccatcccggataataccaaaagcctaagtgtggagactaaattaaaactaagaccttaatttgccagaacaataaggactgaaaggggcttcagatgtcactgtgtccaaacctccatcttatgcccaacttccctgacagcaacctgtaagtggcttgtcagtctttgctgcttgttactgtatagtaaggggcaacgtcctcatcttggttgttagctgcaattttagacagctccagttgtcaaaaagactttttgtacattgagtcctaatctaaccctcagaaactattagaattgcttgaatccttttattcttacacctgcaggaaggctcatggacatagacttgtgacaactccaaggctcggaaaccaatttgtgagcctctgagtgttagtgattctgatcttcaaggaactattttagggcttaatttcccaacctatccagttgcaagtaaacaagttggctccttcatttttatacaatctcccattatgaaatatttgtttaaaatgatagtttttcaaccttactagtgaaatcacctatcaaggtttgacaaggttactgcatgccgaaatttgagctgcttccctaacaatgcggggatttttttctaatctataaaaacaaggcaccatcaattgtgatttgtatttgtttttttttttttttttttttttgtccaggattattctgttaatgtttataagcccttgtaacaagagatggaaattttactcccgtcattttctcatttcagatatgactgaataatcgtccaagattaagtgagtcaagtggaaataattaggaaagggaaaaaggcccagattcttcaattttcagttccattacattttattctaggagcaaaggcattctgttagtctgaagcaagacacacttccaaagaaaacgaggcacaatcaaaggccttttgttttccctgtctccaatgagcacagtccatctgggccacgcatgtttatgcatcaccttgtagggatccctttgttctccagawatcaaatgccaccaaaatatgttccagaagaaacgaagccagaaggaaagacagtaggattttttccccagagggttaaggtttattactagaacattctcatcaagtgttctctgtgacacttcaagcaatgtggatcttgtggaattaactcattgccaaaaggcttaaaaataattacaatgaattaacctattatattaattacaattaattttcagttgaacctaggaattccatctctaggggattccttagcactgacatgtaggaagtggctttggcatatgataggtaattaatctctaacaatctgctatcaaattcatttcctttaggaatgaccaatttgcaaagaggaccaatttgcaaagagaaatgagagtaaagacttagagaaacggcattggaaggaatctctttgggaacagaagtgtccagttgggtgttctgaacatctgtataggggatacctatttagttagcagtgactccaaaggcccaaaattgtatccatagctgattaatgagcactccaaaatacgtgaatgggtacacatgctggggtatagctcaataagatcatgaaaaatcagtgtcagtatggacacaacaaaactaatgattatttagtaagaaatgatgatttatggaaattgttcaaagaaacatagaatttcagagcaaaaaggaactagggtccaaaagcctttcctgtcaactctgtagcaacactatccagttgaaatttctgtgacgatggaaaggttctgcactgcactaattgatagccactagccatgtgtgactaatgagcatttgaagtgtggctaatgcaactgaggaacttttaattttatttaattttaattaaatttaaacttatagtaatgaagtgcacagcactactgcataccatggtagcagtccagcctttgtctaaatccttttgatgacagggaacatccttccttaccattaagcaccctccatttagaaagagtgcttcagagctcatcatttaaaaagttttgcttcaagttgaactataatctgccaactacagatccacccccctgtggtttactcctcacctcctctcctagaccacacagaataactgctcacagtctcttactgttttttagtatttgagaagcttcaaaatgctgtagtatcatagaatttcagccatggaaggggcatggtttagcttctttgttgaacctcccctcttagtgggtttttctctaggctgaaaaaattttgttttgttatttatttatttatttattttgagacagtcttgttctgtcacccaggatggagtgctgtggcacaaacatgactcactgca

SEQ ID NO: 13868 - DNA, 2482 bp, Homo sapiens
attcattcatttctctcctgtacctgctttgccaactttgtacagcaggagtatggaaagtagatgtttaatgaaagtggggtgttctgaaccatcccggataataccaaaagcctaagtgtggagactaaattaaaactaagaccttaatttgccagaacaataaggactgaaaggggcttcagatgtcactgtgtccaaacctccatcttatgcccaacttccctgacagcaacctgtaagtggcttgtcagtctttgctgcttgttactgtatagtaaggggcaacgtcctcatcttggttgttagctgcaattttagacagctccagttgtcaaaaagactttttgtacattgagtcctaatctaaccctcagaaactattagaattgcttgaatccttttattcttacacctgcaggaaggctcatggacatagacttgtgacaactccaaggctcggaaaccaatttgtgagcctctgagtgttagtgattctgatcttcaaggaactattttagggcttaatttcccaacctatccagttgcaagtaaacaagttggctccttcatttttatacaatctcccattatgaaatatttgtttaaaatgatagtttttcaaccttactagtgaaatcacctatcaaggtttgacaaggttactgcatgccgaaatttgagctgcttccctaacaatgcggggatttttttctaatctataaaaacaaggcaccatcaattgtgatttgtatttgtttttttttttttttttttttttgtccaggattattctgttaatgtttataagcccttgtaacaagagatggaaattttactcccgtcattttctcatttcagatatgactgaataatcgtccaagattaagtgagtcaagtggaaataattaggaaagggaaaaaggcccagattcttcaattttcagttccattacattttattctaggagcaaaggcattctgttagtctgaagcaagacacacttccaaagaaaacgaggcacaatcaaaggccttttgttttccctgtctccaatgagcacagtccatctgggccacgcatgtttatgcatcaccttgtagggatccctttgttctccagaaatcaaatgccaccaaaatatgttccagaagaaacgaagccagaaggaaagacagtaggattttttccccagagggttaaggtttattactagaacattctcatcaagtgttctctgtgacacttcaagcaatgtggatcttgtggaattaactcattgccaaaaggcttaaaaataattacaatgaattaacctattatattaattacaattaattttcagttgaacctaggaattccatctctaggggattccttagcactgacatgtaggaagtggctttggcatatgataggtaattaatctctaacaatctgctatcaaattcatttcctttaggaatgaccaatttgcaaagaggaccaatttgcaaagagaaatgagagtaaagacttagagaaacggcattggaaggaatctctttgggaacagaagtgtccagttgggtgttctgaacatctgtataggggatacctatttagttagcagtgactccaaaggcccaaaattgtatccatagctgattaatgagcactccaaaatacgtgaatgggtacacatgctggggtatagctcaataagatcatgaaaaatcagtgtcagtatggacacaacaaaactaatgattatttagtaagaaatgatgatttatggaaattgttcaaagaaacatagaatttcagagcaaaaaggaactagggtccaaaagcctttcctgtcaactctgtagcaacactatccagttgaaatttctgtgacgatggaaaggttctgcactgcactaattgatagccactagccatgtgtgactaatgagcatttgaagtgtggctaatgcaactgaggaacttttaattttatttaattttaattaaatttaaacttatagtaatgaagtgcacagcactactgcataccatggtagcagtccagcctttgtctaaatccttttgatgacagggaacatccttccttaccattaagcaccctccatttagaaagagtgcttcagagctcatcatttaaaaagttttgcttcaagttgaactataatctgccaactayagatccacccccctgtggtttactcctcacctcctctcctagaccacacagaataactgctcacagtctcttactgttttttagtatttgagaagcttcaaaatgctgtagtatcatagaatttcagccatggaaggggcatggtttagcttctttgttgaacctcccctcttagtgggtttttctctaggctgaaaaaattttgttttgttatttatttatttatttattttgagacagtcttgttctgtcacccaggatggagtgctgtggcacaaacatgactcactgca

SEQ ID NO: 13869 - DNA, 2482 bp, Homo sapiens
attcattcatttctctcctgtacctgctttgccaactttgtacagcaggagtatggaaagtagatgtttaatgaaagtggggtgttctgaaccatcccggataataccaaaagcctaagtgtggagactaaattaaaactaagaccttaatttgccagaacaataaggactgaaaggggcttcagatgtcactgtgtccaaacctccatcttatgcccaacttccctgacagcaacctgtaagtggcttgtcagtctttgctgcttgttactgtatagtaaggggcaacgtcctcatcttggttgttagctgcaattttagacagctccagttgtcaaaaagactttttgtacattgagtcctaatctaaccctcagaaactattagaattgcttgaatccttttattcttacacctgcaggaaggctcatggacatagacttgtgacaactccaaggctcggaaaccaatttgtgagcctctgagtgttagtgattctgatcttcaaggaactattttagggcttaatttcccaacctatccagttgcaagtaaacaagttggctccttcatttttatacaatctcccattatgaaatatttgtttaaaatgatagtttttcaaccttactagtgaaatcacctatcaaggtttgacaaggttactgcatgccgaaatttgagctgcttccctaacaatgcggggatttttttctaatctataaaaacaaggcaccatcaattgtgatttgtatttgtttttttttttttttttttttttgtccaggattattctgttaatgtttataagcccttgtaacaagagatggaaattttactcccgtcattttctcatttcagatatgactgaataatcgtccaagattaagtgagtcaagtggaaataattaggaaagggaaaaaggcccagattcttcaattttcagttccattacattttattctaggagcaaaggcattctgttagtctgaagcaagacacacttccaaagaaaacgaggcacaatcaaaggccttttgttttccctgtctccaatgagcacagtccatctgggccacgcatgtttatgcatcaccttgtagggatccctttgttctccagaaatcaaatgccaccaaaatatgttccagaagaaacgaagccagaaggaaagacagtaggattttttccccagagggttaaggtttattactagaacattctcatcaagtgttctctgtgacacttcaagcaatgtggatcttgtggaattaactcattgccaaaaggcttaaaaataattacaatgaattaacctattatattaattacaattaattttcagttgaacctaggaattccatctctaggggattccttagcactgacatgtaggaagtggctttggcatatgataggtaattaatctctaacaatctgctatcaaattcatttcctttaggaatgaccaatttgcaaagaggaccaatttgcaaagagaaatgagagtaaagacttagagaaacggcattggaaggaatctctttgggaacagaagtgtccagttgggtgttctgaacatctgtataggggatacctatttagttagcagtgactccaaaggcccaaaattgtatccatagctgattaatgagcactccaaaatacgtgaatgggtacacatgctggggtatagctcaataagatcatgaaaaatcagtgtcagtatggacacaacaaaactaatgattatttagtaagaaatgatgatttatggaaattgttcaaagaaacatagaatttcagagcaaaaaggaactagggtccaaaagcctttcctgtcaactctgtagcaacactatccagttgaaatttctgtgacgatggaaaggttctgcactgcactaattgatagccactagccatgtgtgactaatgagcatttgaagtgtggctaatgcaactgaggaacttttaattttatttaattttaattaaatttaaacttatagtaatgaagtgcacagcactactgcataccatggtagcagtccagcctttgtctaaatccttttgatgacagggaacatccttccttaccattaagcaccctccatttagaaagagtgcttcagagctcatcatttaaaaagttttgcttcaagttgaactataatctgccaactacagatccacccccctgtggtttactcctcacctcctctcctagaccacacagaayaactgctcacagtctcttactgttttttagtatttgagaagcttcaaaatgctgtagtatcatagaatttcagccatggaaggggcatggtttagcttctttgttgaacctcccctcttagtgggtttttctctaggctgaaaaaattttgttttgttatttatttatttatttattttgagacagtcttgttctgtcacccaggatggagtgctgtggcacaaacatgactcactgca

SEQ ID NO: 13870 - DNA, 532 bp, Homo sapiens
ctgggattcaggggtaggggtgggggcgccctggtgacaaccacagcctcttggaaggctagggagaaaacagaaaccccactgagtggacacaatcagtctggatccttatcaggtgtcattacacatgtggcctgcagagtaggggttttgatggggttccggggagcccagggtggaaggcagggatcatagagacttctgaggctccgtccacaagggatgctggcctcgcctgggctctgtgactygtgtgtggcctttatgagccgtgaccaatggctcaaggcctgggctggcagccgtgagccttcatcctaggcaggaattctaattaaactggggctcctgggtctcacttacaaagagctcagccccagaccctgcttttcggggccccacccacctggacatactctttcacgcaacctgcagtgatatgcagctcagggaatccctgcttcatgctgctgcgggctgcggagggccggggcctatgctgatgcttggggtgggccctgagctttgactc

SEQ ID NO: 13871 - DNA, 532 bp, Homo sapiens
ctgggattcaggggtaggggtgggggcgccctggtgacaaccacagcctcttggaaggctagggagaaaacagaaaccccactgagtggacacaatcagtctggatccttatcaggtgtcattacacatgtggcctgcagagtaggggttttgatggggttccggggagcccagggtggaaggcagggatcatagagacttctgaggctccgtccacaagggatgctggcctcgcctgggctctgtgactcgtgtgtggcctttatgagccgtgaccaatggctcaaggcctgggctggcagccgygagccttcatcctaggcaggaattctaattaaactggggctcctgggtctcacttacaaagagctcagccccagaccctgcttttcggggccccacccacctggacatactctttcacgcaacctgcagtgatatgcagctcagggaatccctgcttcatgctgctgcgggctgcggagggccggggcctatgctgatgcttggggtgggccctgagctttgactc

SEQ ID NO: 13872 - DNA, 819 bp, Homo sapiens
cttgagcccaggaggtcgggctgcagtgagctctgatcatgtcactgcagtccagcctgagagaaagagtgaaaccctgtctagaatgaatgaataaataaataaatgaataagcttcctcattgtttgttcaggcacttcatgacctcatattaataagtttattscctctctgggcaacatgtcagcctcagtttctttctgttaaaacactgggcctctccattttttaaattcaaatccctgggaatacgtacttggttggactagctcaccccatctaggcagagctcctcaccccaagactcccacaggccatgggcagcccatgagttggctgcttttgagtcaggttcaatcaagtgcagctggaggaagaatgagtctcacggtgcgaaacactgtggctaatggtgcctccatcagtaccatttccttagaaaggcctgtggacacagaaggcactcccagagacagtcctcctcccaagcaccatcagggcaagataccaccatcccctgaacagcacagcattttacccatgaacaaatgaataaataaacaaacagcgagttgaacagcccatagtcaattgtgatggtttgtacaggtttcagtttgaaaagcagtcactaatgagctgcttggtcacattttgtcaattatttagatgtagagatcaaagtcagattataggttgggtacagtggctcacatctgtaatcccagcactttgagaggctgaggtggaagaattgcttgagccctgtagttcaagactggcctgagcaacacagcaagaccccatctgtacaaaaa

SEQ ID NO: 13873 - DNA, 819 bp, Homo sapiens
cttgagcccaggaggtcgggctgcagtgagctctgatcatgtcactgcagtccagcctgagagaaagagtgaaaccctgtctagaatgaatgaataaataaataaatgaataagcttcctcattgtttgttcaggcacttcatgacctcatattaataagtttattccctctctgggcaacatgtcagcctcagtttctttctgttaaaacactgggcctctccattttttaaattcaaatccctgggaatacgtacttggttggacyagctcaccccatctaggcagagctcctcaccccaagactcccacaggccatgggcagcccatgagttggctgcttttgagtcaggttcaatcaagtgcagctggaggaagaatgagtctcacggtgcgaaacactgtggctaatggtgcctccatcagtaccatttccttagaaaggcctgtggacacagaaggcactcccagagacagtcctcctcccaagcaccatcagggcaagataccaccatcccctgaacagcacagcattttacccatgaacaaatgaataaataaacaaacagcgagttgaacagcccatagtcaattgtgatggtttgtacaggtttcagtttgaaaagcagtcactaatgagctgcttggtcacattttgtcaattatttagatgtagagatcaaagtcagattataggttgggtacagtggctcacatctgtaatcccagcactttgagaggctgaggtggaagaattgcttgagccctgtagttcaagactggcctgagcaacacagcaagaccccatctgtacaaaaa

SEQ ID NO: 13874 - DNA, 819 bp, Homo sapiens
cttgagcccaggaggtcgggctgcagtgagctctgatcatgtcactgcagtccagcctgagagaaagagtgaaaccctgtctagaatgaatgaataaataaataaatgaataagcttcctcattgtttgttcaggcacttcatgacctcatattaataagtttattccctctctgggcaacatgtcagcctcagtttctttctgttaaaacactgggcctctccattttttaaattcaaatccctgggaatacgtacttggttggactagctcaccccatctaggcagagctcctcaccccaagactcccacaggccatgggcagcccatgagttggctgcttttgagtcaggttcaatcaagtgcagctggaggaagaatgagtctcacggtgcgaaacactgtggctaatggtgcctccatcagkaccatttccttagaaaggcctgtggacacagaaggcactcccagagacagtcctcctcccaagcaccatcagggcaagataccaccatcccctgaacagcacagcattttacccatgaacaaatgaataaataaacaaacagcgagttgaacagcccatagtcaattgtgatggtttgtacaggtttcagtttgaaaagcagtcactaatgagctgcttggtcacattttgtcaattatttagatgtagagatcaaagtcagattataggttgggtacagtggctcacatctgtaatcccagcactttgagaggctgaggtggaagaattgcttgagccctgtagttcaagactggcctgagcaacacagcaagaccccatctgtacaaaaa

SEQ ID NO: 13875 - DNA, 548 bp, Homo sapiens
gttctgaaatttcatggggcatttgtttgtgccactcacataaagcctatttattgccttgtttgtggtcatttttgtgtttttcttttgcttgtactaggctataaacctctggggaaggtgaaactatcacatttgccttgtattcttcttgatgcaaaagagatacttttatgtgaggaaagcttggaaaacgtttgactgtaggaatgaatgcaaaatctcctttatgatgtaataattctgttggcttttaattttgagcgacagagtttctttttagaatctgataaaacagaatttttagccagaaaaaaaaaaagaactgcacataggaacaagttttgtaaaaacttcaatgtattcatggatgccctggagccaatccaggttaaaaaagtttaaatttcacccatccaagtattttatgatctatattttggcygtgtaaccatgggggttacccaaaatgggaggagttttttcacatttcagtgccaaaggtttccaaatataaagaacactgccgtgtctgcctcagtgggatg

SEQ ID NO: 13876 - DNA, 851 bp, Homo sapiens
gaagcctagcaactgaccctcccagtacgcagaacatctcaccttcgttttatcattgcaggcaacaggcagtatagtctagttctgaaaaagacaaacagagattcagaaatacaaagatcagcacaaaacattagaaacatcagacatttaagaaagtcaatctaataaaggaagacagcaaactcaacaaacccaagttctgagaactaaggaaatcaaattaatacagcaattatggagtgatgagagaggacattgcatccaaatraaaataattgacataggatattttgttgaaataaaaggaaaaatcagtagttgtactgagtgtagaaatcagaagtcctatgaggggttctagaggaaaagaacacagagcatagaaagaaatagtaaaaaaaggagaaacatattcaacttgaagaagacatgaatttcagatttaaaaagactattaggtgctggacagaaagaatgtgaaatattccagatttaaacatatttaaaaatttttaaaccacttaaaaaaaaaaggaggaaatcccaaacttttcagacaaggaaaaagaaagttccctataagagagaataaattatattggcataaatctttcatttacaacactggatgcaagaggaaaatataacagtataactggatttctatacccagccaaactattgttcacttcaaatggaaatacaaaataggcacttatcactaacttggatagtttatcatctttaatctgtaactgaaaaaatcactagaaattgtacttgaaaaaaaacaaacaaacaaaaaacaaacccaagaggaagatgtgaggtaaaaggagaagagagaa

SEQ ID NO: 13877 - DNA, 851 bp, Homo sapiens
gaagcctagcaactgaccctcccagtacgcagaacatctcaccttcgttttatcattgcaggcaacaggcagtatagtctagttctgaaaaagacaaacagagattcagaaatacaaagatcagcacaaaacattagaaacatcagacatttaagaaagtcaatctaataaaggaagacagcaaactcaacaaacccaagttctgagaactaaggaaatcaaattaatacagcaattatggagtgatgagagaggacattgcatccaaataaaaataattgacataggatattttgttgaaataaaaggaaaaatcagtagttgtactgagtgtrgaaatcagaagtcctatgaggggttctagaggaaaagaacacagagcatagaaagaaatagtaaaaaaaggagaaacatattcaacttgaagaagacatgaatttcagatttaaaaagactattaggtgctggacagaaagaatgtgaaatattccagatttaaacatatttaaaaatttttaaaccacttaaaaaaaaaaggaggaaatcccaaacttttcagacaaggaaaaagaaagttccctataagagagaataaattatattggcataaatctttcatttacaacactggatgcaagaggaaaatataacagtataactggatttctatacccagccaaactattgttcacttcaaatggaaatacaaaataggcacttatcactaacttggatagtttatcatctttaatctgtaactgaaaaaatcactagaaattgtacttgaaaaaaaacaaacaaacaaaaaacaaacccaagaggaagatgtgaggtaaaaggagaagagagaa

SEQ ID NO: 13878 - DNA, 747 bp, Homo sapiens
ttgtcgctgtctttgctgagcgcagcatgctccagtgaagtcagccttggctggaacctgagcgtggggccgcagctgaggcacttcagcatttgttgaggaatggacaagacagacctgccgttgatggtctgttgaaccgctccccgtctcactattccatgagtccttccaggatcactcagatggatggagggttgtgtctaaaaatgataatggctgcttaaactatggcaataacttgtatgtacatatattttcttccaagaagtaaaatctgctttatagatggtatttcaataatcttcctcctttttctttggaattttaaatratgtggcctataaaactggaaaggcagcaaaacaataatttgctttgataaaaatttcaatattattgtttcccttttcttgaggaattcttttttttttttgataaattgcagtttctttgggcaccaatagtgtaagactgtcatcatttctcttatgtgaaaataatagactttgtctatttttacttcctctattcagtcaacccaaattttctttttttccccttttctcacatttctttacctatttctagagctttctgatcaatgttgattgaccagtctccaacatttcctatgaaatggaagaagaaagtcaatagcctcttgtttcaagtctacactcctttgcccagttctcttcttctttttcttcttcttcttcttctttttttttttttttttttttt

SEQ ID NO: 13879 - DNA, 747 bp, Homo sapiens
ttgtcgctgtctttgctgagcgcagcatgctccagtgaagtcagccttggctggaacctgagcgtggggccgcagctgaggcacttcagcatttgttgaggaatggacaagacagacctgccgttgatggtctgttgaaccgctccccgtctcactattccatgagtccttccaggatcactcagatggatggagggttgtgtctaaaaatgataatggctgcttaaactatggcaataacttgtatgtacatatattttcttccaagaagtaaaatctgctttatagatggtatttcaataatcttcctcctttttctttggaattttaaatgatgtggcctataaaactggaaaggcagcaaaacaataatttgytttgataaaaatttcaatattattgtttcccttttcttgaggaattcttttttttttttgataaattgcagtttctttgggcaccaatagtgtaagactgtcatcatttctcttatgtgaaaataatagactttgtctatttttacttcctctattcagtcaacccaaattttctttttttccccttttctcacatttctttacctatttctagagctttctgatcaatgttgattgaccagtctccaacatttcctatgaaatggaagaagaaagtcaatagcctcttgtttcaagtctacactcctttgcccagttctcttcttctttttcttcttcttcttcttctttttttttttttttttttttt

SEQ ID NO: 13880 - DNA, 1880 bp, Homo sapiens
taattgctactcacaaagctatgtaatgccaattgtttgcatcacctagtttttcactgagagacaacattgtgtagtagaaaatataggagcttcgaagtcagagaaatgggttcaaatcctggctctcctgtgcaccagctctgttgttttggacaagccatttaacttcactgaacctcaaattccttatataaaaagctgttattaacaccaatttctggcttattggaaagattaaatgagggaatgtatataagacacctagtacagtgtctggtacctagcaggtgctaaataatagaaagctatcactattcctaggaaataacctcacttcttaaaaatatcctccaattcaaatattactgatgagcaagttccgctaaatacagaaatctgataagccagcaagtccactttcaggaatccagcctacagaaacattcacttctacagacaaagttataagtgtgtacaataatattaattacagaattgttcataatattggataacggaaaacaacttacatattcatcaaaagaagaatggctaaagaaattatgatttatccatatcagggcaaactttttctctaaagagccagagagtaaatattttaaggctttgtgggccatatggtctatgtcgtagctactcagctctgctgttgtagcactaaatcagccacatacaacatacaaaaaaatgcatatgactgcatctcaaaaaaatttttttttttttacagaaacagatggaggaccagatctgacctcagggtttcacatatatggctgaatacgatgcaaccatttttttaaaaatcaagtacacctatagtatctagacagaaagatatccacaagcacttctacaaatcataagaaaaagacaaacaatgtggtaaaaattggggaaggaatatgaacaagccactcataaaagaggaaattcacataagcagtttgaaaagttgctcatctgtctaattgataaactttccaaaagcaaactaaaacaaaaagatcctattttcattcatcatatctgcaaaaaccaaaacactgacagaatcaagtgttgaggatactgtagaggaaaaaatacacttatacactgttggaagaaatataaatgaagacaatcacttcagaaggttctttggcagaatctattaaacctgcaaatgtgcttatcctgtgacccagcatttcctagtctagatccgtacccagggaaccactttcacatgcatccaagaagactggataagaaagctatctgaagcattcaaatagcaagaaattgaaaatgacctaaaggracatcaataatggaatggaaaaatataatgtggcagaatgcaattcagtgactaagaggactaaaccaaatctctgttcataagtgtagttagatctcagaaatacaatgccaagttttagaacaattcttatagtatgatacaatgtatgtaagaacatagacataaaaaataaacaatgctatccatttattatgggtgcatgtgtgcaaagtaaggtctggaaggatatgcgctatattcaaagagtagttatctcaaagcatagggaagaccaggattaaaggtggtggtcaaaggggactttagctttacctacaatattctaacttttaaaaaaaattcatctatataactaaagtaaatttaacaaaaaatgtgtttctgatatattatgtaagcttcaaaatgacataattatatttattttatttttaaaattattatatgttttttacacacacatgtatgtgtgagcacatgcacatgtatacttgtgtctggaagggtaaataccaaatagttaataggattgcttggtcatggattg

SEQ ID NO: 13881 - DNA, 1880 bp, Homo sapiens
taattgctactcacaaagctatgtaatgccaattgtttgcatcacctagtttttcactgagagacaacattgtgtagtagaaaatataggagcttcgaagtcagagaaatgggttcaaatcctggctctcctgtgcaccagctctgttgttttggacaagccatttaacttcactgaacctcaaattccttatataaaaagctgttattaacaccaatttctggcttattggaaagattaaatgagggaatgtatataagacacctagtacagtgtctggtacctagcaggtgctaaataatagaaagctatcactattcctaggaaataacctcacttcttaaaaatatcctccaattcaaatattactgatgagcaagttccgctaaatacagaaatctgataagccagcaagtccactttcaggaatccagcctacagaaacattcacttctacagacaaagttataagtgtgtacaataatattaattacagaattgttcataatattggataacggaaaacaacttacatattcatcaaaagaagaatggctaaagaaattatgatttatccatatcagggcaaactttttctctaaagagccagagagtaaatattttaaggctttgtgggccatatggtctatgtcgtagctactcagctctgctgttgtagcactaaatcagccacatacaacatacaaaaaaatgcatatgactgcatctcaaaaaaatttttttttttttacagaaacagatggaggaccagatctgacctcagggtttcacatatatggctgaatacgatgcaaccatttttttaaaaatcaagtacacctatagtatctagacagaaagatatccacaagcacttctacaaatcataagaaaaagacaaacaatgtggtaaaaattggggaaggaatatgaacaagccactcataaaagaggaaattcacataagcagtttgaaaagttgctcatctgtctaattgataaactttccaaaagcaaactaaaacaaaaagatcctattttcattcatcatatctgcaaaaaccaaaacactgacagaatcaagtgttgaggatactgtagaggaaaaaatacacttatacactgttggaagaaatataaatgaagacaatcacttcagaaggttctttggcagaatctattaaacctgcaaatgtgcttatcctgtgacccagcatttcctagtctagatccgtacccagggaaccactttcacatgcatccaagaagactggataagaaagctatctgaagcattcaaatagcaagaaattgaaaatgacctaaagggacatcaataatggaatggaaaaatataatgtggcagaatgcaattcagtgactaagaggactaaaccaaatctctgttcataagtgtagttagatctcagaaatacaatgcyaagttttagaacaattcttatagtatgatacaatgtatgtaagaacatagacataaaaaataaacaatgctatccatttattatgggtgcatgtgtgcaaagtaaggtctggaaggatatgcgctatattcaaagagtagttatctcaaagcatagggaagaccaggattaaaggtggtggtcaaaggggactttagctttacctacaatattctaacttttaaaaaaaattcatctatataactaaagtaaatttaacaaaaaatgtgtttctgatatattatgtaagcttcaaaatgacataattatatttattttatttttaaaattattatatgttttttacacacacatgtatgtgtgagcacatgcacatgtatacttgtgtctggaagggtaaataccaaatagttaataggattgcttggtcatggattg

SEQ ID NO: 13882 - DNA, 568 bp, Homo sapiens
acattatcatctaactttcacaagcattccaatatggattatgtaaaattaactactcaatatatttraagtacttttataatctctgaaagatgaagtaatgtatgtagagcaagttaatttataaaaagacagagaaactgaatattggattgttcttgttgaagaagacaaaaaaagcaatgtaatggtgttaagagaagctttgttagtaatttgcttaagtccaaatttttgccaatgaatttaaatttgggggttccttacaacatttgaagtaacctctgatgagccagaattaagaggatagactcctcacgtcaaaagaattagctgatatagctcccatttgtttattccctaccagtgtgaaaattatgtaaattgatattttgctcttgtacttgttaatagaatagaacatccaattcctgaaattttctctgatacccagagttaacaacatgccatttctgcggggagtttcaagaataaaacaacatcaagctatgtaatcactgtataaaaaagccaaaagatacaattaagaacagaatctcacacataa

SEQ ID NO: 13883 - DNA, 568 bp, Homo sapiens
acattatcatctaactttcacaagcattccaatatggattatgtaaaattaactactcaatatatttaaagtacttttataatctctgaaagatgaagtaatgtatgtagagcaagttaatttataaaaagacagagaaactgaatattggattgttcttgttgaagaagacaaaaaaagcratgtaatggtgttaagagaagctttgttagtaatttgcttaagtccaaatttttgccaatgaatttaaatttgggggttccttacaacatttgaagtaacctctgatgagccagaattaagaggatagactcctcacgtcaaaagaattagctgatatagctcccatttgtttattccctaccagtgtgaaaattatgtaaattgatattttgctcttgtacttgttaatagaatagaacatccaattcctgaaattttctctgatacccagagttaacaacatgccatttctgcggggagtttcaagaataaaacaacatcaagctatgtaatcactgtataaaaaagccaaaagatacaattaagaacagaatctcacacataa

SEQ ID NO: 13884 - DNA, 568 bp, Homo sapiens
acattatcatctaactttcacaagcattccaatatggattatgtaaaattaactactcaatatatttaaagtacttttataatctctgaaagatgaagtaatgtatgtagagcaagttaatttataaaaagacagagaaactgaatattggattgttcttgttgaagaagacaaaaaaagcaatgtaatggtgttaagagaagctttgttagtaatttgcttaagtccaaatttttgccaatgaatttaaatttgggggttccttacaacatttgaagtaacctctgatgagccagaattaagaggatagactcctcacgtcaaaagaattagctgatatasctcccatttgtttattccctaccagtgtgaaaattatgtaaattgatattttgctcttgtacttgttaatagaatagaacatccaattcctgaaattttctctgatacccagagttaacaacatgccatttctgcggggagtttcaagaataaaacaacatcaagctatgtaatcactgtataaaaaagccaaaagatacaattaagaacagaatctcacacataa

SEQ ID NO: 13885 - DNA, 523 bp, Homo sapiens
agtattataagtgtcatgttcagaacactccacgattgcagtatttatgaagccaagttttgcaagacacacgggctcaggaaatccattgttgaacctcagtgatctgcagtaacttctactctattctcaagatttgagctacgtgactccagacagagagctgttcactatatgagatgattrtcattagaggtacattccaataattaaaggacattctgaatttttcccccagaagtatattcctgaaccacaaaaatgtattcatcatccatacacacatcaatacctaaaacccatactcatgattgatggagttttacatgtggtgttgtccaaagatgtcaaatatgtatacgtaagatatacatcttataaataatgtgtatgaggtatagccatgtatctagcattattccccatagcttaaatttagacattacatatatactcaagtacatatataagcctatatatgcatcaacaattctggaaagatatacaagaaataattatatag
